United States Patent Application Publication US 2014/0057251 A1 - sequence listing, part 61

SEQ ID NO: 89017 - DNA, 1048 bp, Cannabis sativa
tcttgtattttagtgtcaatttattggattaatttttgtggacaaaaatcttttataaatatagattcttcgaacatcacataatcttgcggtgcttaatgaaaagtataactatttcctacataaaaaatggtatatttggatattagaggtctttctgtacaaaaataaattgtatttttatgaaattggaccttcctaggcccaatgcaaaatatagtttttgtttcatgaaaaattataggaataactacataaaacataaatttttgtaaaaatcttacatttttacgttcaattatttttattcttacggtattctataaaaaaaataagattacaaaaagaaaaccgcataaaaataaataagaaaataacatcaaaataatataaaaaatatacaaataataaaaaatcaataactacagcataaaaatacaccaaaagaccgtaccgtatgatatgtaaataaaatcttaaaaatcataaaaatgttaaacttcacacatagcgtatttttataattttttttattatttttgtgtttttattaattatcccaaaaattatatgcaaaatggtacttttcaaaattggttttctttgtgtacaaaaagatagtattggcccggtctctaaatttttagggcttaatgcaaaatataacttctctttttaataaaaagttatataaaaaatggtatctttcaatattaggggtctttttgtacaaaaataaattgtattttaacgcaattggatcgtgctgggacaatgcaatatattgtatttttatgaaaaaaatatataaaatggtaattttcaaaattagatccttttttgtgtacaaaaataaataggagctctaggcacaaaaaccttcatgtcctatgtcaggactgctattgatgtacacatttgggctcgtttggaacgtcgtatttagtctattatattgtattgtattatattgaattagattatatatcatatttttatgtttaactatgttaaattttaatttatactaaaatattatatatttagg

SEQ ID NO: 89018 - DNA, 507 bp, Cannabis sativa
attcctaattctaagcatgaagcaccctattcttcaggaaacacatagcaacgttcaaagactagttccactatctcatttattaaataaaagacaactgaaaaaatgcataaactaatatagctgttattcctaatacaaatactttggattctgtttaggcacacgtgtagacctcctagatggtctatcattatcgatttccacttcgaaattgggtgcgcttttaagcactttgtagcattagtttgatgctgttgaagtgcatctcctttctctattgtatgtgagaacatttgctgagatccttttgaaccctggtttaagagcttgacgaagtaccatgagcataatacttaatttgagttcactcttaagcactatatagttttgtaacatatgtatggccattaatacttctgctcacttgtttctagatggtataccagcggttaagttgtacacattttttttttttgaaaaaagagaaggaggccatatggctgg

SEQ ID NO: 89019 - DNA, 543 bp, Cannabis sativa
ttcctctggccaatttcccttggcttcttcgaaataaatgagcagtgtcattagttgcttatggttaagcaactcctctgactttcttgaaggcttcttcgagcttgatgaaactgacagctctgtctagaaactcttgaacggtgtatactgatttgagcttcaagtctttccataatggactcattactgttagtccaactgccaatgcaatgaccttggcatcttcactgagtatctttgtctgcgtggttacctctaagaatcgttgtaagtaatcctttacaagttcttctttttattgcttgatgcagaccaaattattgggctcgattggtctgttctttgatggagatcgaattggtcatagaatgatttcttgagtgtctcccaagaattgatagatctcagagagagcttgagataccactactgtacagattttgatagtgtagctagaaagacttgacaatgagaatcgtctctaatgccttgcaggtcagtttgtacttcaaagttgtggatgtgagagagagggtcttc

SEQ ID NO: 89020 - DNA, 1353 bp, Cannabis sativa
tatgtgaaacgacaaggcaatggaaaaaaccagtcgaatccgcccaataacctcggcaaccaaagattacaacctcttcctgttgaaggagaagacattttggttatctcgagagggccacatcttgctggagaaagtaacaatgcccaaaaaagatatgttaacgaagttaagaacgagcaataaccttcgctccagaatcatctaagagagccaaggctgaggaacctccaattgtgttttcaggggaagacacaaagcacgtgaggtaccctcatgtcgactcgctcgtgattacaatcgagctttccaacaaaaagataaaaagagtgttgatggataatggaagttcagtgaatatcctttataaggatacattgaagaaaatgggactggaaaatgcaaagttaaaaccttgcatggtaaatatatgtggatttacaggtgatagtgtcgccagtcaaggaataattgaactcccattaactgtgggcaagacgcctttatttactaccataatgcaagattttctagttgtcgacttgccatcggcctacaacatactaatgggttaaccagtgctaattggactaggggaagttagttcgattaaacacctatctctgaagtttcagacatcgacgggtgtaggagtagtgcgaggtgaccaacttctggctcgtgaatgctaccgcatagagctacagaatagaaaagacgatcatcaactaatggcagtcacaactgaggaaggcaagaagtaggtcgaagatctggatcctcgagttcaagatgaacaaaaactatggaaaccgattgaggaattggaagacgttattttagatctggagaatcccacaaagtgtgtattcattggaaaaaacctggatgaaaaactaaaatagcaactaataagttttttgagggaaaacaaagatcagttcacctggagccatttagatatgatagggattgaccatgaaattatttgtcaccacttgaatatcgacccaaattacccagccaagagacaaaagagacaacccttggattttgaaagagaaggggaactcaagcaggaagtggataagctattgattaatgactttatacgcgaggcattttatcactcatagatatccaaccctgtccttgtcccaaaacaaaacaaaacttggagaacttgtatcgacttttcagatttaaacaaggcgtgttgaaaggattactttccactatcaaggatcggccagttagtggatgctactgctagacacaagcttatgacgttcatggacgcatattctggatataaccagattaaaatgaatgtccctgatcaagagcatacaa

SEQ ID NO: 89021 - DNA, 522 bp, Cannabis sativa
tgtgcgattgaagtgatgcgattgaacagccgcatatgtatatttatatatatgaagtcatcttttgttaatgaatgaatatatatacgggttgtttgttgtatcttcagttttgaattcatattcaaataattaaatgctttatacacttacttttgcctggcatttatacgagcacttgtctctgccggattgatgaggaatatcattataggattcactacagtataaaatataattgtattttacaaatttacaataaatataacagtgagtgtatataattaatctacactatataatgcactatatgcattattcctttagcaatattgcattgtgtatcgtatactgtgtattatacatattcgttttaaattattattgttattattttaataataataatgataataattattcagtagcaattaaatttaaattttggtttaaagtttattaaggaaatctaatatttaattaaattaattgaaacaaaatatcaccaaagtgatctctttt

SEQ ID NO: 89022 - DNA, 1381 bp, Cannabis sativa
tgtgctacatgtgatcgatattctggcaattattctatgcagaagtgaacagtcagctttcagtctcttcgattgcattaggtgtcagctgtcataatggcagttttaaataacgctttatgtgggatagtgatgacaactgcactcccatataaatgtattttttgctcctcccactttcccatagcgactttatagggaatgaattttccatttaattttttgggaaaaattaaacatgagagccctatataaagtcctctcttcctctctattctctttactttcatttttttactcagaaaaaagttttagagagaaaaaactcaagaaaattcaaggtttttagccaagctcttcaaacaacccggcctccttcgtgcagcaagaaaccagtagccttccttcaatcgtccaggccttggctactaggctccgtccagtgagtaagctttttaaaactattctttttctttaaaagattctttatttttgtttctacaccattgttagaggtaaaaacctccatgccaagaacttaggaatacctatccctcataggttgtacgggcatgttagggtagattaatgtaaggattctgccttaaaaaaagttgagttttcctctatttttcatatcttgaatcatgggttttgaagaacacaaagaacttggttttcatggttttgtagaatatgctatttagatctattaataatcctagtcgacctatgcgagatgtttttactctggtcggctaattagatattgtccatgtggtttttattttgtctagatgttcaccacccttttcccttttacaaagatgaacccacgcgactactaggaggtgaacactggatggacacaaatttcctcagccttctctgcaaggatcagcccatactccgggcaagtagttcatcatctagtgattctccggccatatcatcaggtagttattctgacttggaagtcagtagtggttttcttgaaccataaatacaacaccaccacaattctaaactaatcaaaggagagatctatggtcggttcatttggaaactaaatcgaggctggaggaaacttcttccaacttcttggacatatattgtctggaaaggtgtcttggacaacctacgagagggacgtagaccgcccttagtgaaaaaaccatctcaagctgaggttgttgtcattgttgtacggtatactgaccaggatccaaacttggccaggacaaaataaacttactgtgcattgccttcgatcaatccccatattaacattgttgaactcaactatttgctgctgttgaaaatttgaacccacctactccttttgacattccagagctttgaagctcttcttttattttct

SEQ ID NO: 89023 - DNA, 1095 bp, Cannabis sativa
tataataaatatatcacaagattattttagcaataaatgaacaacagattgcaaagaatgaaaaagttgttattttttctaagggctcaaaattgcggatccccggtcatggatgaccccttatatagaggaaaggattggtgcttctctcttcaggaaacgcgaccaacgcgaagctacctcaaccgtctccttgatttttggaggcagttgaagtctaatttttatgatgatatcctgctattttcgtgagtttataattgtcttcgagcatttcatgggatttgaacatttgaaatagtcactgatgacgagggtctcttaagggtgtgacccggttgttgaccaccttcggggattaagcccataccttggggtgacactctcgagaccaaacttgaggagggtgacaatcgtcatcgcgaggtgacttttgagacccaacttgaggagggtgacaatcgtcatctcggggtgacccctcgggtccccttgtccattgtcaatatagtgtaatatagatatccccatatacctttgagaatgtcattatgtgtatggtaaaatcaatgacttgtaccatgagggtgtaagaggtaggggtataccccttgactaacccattcgggggtaaggggtgtacccctagactaaccctttagggggtatgtggtgtacccctagactaaccatttgggggttaaggggtgtacccttagcctaaatcccatgtagatcatggcagttgaggtagggttagtagtatatacccttagacttgtttgactctcgtaggtgtgtggtgatcgttcattatgcttacgaaggtattagtccatcatttttccttcttcgagacgcctaccttactcatgctaggggtaagggtgaccgtctgacttccattctaacgttcatgactacccttcttgattaacggtcatgaccacccttcatgattaatggtcttgaccacccttcatgattaacggtcatcccaacggtcatgactttatgtatttttcattaatttagtctcgatatttttcgtaccacgtgttgctactcttgacatgtcatcatcgttaaaatttg

SEQ ID NO: 89024 - DNA, 1112 bp, Cannabis sativa
tggagctctcaaccctgcctttcatcactggaagaaacgcgatcaactccttctgtcatggattcgttcatccatgactgagggtgttctcgcatctgtagctaatcatcatacctcatctgcagtgtggcgagcccttgaacagaggtttgctagtcaatcccgtgccagattgcttcaattaaaaggtcagttttccaatgtgcacaaaggaaatctgtccatctctgactatgttgataaagtccaatctcttgctgattctttaataattgctggttctaacataagtgaacaagatattgtgcttcagatcttgaatgaattaggtgctgaatttgatcctgttgtttctggaatcacttcacgaagtgattttttgactcttgatgaggttcaagccttactaatgtcgcatgagagccggttagagcatcacagctctatgacagacctttctatgaaacttcaggccaatctcactgttggaaataacaaatcaaactcaggaaagtatatcccaccacctgctcgtggaaattaccctgagaacttttccagaaatgttggccgaggtaccactcgtggttcttttgtctatcataccagacttatttgtcaattgtgcctgaagagtggacacacggctgttgtgtgccactaccgttttgacaagaactatgctccacccaaatctgctcctcctcgtgcctacctcattgagcttgaagctgaaaatgagcatcaggtacctcacactaccattttacctgattttggagatgacaatctatggtttgttgatacaggggcaaatgttcatgtcacaaatggttctgaatcccttgattcccctaccccttatgttagaactgagtcacttgctgtaggtgatggtaagagtcttctcatcactcatataggctctacttctttgtccttccccagttctcatgctttaaaattaaattatgtcttaaatgttcctgccatgaaaaagaatttaattagtgtgtctaagctagctcatgacaatcatgtgtatgtcgaatttcacaaaaattgttgatttgtcaaggacaaactcgcgggagctgttcttctcaaaggac

SEQ ID NO: 89025 - DNA, 507 bp, Cannabis sativa
gttaaaaagtaaaaacgtaccctgacactcatttaatgtaccgtgaaacccatctaatgtactacggaatacattccgtgaaagtacacgggacaaaatcatatcccaataaaattatttaagagagaattactacagaataatgacgtacgaggcttctacatcattatcaccaaatttaatggatatttagtaatttatgacttcattcatgcatgtacatactaaaatcaattctcctacgcaccaagtcattttgcaaataaataagccaacctctcttggtggttgagacctgaagcattggtaattcaataattagggttcaaaattcttcacaccctccattaattcttcattgtaaatatatttgtacgtaatattaatgtatgttgtgtccgagtggaaatatgttcactacaagaaatatcacttttaccagcacagttcgctactgtactggtaaaagttatttttaccagtgcatttcgcaaactgcgctggcaa

SEQ ID NO: 89026 - DNA, 624 bp, Cannabis sativa
taaacttattatattttttataaacatattattgattagtttattgaaacttatcaacggtatgagtaacaaacaatgtcatcaaattaagggaggataagatgaggtatacgctctaataattggcaagtggtctctaaaattgtctaagctatcgaaagtatgggaaatgaattgcaccatgtaatcacttattttttattagaaaaaaacaaaaaatgttatggaggtgatccattaataactcaaaattgtgatatacatatttgtatatatatatttatttatatatattttttattttgttctataaaacattaaaacttgaagaacttaattattatagtttgtctaaaataatactaataataaaaataatatcatattagaacatttttgtaaattgttgtcactaccacgagtgtgtggtgtagttggttaggatattttgcaaagtctctcatttggttgtacttcggagtttgagtttccatggtagcatttatcttgagtgataaaagtggcactcttttgagagtaactagtatttgtgcgccctattgagaattgatccctggacttcctattttaaaatgacattctctaatctctatcacttagtta

SEQ ID NO: 89027 - DNA, 1724 bp, Cannabis sativa
ctaaaaacaattttttaaaacaaaaaacagaaaacaataccaaacatgctcttactctcttatttatttttgttttttgggagaggggacaagatcataattgattataacaagccttagctataacaatgtaacaatgaatagtaccgtcaggagactcgggccaacaaactttgcaagaagcaacagtcaaagcaaatttagtaagagcgtattgcaacattattaaacttagtcgccacattaagacactcagactcaaactgaaccttctcggagttgagaagacgacattgaactctagcattacacaatacaagtacttcagcaactttagtaagaaagtgaccaactgaaggccaaattgcatgagcaattaccgaaccattgaaatcttggatcatcatacccataccacagaaaccactgttgttatctaaggccgcatcaatattaaccttaataaaatcctctaaatgtagtgcccaacaacgacgagagatcgatgaagagccaacatctaactatcttgtcgtccttttacaagaaacctccgctgaccgaacaaatggtctttgataatcacccaaaaaagttacgggcctaatattaggctatttttagccaaatattcagagtatttttagtatctattttcttcttaataattctagtttttagaatataactacgcttatttttttggtttcagtttttgatacttagaatgcataaattgatcaaatattggaaatacattgatttataacatagataacttttttaaaaaaataaagctgaaacttcaagtaaaaattcaatcacgttttgtttagattttggaaaatatcgaaacatgaaagtattagagatctttctcagcttttgaatgcatcttgaatcagctcatttggagtttgtattcaaaagttaagtgtgttttactgagagcagttgaagtagaaaagtgtaaggcaccgtggcactaattgcgcctccaaggtgctattgtcgaaggaagttgggagttttttgtcttttcgcgtgtttcggctgaagattctattttaaaagtaaaagaaggctttgaaataaagggggagccaaaggaggcagaaataaaaccttagaagaagaagaagaagattggagcgagaagttggtgatctgtgacaatcccaaacttttttctttatcattctcttttattttctatgtttatgtttatgtttaatttgattatgtgctaaacttctactttaaagatttgatggatattgtttgacattatttcatgagttaatattagttaagttttctttcttccttcattatgtaatttattcatatttatacttattacatgtatttgattggccaccttatgcatgatctaaaatcctaatgtaaaatttaaaaagtgaatgttatgaatactctaaatgaataaacataggttttaatgtgaaatgaaagttttcacatagcttatgtggcttttagattattgcttaattcaaattatttgttgtacaatctcagagatgtgtagtagttgacatgctgtaatgaccgcttaagtaatttagattagtaaaggcaattagcactaatttctgatatttttataattatttgtaggtcccattgttaaaaatgggcattagagttataatttctcaattccagagattttattaaactctaggggtattttatgaatt

SEQ ID NO: 89028 - DNA, 603 bp, Cannabis sativa
atgaagaaattactccgggttgtcaagttccaatgcaaaattatggtgatcttatttcaatatgaggaggatattgaggtctattcttagttgcattgtactgtttaagaattggtttttttgtatgacaagtaaaattttagttttatttcgtagagatttcttttcattacctaactaagtcaaattgtttttttatcctataatttgagatttttttggagagatatggtggagataacagtgtgttctgttgcagacagagtgttgttatttatgccgaaacaatgttaaaactgaaaaagttgtgatttgggtgagcttgttagaaatacaatgctaagattctttttcccaatattctctcttgttgagcttgttaaggtcaaccatattttatatcctatatagtagtgaccattttacaggtggaaaaaagggtgagatgacagcttgcatgatgaatgaatccactaagagaatttttagtattaattatcaactagtgaaggatttagaattggtattctcagtaggtttaaaaatatgagaattttgagtattcccatttaaaggatgagttcactaacatctcttgaagtg

SEQ ID NO: 89029 - DNA, 2158 bp, Cannabis sativa
ctgtaattttcttactctaattttctccttcgatcatttacctctcggcaagtcgacctctctctattttctgttgatttatttatttttattcttatttcaaattggggagatgatatcaacaaaaattaactaaaaactggttctaaaattctctagagacgtcaaatattttgtgatatttgctatcatcaaccatttgcctctataacgttggattgaatttatgcaatttcaatattttttgaagccttgcaaacaacacttgaatctgtcatttcgaacaaagaattattttgggtttattatcaacgtagggttcttgtatcaaacttcagatgcaaagtttataggtgtgaattgtggtttaagagttatgggaagtgaagaagcaagagacccttttagaggggtggattggaaagctgtcggtactgatatacagaaggacccaggtagtaaaccagttataaagaagcggctcccaaaaaagatgaggcaaattccagaatgttacttccttcctcggagatcattaccttcagccattggcttttatggagcttgtattgctggaggaattggtgcggggatgctacttgagatttggatcaataaaaaaattgcaggtttgacctttcttcttttccatcttttctttttcagttctttagagtagaaactgaacgtatgtataccatatatttgtagaaaagtgaatttgttttacttgttcaaatgtttattcgtttgttagcttaggctatgttcaaaaaggagagatgaatatgagaaatgagaggcagattgattagggaaggggactgaaaagagtcaatagttcttttagtgtgtgttaactatgacatgaagagaaaatcaaaatcctctccaagtgaattaaaagtggctacctgtgaactctcttctaaattgtctctaatttttaagttgaaaattgattaaaatgaaggattacaattggttgcttagtttcttttaaaatgcttcctaccaaataaacctgtcctgccctaacctacgattctcaaactttctcgtttatttgacatttccctcctatcctactaaacacacttaacctttatacccaccttatggtaagctgaagttctgacttttttataggggagattgtggccaagtaaagtaaaaggacaatggtctgaaaaatattcacggtcattgttggtagatatccagatttgattcccagcgattggttaaatggaagatgagtttccttatgataattcttgatggaagtgtattactatgagatcatcctttctactaaagttttgtccatttggctgaaatataagaaatagtatgttcttttaagcgtttctcgtctatgagaacttatgcatgatatctcttgattgctttctctgttgattgaccattttggtttgaaactgaagcttataacattctttcctactttatgttgtatttggttttgcagaggatggaggtgttatatgggagtttgataaatagatcttaagaggaaaatgcatttacaatggtgtttaaccctcataggatcccctctccaagctagatagaagggtttctcgcattcctttaagatgtttattcaagaggcgtccgctataaacataaatgggactgttttctaatcgagagcaagagtttacaatcatcttgtctctttttgttttggtgctattcttctacactttgaaaagcttaaccaagattttcttttgttgttagaataaaaagcttaaccaagattagtatttatcttgaaactgatacaaagaaaaggttcgcatttgagtaagaacgttgtaactaatatattcgtgttccaagaagcttacaagaaaattgcagctgtgaccatgttatgaggaaatctgatgaacaatgctacaaattttgctataatatcaatgttacttttgtagaactgtataaaaatacccctagttgttgcatatatattgcctcattgtgtcaaaatgtatgtgtacatcgctagactaataactaaattttttggttcaattcctctactgaatttttgagggtaaaatttttcaaatttcaattccgttttggtctccacttttctgttcactttggtatgttaagtgttacg

SEQ ID NO: 89030 - DNA, 519 bp, Cannabis sativa
agacaaggtttgagtgagagggtcatggatttgaggttttgagcaagagggtcgtgggtttgagggtttgagcgagctcgaggtcgtgtgtttgagagggtttctacaaagggtaaatgaagggtttgctgggctttattttttttattttttttgaacaactgctgggctttattatgtgccaattaatattcacataatttgtcttcggtagttccctaaaatctgaaaacaaaggtttattaattattaaaaagtcttcttacaaaatcgctcccacattaaaaaaaaattaaacacttttaatttcgcttattaataaaaaatctaaaatataactaaaatttcatgaaaaaagcaatgatacctgtattaaaatagttttatcttcgatttttaatttattaaaaaaaactaaaaatcaaagatatatttatagtagtaatagtaatttgattttatattttatcgtgattaaataattagttggtatatataaaccattaataataaatgtaa

SEQ ID NO: 89031 - DNA, 598 bp, Cannabis sativa
  modified_base (560)..(573): a, c, t, g, unknown or other
tatgctttggcaggctttaaactcccacgacaaaagacttattgtcaagattttatattcttataaactctcttgattgtccagttggtggcctggataaggagagttattgccatctattctttgactattctttctcaaataaagtggtgagttttatatttcattggttgggttttcaagcttggcctttaaatttcgatagttggaagatttggattaatactataagatcaagtcgtttggcttccgtagtgaatgcaatcgttgtagctacagtacatggtggtggcgacaacgtgatcacgaaagggctagagaaaaggagagcaagtgaggctgggcttaggggttgaggattttcgataaataggacctgaggtccttttgaggtgagaggggggctggagattgtggctccagtctggttctagtgatgcatgagggaaaccaaaaagagagaggtatcgggagaggaagagagagagagattaggattttttgaattataaatatttgtttttttgtaactttattatttttaagggtaaataccattnnnnnnnnnnnnnnttgcaaaagttacagattggaccct

SEQ ID NO: 89032 - DNA, 639 bp, Cannabis sativa
cttaagaatgatgttttgaaaaacagtgagaagaagaaagagattgagaagttattgagtcctattcataatcaggtgtttgatcagttggtttctattgggaggattattactgattttcaagatgggagtgatggtgttaatgatgatcttgatgatgatatgggtgttgctgttgagtgtgagaagaatgaggatgatgatgaagagagtgatcttgatatggtccaagaaggggaagatgatgaatcagggccagggggtatgcaaatgggggctggggttgatgaggatgatatgcgggaaacaaatgagggtatgactcttaatgtccaggatattgatgcttattggctgcagaggaaaatttctcaagcttttaagcagaagattgatccacaacagtgccagaaggctgctgaagaggtgcttgagattctggctgagggtgatggtagggaggttgaaaacaaactggtcttgaaacttgaggatgtgaagtttgatctcattaaatttctgcggcgaaattggctaaagattgtgtggtgtacccgtttggctagggctgaggaccaagtggagaggaagaagattgaggaggagatggttcagtcgggtcctaatttggctgcaatt

SEQ ID NO: 89033 - DNA, 888 bp, Cannabis sativa
atcaatattttagactccgactccaacttaaaccttagaaacccaacccagacccgaccccagacttggactcgcccccaatcatgacctccctggacccgacttaaataaatcactaaatgaaaataaaaataatatttatagaacaaacttttgtttttatatttaaaattgaaaaataaaaatggttatataacacatttttgttttccaaaaataaaatttaaaaacaaaattttaattttatttttgtgattaaaaaattaaaaaaaataaaagtatgaccaaatgccaccttaacttttttctcatttgtttaattttttttaattttattatttaaataaaaaaactaaattacttttcagcctattttttaataattattattcaaattttacttaaaaaagatgtttattctatctttctaatgatttttaattgaaaactaaaagaaagaaaaaaaaaatctaaaataccttgcactatcctaaaaatatatattttttaatttataataaataaaattaattctatatttttaataattgttaattagacttttaatataaatatatatttatatattttgactactctaatcacattattttttgttaaagttatagtgagtattaatcattttaatattattaatttattactttggtagaactttttattacacttttttaattattattaaggaatatttatgtttataggtgatgtaacctttttattttttttccacttacttaataatttattgatttcttctatcattattattttattttaataaataatatttacatgtgtaaatatattggcgggtcccttcaactaaatttaaacataaaccaatctaatatgtatataagcgat

SEQ ID NO: 89034 - DNA, 835 bp, Cannabis sativa
aaatggagaggaactcagtcatatgctttgcttgaaatgaagagaacagttaaggtaagcaaatggttctttgggatataataattcccttttttatgatattgctttatgaatttacttaatcttattttgtttagcactaatgcttaacaagtgaatgacattctccaaaggtgaactgttatttggtgttctttaagtataatttcttatctgtgacatgggtcatcaaaattctcgattcaattttattttatgtttatttataagagaaattatgtaatttaaagatagatgcatagacaacagcttgagcaatcatgtattatttggatgaaacttgtcttatctttgtctctcttcataggtctagatttttctcttcaaatttttgtgcaggacatgaagagcatacttactgctggaaagaaaaattggcacattttttctatctctgaatttgggatcttttatgattttattagagtgatggctaataattttcaatatgattaacagtacaaatcattggatctaaaagttataaattggcatatttttcattctcttctcagtctagatttatagtttttttctaatttcttgaagctcatgttaaaacagaacatagtgctttatagatattcttctgactattttttagaaaaccaaaatataggatggctttgttctgttttttgtgtcctctgtcaagtattgtccccaaaatgttttgacttttttattcaatcattttttgctttctttaatttggaaacaacctaagattgttgatgttgtttggacattatggacatgagtaatatgtgtatat

SEQ ID NO: 89035 - DNA, 715 bp, Cannabis sativa
ctttgcatatatccttcacttcttgtcatcctatctctaacgttttatgaagtattatttgaattagttactgaattcttaaataaaaactactcgaagttatataaaactaatatttacgtggctcgtcacgtaactcttatctagtatatatatatagtaacttaacaaatcttttaaccaattatatttatttataaagaaatgtcaaatcctatatatatatatatataagacaagattatggtaggacttaacaaaagttctctactggtagaaagcttttttttaccattgattttaaatcatgtgcttgtatacaattaaaattttgtacatattataataatatttaatgatatttatttttttatgaagtttatttgaattataagactattttactaagtatccttatttcaaaattgtagaaaaatgacccttagactatttattatttatattgtcttttactatataaaaaaaattaataattttttttttcatattttttttagaattagaagtaaattatctaaagattatggtatatctatattagttttattaaaatcttttttatttgaaagttatgtgtttttttaattttttatgagttgttgtgggttgttggtatatagattttgttgtaaagtatatttctattttattgtatggtatattattatcatttgataatatttattttttattt

SEQ ID NO: 89036 - DNA, 742 bp, Cannabis sativa
caagcacattgtcggtgataagccgtcccggaataaacacactttgaaactcagaaattaccttggacaataaacctttaagtctgttagccaacacttttgagatgaacttataaagcacattgcaaagagaaatgggcctcaaatttcctatgacagaaggagatttattcttcagaataagcacaagattagtagcattaagatatttaggcattaccttatcccaaaagaagtcttggacaagtctaaccacatcttgaccaacaatatgccaacacttatgatagaacgctggtgtcataccattagggcccagagacttatctaggtgcatctgaaatacaaccgaacgaacctcctcctctaaaatcggctgaagcagagcaacattatcctcatgacttatctagggctgaatcttatcaagaatatcatcaccatgagaccctaaggaatagaaaatatcagtaaaataattaaccattaactggggtaaaccagtttcccacttaacccaatcgcccatctcactcttcaattggtgaatacaattatttcttctgcgagagctggccgcagcatgaaaatatttagtgttttggtcaccctcctttagccaaaatttcttcgaccgttgtctccaaaaaatttatttttggtgataaatctcagcaagcaatctttttatcaatcagtacaacctttaagagcaccgaatcttcttttgcaactttgaatc

SEQ ID NO: 89037 - DNA, 508 bp, Cannabis sativa
atggtatttttgacatgtgttgcttaaactttgttgtatttgtgatagtttaattatttggtgatagtctaaactgcaaaaatcgcactgcaccgtactattttttgcgatgcgggtgcggttttagaaatcggaaaaactgcacgtgcgagttagtttgaaaaaatagccaaaaattacaccactcgcattgcgaagatcctagttaggagaatttatttaaatacggtaaactttaagaggtaagattaatgtcaaaagttgatagcacaaaaatgctaattatcgtaaatggtaattgtttttttttttttttttttttgaaacatgtaaatggtaattgagaagttattttttcaaccaattttcacaacaaatactactaaccattaatcatgacagtgctgggccatggagcggagataaaaaagacggctaatccgacggtcagatcttttgggcgcagtgatcaagcgttatagagtcgcgaagcactagatctccggga

SEQ ID NO: 89038 - DNA, 886 bp, Cannabis sativa
  modified_base (171)..(176): a, c, t, g, unknown or other
aaaactgcgttttccgtacctggtcgcgaccaccttaaaggctggtcgcgactacaggcaaacctcgaaaatcataggttctgccaaaactccaagtcgcgatcgtggtcgtgaccatagaaaagcgtcgcgactagcacgatccatggtcgcgactactgacacccgaannnnnnatttctccgatttttcactagttttgtcttttcatcaattgactgaatttgacttccgataccccgagaacctaaacaaggaaaatcaagtgtaaaaccgctccaaaagacaccaatagacgagaaaatgcttacttttcagacccgaaacataggctagatgtaacctaacaaaaggtcatgtatgatgattctgagactgtgtaggtatgggactacatagttaaagagggcttaagggattgattggtactacttatatcaacaagatgcatcttgtttttcggaagcccatcacgaaagaactccacggttaagcatccctgacggggtaatttcaggatggtgacctcttggaaagtttttccagaaagtgtgcgagtgaggacaaagcacgttgaaaatacgcgtgctggtttatagggtcagtcgtcattccattaagctgccaaagtgacgtactcgtgtataagagccatcattctgtaggtgtaagagcccaatggaaacttaaagcggggacgttacatatatataaatatgtatatatattcacaaaataagaataaataagagagagaaccagttggatctccattacacttaaaaaaaaacaagacaaataaaatctaagaaatatacttgaaaatggagctcattcctagtcacccatagccaagatctctagccctcgtcgaactcgaacaatt

SEQ ID NO: 89039 - DNA, 612 bp, Cannabis sativa
tatggcatatcaaataccatacaaaatcttaaatatgaaaaaataccatagaagagtggcaaacttataaatgtcatatttttgtaacttttctttataaaatctcatattcatgtaattttcacttaaaattgtttgggtaaagtttcatacatcacaaaggctatttgggtgagaattgcttagaggtttatctgggtgagtttggtttttttttttcttttttttttttgttgaaaatagctattaaatatatcaaaatagttgctttgttttaatgatgattttaaaagtctatattttctttaaaatttgtaatggtcatgtctataattttttaagtgttgtaagtatatattgtacttatcatgatagtttaaatagtaaatatgagtatatataaatttatagagttggtttatatgatggattattgatatctatgttgttgttgtgaataatttgttttgtgaaaagttttgtgtataaattggaaatggaaatagcatatgtgtttgttgccatttgatattagagtataggaatatgtattgggaaactactaggccctctgaaatttttttgaatgataacttttacaaaaatactgtc

SEQ ID NO: 89040 - DNA, 1060 bp, Cannabis sativa
  modified_base (47)..(56): a, c, t, g, unknown or other
ttagtatcgcggtgcgggtgcggtttggaaaattagaaaaaccgcannnnnnnnnnggtttgaaaaaatggttaaaaaccgcacaatccgcaccgcgaacacccctaagaactactataagaggaaccactaatgctagaggtgttagttttgtgccctgactaaaattctatttcaatgttatcttgaatttcatttatcaataaaggaacaaaattattttattacttgtttaatataatgtttggttcacatgtttgtttcatggttatttgtttgatatataaattattttaaatccttatcacattgttattcatgattcttgtgttgtctacacaatggaaagtaattaagattatgttattaaactattagtcccacaatttatcagtacacaaaatttatacagatatgataatcaacaatttaatttacttacacttagataatggtattccaacacattagtaaagtaagctattattggatgtattggtatatatcggactggaccgatattcacatagaaaagatatcataaatttactataatatcttttttaagtaaatatcacttaggtaatcatagatcaatgattttaatcctgagatagttaggttctggcttaaatgtattattcatgttctttgacttgttcgttaaagttgactaaatggatcttcttaatacttgcatcttctctcttgcgacttgtaaagattgctttttaacataagattggtctgaatgactaatgtgctcaatgactcgtcagggcctcgcatgttccacgttgtcaacgcatgggatgtctgtttatgcgatcaaaagtgaacgtagacatccaaacgataggccctaaggccatcctctgaatacaaacaccctagagcctgcgagcttgtgtgatgaaatatgaacagaaaacttgtagcttagcaagtcgcatacgttgctacacttattgtacaaacaaattaaaatcatcttttatttactctttcattgtttactttagttaatattgttatttaacgtaaaaaaaaaaaaaaaaaa

SEQ ID NO: 89041 - DNA, 668 bp, Cannabis sativa
ttttttttatttttaaaatttcgattctcaattaaaaaattgaaaagtgaaaacagttttatagaatatgtttttaaaaatatttctacttttcaaattttaaaaacagcaaataaattaaaaaagtgttaccaaacgccaactaattatttcattcatttgggaatgaagggaatacaaagaatgtggtttgaaaaataagatgactgtcatgtcatcaagtaataagttaaaataaaaaatattaattttaaaaaaataattaataacaataaatgtcatccaattgatcaaatccaatagtaaataattaaatacacatttatgggtaatattcattaaaaccacacatatatgctcttaatgtgtattacccatatatagatattttattattgaccattggatcaaatataatggttgatatttaaaatcattaattatatattaaaaaattaatatttcctattttctcacttctttctttgatttttttattctctatattcttaaaataaataaaactattaatagagaaaaaaaattatatatggaattgttattaaagaagtaaagtgtaaaacacgcgaaaaaaactaacaaactattttttttaataaaaatcattggaaaattctacaatgcacctcttaaaatagatatattga

SEQ ID NO: 89042 - DNA, 522 bp, Cannabis sativa
ttaaaaacccttgaaaaaaaaaaaaaaagttaagaaaatagtatacagggtaattcccctttaaattataatacttgaaaaaaagatcactttttgtaatagtcaaatttaatataattaggttaatattacgtgcaatatttagttcttaatttttattttcttatgtatatatttagcatgtataattaattttttttttttttgaaaatgttcaataaacaacatcttttttataaaaaaaatgtttaatataagtgttatttataaaaatttgttgttaattataattttagtttaatcatataatacttaaattttttatttttttgataaatatcatacactttttcaattttttttaaaaaatggtaaatgaaagattttgtttgataattgcaataagtaatgacatcacataatgttcttttaaaaacataaacactttttctattttatggtgtaaaaaaaaaaacaacaacagaaaggtattttttcagatatatgaattgggtaaaaaaa

SEQ ID NO: 89043 - DNA, 525 bp, Cannabis sativa
ttacagatctcaccttcactggatttctcagagagagggaaaaagagtgtagtagtagtatatatgtagtatgcatagtatatagtcacactgaaatgtcaatatatagtaaaatagctttattgtcatttatctagaaaatgcccattttaaaggaacatttacagatatacttttcatattccatagtacttgaatgttggccaaacactaacaactattttccacattgttacttttttatttagtttcaggtgtcagtctcttttggactacagctacttctgttaagcttattattcatttcacccatagacatttctactggtcattcagacctgtcctcttctacaaatcatatattatattaaaaccatataatctcctacaataatataaataatgataatacatatacaattatgtgtatacataccctagacacttcgatttctctctgtctatatatatatacatatatataataatgaaaatatggtagaaatcaatctcttcaatgtttcc

SEQ ID NO: 89044 - DNA, 1384 bp, Cannabis sativa
gactttgaatgggattcggcccacgaaaactgatgagcaaaatgaaagcctgctgctccctgttgtggaagatgaagttaggagagccctttttcaaatgcatccagacaaatctccgagacccgatggcatgaattcggcattctatcaaaaacactgggatattatgggaagtgatgtaattcgctttgttcaagatttctttgaatctggctagtttccgaattccatcaatgacactcatattgttttaatttcgaaaaagaagaatccttcccaaatgagtgatttgaggccgatctccttatgtaatgtcttatacaaaattgcttcgaaagtcctagctaatagaatgaagggtgttcttaatgaggttatctccgaaacacagagcgcgtttgtgtcaggtcgcttaatatctgataatgtaatggtggcttttgaagtgatgcactacttaaagaggaaaactacggggcgtaaggggtacatggcaataaagctcgacatgagcaaagcttacgaccgtgtggaatggggtttcttaggaactgttcttcgtgtgatgggattcagtgaacgatggatagctctaactatgagttgtgttaattcggttcgctatcatgttcttaatagtggtcaaaaagtggggccgataatcccttcaagagggattcaacaaggatgtccattgtctccctatctctttatagtatgtgtggaaggcctatcctctctcattcgtcaattcgaagttagcagacaaatcattggttgtaaagtagctcgatctgcgccaattatctcccacctactattcgcggatgacagctatgtgtactgccaagctaccgaagatgaagctgcccagttaatgattctgctgcagatttttgaaggagcttcaggccaaagagtcaatattcagaagtcttccgttttctttagttccaatacccgtgggaatacaagaaccggaatttgtgatttgatgaatatcaatgaggccggggctgatggtatgtatttgggactccctagcatcgttggtcgcaataaaaatgcagtgttaggattcctaaaggagagaattaaaaaaagaataaactcttgggaaggaaagtacctgtctcgggctgggaaggaagtactgttgaagactgttgtacaatcgcttccatcgtatgctatgaacgtcttcttattcccagtaggaacgtgcaaggaaattgagcgcttgatggccaatttttggtggaaaacctcttcttctaatggtgaagggagtggtattatatggatgagttgggatcgaatgactaagcataaacttgaaggtggaatggggtttcgaagtttaagagactttaatcttgctatg

SEQ ID NO: 89045 - DNA, 1582 bp, Cannabis sativa
tcgtatcaatattaatacaattaattatcatttttcgtgtaatttaatataataattttttaaaaatatcgctaatcaatttaagaatactcccaacagactctctactctatttttgaaatacatcactaaaattctattttttttttaattttagagcacatttttaccttacatcacacacttacttctttaaaatacatacatcactaaaactttaattttttaatatattttattcatttttattatatattcacatatccctatgcaaaacccattatttaagctcaaaacaattaataagatatgtttggaggaatgaatagtattttaaaaatataaagcatgaataataaattttaaagaaactttaaaatgaataaggagtttagaacatatattgtagcgcatttttattacaattcattatttttttaaaaaaaagcttctctattttaaagaaactactgtaagtgctctaaggacgtcacatttagatagtgctagatactataagtatctaataacaattcttgagcaaaaatttaagattaattatgattttaacctaatgaactttgacatggactaaattatcttccatgaattttctttccccgtttaaaatcctcttcaaattgagatggttagatttaaggacatttgtctaatttcattcaattttactaattatatgattttttaatgtactaaatcatgctccttaaactttaatatctacaaaatcatacctattaaattttgatatgtatcaaatcaagcctcctgaactttcattcttgttaaattttccttacttaaattaaaaaaaaaaaaaaatccttaaattcaaccatttcaaaatatttaacaatttaaaacatgatttattacatagacaaatatcttaaatagtgaaatcttaatatccaaatgaaataaataataataataaaaaaataaaataaccaaatgtccaaacacacccttaattaaataaaaaaaaaaaaaaactgaaaatccacacacaaaaagaaaaccaaactttctctctctttccttctccatagatccaccattgttgacctcactccaaaccttcaaaccctcacatggcgaaaccccaccctccacaccgcccaccttcccgttccggccgtacaaacctagcatcttgcattgtagccctaatcttcctaatcttcatcataatcatcgctctcatagtctacttcaccgtcttcaaacccaaagaccccaaaatctccgtcaacgcaattcaactcccacccttctccgtcactaacgccaccgttaacttcaccttcgctcaatacgtcgccgttcgaaaccctaacaaatcttccttcactcactacgacagctctctccagcttctctactcaggtaatcaagtagggtttatgttcatccccgccggaaagatcgacgctgatcagactcagttcatggccgccacgtttgccgttcaatcgttcccgatttcgccgcctcaacagtccggaatcggagctaatatgttgtcgggttcggattcggactctgtgcccggaatggg

SEQ ID NO: 89046 - DNA, 1380 bp, Cannabis sativa
tgtatttattatacattattatttttatagcacaactattattcaactaaaatgaaactgaaatgcaactaaatatcaaccagttgaataaaatcatataactaaccatgttgtagaagtttctttgaagtgatttctcttttgctctgtcaaatgaaataccaataaatttgataaacaccattatgaaatgataatgcaactataacacaacctaaaaaactagaagtacacttcgatgtacgtggctctagatgcattcgaattttcttttcttttcttttcttgattataaattaatatattcactattggaaatctgaaatcaacgtcaatgcaactggataaacattagatctattattgatgcatttttttttctttcatttggattatacttaatttggattgattgggagctccagatctgtttgttagagatctacattatatgaatctaaaatttgatattaaactgaaattcagtgttgaatttcagtttcaaaccaattttcatgctctttctttcatcaatacgaatcaaactttgtttcgatcgaaacttttgttggtgattgttctgtttcgtgcgggtgaagcttttgaagaggtggtatttttgtaattttttgtttgtgagctatataactgttgaaagggtcggcccactatattttaataatattcttattttttttttttttgtatattcttgttttttcactttcaatatatattaaaaaagaaaacaaagttaaatacgaatatacaatctttcaataagatgaacataggcacaaaactgttataaaacaatgtggagaaacaatttctcttagtatgacttacacagtctaaccatcaaaatagtataaacacatcttttcaaaagataaagagtaacaaaactctatgttgaacgataaaaagaaaaaaaaaaagaagaggaataaataaatttataattattttattattggttttaaaataataataataaaaaataaataaatatcagtcaaatagagagaaaataggatctcaactccccactcccctatttttactcatcctttacgttacaggataaaaaacaattaaaatttactcatcctttacgttacaggataaaaaaaaataataattttattggaaaaaatagggtctacaaatagtagaagttgagaacagaaaaaagtatcgacactttgaaaaaaaaagtctgagaaagagagaaaagaaacacagagaaaaaaatataaacgatacattttttttggaaacaatcaagaaagcttcaagggtaagtattcatggaatgaactcattcctatttctctttttcttttgatgtgtattttgctcctctctcattcttat

SEQ ID NO: 89047 - DNA, 1046 bp, Cannabis sativa
cctcttttactccaaagaacctgaaaacatagaaaacaagcgtaattccgtcccaacacagctaagaatgcacataaattggatccaaaacataggctaaaaatagcctaacagtcacaaaatgatgttgcttaataagcttattttaaatacaaatgaatgtgtagaataataaaagtgtcattttgagatcaacactataaccaaattagttaaaatacttttacctgatggttatacatatgacgaaaaatttccttacgatgttcactagtaaaaatggtattaaggtgacctgtaatgtataaacacataacctacaaccaaataaacaaatgttatgttaatttattaacataataaagagttgatactctatgttatataaatatacaccttctcaaaataacattgtattcgagtactttctaatatatgaaattgtaaatactttataatttgaaattgtataaatactttgatgcccttaatttgttattgataatggtattagttgccctataatttaaaaataggttgtaagataataaaggaacatatcttttaagtacctcataaattattagaaacaatagaggaactaactctacatttatttgaattaaaaagtatcaagaaaaataattggcaaaatgtattggtggaaacggattgtcttatggtagtacaagctatatacgagtcattttgccatgagctcttattttggttgtgttgtggaggattgtcgtaagttgttgattgatttaaggacttgttcaattatttttcttaaacgtgatgctaatagggtacatagcttattattatcttgctagagtttcttatttttctgtaaatcgttctttttttgaactttttattattttttatttttgagatatacttttaaatgatattatttaatgaagttttcttattattcagagaaaaaaaagaggaaattacattgtatacccattatattttacatgttttaatttttacctttatttatatatttttttaagatatacccattttta

SEQ ID NO: 89048 - DNA, 694 bp, Cannabis sativa
ctgcaaccaacacccaatctaccttacccgattccacacctactgctaatgcagcctctaaaaataaaaggcctcgtccccattgcactaattgtcaaaaaccaggtcattacaaagataaatgctactttctcataggatttccacctggttatggaaatcgaaaatccaatgataacactaccactcgcaaacccgatcctggctccacaagcaaaactttcccccaaacatctcaagtttctaccaacatacttgatatcaatccctctcaactcgcctcagcacaatgtcaacaactcatctccatgttgacacaacaacttcaaccttcaacaaatgcttcaacatcgaatgataatgctgtcatgaaccatttttcaggtattacttcccccttttcttggatgatagatagtgggacaacacatcatgtttgttgtaacaaatcttgtttttatgccattactcataacaccataaacaaatatgtcactctccctaatggcacaaaagttcaaattgaacatattggcactgtcaatattaacagctgcattactttatacaatgtcttgtttgtgccacaatttcattacaacttgttatctgttcatgcattactacaacatagcaatcaatattctatacatttcacagctaactattattacattcaggaccattctcaaac

SEQ ID NO: 89049 - DNA, 522 bp, Cannabis sativa
  modified_base (251)..(254): a, c, t, g, unknown or other
attttgtagttcgacccgcttcttgattaaaaactcatcttgggcttgtttctttgatattctctaataaatttgattcaattgtgaggttagttagctttcctgttactaactgtatcccagatctctcgatttcctcttgcaacgacacttttaatgcccttaacattgacaagcttgcatagttgcgtctgctaagtgcatccgccactacgttagcctttctaggatggtatagtatctcacaatcnnnntcttttaccagttccaaccaccgcctctgtctcatgttgagctcattctgtgtaaagaagtatttcacacttctctccatagaggtagtacctccagattttcaaagcaaagaccactgctgccaactctaagtcatgagttgggtaccttgtctcatactcctttatctacctagaggcataggctaccaccttctcattctgcatcaacacacaaccgagcccttgctttgatgcgtcgcaatatactacaaatttgtctttgtta

SEQ ID NO: 89050 - DNA, 1613 bp, Cannabis sativa
tagtttctctttcatgcttaatggggaagaagttgggaatgtcaagccaactagaggtcttcgacaaggtgacccattgtcaccatatcttttcctaatttgttcggaaggtttatcacggctattacaacatgaagaatcggttcaaaatctcaaaggactacgtttgacacgtcatgctccatcagtttctcatctcctctttgcagatgacagtcttctcttttgtgaggctaccaatagctcagctcaggctattcaaagggtattggacatctatcataaggcatcaggccaattgttaaacacgatgaaatcagtaatgtctttctcacccaacactactcaagcttccatggactattttcacttgatgctaggcatgcctattagtgattgtcatgaacgttacctcggtcttccagcattttcagagcgtgataaaaaggaaatgttcagcgatgttaaagagcgaatttggcaaaaacttcatgcttggaatgaaaagcttttttcagttggagggaaagaagttcttcttaaggcggtagttcaatcaatcccaacatatgctatgagttgcttccgtttgcctactacgttttgcaatcagttagaatccatgatggctaacttttggtggggttcaaatagagatgggtcaaagattcattggagaagttggaaactgctatgtaaatcaaagtttgaaggtggtatgggtttccgatcttttgttcatttcaataaagctttattagcaaagcaagcatggagaatttttgaaatgcctaattccctacttagtcggctgcttaaacatagatatttttctaataataattttttggaagctcgacttggtcactcaccttcactcacttggcaaggaatacattggggacgagaattacttgtggaagggttgcgttataaaatcggtaatggttatacagtcttggctggtcgagacaaatggattccaggatatactgatttcaaaccagttagttatcatggagctgatactttgacagtatccaactttataacagaccaacgggaatggaatatccctctgctcaaccagttttttaatgcaatcgatgtagacaaaattgttacaatccctctcagctttttcccctctcaagacagactcatttggcactccacaaccaccggctgctacactgttaattcgggctttcatcttgctgaaaatctggcagcaaaccgagattcacatgcatccacttctcacactaattggtggaaaacattttggagtttaaatctaccttctaaggtcaaaattttcgcttggagagtgatgcagaatgctttgccaactgctacaggtttgcatcgacggaaggtgattctgccatgtgctctttgtgcaataatgcgtgggaatcgattggacatgcattattcaattgtacaaaagcaaggaaagtttggagagacactaagttcaccattgatcacactcacactcataatatgttcaatggtgattacttaatccatttgtccacactgcactctaaacaagattttgaattaattatttgcactatgtgggcaatatggcatgatagaaatcg

SEQ ID NO: 89051 - DNA, 881 bp, Cannabis sativa
cttgaagcaaggacgttacaaatggtatacttcttggtaagttagagtaagtgtttgttgttgataacattctcctacaacgataatttgttggcaacaatacgtttggcaccctatgagatgtttaatgagtgctaaatttacttggagtgggtaccacctataagtgggcaagaagtatcaagaatggtagacaaaatatgacagagaatgctcgtcgctctagcggatggagaatgatgaggatttaaacatgataaaaggttaagtattgttggtgaccgtacgttcttaaaggtcactccaatatagaaatattatgcatttcaagaggaaggacatgtaaagcttgagatatttagatccacctactatattagatatgcataacaaaatcccaacaccttttacacattttcgtgttacgagggaaccgagcttgaggataccagtggtcgatcatcctaccagggagttggctggccaaatttgagcttttaagggcgagtgcgagtacggtgagtgtttctaggccatgtgcattcattttctaaactttctttgagcgatcaagggcgcagaccttcagtcttaacaacacctctggccaagtccttcctaacctttagtcaggtggccttccttcttctttctttgcacgagctttctttttgatggacttgcgttggtaactgtcgtacatatctctttcttcatctctcaataaaaacaccaaaatgtttaccgtattttttggcaattgaatatttttttagagcttaagaaagcgatgacagaataaatagcaaaataacaagacatttttacgtggttcaggcatcaattatccttaatccacgagtccattttattaggctcat

SEQ ID NO: 89052 - DNA, 623 bp, Cannabis sativa
atgtgtacaaataaaaacttaaaatgtataaaatatttaatttatattaattatatgtgtacaaataaaaacttaaaaaatgtatcaatttgagcctttatcagtatataacagtttaaatctaaatattagatttttataaagtaaattagatgaaagtttgttgatcctagtcgatgtgggaaagaaattaatctttcgaaagttgagcctttcaattttggcagcttttaaccaaacaaccataagaattctcgtactgtatacaactcaaagcagtgactgaaagacttgacattattacaagagactaaggtataagcatatatgtgtatgtcatcctcacaaatcctatttcttataacaaaatgcaaagccaactctcccatgtttaccaagaagaaattgatcaaatgaaattgtaaagtttaaatgatgagaaaaaacatagggagttattatgggaatgggatacactgaaaccaaactctctacataaacaaaagtttctaagtaacaaatatgattacaacttttctgaagtactagtgtatgattatgattatgattgtggtctatcaatatcagtttctcatctcgatcaaccacttgaggctagctca

SEQ ID NO: 89053 - DNA, 530 bp, Cannabis sativa
caggttatggcatagaatgaaactattgtagggtttcctgttaggttatggcatagaatgaaaccgttgtagggtttttttgtggtgacataccgagcataagtacgagtatcagtgacatatgagtatcgaccgtaggttcaggctcacctgattaggtgatttaattatgtgatatgttggtgccaggctatggcacaagcttgcctgattagcaaatgcaatacatgattatcagactaaagcatcgagttgcctgattaggcaatgtgatgtaatgaagatggttactttatgcggtaacatatatataatttatattattaaatgaatatgatttctaatattgatataagagttttgtattaccagatatctgcatactgatgcttattcgtggcagatgccagtagtgattggattccatcttatgaacaatgtgtgatgatttgattctgattgcgtataaatgataatattcgaataataaaatatatgattatcattattacttttgttgctgagtcctt

SEQ ID NO: 89054 - DNA, 912 bp, Cannabis sativa
tcaagtataaggctccgagcttcggagccttaactcttgtttcaaggagaccaacaaaatcaactttctgagaattgataaattgctttatcatttgttgcttatgttgactgttggctccgcaaacattctagcatagtagtttatccattagacagagagggatctccccccctcctgtcttgaacaaatcatgagtctgctcttgttcttcagtttcagcaaccatttcctcttcctcaagcacctggaacgagtttttcacttcagtactattagtcttaccagaaccagaaccagaacctttgttctctgcatcatctcgaatagcactacctttcttgctgtgcactttagtaaatccttcctcatacacctaaggtagctatcttttgtcactcttaacaatccactgctgtttcccattactgttctttttgcactctgtagcagcatgcccaacccctgaacaatgtgtacaagagataggcttccattcatatttaatccctaccgaagtgttcaagccaaactcattctcaaactccaacaaatctggcagcttctgatccatttgaacttcaactaagattctagggtaactcagtctctctctttctctagttacactatccaccataatcgggttcccaacttgagctacaatcttgaagagtgatttctgaccccaatacttcaattccaattcctccagctgcacccaaataggtaccttttgaacatcttctttcttatagttttcatttgggtcccaaggtttcataatcaccggccttctattaaagaatatgtaccctccatttaagatctggtccctgtcctcaagagagtgaaatcgaatgataaaaatgccataagacagcattttcactcgatctactttcccctgcc

SEQ ID NO: 89055 - DNA, 1149 bp, Cannabis sativa
  modified_base (743)..(745): a, c, t, g, unknown or other
aaattaaaataaaagggtattttgggtagttttggaaaataatagaattaatttgtacaaataatggagggtatatattttgatatggggtattttattagggtcaaataatgaaatttccctttaataatataaaaatacttttaattctattatattttattttattagaaaaatcaaactttcattgaaggaaataaagcccaaaatcaaaagatctagcaatagatcaatacaaacaaaacgcatattgttgtagctactattacttgtgtttgtttttaatgatcaatacaaacaaaatacatacaaatgacattttacttgttactaaagtccaaaaccatttttaactagtgttaggcacacgtgtataaattatattttcagtgagttaaatgttttaaaatttctcaaacatttacacgagggaaatttgattttttatacttacatatacttaatactttatccctaaactaatacatatcaccattgaaaatatatgaccactttctctaaaatctaaaaatatccctctcaaatttctcatacttttttttagtgcaaaaacataataataaaaaaaaattgatagcagatctggtccgatagagtccgatggtggtccgatgagtggtctgatgggtcgtccgatggggtccgatggtataaaaaggggtgatgtaaatagggggtattttagggatatcataaaagttgtcatatcctaccaatattannnattatttgtttagaattttttttttaaccaaatgtaagcataaaaaaaatcaaatttcccttacatgatggatgtcttaaataattatgttatatgctattatataaaaaaaaattacaaataaaactatctaaatgtagaaaaatcacgaatggcgtatagtaatttttccttatttatagtgagaagaaaaacttaaatcttttagtaaaataccaaaggctgcccacttgtggaaaagacttttggaaaatgaaaagggactttgtttgtaaattttcttatagaaaatagtactgcactttgcactggtgtaatataataaatttatatatttagttttatatttatttaattatttatatttctataaatatatatatatgtgtgcacttttaatgggt

SEQ ID NO: 89056 - DNA, 881 bp, Cannabis sativa
  modified_base (828)..(830): a, c, t, g, unknown or other
tgaagaaaaaaaattaagaaaaaagaaaaaaaaaatgcgagaaattaaaaaaaaagagagagaaaaatattaataattagtacaaataaaacaaaacacatagattatattttgatggagacatgttcacttggcacaataacaactctaagggtacgaatgtcaaagaaagattagactatatgccaaatggtctaaatttttttccgtgtcaatccttgcacacctagacttttatgcttctaaccatagagtattgaaggttgttatttcccaagcttatcgctcactgcctcaacaattcgaatctcagtttcgttttgttgagaaattatggttgaaagatgaagattgtcttgaactcattacttgaaactggaagcatacaactgggggtgatctaatttcacaaatattatataacatcttctctttttctccacaggtacaatcttggcataggagtaagtttggagatttgcttaagaaaataaagcttttacatgaaaaatttgcagcctttcgcgattcaaataacaccagctctgaacactttgttgaacttcaagctagtgaaaatatcttggatgatcttttggctcaagaagaagattattggcaccaatgttctcatatatcttagttacaatctagtgattcaaataccaaaattttccatcaaaaagccagcaataggaaggctgctacttaggtcacgaaattacaagatagcgatggggtggagcgttcttctcaagctgaaattgcttatattatacaacaatattttcacatcagatggtagtaatgttgggttttgtgccctannnaaaactcattacaatctgattagtgatcaatctaagaaatttgaagtgatt

SEQ ID NO: 89057 - DNA, 1168 bp, Cannabis sativa
acccaaaacctagcgattcaagctttggtagtagcaggatagtaaatcattgaagaggaaaagcttaaggtaaggattagtttcgttttaagttgaaaacaattaattttatatagtgactttgtgaatttagagtacttatggagattttaacttcgtggaattgttctttggttgctatgggactagttttgatgtttacttgttgaatttgaggtgactgtgagttagaaatcaagtttgaaactttttaaagcttatgtccgagctttaataacgtttttgtttaaggactcgattttaatttctgttacgtaaggattgttgtatatatgatatatatgtatcctgtgaagtttggaatgatttggatagatttcggtagtattttggagagttcaaaatttgagattttcgtgccagagaacggtcatccgtttttaccaaaatggtgtgccgtttttggaaagattagggagatcagaaatcgtatttttgtcataatttttcactcgagtgtccattttggacgttctatataccgttttgaagcttacaacgagatctataatatggtgtatgttttaaagccaaaatataagttttattttattgtatttataccacaagattttgtagaaaaccctagattatcttatgcaaatattaagtagtattttgggatagacaattattggtttaccattgttatgacataggggccgagatcttcgatcattctctaagcaggtcagccaacatacctgatgaactaatgtaccacatggcatgacaggtttcgtaattgtcgattatctgattcagcaatgacaatgtgaatgtgatatacaagctcacctgattaggtgatgtgatatatgggtgccgagttatggcacaggcttgcatcattacgcaatgtgatatacaagctcacctaattaggtgatgtgatatatggatgctaggttcgcctgagtaggcaatgcgatatatgaatgttagactatggcatgagcttgcctgattaggcaatgcgacttatggatgccaggctataccataagcttgcttgattaggtaatgcaatatatgaatgctagactatgacatgagcttacctgattaggcaatgcaacatatggatgccaggctagatcataggctt

SEQ ID NO: 89058 - DNA, 613 bp, Cannabis sativa
aaaaaagagaagaaaattaaacattaattattcctgtgattaattgtgttgtttccaaaaaaaaaaaaaaaccctataaaacattaaaaataatttaaaatttcaaagagaggaaagggaaaagtgtttggataaaagatggctatctttcataagatttttttagcttgtaggattaaaacatgtaaaggtgtattagagggtattagttgtctgttacacagttgattatgttagttactaggttgttaggtctgatattttctctgttcttggttgtaagtaactccgtttgaattagatgtatatatacctattcttctctcataacaaatcaataataaagtttttcatattgttcactttgtaatatggtatcagacgtttaaaccttcttctattccttctctctcgaccaagtttcgcactgttgtttcaccatggtcagaacacgggctactggttcaagacactcccaccgaactcctccgcctcacccttcctcttcggttccagatgctctgtcgattgaaatgcccatcgttcctccagctacaaatcatccaagaaaacctcttctacagaatcatccccctgttcatcgccctgcgca

SEQ ID NO: 89059 - DNA, 658 bp, Cannabis sativa
cattaggcatatctaacccaaaacggaaaaatctaaaattagtcaccaaaaagtagaggaaaactcaaacccaacactataatgaaaataaacaaaaacagattcatttgatacccagatccagaatgatagtcacagaaagacccagaattcataatttatgaatatgaagtaatattaacaaccaatgcatttcaaacataaaacaactacattgaagaacctgcttcaactcaaaccaatatacattctcttttttgtcatatcaatctaaggacgattttgatggatctaacaagtaaaattgaaaaaagaaaaaaatggagaggtgcctaaccttagggatagagggactctgccagtactgaattcctttctcctttacttcccctctgctcagacagacccagcggttcctctttactccgtttcgttttctcagctcacactctcacgcgtttcgctttcagtatgcaaatttctttcttttgctctttctttcaattttctcacttttattgttcctctttttacacgagtgggcttgcttaggatacgaatacattttgggccatactggtagcccaagaaggacagtacagctcaggcctaatctcctttccggattaactttcaatcattaagcataatttaaata

SEQ ID NO: 89060 - DNA, 1137 bp, Cannabis sativa
aaaatacttataaataaataattatacaacacgtgacaaatgattaggaatccaggtcaaacatctactacttaagagaatgtattattcccacaaatggtcaaatacataataaaccctcctctaattgaatcattattaatattctggtcaaagtcaaaagcctctaaaaacaccaaaatgtagaataataataataatattcaacacgtcttacgtaccatgcattcaacacgactaagaatataaatgctactcttcaaattcttcttatatatataaattgcctcaaacactcacaacaacacttactcaaactcatcatcttctacaaattccattaccaaattcactaaatcatatcatgggcttcaaaggtttcgtagaaggaggaatagcttccattgtcgccggagcttcaacccacccactcgaccttatcaaggtccgaatgcagcttcacggcgagcccactctcacccctccaattaatccaaacccatctttattattccgtccagccatgcccggaaacatctccgccgtccattccatccacctcatggatccaccgccacgtgtcggcccagtatccataggggtaaacatcgtccgtagcgaaggagtcgccgctctcttctcaggcgtctccgccacaatcctccgtcaaaccctttactccgccacccgaatgggtctctacgaagtccttaaacaaaaatggaccgatccccaaacgggcaatttcacgctccccaaaaaaatcgcagccggcttagtcgccggaggcgtcggcgcagctgtcggaaacccagccgacgtggcaatggtccgtatgcaagccgacggtcggctcccgattagcgagcgaagaaactacaagagcgtggtggacgcgatcagccaaatgtcgaagagcgaaggcgtggctagcctttggcgcggctcggctcttactgtgaaccgagccatgatcgtgacggcttcgcagctggcttcgtatgatgagataaaggagacgattttgaaaaagggtttgatgaacgatgggattgggacacacgtggcggctagctttgcggcgggggtttttgcggcggtggcgtcgaatccggtggatgtgattaagactagggt

SEQ ID NO: 89061 - DNA, 1314 bp, Cannabis sativa
  modified_base (324)..(337): a, c, t, g, unknown or other
tcgccgcaaattgctctttttattaattttttaattaattaaaaattaattttagatattactagcctttcaatttgaaaatttgatttttctacaaacttgcctttatggtcattttacgatttaattattttttatttattttttttctttaatttcaattataagatcatatattacttattttattattaaaatttttgaaatgatcttattttgacaataaattaatattaataaaaaaaaacttaaaagtaatctaattataatttcaaaattttctaactacattagattttcaaaatttgttatttttgaaatatnnnnnnnnnnnnnnaattataagattagaaaaatatagttttaacattttatcttattagatatttatcttaatttttatatttttgtcaaaaataacataaaattttgaaaaggtgttcattttggtttgaatagatattttagggtttgctaaccataaattttttaaacttaggatattttattttatttatcttaaataaagttgataatatcctaacaattaaatatcgtattttaattttgtttattttttttttgttaaatttattttattaaattataagattataaatataatattagaaatatctcaattttcgaattaaggtattatattaaattatcttattagatatttaattaatttaaattatttaaatataaaattcgaaatttggcagaaattgcgtcctcgctgtggccacgaattccctcgccacggcgacagcttgctgccaaaaaatttctgtcccatgttcaaattattattttagccataacttattcattagagctcagaattggacgattcaagatgttccgaaaagctaagaactagatctaaaactttcatactgagctccaagtacagttctgcttctaagattgtcgaaatttgcaattaagttctaccttataaagcttagcttaccgacttctactattttcaccaaaatgtgctaaaatccttccaaatgactccaaatgcatgattagtcttcaaaatagcctaataaattataattacactgatcaataatttaaagaatcaatttattaagaatattaatacacaaaaaatattagctatatttataagacaaaatatggactcatcattacccaatattccaggaaataaagaatacttagtgttggttattcatcgataataacaaatgagtcaatccttgtgatgtattttcaaaagattcttccttctctaaatcatcgataccattcactgcgagaagctctgggtcataa

SEQ ID NO: 89062 - DNA, 2087 bp, Cannabis sativa
atatacacttaaaatgtagtgtttctatcccatgtgggactcctactcacacacttcacttttctatttttacataatttcatacaaagttccaacaataacaagttggcgtaataatatatataattaattaattaagagatgaatccttcggtccctatttttgtggtggaggtttttgagagtagacaaaataacagaataaaaataaaattaattgtggtaaaatcctattaacatttgcaattataatcttactaattaacccttctaaaaaagtgacaagagaccttctattgcaattttgttaataatagtgctcttttagctattgagtgagagctagattctttaacgcatgtccacatattactaagccacgtgctaaatacttattagagtaatttatggaataaatacataagtttaatttttggttgcaaataaatacctaagtttaatttttaacggtaatgatatttaagttatatttctaaaactttgtaagttaccggccgtaaaatgtctagtcataactacatgttattttcttaaaaaaaaaaaataaatttaaatataccattaagactaaatataccctaaaccctaaaccctaaatataccattaaatttaaataaaattaatttttaaaaataaatttaaataaattttaaaaaaataaatttaaaaaaataaaaaattcatgacctggaccaatcagaatttgttacgtggcaatttatttaacatttaacaacaagtaactacagagtttcagaaatataacttagttattattatcgctaaaaataatatttatttgcaaacgagagttaaacttaagctattataccacaaattactctacttaattaattgaaaaatacttttttaaaacaatttaattaattaaaaaatgataaattaaatttaaataaaaaactaattaaataagtttttctttaattaaataaagaaaaataaaaaatataacaaaaattgcaataatttgtttcatcttcgtcacttaatccttagagtagcattcaaaacaaaaactcaaacccagaaatccccttgttatgtctttgttcttcatatgagaagttattgccaccaccaaccacctctccgacaatcatcaactttaacagaccaactcatctgcccatccctgtgttcacatcagaagtccaaccactattttatcctcatcacaaccggcaaaccctaaatgaaaaatcagtacaaacacaaaaatttcacaattaaccacaaaatcaaatttattattttagggtgggcatacataatcaatttaacaaaatttaactcacgtaggatttgcatatatcaaattaaattttataggatcactatgcatctacagtttgatttaacaataaggtttcaaactaatagaagaaattctaaggtttttaagcattcgcaatcaaaaatctcaaagtaagaagaaaaaaaatacctacagcgatgtcatgagtggattgcttttcaagattgacccaccatgaccaacttgaccagagtgagagaggagagagaaagagaggagtaagtgaaaacactacacaaagtgagaaaagagagagagaaagagaggaataagttgttgatttagatggacagtggagattcattcataccaaatccctctttcttgacccgacctccatgttcgtttgcaagcaggaacatagagaaagagagagagtagatcgacgagtttcaaatctctctctcaattttttttttttggtgtgtgtgtggtgaatatgtgttagttttaaggtttttgtttttatttatttaattaaagaataggttatttagtttttgagttacttttttttttatcattttttaattaactcattaaatttgttttaaaaatatttttaatgaaaaaactaaaataattaatataagtatttaatatatggcccaataatatgttgatatgcttaacgaatctagttgttacttcaaaaagggcaatgcaacaaaaaatcataacggaagggacgggactgtcaccaccacttttttctattattattattat

SEQ ID NO: 89063 - DNA, 801 bp, Cannabis sativa
acattgagtaactctaaaagtgtatagtgacacttcaatgcgcgtcactaatgagggtgactggaaagacaatttttagtgacgcgcacattttgtgcatgtcactaaagagtgtcactaaatagttaaattgtagtagtgcggattcgatcttcctgggatccaccttaatcccatctcggccaatttaatcatattgtgactatatttatttattatgatttagttcaattaaggacttatttaatcttgtcaattactccaaaaatactcgtatgtctgtacgtcatgattttatattatccctccactaaatatattctttatatatatatatatatcttccagagaaaaagaaaaagtaaatatcctttatccatatattaaaaaaataagaatttgaatttgaagaggtaagatataaataaatatcacgatgagtatatatttttgtagaacattaaagaattaaataatttaaaataattttgcaaaatttgtaaaatattttcaacaaacatactaatatactatgatatcgatctatatatgatcatatacagtgtaacatctaagcttaactatatcaatatttttaaataaaagatcacaacacatatcataaagaaaatagtagcagtaatttgaaaagtggctggatatatataatttcttccagtgaatgacagatcaactcggtctctgtatattattgcaagctcaacatgatcctataattcccaaccaaccactacaaaagaaagcataataaaaattagatgagatcaattaattaattat

SEQ ID NO: 89064 - DNA, 630 bp, Cannabis sativa
aagaacacaaagaacactagtggtgatacacatcaattacaaacttaatctcacttgaggcaatccaatcaaacacatggaaatgccttttacaaccctcatcctcaactaatcaccaagagaattcatctcaattacaagctgagttttaattgtgctttactcactaacttgatctctctcatacaagtgaatcataaaccttctatttatagagctcggttagttaggacaggactaaccgagttaactaccaactgtcaaggtagtcagaagtgttgtctaagtgtcctaaaccccacacgcacaaatacaaaaacaacaaaattacaatctaacacgagcattgcttgtttcatgttgtggaagctacctctttgcttccttcctaaaggagctccctgcattagaagagataaagaattggaactcagtgtgagtacttgtgttgaaagagcataaagttgagagaaaaattgaaggtgtgtgatttaacggtgtgaaccaaattgaaaattgttaacatacctaacaattttatagctcatgcacaccattaaactccaaatgaataatagaacaaaaccaggggattctcataaagcctgtcaaaataattgaagttccatc

SEQ ID NO: 89065 - DNA, 1005 bp, Cannabis sativa
tttaggctattctgataagtgagaattatactaatgaaattattatatatataggaaattacactctatactctttttatattttttttttatttttaccttttttttaaaaatctcttatttttaactatttttgaaaacattataccaattttatccctgtcacttcaagatactcttcatgtgactctcttatgtcaaagtattttgggtacaatatatataaaaagaggtatgcttcaattaaatataaaattagaagtaaatttgatcaattgattaataaaagtggtatttttcaacttaccccttaaatataactgtaaaataattttaattggtaaatatttttatttataattaaaatatcaaatataattttatataatttattaaaattagagttcttaacgtatataataagaattaaaataggagtatacaatataattttctctttatttaaagtgaaaataacttttatgaaaaaattaaaaaaaaaaaagaaaaataaattaaaaatatggaaaaacaatacaagttaactagttaccataaattatttttttcttcataattttcagacttctttttattttttatataagaaaataaatcatatttttataaacttttgccaaaaaccataaaattgaaaatgcccattttcaaatgaagaatcatagtaccactcaatttataagttaacatctataccacttttcatttttattttctagcaaaaagaaaaaaacttttgaaacaaagtgatataaatcaattcaaatacagtgaaagccataagtgtacattgaattgaaaaatgacaacaaatctaactaataaaagcaaattatgtttgactagtgtagaatgtgttatacaatctacaataattatttcaatgaaaaaatataatataattaaatttagattacattacatattgactagtgtctagatatagtgctaaaaaaattagtacaagtatttctaaaaagaaaa

SEQ ID NO: 89066 - DNA, 917 bp, Cannabis sativa
ctggtgttgagggagctgtgggcctgtttggaggtctagatgatgctctactagcagaggagacttgcctggaggaaagacatacacttgattcagatgatgatgctctcgtcaccaggcttaccaagaccatggataagagggacagggccctccaacagcgtttggcatgcggaggtattattggtgatgcctctttgtttattaggcctggaggccaaaattttgccaggtctgcttgccccccacctacttctagaggcaagggcaaggcagccattaatgatagcagctcaaatgatttctcctccgaggatgattgtctctcagatggtagttgatagtaccaactttactttttcttgcattcaatacttaaaacttgtattctaacttcaatactttctttttgaaggcatggattctagaatgagggatctagtaggggagccttctagtagtgcttcttcaggtcatccttaggccaaggtggcccgaaccacgaggtcttctaatgccactaagtccccattgcctccccctttccagggcatgctctggctgatcagtcgatgattatggaccctccttcgaggagatctttacccccacgtagaactacaggcaagggggccaaaagtctggccggagggcctattcatccaccagtccgatgattgctgagtttgcttgaaactatattggcaggactttgcctatcattgacggagagctccaagagcttgaggatgaggaactggagtgcttgacatccagagccctccaagacatatcatatgtaagttttatatttgatttacttaaattgttgcattggcagggtctgcctagccaggtgtgcaccactaaagggctggccagctttggttgcatcaatgggaggctggccagctaga

SEQ ID NO: 89067 - DNA, 929 bp, Cannabis sativa
  modified_base (889)..(890): a, c, t, g, unknown or other
tcctagtatagtaggtttgagattatctaaacttgtggcttgtagtatgcctaacaattaacttactttagtaagacgctgatgtatttttttttttctaatggctaattctataggaagttttttggctcctagacatagattttaattatctaaggaacaacttcaactattctagaaaaaataaaagtcatgaaaggaatttcttaggatcgacagtgagaagtctcatgtatgttttggtatgcattagaccagacacctgctgttgagcgggagtgatgagtaggtaccagattaatctaggtaaagaacattagaagataatcaaataaaacttaagatcaagaagagaaactatatgttagttgataagggtggaattttagtactcttagactacaccaaatccgatttctagacttgcattaatgctagaaagtctactgatgagatggttattactctgaggtggagcagtgattttggagaagtgtaaaaaccaatccagagtctctaactctaccagtgagactgaatgttaaagttgtacgaaggatacttattcagcctatggaaagtcttatacagtttttggtgttgtaccaataacgaattagctacttgtgttacttcctaactaacacagaagtagttgccaaaaagtaaagaatccagtaagtatccctagaggagaagacatatagagaggaatttcataatatcaaggattctgtgattaaagagatgtaatgatggagaaaggttatattgaatacaacctgacaaatcctgttacagagagaatactatatactacacttgatctcgatatcaatgtgtggagattaattgaaatgcacttttatttttatattagtgcaagtgnnagtttgttgggttttctgccctaaataaaactcatttca

SEQ ID NO: 89068 - DNA, 1277 bp, Cannabis sativa
ttttcttcttcttcacatcaatataataatgtatattttaataaatgtaataatttaatttgtattataaaactgatcaacaaactcacctttcatattaataagtattcatattaaagaataattcaatttgaaaaataaagtctgcaataactagtaattaattcttcatataaaaaagtttgtagtaattagaacaagcaattgtcactacaaaagtctttcaacaacattacaacaagttaccacttccaattatttgtattttcagcttctataattgcttatgcaattgggaagaggtgaaaattcacatcaaaccccactccaatcaataaaattaccttttatggccctttgagatgacaactacataatccaaaaaatgttcgatatcctgaggcatcaagagttgctagttcatcgtcgtttccctccaaattcttttggattgccactaagttgctttggacaatagcaacaatactactgagattaaatttaaggatcataatagcataacctcttaattaagtttgcatatgagtgagcatagtcaccacctgaatcccctctagctttctgtctagctgctcatagctgtctagtttgtagcctcaactccaaaatagtctcttaggacgctcaactctcatttactccacactcattttaggatttctagcaaagcttttatgaagctctttggcaatctatcttgctgtaattgttcgattcttgacaacgtattagcaatctatcgatattgtttttgatcgtattaccaatcggtacaatatccagtactcgtggtctcgtaaagaaaacaaagaagaacaaatttttttatcttgagtacaaaatgtaagacaattaatattaatgaatattaggttgaaaagaaaatgaacatgaagatgaaaattgaaaacttgattacttatttatttcattttcttaaaacacatttatttcatagatacaattttgtagtgaatgataaaacaattaagcataccagtcacaatcgtcacaagaggcaagtttttaattagtatttttttgttctatgatttgtgatattgtttaatttactaataatttctattatatatttttttattagtttattttggcttaatcttatttttagtatgcttttgttgaaattttattgagatttttgaattgctgagtttcaatatgccttggaattttgtgttttgactgaactcgacaagaactcaccaaagagctcactgagttttgtgtttggt

SEQ ID NO: 89069 - DNA, 532 bp, Cannabis sativa
ggctcgaacaccatcagaatatgactgatcttgcagtcaaaatgcaagtcgatcttgcatttggaaatggcagatctggtggtgctcgaccatttgcctcatccaagaaccctactaatgaagtttcccaacccacctctggtcatgggcgtggctatcccagatacaaccaacaacgagtcatttgtcaagtgtgtttaagaattggtcacacagcccttattttccattataggtttgacaagaattgggttgttcctaaatctcatcaacctcctccaagggctcatctcacagattttgattttgagtatgatcctcaagcctattccacaactcttgttcaagattttggagatgatacctcttggtatgctgacacaggtgctaccgcccatgttacctttgacagctcaaaccttcatactcaacaagcctacaatggatatgagacattggctatgggagatggtaagaaacttctcatcactcatattggcacttctgttcttccttcctatcactcttcttg

SEQ ID NO: 89070 - DNA, 1042 bp, Cannabis sativa
  modified_base (223)..(225): a, c, t, g, unknown or other
gcgttggatgttaacttgggcgcttggatatcaacctgggtgctaggcccagaacaacctttagtaaaatggtcataactcactcaatattgatctgagtgatgcggtttaacttgagtttcgaagctatttcaatgctctatcaagtcatgtctcacacttcaatcgcagttctaaagctatcaactccaaatttcacctcaagggagttacgaatttaagnnncaacttacccaaagcaggtcctgccgtcgcgactcgaactctgaaaattgacgatcaaccttagaagttaagtttcaccgttagatcatcatctatggtaaaaatatcctaatatatttttccatattttttggattattttattcacaataataggacctccttcacctataaaaagagatctcctctaactcatttttcatattcagaaaagtagccataaggtcagagcatctctctctagtttttttctctctagaaattaaagcatccacacttagccatttttctgtactccatctcgtaagaataaacactcgaagtagacatagctcaattactattgcgatacaggtagtgaactactataaattgttctctctattaatgcgtaacatatatctcatttctcgccaatctagtaagcaggtatggcttaaaagtctttgtcaagatttctgagtcaacatcagtgttgcaagaaagtggagccatcttttttaattggactttctttccatccttcatttcgctttctggttaggattcttctgtttcttttatctttagatgaaatttcacgcctaacagctactcctttcttactcgctatggaggccttatagagaggttttcctcctaaggatttaaaagtagagaagcttgtcacctcaaccaaccttaggaaagatggtctaattgctcctcactagagcataaatggcttccatatcaaagacgctcacagtagcgattctctaaatcttaaagaagtcattgcagagatagtttctaatgagcgaagaaggctatcaag

SEQ ID NO: 89071 - DNA, 672 bp, Cannabis sativa
  modified_base (56)..(65): a, c, t, g, unknown or other
cggcgacaacggaaaatgcgatgggtggctggtttgatcacatgggtaagtttagnnnnnnnnnncttagtgggaaatattttagagaaaagaaaatatcggggttaagcaaggttatgaaatttgaccattttacccctagtcttggaaaatacctaagatttgacttaaagggcattttagtcattttaaatggtggattgggtgactaagtttggtgttggcagctggccactttattcaaccaaagttattcactctcattttcccatttttggaaaataaggaaaatcaagaaaaccaaaaaagataaactctttctctctttttctctttcggctggggcaaaatcagaggtgaatcatcttacctcaatcattttttctggaatttaagtaaggattcaaaggttcttgaacccaaggtaaccctagaactcttgaatatgtgttttgaagctttttctttagttgagtatgtgatttttgagaagttgtggctgttatggtttgggatgcttagggttctgattttaggttaattttaagttgattttatgctttggatattagttttgagctatggtgagggttttgagcaagcttgagctttgaaactcaagtttaggtctttaatgtcataaattgttttggtatgtttttctgtgaaata

SEQ ID NO: 89072 - DNA, 893 bp, Cannabis sativa
taaaataatttccaacatgtactcctcggcattagaaattattggatgagtatttttactcttcctagccatgttatagcagccattgatagaagatgtcgagaattcttatgaggaacctctgggaaccgatctaagatgcattttgcctcgtgggagaaggtttgtctcccgaaaaagtatgggggagttggcttttgtgatggtaaaaagtggaataaagccttgatggccaagttcctttgggccattgctagaaaacaagatagcctttgggtgaagtggataaactctatatacataaaggattaaaatgtgtggagccttcctatcaaacaagatatgagctggtacctcaaaaggcttatgaaacttcggtcaagtacaaatgaggcatctttactacttgctgaaaaaggaggtaagttccgagccaaactcttttataacatgcatgtggaagctcaggaagagaaacatagtagaactgtctggaataagctcattgttccaaaacacaggtttattctttggcaggctagcaaggctcaactccttacccgagatcaattgagcaagtttctgagtttactctcgaacctttgctcggtttgtgagagtgatatagaaacacactcccatctcttctttgactgtgtgttagctaggaaaacttttgttgaaataggaagatggttgggttctgtggattggccgattgatgctgagcacattcaacaatggtgtatccagggcccccttgatttcaagaaccgagtgataaacactctttttgcaacaacgatttacttgttgtggaaaaatagaaatggttgtatatttgatttagtttgtacttctccttttaagttgagcatggagattaggaagat

SEQ ID NO: 89073 - DNA, 1063 bp, Cannabis sativa
tttattaaattcaaatatttatatgtgtattacaattcaaatattaattctacactattacatttaattatttagtttgttaggttacttcacatatgtattaaaataagaaaatggtgtaaaaatcattatcaagagaaaaaaaaaattattactttgaatactaatgtttatagggtttcttattgtttggaaaggaagaaaaaaaaactatttatcttttttaattaagtggaaaataattaaatacaatattaattataaaataaattaaattcataatttttttaaaaaatttattatttattataaataccgcgcaaaacgaagacgaatataaaatttacggaaacactaattaaagcagacttaccttatattaatatagtataagaatatataacatctagatctaattaagaaataaagttggttcaaaattttttatatctactctttttttatggattcagtagttataatataccattagtgaaaaataaaattaaataatgtataaatttctttctcaaattaatatatatataaatattttacaaaaatattaaaactaaatatattaatttattatattataaaaccgcgcaaagcgcggtaatgttacctagtatataatataaaggaaagcatcaacaagggaagagttagtgaaattacttcggctggtctatacataaagaagatctgtattgcatattgctgtcaaacatctctgccatcttaccccatagtgtaatttttgatgtgatcgaactgtaaaatggaaaggtaaaatggcattaatcatattattggtgtgatatataagatatactactcctacattaatcatattttttaatttcactgctcatctcttcttttaattaggaaacaaattcgaaaataaaattaagttggaagaccatgcctggaaaatatctagatctcagaggaatatataaaaagcactcttaataatttctaagagcatgtgcaaggagacggtatattttcatatataccgtgaatatggtccaaggaagctgcatttcacgcagca

SEQ ID NO: 89074 - DNA, 828 bp, Cannabis sativa
tgaccatctcctcatcatagtgctacgaggatgacccctcaggctggacagtggtctggtccacttccaacctactctcaaacatcactttcccttgtttagtgtactctctaggaaaacagcgtcacccatgtatgaaagattagcattggatttgtgcagcttaaactcatagatgagttctaaagacaagctgacgtactcatcccttatggcctactagccatcaagggatgccctcatcttttgatcacaccctgtgaggtcaatctccaacctggagatgttagcagcttgcatggtgttctcctgattcctggtgccaagcatgggctccaaactagaaatcatgctccaattttttaggctaagagcctccatctcagataaagcctggtccttttccaggagatcagcttccttcgtcaagagggtaaggtccaaggactttatctgctcacgaagagcgctcaaagaccccttggagttctcatgagaaaagctcagcttcataagggcctgaaagcaaaacaaagcaaaagttagtgtcaaaagacaacactgggtggccagcccttccacaaaagtactaagactggccaacgctcaaagacatagcattggccagccaactccatgcaacgaccactatttctagtcaacctataataatgccaaaaaatgagcaaagttaagtgtgcaactcaccgcggataaatcccgaaggccagttggatagagcttatctaggtcgttgtaatcaagctactgaaactcatcatccatagaaggagaagctctctgtagatgcctgcgagctacttccat

SEQ ID NO: 89075 - DNA, 545 bp, Cannabis sativa
tattttgaatctattgtagaattttaaaaaggatattagattttttttttcgaatggaaaagatattagatttaagagtcactgtattataattttgatgtcaatatttaaaatgtattgtatttaaaattagtgtgtcaaagatatagaatcaactaagtccaactttactaagaatttactatgggttaacttacaccaaatatagaattgttgaagattacaacgtgtttttatttatgggattagggaataggaataaggaatgagtttgattatcttttttacttttatgggctgtttggtatacatgtttgcttaatttaaagcccaaccgaacccatgtttggtattacatttttatttttgtagctgggtctggggagtcattttactatgggctcaacatgggctcaacattgaggtaatatccacctctcctcttgataacacgagtttcatttctcaggaaagctcacccgacaggaagaacaaccaagcctagccgcctctgctcttcatctccttccttccatcaaccaatt

SEQ ID NO: 89076 - DNA, 637 bp, Cannabis sativa
  modified_base (385)..(398): a, c, t, g, unknown or other
  modified_base (451)..(453): a, c, t, g, unknown or other
accgtttgcactgaagaagactacagctctatcaaacaacatgctagataggctttagggacatgcgattatgttgaaatagttgtcatagaaaataaaaaggaacgaatttatcgaattaaaatctaagttgaatcgcgaattaggtcgctctctttaaaaagttagtagcactgcttagaattgtgcaaatagactatcaacactgtgttagaagaaggaataggctatccaactattattggaggaagtgcaaattcccactacgaaaaatattatttttagtcacaacaaaattcgtgactaaaagtaaaaaaaattacgattaattataaatcaactaaaagttctgtgactaaaaatatattagtcacaaaaattatannnnnnnnnnnnnnaatgtatttttagtcataatactcgttatgattaaaattaaattagtgacaannngtatctaaatattatattttagttataagtaactttttgttttgactaaaagtcacatttagtcgtctatagtattaggcatggttataaaccgtcgcctataccctatcataggcgacggttttaagtcgttagaaatgaaaaaatggcaacggtttcgaactgtcgtcaatcttttctattt

SEQ ID NO: 89077 - DNA, 530 bp, Cannabis sativa
ggtcgatcaggtggatccactatcaggtggatccactggcaggtggatccactggcagtagatcccgcattgtagactctatggaatgcaagggtcccacaagtcactaatcctaaacaaccaatcacccaaccacctaccgggggttaaggtttgacgtctcatttggttagaatcacacccggtgtgtaagagactggaaacatcagttcaacaactgatctgagtactcccagcactgagattccttcaacaacaaatgtccagacaaccattaaagatgacaccgagatccaaaacctctgtaatgctcttgggctcatgcaaggtcatactaatactttgattcatgatcaggaagagctccgtgctacagtgaaccttgcgttcgaggagcaaaggcatcagttcactaaatggagggatagagagatggaaacgttgaaggctcaacaaatagccatcgatgacagaacaagacaagccaccgtactgatacgaagagcctaccaagctgctaatcaacaacc

SEQ ID NO: 89078 - DNA, 1306 bp, Cannabis sativa
attttccttccataataacatgatccccccttttaaaccaacacgagcaacttccaacccattacagaaatttaaagactgtttaaaatgaacaagagcaccagcagaagctttggtttccatgagaaacaaaagctgagggttgtacttacgaactaacattcgcaagcgacggaatgcactcgggttacccaacccccgagcattccaacttataagattcatggctgcttgcgggattgtttgtcaacaacacccgctggaaaagaaggctgcatctcagatgaatcttgtgttggtgaagaaaacaactgtgatggagagccttcagcatgaatgtcagatggaacattgtttctgcatcttttgagaacatttcgcaaattttcaggttcgacatgtcgtttataaacacattgggaagacccctgggccgagatatcttcattaatcaatacagctttccctttagcaagtgtggaagtggctatggcatcagtagtggggatgctagcagagatgggtgagtgtttgggagtgagattaatgactgatgaagcagggggatatgttgctacgggtgtagattgggcagaggtcataattgctgagattggagaagatgtttttgggcaatgaatagctggctgttcatcaataggcccatttgcattaataggtaatgaaggttgaaaaaaggatggaaatggagagggaagttcaggggcagcagtggttatgtatttctcaggcatggattgtgatgaggattcaacattagtgagtagggtcgggtgaggagcagagccaagggataaatgtttctgtgaaatgtgtttaggatagacagaggtgatagttttacgggttaggcgagttaagaacgggtaagcattaaccttggaaaagtcattccgatacttttcatagccagatttgggaagtttatcacccaacaattcaggaccataaggcaactcaggttcaataccttcatcatacatctcaaggaagccaacacatctctcaaaaggatggcccaaacaaccacaatggaagtagaaaattgggagattttcataacgaaattccaaccaatgttcgtcatgaatatgcgggagtttcaccagtttaccacgcattagaggttgttgaatatccaaccgaacccgaactctaagaaaagagccccagccctcatggagcgagtgttcatacacatcaacatattcaccaatccattcaccaatcttacaagcaagagcacgggacttgctaagaaaaggaaggcgatgacattggaccc

SEQ ID NO: 89079 - DNA, 845 bp, Cannabis sativa
tttgtttcttttaagagcaatcatttcacctcccattgctccacaccatttaattttatcaaatgatttcatggcttccttgtaggaccttggctcttcctcaagcatctcagccacatttcaactacatctacatatccataccttgcaggtgcttttatagctctcctctttctgtctctgactagttgatagtcaaggaccatcatcatctaattcatcttcatctcccacttcagttttgtgttctgttggagcttcatcactttttttcctcaagtttgaatctacagggacatttcttttgtcaaactccacctccatttgtgtattctcattagtttcagtgtgttcatcatctctttgagttttaagtgtatccttgtaaaccttttcttcatcaaatacaacatctctgctaatgaagttcttttgatgatcactaggttcaatactccacatttgtatcctttaacaccttcagggtagccaatgaatatacactttctagccctaggcccaagcttgtcttgtctcacatgagcataggctatgcacccaaaaactctgagatgatcatacttggcattactccctgttctggcttctattggtaccaatagctgaagatggacttctgttgataggataacaagcagtagtgacaacttcagcccagaattttttgggtaaaccagagtgaatcaacatgcatctcaccctttccataatagtcctattcatcctctctgctagaccattttgttggggtgtccttggtactgtcttgtgcctggaaatgccaactagtttgcagtgttgattgaaagtatccacacagaatt

SEQ ID NO: 89080 - DNA, 4286 bp, Cannabis sativa
gtctaaggacaagaaggcaaaaggcaaatgtttccattgtggcgtgatgagacactggaagaaaaattttaacaattatctcttagagctgaaaaagaaaggtaaatatgatctacttattcttaaaactaatttagtaaaagatgataaatctttatggattgttaattttagagccactaatcatatttttttctatgtagatacttgattcgtcaagggagctaattgacgaagaggtgaccatgcgtgtgggtaatggaacacaagtgttagccaagtgtgttggcaaagtccgtttgaacttcaaaaataagtgtttggttttgaacaatatttattttattcctaattgtacaaggaatattaattctttatctctttctttcgcacgaacaatcctttaacattgcttttattaataataagattattatttcaaatcaattttaaataattaattatttagagtagctttgcctcaacaaaataagagacaaaaggtttctaaagatgatgagacatatctatggcatctgggtttaggccacatcagcctagacagaataaattagttaacaaatgattgtccattgagagaactaaaagttggaactcttccagcatgtgaatcctgtcttgaaggaaagatggcaaaaagacctcttactgcgaaaggcaacaaagccaaagaacaacacgagttagtacacattgatgtgtgcagatcaatcaatattcaagcttgaggtggttaagaatacttctttaattttatcaacgattattctagatatggtcatacttacctaatggccaagaagtatgaaactttcaaaaagttcaaagacttcaaagccttggctgaaaataaattaggtaaatcattgaagacacttcaattagatcgaggtggagagtatttagattatgaattcaaatactacctgctaaaatagggaattttatcccaattcaaaacacttggcacacctcagaagaacggtatttcagaaagaaaaaagcaaaacttgttggacatggtctaatcaatgttgagttactcgtcactgccactgaacttctcgggatacgcacttcaagtggctacacacattctgaatgtagtaccctcaaagagcaaaagcgaaactcctatagaattatggaatggggcaaaacccagtttgaaacatttccatatttgtggttttcttgctcatgttcttaaacccaagacaggaaaacttgctcctaggtctgaagtgtgtatgtttatgttgatgacattctactcattggaaataatatagaaaggttatcaaacataaataagtggttagttgaaaaattctaaatgaaatattttggagaagcaagctatgttcttggaattaaaatctatagagatagaaagtggagaacattagcacttgctcaagcaacttatatggataaggtgctagaaatattatcaatggagaattataagaaaggacagttaccgtccagacattgaatttctctatgcaaggatcaatgtctaaaaactccacaagagatggaggacatgagaaagtacccttatgcatgagcaattcaaatcttaatgtatgcaatattaggtataaggcctgatatatgctgtgcaatagggattgttagtcgttataaattaaatccaagtttagaacaatggatagttgtagagcacattctcaagtatcttcggagaatgagagatctcatgcttgtatattctggaggagagttgaatcctaccagatatatcgattctaatttttaatcagacaaagatagtccaaattcaacatcagagttagtattcactcttggttaaagagttgtagtctagagaaacattaagcaaaccggtattgcagattcaactatggaagtcgaatatattgcagcttgtgaagcaactaaggaagcaatttggctgaagaaattctacacttatctagaagtagaaaaaccactggtactctactatgaaaacattatagcggtggccaacttcaaggagccaagaagccacaagagaggcaagcacatcgagaggaagtatcatctactaagagatgtaataaagggatgtgatatgacagtcttaaagattacgttggaacatattctgattgatccattcataagacaatactagcaaaatcttttatgggtcatattacgaatatgggattaagggagatgcctagttttattttaggacaagtaggatattgttagagtttatgcctagaaaatcctttaaagacattttttatcataaaattttacttgaacatttcaatatattcttgaatataaaattattaatattgaatattaaataatttatatataaatatcaaaaaattcattattcatatataaagttgtgacttgtattgtacggagaattaagatcacttagccatgaataaaatagtcagtaacatattaaagttacagaatccttaatcaagggttgctagtactgttcattgatgcctaatattccgtgaaatcagtattgattcagattgctgatgtagtatgatatctaagtgaatgtgttgtacataatggatattttatatgacatggaccgatatgtaataaagatgtctttatcaaacatgccgattactataaagaactaattcatatcacaatgactatcaatagtagatcggcctaaatcctcagtaatcatgagctcatgttcatgttattagtttccctgcttcactcattaaagtttttcagaaagatgattcttaaaacttttattctgggaagcaaacaatgtggatggatgggaacttgatttataattatggaatcctgtctttacaaatagatcgaatgttggttcctttaagtattaattctggagctaaaaaattatgcacaaatttagattagatctaaattatactttcactagtgaattaacggtactaaaggagagagaattaattagaaaggtaaacgataatttgaccaaaactaattacgaaccgacacaaggaggaaaaatcactcaaatttatcatatcagtagacactacaattatactcggtaaatataattctagaattactaagagttcagttccatatttatagtgaagtaatcatggagttgataaataaaattaattggttaatgagattaaataaataatctaatttaaatgagattagtattataggtccatggtcacctgatcgccaccttgcaacactatcaagggtatggataaagttatataatgatgttcggaaaaatctattttgaaatggtaaagtagtaattatttattttgtaataaatcattttttaaatttattatttaaataaattgggaaaaagacaaagttttgtcaggttaaaggcattaccattgtctgggtaagacaatggtggtgccagtcactgtgtaaggactcaatgataggcgcctatcagataagacaagccccactatatttgttttagattaagtaattaattcaaaagataaatatttatttaaatttgaatttaaaaagcggttatagatagttatggtggttgagatattccctcaaagtagttgaaatattctctctaggtgattgagatatttcctcatttgtatagagattctattgatcagttattagatatttagtttaaattaaatatttaatttcaaataaatataacagaatagattacaaatatttaaatattattaatttaagaaactcaaaaatgttaagctttacattattattcactcgtagagaaaaattgttcttgctcacgtattaagataactcaagaatacattatacacttttattctaattagcccacattatttcttgtgtgtggtggtagatctaaaagatcgtggtgtgagttttccatcaccatattaaggtggaacttataaaaagatttgaggatactagttgtgtgatgctgatgacagacccagagcaccatgctccaaccttctgctcccacctcaggtggaccttaattcccttttattgaaatccagaaccctaaaaaccctgaacctagcctccttctcagccctctctttatcacgacgtcaccaccaccgccagcctaggtgacgcctgagaagacttaccttgactagctagtcaacccctgtgacccaaacaccgtcaacaccttgtgaacctaaatgcattgaccccttaagaacccaaacacataaagagagagagagagagag

SEQ ID NO: 89081 - DNA, 777 bp, Cannabis sativa
cgttaatcatgaacggtggccatgaccgtcagaatagaagtcaaacgatcactattacctctagcttgagtaagatggacgtctccaagaaggaaaaatgatggactaacaccttcataagtgggataaacaatcaccacacacctacaagcaagttagtctaaggggtagatgatactacccccaccatagatataaggacgttctaaaaggtaaatgatgacatccacacaacactatgactacccacaacatacaagttgattttggagaaaacaatgcaacattcccaaaaggattgggtgaaggactagatgatgttttatgggcttacaaaactgcatttaaaacacatattggtatgtcaccatataggttagattttgggatagcctgtcatcttcaagtagagttagagcataaggcattttgggccatgaagaccccgaatatggatttggcatgaaaatgaaaagagattgctgcaattgaatgagttggaagaattttgaaacgatgcctacgagaatgccaagatctacaaagagaggaccaataagtggcatgatagatcttggtcagaaaagagattcaacctggacaacaagtgctattatttatttcaagattaaatctgtttcctggtaagttgaagtcaaggtggtttggaccttttacggtggtcagagtattctcatatggagcagtggaatccaaaggcgagaagatagagactttcaaatcaatgattaaagctctacttgggtggtcaaattg

SEQ ID NO: 89082 - DNA, 1103 bp, Cannabis sativa
cctactattatattataaatagatagaggagaggcagcaagttacactgaaaaagggacgaaaaaataattagagaatagaggcttgagagctatatcagaaatctaataagattgactcgtcgactatgcagaattttaactgcaaaatctcgtaaaaacctttgtgttcaatctttcttaaactgcttttattttttgcgcaaatctatcactatttaagctccaatatagttaacaaaaatcagcgttaacaatgtgtatgtatgtaatatgcatgctaaattatgtgatttgcatactaccaatgctagtacggttgtggtactgagtgcaattgtatagtatatattgttgatgggtatgacacaacgttacaaacactagtacgggacgagtacagattgcaattggtacaaaaggcaatagtaattgaggtgcgagaaaaccctaccaaccctactattagaaagatatttagtccatatggcacataggtggtacttctgttaagaacgttgttgattcttctgaagtcttgtaaataggtgtgtgggtgcctagctgcaggttgactgtatttttatatgttttatgcattttttactgagtccgtcaactcaaagatatggtttcatgtgtagctaaatgaaaggtgaaggttagtaacaatgagttcagagcttgtgggtgattgtacgtatgaggattattaggtcaggagtgtttagtctgatggaattttatttgttagttgctaggcgactttatgataaaacgtatttggtgtactgttgcaaactttaaaatagcatcccagaaattatttatagttgaagtataattcaaaagttttaatttgtcatatttttcaagaaatcctttgattagcaaaggcgtgcacggtaattagaaaatcattgtagcttgcctaagtaagtaggatgttatattagttgaattaacatctgtaagtaatttcccacatttgagaacacacatgccagttgtggtaaaatcatcccccactatattctatgcttttcgtaaaaagccactactaaaaccatcaggcctaggtgctttagtgtttgagatggaaaa

SEQ ID NO: 89083 - DNA, 674 bp, Cannabis sativa
aaaaacatcagatttctccgaaaaaattcctctcagtgcgtactctggagacatatagccgctgcaattcattcattcatgttaataaaaattgagttcaataacctatttgtactatttgaaaaatacaaagtccattttatcgtttaacaaaatagaaggtctaattgataacttttgcaaaatatgaagttcaaaatgatattaagaaaggaaaggaataataataagaaagagatatgatatgatgataaattgatgatgcttacttacatagttcctaccaccctatgagtatttgctagatctaaggtgccctcaaaaatccttgctaatccaaaatcagaaatcttcggattcatcttttcatccaataaaatattactagctttcaaatctcgatgtattacccttaaactggaatcgcgatgtagatacacaagacctctcgcgatcccctcaataatcttgaaccgcgtgctccaatcaagctcagcgcttcttcttcttttatcatctgaacacaaaataacaaattaacctaaatagttaaaactaaaacttacattgttaaacataaagagaaaaactaactaaccgaaaatgaaagtatccaagctcttgttgagcatgaactcatatattaacagcttctcctcattctcaatgcaaca

SEQ ID NO: 89084 - DNA, 752 bp, Cannabis sativa
  modified_base (43)..(43): a, c, t, g, unknown or other
tctccctcccttatattctctatcctccctcaactctccatcntttattctctccatccatctcaccaaacatagtgctaatcttcctattgtaaagaagttataaaaagataaaaaataattaaaaaaaaaagattattgacttaattattacatgagaagtcctaattacaatctctcattataatattaattaatctttatgtccaaaatcatgtgtcggaatatttttttcataatggtatttgttacagttacaatatcattcttataaattttaaataatttaaaatatcgataataaaattcttaatattctaatttaccacgaacattcaaaaaacttcaaacgtatttacactactctaaattttttgaaattttttaaaaatttacaagaataatgttgtaagtataacgaacaccgctataaaaaaaaattttaaaaaaatatttcgacatatattttcaaataccgaaattaagtaaaaaaaattaataagaaattaccagtaacactttccttaaaacattaaaaacatgagtcatttgcaatagaaaccttttttattttttattcataattacccacatttttcttcttatactaactttaagtttaaatacaatttatgtaacaacaacaaccccattgaaacacattcatcttcttcttcttccattataatgttattattattattacttgttcaaactattccattggtagtgaattatgagaccaagtagca

SEQ ID NO: 89085 - DNA, 3548 bp, Cannabis sativa
aaaataccttataattgtcacacaattatcgccacatgtatgtttgaaatttagcaaaatattcactcacatttgaattagtcaatatatgcatcaattacaaacacaaccatcttgatatttttaataaattaatctacacaaaagatgtcactttagcgacatattattttaattaatttattcaaaatattataaataaatcaatactaaaatttaaattaaattgttctaaatatatatatattactataaccatacaatatataaatattatcaaatctataaaattaaattcagttaaaccatttagctcctcatatatatgtgattgtataatatagtataatattcctaagagagcaagaaactaacaccaatattaaatttcacatttttttaatttcaatacaatttacgaaagaattaatataagttattgaagccccaagccttaatgctaggggtctcattaatctgcctatccagggtgatatgctaacctgggataaccaccgatcaggggcgaatcatgttaaatctgccctcgataaaggtctcatcaatggtgattggatcaggctgttcccaagagctgtttagtgctcctcccagacaagcaattcatatcaccgtcctctgtgcctttttttcggtggtttggaagaaaagttcaaacggtattttaagtttgaagaaggttggactcgggatgaaaggagcaatttggtagttgattctgcctggaaatctgttaattatccttgggctctggccagggtttttaaaaaaattggggctacacgagtcgctctcatgcattggaatagagctcaatatggtaaaatcgactccataatctctgatctggaaaggagactaaacctcattcagagtttacctacgggatctagagagtgggctactaaaagggatatccgtcaatctctcaatgaggcccgggtgaggaaagagttatattggaagcaaagagctagggtatcttggctgaagaaaggtgataaatgcacagaattattctttctttcggcaactatgaaaggacaaaggaatgccatcgagagtatcttgaataaaaacaatctgtgggttactagtagagagttaatcggaaatgaatttatggaattcttcaaaggaattttcacaaggatggatagtggttataaccttaattgcaactacctaatcaaggatagaatctctgagggtgaccaagcggagcttattaggtgtcccgatgacgaggaaatgaagtgtaccctgttcaccatgggaaataacaaggccccaggtcctgatggtatgtttgtcctcttctttaaacactattggggatttgtggggaaggatttttgtgaagcagtctcggattttttttcgaacatgtactatgcataggggggtcaatgctacaaatattgtcctaattccaaaagttcaaaacccgaaaagacctaatcactacaggcctctctctctctgtaatgtggtctacaaggttatctctaagatcattgccaactgaattaaaccactcctacccactctaatctgtcctacccaatctgctttcgtgccaggaagaaatattcaggacaataatgtgatcgcccaagaaatcatccattcgttcaataagaaaaacggaaaagaaggcatgtttgcgatcaagattgaccttatgaaagcatatgacaggctgagttggagttttattggtcatgtgctttcttgtttcggggcgctgagtgatctaaggaggtggatttcccaatgtattacgaccaccaccctcagtgtttgcctaaatggtggcccttgtggtaagattaccccttcttgcgggcttcgtcaaggcgtctctctgtccccctatctcttcatttgggccgcagaaattttgtcaagactcttggaagaagcccaacaaaagaaaattatcaatggtattaggctcaataagggaggccttattatctctcatatcttctttgcagacgaccttattctagtggaaaaagctaagctggaagaagtcaaaggatactgggattgtctagaaaaattttgtacttggtcgggccagaaaatcaataaacttaagacgtcgattttcttcaccaacaacactcccaatagcatgaaacaaggaataaaggagctgggtattggttcgccagagggtaaggtcaaatatttagggctgcctttattcagatccaaacaaaaagatgcagattttaactttattctggataatctaacgctaagttacaagggtggaaagctaagactctctctaaagcgggtcgggcgactctcataaagtcagtgggtctaactctacctgtgtatgctatgcaaacaactaagttttccaacctcctggttactaagattgacggcatggtgcgtggtggtgggggtcggagaagggtaatcatggtctgtacttaaaagcctgggacaaactctgcctccccaagtccttaggaggtctgggtttccgtaagaccagagaaatgaatcaggccttcccggcgaaatgggggtggaacctcctcatgggtaactaatccctttgttgtaagattctagaagcaaaatatctcaaaggaaagtcttttctcaactgtaatgcaaaagactataactcgtggttttggaagaatgtggtcaaatcgaaagacattattcgtcagggtgcttgtaaacaggtggtggacgaccaagacaccaacatatggaaagatccgtggatagctcacatgaaaggttttaccccacacccaagatgtcccactactcatggtgcgatcaaggtggttgagcttttgttagataatggtgagtggaatatccctaagctcaactgcttgtttgatctcgaaacgacttcggaaatcttgaaagggggcatagcgacaggccatggaaaggatagatggatttgaatgttggaaagcaatggtcgtttctcctgaaaatctgcttatagagcacaggctgttggtcgaacaactcattgtgaggtggtccccacaatgtggagaaaattatggaatagcaaaatcccgaagaggctaaggttctgtggtggtgtatcctgtctaaagctctccccgttcgttcggtgattagaaaacggtttccaattggggatgatagctatcctctttgtggaactgagattgaaactctggaacacctgttcctttcctataatgtggctttccacttgtggcggtcctctccctggggtttctttcctatttgcgatactgggattaggatgtgggactggctaaaattcctatgggatctaaaaaaacaaaggcgttaacacagatgaggccttcctttatgcatcattaattattgactccatctggcggactcgcaatgaaaaggtacacaataattgtctcgttgatgtgtttaaatgtattgactctgttcgctcttcttttgcagatcactaagcatatttgctcccttgcattatctcacaccccccccccccc

SEQ ID NO: 89086 - DNA, 641 bp, Cannabis sativa
  modified_base (74)..(74): a, c, t, g, unknown or other
ttcggttccctcttcctttttccctgggttcctggtgcacagaaatactctttcggtcctctcgatcctgaggnccaagactccctttttggagttttaccctctgcagacctttcccttttgggaaatctgagcggacctttcacggatcctgcatctttttctttttccctggaatggaagtagggtttttccattggtttccttcagagggataccgtatgggactaggttccctagacttatgcttctgagtgcttggtgaggactcttccggcgtttcctcgagtcctgcaggaatggctttagggtgaatgtggatccctgcagtatccatagctttttggatggcgaccatcacctcttgtatctttttgttttgttctttttgggctgcaatctcagcttcatgatcaacagtcttttgtcttaagagcaatagctttgtgtaactaccttcgtcataggcgtcatactcgtcaaagtttttctcatattcgtcattgttagcttcctctcgttcctcagatcccacgttgactctagaagccacttcttcgtcttcagggttttgagcgtcttgaggaggacggggctgacatgtattgcgagtttctaccattgttgctttagcttataag

SEQ ID NO: 89087 - DNA, 650 bp, Cannabis sativa
tctcttgattcttggtgtagaccatgagctctaaactagaaatcatgtcccagtttggcagggcaagagcttccaaatcagtcataaccttacccctcgccaggagatcagcctctagggtctttacttgctcttagagagtactcgaggaccccttgagtgtccatgccaaaagctaagcttcataaagtcctgaaaacaaaacaaggtcaagattagtgctagaagaaaacactggccggccagtgcctctatggtgcaaccaaggctggctagcctctcaaagacactacaatggctggccagcttcatacaatagcccctatggccaaccagcttacaatcacataaaaaagtgagcaaagttaaatgtgcaactatctgaggccatctcttgaagaccgatagaagagagcctctttaacttgccatcacgaagctcctactgctcgttatccccagtagtaaaggctttgtccaaagacctacaaactacctccatggctctctgccccatggctaaacctactctcgactatgcttttaggcaccccttccagaaggccgatccatcctcaacggagggtcatctatcatggtatgcccagctgccgcaggcccagtaggagaaggaggaagagatgaccccg

SEQ ID NO: 89088 - DNA, 1117 bp, Cannabis sativa
tagagggtgaagactatgttatggaggaatacaccgaggttgttccttaaagaagacaaggtgtcgtaggagctcggtgggtttctccttcatccatagtaacccaagcaaaaatgaagaatttagagaagcacgactacttgggggatgtcgaatgcttctttccctctccaaatcaccaggcaactagtccaagacaagggttttatgcctggttgagcactcataccaagcagggtgtaatgttgcctttgcttccatactttaagagaattgtgaactactaccacctctgctcgacccagttcacttcgaagggcatcaaatatttatccgccctgttcatcctttacgcctcgcaaggatgggatgagccatccccgcacaacacaaattggcttttcaacctgaagtcaactcctaagcaaggcaggtcggggtatttccacttctctcagctggatgggaagtggctgaagggcactgtggataccgagtcaacaaaataggacactttgtgaacgagtacttcttcgttcagggcatggataccgtccatgtaatattctaagataagaaaatagattagcgaaccctaactagttaaatgtgtatttatatagaattatattataatataatttattatgtgtgaattaaattgagaaatgacatgataagaccccattggtgagccaggggcatttttgtaattttgacccaagaagggtaaaactttaaatttaatttaattgtgtgcttatggactatattattatatagtatacctgttttgtcttttttcaagtatttattgacaagttggcatggtatagtcacaaccgggtatttcgagattttaaaatagcatattattgttattggaataatctaaaattatttatttatgtatgatatgtgaatgacaccagagtacccccttaaagagcattctgagcttttagccttctgccaggaacatacatgattttgactctgtagacatacaacaaaattgtaaacccaaataaatggagaataccaagtctcgtcccaatctggaaaatattgaagatatttacgaaaacgccactaccatacaaactaagcatcagca

SEQ ID NO: 89089 - DNA, 820 bp, Cannabis sativa
atattaataaaataattctaaaaataatttagttacttaagatttataaacatataaatttgaatatctttgatgctaatcaaataatttagtacaaatattataagtattataatttaaatacttttattgctaaaagaacaatttgggtatgtacttaagtactacaaacttaatattttatgtacttttgttgtaaatatttcttatttagttttatgatataaccatctatgaaatagtaaatcttgttaaaataaaaatatcctgaagttaatttttttgtgaaataatttaattttttttaactcatgccttatttattaaaaatattatattataattatagatatacaaaaattaatatgctcaaaacattagaaatatatatatacaaaatgtttgaaatttaatttcaacgttataaattatttataattttctaaaaaatttacagatggtctttataaataactataacatatacgattatgaaaaaaataaactaaaaaactctactgaatgtcaaaacagataagagagtctacaaaaccacccttttggagtggtgaaatacaattttttttttaattctttttcaaatgattacaggttaactaatagtagtaatatcgtagaaaacttctttggtgcaccgatgcacttccttaatatttttgtatttagaagaattttttagtcaattaagtgttttcatggtcatgtatattgtagttattaaagacatcttacaaaattataaaattaagaataagttataatataaaaggtaatgttcaaatagtctataatgcccata

SEQ ID NO: 89090 - DNA, 700 bp, Cannabis sativa
tacttatacttctcctagctggacaataagtgactgaaggaaaccgtagaccctgcggtcagcaaaatagggcattttgtggacgagtattatttcgtaacgggcatggagaccgtccacacttggttccaacagatcccctcatactgccaccctcctttcatgctgaaacttggggagagggcacaaaaaattctccaactgctggaagatgctcgaaatatcactttgttgaccactgaggccaactttgtgaagtacaagctctatccggaggattttgtgccaaagcccgtgaaggagaagaagatgaagtccaagccgagctgagctaaggatgtcgagcaggagaaagagctcattcaactgaagtgtgaggcccaatggaggcttaaagtggcgtacccgcagggccgtctcaaatattttagaggcctgttctaattttaaaaaataggcccttaaccaaaaaataatataaattgtaaataatatttaagtattatcatattacgaaagtatattttacataattaagcacccaaaaactcaaacaattttattaaaattggtattaattccaatacaacttcaaaccaatatcaacattctatttaaaaagggccatccttcgaacgctttttgaagcaaattcatcaaccaactcttcatattttatcgtctccaaaacctcattttc

SEQ ID NO: 89091 - DNA, 1277 bp, Cannabis sativa
gattcacgtcatcaagtcaactccacacaagtgtgaaattgacttgggggaaaaatgttaacctagaaacttatctcggtgacatggacatcaatgtttgacacatggaatgaaggatgctgtcaaggagttgagtagacttgagtcatagcagtcgacctgggaggggaccctagccctacgccaatgttgactcagggatatccaggatggaagttcagacttcaataacttgaatccaacccactatcttacccaacatctagattgacgttgtatgtcaacttggatgatgggatgtcaacctggggactgggttgtgaactgtcttcagtaaaacaatcataactcactcaatattaatttgattgatacgattcaacttgtgttttgaagctatttcaatgctctatcaattaatgtctcacacttaaatcacaattctgaagttatcgatcctaaattttaccctaagtgagttacaaaaataagccccaagttacctgcagcgggtcacgcatggctctaaaaaatgactattcgcatcaaaagttaattttgatcattggatcatcatatacggtcaaaattagccaatttagattttttttttcatattttgaattatttttccctatttttgtgggcatccttcacctataaaaggagatctcccttagttcatttttcacattcacaaaactacccacaaggtctgagcttctctctctaaaatttggagctttgacacttaacctatatctgtaatatcatttcttaagaaataaaaactcaaagtagatgtaacttcattactgtcgcgatacagggagaactactataaatttctgtgtctctctttacttttacctaacaaatattttattatcgccaatctagcgagcggatatgacttagaagtttgtgtccagatttatgagtcaacacaacgggtaaccaaactacgtgtaagaaactgtagaaaattattatttattaatgggatgattgtgacaaaattctctaaaaacttagggttgatgcagattagtctccaacctcaaaaattgacggtgatagttcccaagattatgttttctgtaagtctgttggtccctaacttaactgatcaatttatttatttaaaaaatgccacgtgttgatatataatatatgtccaaataataattttaattaaaaataatttaaaaataaaaaatcattattaaaagttttaaaaattattatttttattttctttttcctgtttctctcgt

SEQ ID NO: 89092 - DNA, 626 bp, Cannabis sativa
ttaaaaattaaatgttattaattttttattgtgagaaatgttactaattaatttgttatattaatatatattatatgttaaattactaatttaatatttattttgttaaataataaaatagattaaaaattgtacaaataagatcttgagttcaattttcgataatttttttgatataactaacttgaagacaattccatacatgaacagatacagtaaacgtaatcagttttgtcataacacatttagattgaattattattaaaatttattttaacaaaaatcagtttaaggtattatttagtatcattttataaaatataaagtttaatttataatttattaaaatagatagtctaatcaataattttttcaaaatacaaaatttaaaatgataattacattattttcaaaatatttaataattatttactaatatttatatatctatatctataggaggatgtggggattatgaaggaaatgaatttggatgcctatagattttcaatctcatggtcaagattgttaccaagtacgtacgtattacgtttacgtgtattaatattaattaattaattaattaataaatatatgtatggttaattataattaaatgaatttga

SEQ ID NO: 89093 - DNA, 1123 bp, Cannabis sativa
cctgaccttatttcttttaatgttcttgtttacaagttctttttacggttctagctagtgtgtcatagtgccccttgctttggtgttgtttgtgcttctttgggttttcttgggggtctgatccttgttattacctcgttattgtgaagtttcttctggttagtatgggggaaaagggaaaagagattcaagtggagtttgttgattctgagaaagatgaactgttatctagagacagtggtcttgagatggaaatgttagagctctttgaagatattacattggaggatgttgtggctagtaaggcttgtgtgggtaaggtagttgggtgtaaggatatgctggcatcagtagtgaagaagatccttgctggcgtttggaggaggctgggttattggcgaatgaagaagtgtgacgatggagttcttggattcttttttgaggaagaagaggactaccattttgttatggaaaaaaggccatggattatcaatggtgttcttcttaaccttaaaccttggccgattgaaggagaggtctcagttggagaatttgatgtagcattattctgggtccaattccatggactccctacccgttttttatcaaatgagaatgtcccaatccttgcgaagaaagtgggaaacctggttaagatggaggagaagcgtaaagaggacattgttagaaggggttatcttagatgttggatagaggtttggatggctcatcccttcccatcagggttctttcttaaagctgatgggaagcctgattcttgggtccaatttaaatatgagaagcttccccatttatgttttaattgtggcaaattggctcactgggataaagtttgctctgttcagcctacgatggtcattcccacggaaggtcctgcagtcccaatgtatggaacatggattaaaagcgatacaggacggtctaattgttttaatataaggggcaaggggactatcagatcgattgtggccagggaggaggttcctgaatgggacgttgggaaaccatttcggaggcacacctggaaacgaaaccagagatcagaggaggtcaagaacaccactgctacatcgtcgttggagggccaggtgctgggtccagt

SEQ ID NO: 89094 - DNA, 746 bp, Cannabis sativa
tcttaattgtgaaaaaatgccatagaagagtggcaaacctataaatgccatatttttgtaacttttttacaaaatcccatatttgatgtaattttcactttagtaatgttgtgcatatgaatagtcccccggcccaacccataattacaaaagcccaattattaaacaaagcccaacaaaacttgtgcatcaatatatgggttgtgccgagctaacctatatttcgagctgtgtgctagattttgatagaccaatccgtttttattaaagggattattataaaaatactgaattttgtataaaaattaataattttactattacaattttttacaaaaatattgtatttttataaaacaactttaaaacaacaagacagaacaattaaaataacagtaaaacaactaaaaaacaatcgtgaaaactcaacacaatacataatataaaacttatatagtatttttacaaaaaaaaattacctatagtaaaaaaaaacaaaaaaaattaaatataaccgtatgtggtgtaaaaatctcttattaaataggtgaagccatttctgttaaatggaccaaccatttttgaaagggatcataatataggtttatagcaaattggtactttttttcaaaccaatttttgatgtttgaagcataaataaccatattgttgtaattatatcacaaatatgtataaaataattctctaattgtatattatacacataaaaggtttttttttttttt

SEQ ID NO: 89095 - DNA, 557 bp, Cannabis sativa
gatagaaattgtgacatctgagcagagtatacatagacagctaacctgcttccatcaaacaggtggctcgtatgcaccgaccagaaaatgcgagttggcaattttaaaaatatatcttgtatgtccaaaaagcttgcgagtcacgacacaatccttaaattcgtgggacatattcatatcattagagaagaaaataaactattttccaaatttatttcttattgattttggaaaatcaaattgatgtaattaatctctataaatagtggattcatctcactatttaaggacgtgaaattcattcagagagaacactcaagagaaaaaatctgattcaagagtaaaacatttagagatcattgtaagagctttcgagtgagatcaaaacattcttgttcattcttctcataagtcaatacaaatacaggtgagtaggctattaccgtcaataagaagtcgaacctttataaattatggtattttctttaccttacattatttacattttgttattcaattatcctcaatcgctttaatttgactcactgtcgttggct

SEQ ID NO: 89096 - DNA, 913 bp, Cannabis sativa
ttgattcaattctcgattttcctttattttttgtagtttcttttagattcttaaatcatcatatgattcttgagatactagatagtgatcgatccatgtattcttgttcatactaaaatatgtttgctctttagttgaatattttatttctctatttgatattttggaatttctggaatttcatattattatttgtatatttgtttttttggttttcgttctcgactgtaagccctcgaccatcctctcaggtaattttagtgttgccaatcataataatagtaactgagagtggtttgagaattaattttgatttatatgcttttataattcatctgttgtaagttttgttggctatcgaagcttggtttttctaaagatatgtagaataggctgcgcgttattgtcgtttgagaaaatttcagtaattaattttaatattttcatttaataataattaaaaataaaaatgatttatcttttctactaattaattaattaaatcagctttaattataatatttttaagacagtttacatggttttttagttttgattttttgagtaattttctcttttgtagagtgtaaattgttggtttttgttttcttttcaggctttgttttgttgtttttatttttatagattaggtttgtttttggtaagtcttagttttatattagtcttttatattattattagaaataagattagttattttttgatattttattttgtcttaaataagttatactttttatgatattttaaatctttatttttagggtttgtttgatacgccgtattacatggtattgtattgtattatattgaattatgttttatacaatatttttatgtaaaatttatatgtaatattgacttgtatgagcacataaacatataatatttt

SEQ ID NO: 89097 - DNA, 621 bp, Cannabis sativa
aaaagaaaaggaaaaaaaataaaacaggtttttataatttatttatttatataatttttaaattatattttatactattttaatatttaatattacatgcaccactaattttaaaactaaaaattagtatacacgtgagcagtctattgtgaaacttaattgagatttttggacagaagtataaagagaaaaaaggaatagaagttcagtaggttttgccgttaaaattttagattatgtggctaagtgttaacaaaaaagttcaggtaattttgttgacaatatccttaaaataaaatatcatattttttaggtgatacaaatatttttgacaccttaaagaatgaagaaatgctaaaaggtaccatggtgcctagcattctactcggtataataagattattgatttaattaagtattgaatcctatataacttaagataataattttgaaagaatatcactaatcaatagtaaaacatcatctattattaaaagtgttacacattactaatggtcaatattattgttgtaggcaacactacataaagttaatggtgccgccaaaatccaaatgtcctcaaatgatttacgaattgtaaagcttaaacacattggaaac

SEQ ID NO: 89098 - DNA, 1059 bp, Cannabis sativa
  modified_base (613)..(613): a, c, t, g, unknown or other
agttccctttcctttatttttaatcacaatgtgtcactttagtttggggtgtaaacttaaatttttattaattttttttagtttttagtttgttttttttagtcaatttacttaatttgagttaattctaaagtaggtagatagcatgatttgaaaagtatttatttttcaaaaaaatacatgttcttggtgatattactttcttgactaattttaattttgagctttaaaagaacatggaattatattaggtaattttctggtaattttctagtaattgaattggcttacgtatgttaattgtgaaatgtggaaagttgtttgaaaaaaaaaattctagaacttgcttgcttgctatttgaggcgaaataataatttatgcaagacaaggaaagtgatttaggtattctttagatcgattgtgcctttcaagccatccctgtaattttatcctagttaccctttttaagccttaacctattctttgtttctacacatattgagcctagacaagataaacccatgaatatccaaaaatttaaccttaataccataagtagatctttagtttaggagaatttggatgggaagtttgttgtatgtgtgtggaaanaagtgtgaaaattgagagaatatgcaaaacaattgattggcaacaacttaaaaaaaaaagagagagaaaagaaaaggggtattgggattgtgtgaaatatatatatttgggtgacataattggaaaagcttatggtataggcaagcttaaatgaccatttcaactacctttacctaagcctaacactacaagcctagaaagatcttttgattcttagttgtgcattgattaatattagtggagaatagtaagtattgcaagcatatggaatttttagttagtagattgatggttgtaattggcattcataaagtggttcaattgttagttaattgcattctttggtttcatgagttgaatggaatcagaattgaagtgtgtcaatggcgtaattaaactgaaattctaaattgttatgcgtatgtgaaatttttcataatcatgtt

SEQ ID NO: 89099 - DNA, 664 bp, Cannabis sativa
agtatctttaaatacaattataaaaagagagttcatactcaattatttaaactccatcttcttttctttccataagagcaatttcgtatttttttgaagctcacaaattatttaaaataattttaattaatttattcttaagaaaacaattttgtatcatcttttgattatgtttaatgaaataataaaatttattttattatttaattaaacttaagacataatgtgtcttaaatatttaacgggtaaatactattttagaccattgacctatattttccaaaatacactgactttaattcttgacaattatttttttaatataaccaacttgaagacaagtcctaatacgaatagatacagaaaatataaataattttatcataacacctttagatcagattattattaaattttattttgacaaaaaataagttcagagccctatttgtacaattttaaaaaatacagggtctattttgtcatttagcaaaacagagtgtccaattggtaacttttgtaaaatatagggtccaaaatagtgtttacctataattaaaagtggtttcaaattcaaatcataaacaattttattttgattagacataattaaaataaatattattcaaagataaatcttataataaaataacgattaaaaaat

SEQ ID NO: 89100 - DNA, 662 bp, Cannabis sativa
taatatactttatctttcgttctttatatatcacccacataaaaataatataccacactattaaagtaatatacttgaatatctttatttttcgttctttatgcaccaccccatataaaaataatataccacactattaaagtaatatattgacatatgaatataccgtaataaaaaaatccattagaaattaagatcccttcagtgcaacttaaaaaagataataaaaataaataaacacaatgcaaccattaaaattttactcagtttgataatttatagcttatttgattaaaaaaataagacacatttactaattgtaagaggcgagatggcatggacacgagagaatgagaagatagtaaaaagctaggattaattattcaaggttataattgtaattttatcatcaaatttttatccaaatggttattttgctaaatgtttataaaaaggaacattactaacttaatctctaaatttagaaccattttacatctcaaagtataataattaaagagacaggacttggtatctgtcaaaattcaggtgaaaaactccaaattagcctttagatatttacgctaggcaaagaaatttgttatcgtttatatagatttatgggctatttacaaaaatatgggaaaataaagataagtttt

SEQ ID NO: 89101 - DNA, 585 bp, Cannabis sativa
  modified_base (44)..(55): a, c, t, g, unknown or other
agtaaaaaagtaaaaaattccgcctggcagtatttttgtaaaannnnnnnnnnnnttagtataccatgtaaatttccaaaaaaaaaaacatattatctagtgtctagtgagctgggcgaaggatggggccggctaggccctcgcccaagacctccactctagtataaaggcccaattatttttcaaagtactatttttaaatttttatcactttttctaggaaacttatgaaaatactaaaaaataggaaaaatttataaaaatactgagacagagatttttacaaaaatattgcgttaaagttttaaaattataaaaatattgtgtttcagtaaaataaaaaaaaataactcaaaaacaactctagaacaacttaacaaataatatgaaaacaactataaaataataataaaaaaataactacaaatcaataaaaaaaaaaacaaaacattcatataaaaaatcagtctgctatgtctatgatgagatatactgtattgtggtgatattaatacttcctctttgaaataattattaaatatgtaggctttccctcgttgaaatttgacgtttacgaggaaatta

SEQ ID NO: 89102 - DNA, 760 bp, Cannabis sativa
attttaaaagttcctggttttcttattgattataaaactctcttctgtgagtcgatatattcacttcaacaggcagcattgcttccgagccaaatactagcaagaaaggagtgtgtctcatggctattttcttagtagttttgtgggcctagagcacttgaggtagctcgtcaaaccatcttcccttggcagcgtctagcttcttcttgatagtatcctttaaggctttattaacggcttctacttgtccatttgtctgaggtctggatactgacgagaagcttttgataattttattcctctcgcagaattcagtgaacaagtcgccatcaaattggttccatttctggatactatcttcatgggaattccaaacctacagacaattttcttgacaacaaagtcaagaactttcttgtaggttatggagatgaggggctcggccttcgtccatttagtgaagaagtcgactgctactatcgcatacttagctcctcctcgcccagtgggtaatgccccaattaggtcgatcccccatatagcaaatgggtagggcgagatcatcattctaagttctgttggcggtacgcgaggtatatgtgaaaaagtctacacttatcacatttcttaacaaactcgtgtgtgtccttatttatcgttagccagtaatatccttgcctaatgatctttttagacagactttgccaacccacatgatccccacagaagccttcatgaatttctctaatgatttcgtttg

SEQ ID NO: 89103 - DNA, 1061 bp, Cannabis sativa
aataataataacaatataattgtatcacacttaatataccaaataccaatatatgtatataaactggatattacatcttcactaaggctaatatgttaaatatggagactattattggtttgttggacaagtattgtagttggttaggtcaacaatcaatgtgcataagttgaaagttcttttctcttaaaattgtgtcgttggttgcaagaaagagattataaatttcctaaatttttagcttatggaagcatgtgaaaaatttgttggaaacccttgtttgtgaaaagaaaaagcataaaggattttaaattcctggttgatcgtgtctaaagcaaattagaaggttggagggccaagctgttgtctcaatccgctccaacactccttatcaatagtactgtgatacaatcgatccctacatatacaatgtcggtcgtcaatataacaactttagtttgttttgaattggataaggttattagatatttctagcggatcggttcaacagaaaaaactcaatttctatcactaattacttgggataatttatgcaagttgaaagattgtggaggtctcagactttgaagatttaatgatattaatttttgccttctcacaaaactgagttggatacttgcaagtaatcttagtatctttggacataggtgataaaaggaaaatacttcccgaattgctcctttttggagtcaacattgaaatctaattcttctcctctggtctgggtatatggcaagaaagatttcatacgtgacaacttcacttggctggtttgccccaattcaagcattgatatttggcataactcatagaatttatcaaatgatattgatattagtggtggagagcttaatcctttgattcaaaccaagttgcatctcaaagatatcacaactgattcttctaacaatgggatttggataacatcaaatctctctttacccagaatgcaatgtctaaatttgaggttgtccctcttccttctttgcttgatagtgacattcttgttgggttttatgccgtaaataaaactcatttca

SEQ ID NO: 89104 - DNA, 942 bp, Cannabis sativa
atatatatatataaatttgatagtgataaaagacatatatatatttaagcataatattagcataacttaaatatatttttatgataaataacaatataaatacttaaaattttaagtttgtaactgacattataagtactaaatgtttataaaattgtaatttttttctaatttcgtcattattattgtcctaaatagggaatatataaagcctagattctagatcatgtagtttagacaaaatcatatagtatcagttacttttaaatatttttttaataaatttaaaatggagtttgtaccgacgaaactggaaaaaaaattatagttatagaaacattaaatattttttttaattttttttactaaaaaatattgaatatttataccgctaaaaataaacattaattttatacaaaattaaaatattaaatacttatatccatattaattttttttattatcacaaaaatttatttaaattattcttccacataagtgtctttcaataaaaaataacaataattacttatgatataagtaaaattacttaattaatcttaaatacttttattacataaaaaataataataattttttaaaaaagtaaaaggaataataactttcaatacctaaaagcttatatttgcaataaatattttcttttaatttcaaatatacagactacgtacttcactacttccttttcaataaaattgtcataaagattgaaatctaaagtacaaaatttatatatataaaaaagaaatgtaataaggtcacagcagtggttaatagtgtagtgtaggtatatttgtctctgtttggggccaaacttcaaaaactactttattgactttatcgaaactcactcaccccctaattaatttcttcactcccttttcactttatatttttgtaaaaatatgtaatacacattat

SEQ ID NO: 89105 - DNA, 530 bp, Cannabis sativa
aacaaaattgatgagaattttgtcaactttggtataattttgggttaatctcaataaagggataaccttaaaattatggataaaatttatcacattatttgtaagtgataatgtgagtttgatagttaagttttgttgatcgagaaaattaaaaatgtcaaatagtatttttgtgaaagtgaccttaaagagtcatttcaagagaaaaatacacaaaagtgatattttatatacatcttatgatagaattgtgggggtgagcttcaaacttaatcaaaatgtggtgagaaattgttgattagtttatttgatttggaattcaaattctaaatcaattttggctatgtgcatatgcgaaaatattttgacatattttgatgtcaaattttagtgaaaataatttcaagaaggaaattaaatagaaactataaagacaaagtggttttctatattttaaaatcaagatattatcttgatagtgaaatgtgagaaaatgtgggggtgatatccaatatttatcaagcaatttg

SEQ ID NO: 89106 - DNA, 802 bp, Cannabis sativa
agaatctttaactctttgatagcagcatcaattcacatattttcactttgcaggatcttgctagcattattaacagtaaataacaaatcataccaaataaccatgctcaccaagaactcgaaattctaaatattatatatttctaaagtcacagcatcactttttgtggagcttgaaatcttattgctttaacactgtcaacacgacttttccaacgtgtttctaatactggcttaacaatgagacccgatacatgatctctaaaaactttccatcttttttgtagaagctgaaaacaatgagcagattcgttgtaccacactaaaaaaagacacaactttgggacaacaatgagccatatcaaaaagtaaaagattaagagaaagagaagcagaaggagtctaaactgctctaggattcatttcaagtagcctagtttgtacacctttattttttcctttcatattagatccattgtcatatccttgtcctcttatattatcaacatcaagtccaagaatatttaatgcatctaaaagttcattaagaaaaccaagccctgatgtgtcatgaacctttataaattctaaaaaatactcgtcaacaaatatttgagtttctgaaatactcatacatcttacaacaagagacatatgttcatcattacttgcatttggagtacaacctagtatgacggaaaaatattttgcttctttaattctactaattatcaagcctttcacctcatttgccaataactgtatcatttaatttttattcttgttctcaaataatgataatg

SEQ ID NO: 89107 - DNA, 551 bp, Cannabis sativa
taattagtaaaattcaattttatatacaatgtctacagaaaattataaatttgtaataaacttttataaaattataacaaacttttatccagttttataattaaatataaatatggtaaattacaaaatctttcctaaaaaaactatgaaaaatgtaattttttttaaaaaaaatcctatgcatagtgaatcttgtaaattctgtaaaaaagaaaaaaaaaattatcctatacataataaattgaatttttaaaaacagatgatcatatttggtattaaactagatgtaaaacaagagaagtgaagaagacatctgacactctaatactaaaggcaatgtcagcatacttgaaatcaacatacacacttaaatgccattcaccaattctaactaaatcttagtcaattttaatagattccaacacaagatctgctgcagtccccttaagttgttaggtgagaccaaagccatagttacaaattaccaacctacaatgaacttctagggctctgtgtaaattcaaaaatactgtcatgctcaaattcaaatt

SEQ ID NO: 89108 - DNA, 2292 bp, Cannabis sativa
  modified_base (47)..(65): a, c, t, g, unknown or other
  modified_base (351)..(352): a, c, t, g, unknown or other
  modified_base (1662)..(1679): a, c, t, g, unknown or other
ttagtacataaacaatcactggaataataaaattaaatgaaattagnnnnnnnnnnnnnnnnnnnataatctcaatagttcaggaagaatttttaaaaaccttataagttccgagggcataatttggtacatgtcaaagtttcggggaaaaaaatcctaattagccttaaatatatatacaactgtatttgatatatcgtatcattaaaaattaatatactgtaataataaaattatataccacaaagaaattataacaatactaaattaatattcataaaatatctatcatgctaacaaaattatatatatcactattaaaatatgtatacataccaaaaaatttatatnnaataaaataaaaactaaatatcattttaaataaataatatactatagacaccaaaaactatataccatacaacgacagatatatacctacaataaaaaataaaacaaaataatgtaatattattaaaagaattatatattccatattaacaaaattgtatatcacctttatacataataaaataaaaattaaccgtgcatgatctaaaataaaataatatactatacaataaaacttatatataacaaaaaatatataccttacaatagaaatatatatagaataacaacaaattaaaataaaaaaatatataagatgcaaataaaattatatatcatgtcaacaaaattacaatagaaaatagaagttaaatattatttaaaaaaaataaaataccgtataataaaaaatacatataccattcaccaaaatatatatttgaaattgtaccatttcaaataataaaaatattgttataccaaaattcgctaccatttcattggaggacacatgtcagattggaaggagtagggatcaatgcatgaaatggtaattatatttgaaaatgaaataactcaataaatgcggaagtggacagagtatatttacaatttgctcactataaggtcttacgcgagataaggatatatcaactgttgcctcatacattagcgagaaaccatacgtcaaggaatacgcaaggcgaggcatcaacctcgttaagcatgagtagacgtaagcgagatataatgaccgtgaagacacttagcgtataatatacagtatacagactaagtataacagacgggtaaaccgaagcaactgatagcgaggcatccatctcgtcataggaagacatgcgcatgactgtagaagttcaccttgtcgccaagaattgcgattgtcagatggagtgttatgtcttcagcgtaggagcgacgagatttacattatcaaccttgaaaagatacgggaaaagctccagcttgctatcaaggtcattggtacttggttcttattgagacatcctagagcgctatgatttataacgatttaatacacgattattttgacccagttaaagtgaactaatcacagctttgtgatattcaaatattaattgcatttatcttacgtgatatgtaattaaaccccacgatatcaggggataattgttgtaaagatttcagtcaaccctataattaactgcctgactatgcaattataaatagaggcaagtaagactgaaaaagggacgaaaaattcataagagaaaagactagaacaatatcaaaaatctaataagattnnnnnnnnnnnnnnnnnnaatattaactgcaaaaccacgtaaaaaatcctttgtgttcatactttttttttacagcctatagtttttatgtgcaagtttgtgactattaggctcctatctatttaacgaaaatcctcgttaacagtttggttctttcattgagagccttcgtgaaaaagctcagaaaaaatcctccttacatatacaaaacaatctccttcatggctgacaatccagaaaacgctaacacaccacatgaagaaactcatcaccgtcctggaaaggagtccatgggctccagaaggccttccaactcacagtctaaacgaaccacacgctccaagagggcccaacctgagggtggccccagcactcggaccactcgtttcaggaggacccaacctaaggttggccccagtacacgaacgacatgtttaaggaggactcaacaatggaatggccagaatcccggagtgagagatgaagggccccatcgtagaggtgctcaacccacaggtgagggtaaactgccatcttaggcgccgattggaggaggcaaaccagcggaacgctgaattagagtgtgatgcagccgcagctagggcgacacaggggaataacactcaaaatc

SEQ ID NO: 89109 - DNA, 1538 bp, Cannabis sativa
  modified_base (678)..(679): a, c, t, g, unknown or other
tgcccttggaccaacttttgcggtagcaaagcatgaagcgtacattgtaaggggtaaaagttttcatacaaattcaagaaatgatgctcaagaggttcaaaatagtggcatacgtatcgtcgcaaaaaccatgcattttgcaagtgcaaaagatagaaatcatgttttaggtacaatgacatattatggggttattgaaaaaatatgggagctcaattattttgcgttttcaattctactttttaaatattcttaggttgacaacaatgttggagtaaaaactgacgagcttggttttactttggttgatttaagtaagagtgatccattcatcatggctagctaagcagtacaagttttttacatttctaatttggctaatgataaatggtctgttgttttatcgacactagagaggaggttcttagagaatgaagaggatgaggagaatgttgatttatgttatgatgacttcattattgggcaatccattcatgaacaagttatggaaattgattgtaaccttgatgaagatgatgctgaatacattagaaacgatatcaatgagggaatatgggtgaattgtgattcaggcaaagataaacaaaaaaaaagaagagaaaatgtgtctaattggaaacttacttgtgatagcttacttgtgataatgtttgtttnngtagttaatatttgttatagcttacttgtgatattttttatgtacgtagttactctgttatagttaactttatattttgtttgttaatggtgtagatatggctaactcaggttcaggctcaaattctgacccagtagtagagtgtcctagggagatacctaaatgaggtagaattgagatgaatgaaatgtccaagctgatggaccaaggaaaaagacttcctctcctagtaaatgataaatgagagtattatggcagaaactatgccaagctagtatcaactttaggagttatatgtcgtatgacgatagggttgccctatgaaaattggaagcaagtcaaccctgaacttaaagataagatttggaaagatatacaggtaagcagttatttgtgagaattttgatttgtgtttatttaattcagatgttagctctaatcatgtttgttttccttaaaactagacgagttttatagttcaagatgatttcaaacataattgcatgatcattgctgggaagttaatgaaagacttcaagaatagaatgacaaaagacatcattatgctcgcattagaagaaaatgatttgtaacggttggcatacgtccttgaaaaacatcttgaaattgaccaaaaggattggttgaaatttgttcaaagtcgactaactcctgtgtactaagataaaattttaaatacaagtacttgtagctaacatatttttttggcattgtaggaattgagtaaggtgtaaggggaacgtttagtaaaaatctaatctaaacattgaagtggtcggagtgaaatagtgaatgtaagggaagatgtggtaagtaattaataatttctagcaatgtg

SEQ ID NO: 89110 - DNA, 599 bp, Cannabis sativa
cgagcttgtttcagcatttccctaacataattcccaacctgaacattctgccttgtgaaggatctcttaacaccagacaggttcgtgggagagggagatagaatgatgcgagggcattcagaaaccatgacagctttgcctttgtccacactagaaataaccgaggttgtcataataggagcaacaggcagggagcaagtgaggctaggaattccaacaaatgatggcgctgaaaaagtcatagaaagcccaagagtggagtggtcagactgaggaacattagttaaatcaaccaaagacaaggaagtgttaaccagattaggaaccagaaactggttgatagcatcctgaagactctgattagaaacagagcttcgtgaagaagattcttcaaacagagtggagttggagagatcgaaaatactctttttataaacagactttccaggggcccttaaaacatctttatagcttaaaaatggtgggacaggggagaaatcacagaattttagaagcttttcacacctattaaaagtgtggtcaagcataccacagtaataacaatagttttgaatcccctcatgttgggttttatgccc

SEQ ID NO: 89111 - DNA, 748 bp, Cannabis sativa
gtttggtttggtttgatcattttattagtctggtttggttttgaatttttaaaaaaccgcaatagtggtttggtttgaaaaaattgaaaatccagagcaaaccaatgtgaacaccgctaagtttgaactacccttcttaaatattttagaggccctattctaatttttaaaattaggcttttacaaaaaaagtataatttataaaaaatatttttaaatattatcatacggttatatattttaaaaaataccaaaaattctaattattttattaaaattgttattgattccaatacaataaaaaaaataataggaaaatgaatataaattatttaataaaagtaataaataacaattttttttttgcttaaaatagtaatagaattgaaaatgagcttttagaaatcaggatagaagtgtccattaatgacaagttgttaacctcttaaaaagttaggttcattaatcaaaactgaaaggcattaaagaaaaaatgtattggattctttattttttggggacctgtacagtagcccaacttgcacaccataagggccggccttgcccttcagttggagactatgtgtgcctttgggggctgactatatagttagaccaacagttgaagtaaaagccacacatccaattctcacttgagcttcttgataggtccgagcaaacgaaaagacccagctctatataccttagaaatcaagaatcttttagtcatgaacctaataattttgag

SEQ ID NO: 89112 - DNA, 825 bp, Cannabis sativa
agctacctcgagtttgttatattcagcaattgctaaattagctgcatcaatagcatatttacaagaagaaatgcccaagattttctgataccagttccttttgtgttgattaggaagataatcaacatgaaaaccctataaagaattaatattagatctaattaatgtacaattggagaaagagagaaagtattaagtaatagtaagaatacatacatcagtttcaataagttgtttgttcacaatggcccagtcttgttcatattcatcatcttcttcatcggatgaatctgaaactggtaggctagctttaagttccctaataataagtagaacaagaatattattaaaactaataataaatgcataataatatatacataaaaagaaagaaagaaaagcaattaaatataagaaacaacagcaataataataataccttgatttggttatcctttcatcttcaacaagaataaaatcgttgtcatcttcatcttcatcttcatcttgagagtcataatcattatcttctttttcttcttcaccagatgatgatgaatatgataaatctgtttcttttttgtctgtgtctgctgctaacaaacatttgccttccctaatttcatcaaccacctctgccatctctgccattagattatcagattagactaacaagttgagtaaatattagacaccctcgaaaatagattagacaactaattagcatcgatcagatatatattatagaaaagcatattaatttcattcaaacaaaaacaaaccgatggtgtgtaattatataatcagagccctaaaacaccaaaa

SEQ ID NO: 89113 - DNA, 921 bp, Cannabis sativa
tatttattgaatctttctcaattaaattatagagcacctaacataaaactaagtatatgtgtcttgcacgtaatttttttctagtatatatatatattacaatgtacaatttaaaattcgatcccagatttcttcacacaccctcccatacctggcttctagcttgaacctcaagtaattttttttcatcatcaattatacttaatatttgtagtcatcttcattttttttaaaatacacttattattatatatacctattctatataaaatgtggctatgtaacataatttttagttttttacattaacttcaactgaatatactattaattttataatatttgttatatatatttaattgaatatactattttgagaattttttttattaattttacattattattatacatatatttaaacataaaaaaaaaattgatgaatatgatcaattgtattgctcaaccaaacatttacaaacaccaattattactcaactatgtatcattaaaaatatatatgtatatatattgatactttacataaataaatttaactttaaatttaaaatacttaaaatattataaataggtttaaccatattaaaaaaattcttaaaaattaaaatctcaaacccaattttaaaaattaaaaaattacctaattaaaaaaaaataaactaattatacttgcattgcagattaaactaaacttgacattaatctagtatgtatttattaggagtgttcacggattggtttggttcgaatttttatagtttttgaactaaatcagtataacagttttttgaatattaaaaattaaaccagaccaaaaaaatttcaaaccaaaccattaagaacgattttgtttggttcggaaccacagtttaagtgaaatttataattattcatattttt

SEQ ID NO: 89114 - DNA, 1125 bp, Cannabis sativa
aatagaattaaaaaaatattacaactatgtatagtgaattttttctgaaaaattattattattgttttgactttggtatatatttttattaaaaaatttgtgtttaattaactcattatttgatttattttatatacatttaacaataactttaaatataagtcatcactacaaatgagatacgatgatgataacggttttaaattatcaacttagttttatatttttatatgtaaaaatatattatatatatataaatttatatatttttttgattaaatataaatttatatcttacctaatatataaaatgcctatctaacagtttttgttgtgcacttaacagaatataccaaaaattttaacagaatataccaaaaaaacagttaactttaacagacacctattcaattcataagtaaaccaattttatttacaaaaaattatacagaccaagacaacctttcgtcatttgcacaagcaccaattcattcacacaactcataaatcataaataaaacaaattgtgactcttcaaaaagttgcaaaaaaatacattaattaatagtataaattaaatgtttcataatcataattcaggacagttggaattcgtttcttaaaccaatacgatttcgaaaattgatcagcccctggcaatgatcaagatgttgtgccatttagaatagaagaagaagaaaagaaaatattagaagaaccctttccctagctgccattagaagataaaaagaagaaacttgaaataacccttgaaatccctattggtgtgctgctgttagagtagaagagaaaatattgaatattgttagaaaaccctaagcctaaatgttgtggctgctgccgttaggttaagaagaagtgttttgaaaagatttaaatttttagagagggaagtagtgtggctgccgtagcttttgtgtgttagggttagaatattaccttatatatatctagggttaagtaattagggtttttgtgtctacttgggctgatcttgtgagaaaagagtctttgactcttgttgggctgaaagttctttgggccaatccaattaaagagagtaaagaattaaagatatgcccattcttattttcattttttcac

SEQ ID NO: 89115 - DNA, 1116 bp, Cannabis sativa
gatggtggggcccgccaatagaaaagaaaaggaagaaagagaaaatgaaaaaaaatgaagaaaactgaaaaagaaataattaggcttttcaaatggactttttatatttttttcccactttgcctcaatttaaaaaataacacaaaaaataaaataaattaagtattttcatttgaacaaattttaccattaaaaataaagaatatttaatttatattaattatatgagcataaataagagagtataatgtatcaatttgagcccttatcacaactcccaactaacgtatcatttcaagtgacaaagaaaaataatgtcaacatgatattttcaggtcaaaaattttaaaaatgacacaaacattcaagcaaaatgttagtaacaaactaatacgaactatacaaacttatcttgaataaatctagagttgtgagtgtgtgcaccaaacctgaaccttcttaccgcaaaccataacacaaatgcatcaaaaaatacaccaagtggaagtctcaacttcattagcctcacaggtttttgaaaatatgtattcatggctaaggttatgtataacgatttctaagcatcaatacaaattcaaaagttattttctcaaatctcatcactcacaaaaatatgaacacttaaatttgaaatattttataaacaaatatgtgctaataaccatcttaccataaaatctggcatgtgcatttataactctaaaaaaattccaagtaaaaaaaaaagatagcaaaaattgacttaaaaataaaattttacaagaataaatgagtaattttaaaaaaatttgactataaaagtattaatatgacaaaatgcaaattataatgcttgaatatgtttaccacccgcaactaaagttagacggtgtcctcaatatctaaaaatatagaaattcaaaaataattgagaaagagaacaactggagagcaagcaaccatggtggcagcgatattgatcctctaaacataaaatctaaaaaaaatgataataaataacaaaaaaaaatgacaaaaaaaaaaaagagagagaaagaaaagaatttttttttctaccttgaggatgaagaacacttgaaggcttgatgaagatga

SEQ ID NO: 89116 - DNA, 1895 bp, Cannabis sativa
  modified_base (1504)..(1504): a, c, t, g, unknown or other
ggtaaaataattccaacacttttacgatataaagacaaggttggtgtatcagtcagataaggatactgaataataggttctaaatgagtttcatattacatcatacttttctaaactcggaagtagccatagacttcttggttggattatcaagaatagtagagttctatgattttatctaggtaattttagacattacaaatgaatatacaaagtcaacacacttttacctaggaggactacgtatacggtgaatcaatatgttgatctatacatcaaggaaatagtttgacttcgtggtgctcccaaggtcgatcgtctcagatcgagatctataactcacatcccagggttgggagagtttgcaacgtgctatgaatatcgagttagaattcggtatagcttttcacccttagactgaaggtcaatctgagagaactattcagatatctgaggttatgttatgggtgtgtgtattagattttgatggttcttggaataagtattttttttccttgatgaagttttatacaataataattatcagggtactattggtgtggtaccgtacgaaatcctttgcagaaattcggtggatggaggtaccttggccctgatgcggtccaaggaacgagtaaggtcataagaaagattcaagatcgtatgattgcttaacagaatagacagaagagctatgctgattccaagcatagtgatattgaattctaggttgggaattttgcctttcttcaggtgtttttttttagtgaatcgaactcgaaaattgaaatggaagaaaggttaactcctagaattaccggttcgtttgagtttctggaaggggtaggttgggtagcttattagctagccatacttcctattttacctagagtttacagcgaagactttatcgctagttaaagtactgtgaaaaaaaaaacaacaggtctaaaatgcgacttgggagttagagtcccacttgggggaactgtttccccggatagttcagataaatttcgaggacgaaatttctacaaggaggggatagttgtaatatcctagaaaatataataatatttatttggacatattttattaaatatgtaattatatgaatattaaagtaagattataatcttacttaaacaattacgagttgattagtggatttttagtaaatgaacaaataaagcgtaatttataaattacggagatttatatagcatgtgtgaatgtaatatgagatatttgtggaatataaatattttcaggtttggcgaccttagaaactcgatcgggggctaaaaatgtcacaacggtattagttagtaatgttgatggaattattaagataagttgattatagaattactggggtattttggggtactcaggattgaccaaatactctacggttagaaatttcttattgactaagaaataataaaataatcttttattattattatgattattattatcctttttttattattattattantattattattattattactactactagtattgttgttgttgttgtttattttttatatatataaagtttttatatatatatatacttattggtaagcattaaaaaagaagcaaacccttacttctccttctctttctctcaagcaagaaaaagccagccaagagaccaagtaccattagcattttctatccaatttcatcatttttcatcataagttgcagctaggagaagactcttgttggaagggaacatcaaggtaatgaccttagcttctcctcctttccttttccatggaaactataggttttggagggtgagtttttgtgttgtaattgttgtgggtttagcaggattttgttatgattccaggataaaatagatgtgttcttga

SEQ ID NO: 89117 - DNA, 660 bp, Cannabis sativa
gagctagagatccctagccagcccaccgtgccactggttgtcgtgatctagctgttctcaccatttgacctttaaggaaaggtttgtcctccctctagaagtggaagatctatcctagttcttgaggaacttggtggaagtcttccttgaagtggatctttgaggagatcttggcttcttctatcgattctctggttgaaccgtcttattagatccctggcctctcaattacgatgatctaactttacttggtgagatcgaaggatgtactcccggtcatccatccatcttaggaattcgcatctctgctgagcaaaaacatcacaatcagtagtgcatggttcttcagtaggtctgcacggcctatagcttccctaagtctagacaacttaaggtcttctcctaagtctaggcgaggctcgccaatcacaggctcaccaactcctaagcttgtctctccaacgtagaatcggagtcgagatccagttgttgttccaatgggctatcgcccttgggtccttccttcaatgagaggtgccaatcgtgggtctactcttggtgggataggtctgccacttggatccactggggtgctcgttccagtttagccagctgttgtggccaggcttatggctcctgttatggtgataggattcacca

SEQ ID NO: 89118 - DNA, 804 bp, Cannabis sativa
cttatttcttccgtgaaggtagtgcctggtgttgaattggggaggtgacaattgtgtaggtcccttgttttctttgttgttatggttgatacaaaacagagaaatgacagggtgaccttgtacgacccccacacgaccagaatagctatacggggtcacatcaagattgtagaaggggttcccctgcctcatgctgatattagatttggaacgggtcatgagaatgggagttctggggctaaattcaattgtgtggaggatgtacaggttaggaggaagagacacaagccttgcgtcatcctaaccaattatcctttaggttgttatgataacgacgataaactgttgaacaagcccagtgagccttccgtactcggcttagaccatgtctagaacgaatcccttaagtctgagattcttgatgcaagttcacaaagggataggtggatttcccctgtttcagctctctcgaaggacagttttaagagaatgcaggctgctgggctggtaaagggtatctgttgtaagataccttccccaaatcaactagtgcataagttggctctcaaatggatggtgtggtcagaatgctatattgatcaaggtgtcgtactacctcttcatttgtactttcgtgacattgctgcttttttcaagatgtgtctaacacaaatcaccccagaaggtatcaggtaccttttagtgatgtttgttctttataaggagctaggctggtcctaacccactccttatgaggtcagatactattttgacttggactttacttcatagcaacatcggttt

SEQ ID NO: 89119 - DNA, 792 bp, Cannabis sativa
ccataggatgaaattattagaacctgtgaacttgtccacctcaaatcttgttgcaaccattcaaaccaggttcttcatagcctaaatttagttcttgaaaggttaaagatgaatcttaattggttaaatgtgattcttgaacactaaaccttgagctcccatttgtggtgaaagatcaccatcaaaacaccactgttacaatagtagtagcgttcaagaacacataatcataaattaaaaccaatcacaagaattaaaactaaatgtaaatggaaacaaggcaagaataaaacttagctcgaaaatgaataaatcttgcatctttattgagtatattttttatcattactatttgagtgtacaatgttcaatgagctaaggtgatcaacaccattacaaatcaaaatctcatactgaaacacacaagagacatgtttataaatcttcaatacacacaaaatctggcaatgaattaggaagagagagatatatttcctgttgtgaggctcaagtgaaactctactcattgggtgagtggtgatttatttttataggtattagttagttaggtagtcctagaatggaggagaccaattaacaaaactaacttccttgatgactaggataagtgtcatgatgtggtatttgtttatttggactaatcaccaacatatatattaaccatactttaatatatatatatgtcacatatattgctttaatctatattatattataccatataatataacagatctttttgtatccgcatttatttttgttaaatctatc

SEQ ID NO: 89120 - DNA, 614 bp, Cannabis sativa
tcatctactttatattattttataacacatagttatttcttactaaatataatactgctcacatattaattttttatgatgatttagtcaaacaacatatattctctttaattacctgtaatctaagttcttatattaataactttatagatattttgttcatctgttgcgatcaatttctcattcatgaactccccaaacagtcatgactcgatattcgaatgttgttggagtctcataataagagagtgggacttttgtgcatatatcttcttctcgtcttcttcatgcttgtcctatctcttggtttcaaaaagtcttttgaaacaaaaacaaatgagaaagtaataaaagattgagagagagagagatagaaagggtgtataaggaactcaaatgacaaatgaatcatctatatctatatttataaataaaaaaaaatatatcaaagagtttaggtggcaatctatataagcttttcttcttaatctcttttttctcatttttttttctttttgatttagttcattttaatttctaggagggtgtatataagtttctctatacaaacattaaaatttaatgccagatattgaaaacttttgattttttat

SEQ ID NO: 89121 - DNA, 771 bp, Cannabis sativa
ttcttgttgtggggttgtgtacaggacatattagaaatactgaacttgcccattttgatcataaatggctataggatctcgaaacctttcatgaggttggttgggtgtttctacatggggacggaagttctggctattttttccaaggtgtctccctagtaatatctggccatctaccgtggggcccacatttatatgtggcctaggaattgacggtccgggttgcagggggttttgggtgtaagtcgttgggggaacattcgacccatgctaattctcaagcagaacatacatattttttcctctgttaggatccctaacgagggggatatcctcttgcaatttctatctggttcattgattaaattgtcttatcaactatgtgattttgcatgatcggttgttaattgcctcttgttgagcccttaggctttctacctatctatccatccactcgtggaaaagcctcttttgttgtgcaaaatattcattcacggtttctcgggtttctgcctgatcgtgatgaagggtgttagtgtgattccaaatttgggacacagcttccctcaaattatgcaatttggtatcatcatcgactgtcacctcatgttcaccaactggtgccctccggcaattgggctagtctctccaacaccatgggtactggtagtttcagtattttgagtgcctacagtaataccaattccaagagaagtgttgtttgaatcattcgcatgagaatttctcagatttgcaagagtttggacattc

SEQ ID NO: 89122 - DNA, 601 bp, Cannabis sativa
catttttggaaataacaaaaaattaaatgagaaaactctaatttataaaatattacttaaaaaaaaaaagattttcaatttatatgcttaaaaaaatagtgcgaattttataatccaataaaataagagccttattactctttaaaagggtttatttggtacatcgtgttatattgtatcgtatagtattgtgttggattatattatattgtattaatattatttaatacaataatatgtttggtattgacttgtatttatagtttgtgcaaaattatattatctttaccataaactcgaccccaacttcaactctcattcaggtctagggtttggggcccaaggtcgagtccaggtcctagtcgaggttcggagttctgggccgggactggggttgagtctggcgtccgacgctgagtttgggatctgggtttggagttgaagtccgaggttcaggtccagggttcgggaccggggttagggtctctaactctggaccctttgtaaatattataatacaagctactacaaagtattttttatgtattaaataatacattgttttatccaaacataatgttacttgttatttaatataata

SEQ ID NO: 89123 - DNA, 697 bp, Cannabis sativa
aaatatattttattgttacttttttttttactttataatgtatttaatactaaaatataaatttacattaatttttaacatgttatgcaatgtagaaacactcaaatcctgggtccgccactggctaatatacaaacacttaaagtaatgtaaatgtatatttatttaagttttcaatttaatttttatttatgtttattatatataatttatactcaaattaattatatgaataataaaacaatatatataaaaaattatgctaaaatacaaaattataaagctgaaaaaaaaaccataggaagacctatggcgtcagttattatacaataactgatgccatagagtccctatgacgtcggttattttttacccccgtgcctggaacagcgtcagtagtgaaatttgtcaaaaccgacgctaaaaccccttaaaaactgcctcttaagcctaattatgtaatagtgttttgaaagaaaaactacaaaatattaacataaagtattcagtctacaaataactttgttttaaaagaacttataatgttaataaattatgtttaattatatttaatttataattagcacaaatttctatataaaagacagttgacaagaattataaaatattatattattatttagatgctatatatttttttttcaatctatataataactgttgggattttatgccc

SEQ ID NO: 89124 - DNA, 863 bp, Cannabis sativa
  modified_base (829)..(838): a, c, t, g, unknown or other
ggtatttaaatatttttgtgttgggtccatatgactcatgcttgccctatgatgtaggtaagggcaagggaaagtagattagccatgagttgcaacttgaagcagcgaatgtacgtatcttatgatagaaaaattgtccttttgcttgctaatttcctttataaaattaagatcctacttttaagctcgtgccacgaaggtattaaccaacgatcctctctgctaagtgcttcacaaataggaatcatccagaagactgttcaaatgggctatggaacttagccaatttgatattcaatatacgccccaggtttcagtcaagggataggccttagctgacttcatagtagaatctaggatgaacgaccttccagatgagcaagtcctgggactgctagtttggaaggtttatgttaatggaacgtcaaacaaaaaggagccagatcaggaataattttaatttctctgcaaggacatcaactccaatgtgccctacactttgagtttgcagccatgaacaataaggcaaaacttgagtctatgttagtaggcccgtaattggctaaggaagtaggagcccaaaaaatgaagtgtacaacaactctcagctcgtgataaatcagatatcgggagagtatcaaggcaagtgtgagaaaatggatacctaagtgacatgatctagaaaattattgtgaggtttcaaaggctacagtatctactaggtcttgaggggtcaaaactcattcgtgcacatgctagccaaacttgcaatggaatcagggattgtgtaatatggagtggtaccaattgtgttggaattattttaccnnnnnnnnnnatttactaacaagtatgttatttaa

SEQ ID NO: 89125 - DNA, 1173 bp, Cannabis sativa
  modified_base (302)..(311): a, c, t, g, unknown or other
tacgtaagtaagggcgttacaggttattactatgaccatgacccaaacttgatgcaaatgactaaagaactagaagctactcagacagagttagcagagcagaaaaaactcactgagaaaatgaaaagaatcatggagtgtctccaaaataagttcgaggacttgacagagtttgacgatgacccattggtggaaataatggctgaagtgcgtgctcctgggcaaactaatgtcaaaacactactacaatgtgggcctttagaggctgttttcaaccaaatttataaaaagggaagctaaannnnnnnnnnaatacccgcctagtttgaaattgacatttaaaggtaattttttgataaaaactgtaggtataaaaattaataatacttatgccgtttttgagctggtattattacacatacgacgtcggttattaggaaaataaccgacgccataggtggacacgtgctagtaaaccgtgcacctatggcattataccgatgccataggtggtatatatacactatcaaggcttcgtcttccccacttcgaccttcttcctcatacacgataaccaacaaccataacagcacccatacccacggaaaaaccctcgccaaccacccataaaaaaccctcattctccctcatttcttcaccattttaccccatttttgttttaaaatcttctatttttaatacctaaacctatattgtaaaaaagtttagttttttttttcctctatcactataaccgaacctattaaaaaaaaggtggtgttataactccgaccaccgattttggtggagaaaacgttgaatctcaacgtccattaaggtataaatataatttctattcattttattaatgttcattgcttttttttctttttcgtaattttttttttggattttcctattttattaatattatgttgttgtgtgtgcatggtgaccgaatttttgttgtaatttatcgccggattatatttgtaaggtaaatatttattaacttgatatataacatatatgtatatattttgtattttattaaatatatgtttatatattgtgtgtatatattatctgtgtaaattgtgtaattatattgtattgtgaatgagaatgaggtagtaggaatttaattagtttataaataaagtttttaaaatt

SEQ ID NO: 89126 - DNA, 511 bp, Cannabis sativa
taatcttttatcccctcttgactgttgtgattcctcataatgtagccgtcactagactcatcgattatagtgtaatcaccgtaaaagggagcttacgccatatgtcatgacgtttatggaggtttcaatacgtcttcccccatgtagtattaaatgtgaagtgatcgttcaagtaatctctatgcctcccagaactaccttagcgtggctctagcctcccggagagtaaagatgtgtcttatgctctcctccgggaggcaccttccctgaggtgttccttttttgtctaagacttagttgattttgatgagtgatggttcctccagatccacgtgtcacctttatccgcgtccacgtattttgggaaaaatcaaaggcaacactacctatttttttattcttttttatttattaaagtttgaatttttctttttattgagtttttttctcacattttttttctctttctcttctctttctatttatcttttttatttctctctctctctct

SEQ ID NO: 89127 - DNA, 570 bp, Cannabis sativa
atgtatatatgctagttaaaacatctactttgcacttgcaaattatgttatggtcttacaatagtttgtataattttttatgcgtttatttggtacattatattagattatatgttttattaaattgtgttatatattatacttttatatatattatattaaattttaatttaaattacaagttagtatcaaatatttatttcactatataaaaatataacacatgatacaattcaatataataccatcttaataaatggaacatatgatacataatttaaaaatatatgtattataattggtacaaatatttttttaaagaattattagctaatacaaatttaaatattttatgtttagattattaatttaacaaaataaatattataacgatattgttatatacatagtaatattgaaataatcataaaatcaatttttttcaaaaggaaaaaaaaatcttcatataagcatcactacaagaaaaatgagtattaatgaggacaaatttcgttggtaaaaacccccattttcgttagtattcctcatcaatgaggacatttcgttggt

SEQ ID NO: 89128 - DNA, 623 bp, Cannabis sativa
  modified_base (582)..(582): a, c, t, g, unknown or other
tctataaaattcttgtgtctttatcttctttactatattccactcgtattaaactacttgtcgcttacaaaattagactcactgtcattgactaaaagtgaggacaacatttggtatgcagtttgaccgtatgtctacagagccaaaatcatgtttgtttctggtagaaggctaaaagctgagaatgctctttaagggggtaccctggtgtcagctctccaccaccccctggcaccttgatgctaagtgagctactactagtcaatggggctagtaggacggccatatgaggaccacaaggggactcatatgtctccatgagttggagtactcatgaacattatcggcccgacctgcattgcgtttaagaagcttccaaaggttaatgggtacgtttcccttggcttgccggtatgtcgcttacacgggatgtggcctaaacttaccagagatgttgtggtgtgccttggccacgagtgtcaacacgagatgacacgagtagtcattcgtgggctactttgcatacacgtatgggacggatgcaccatgctggaattggacagaggtctaatgtatgcaacnagtttggtagcttgtctcgagggcctgccaacatgcgtgga

SEQ ID NO: 89129 - DNA, 826 bp, Cannabis sativa
attattaacagcaacatccaaaggatcggaaggatggttaaatgtagtacttgtaggaccagagttagtactagctagtactaattttatcttcgtctctatataattgaacaaagaaatcgaatgtttgaaaatcctaatcaataataaataaaattttgttaattagtactttagtacttaattaatggtatgtatgtgattgaaatatatataaatcaattgaaacttttaaatttgtaattcatatagcaataaatattactcaatttagtaattattgttttattggagcattctcataagcttcttttctttattctttaaaatataacaccaaacataacttttttttattattttacctcaaatttttacaatacaccatacatgtttattatcatttcatattaattaaatcatatatttttcattatatatacgttataaaaatatgaataaagtatcagggccggtctaagcattttggaggccttgtgcaaaattttaaaattgggctctttagaaagaaaaaaaaacgtgtacattaaaactacgattctattactaactttttttttttaagattcgttcataaattttgaattataaattttttatttatgtatatataatagaaaaaaaaaataggggtcttgtgcaatggcccaagctgcccaatgcttgggccgaccctgtaaagtattatttttatattgattaagtattttttttaaaaaaaaaaataaaatatcatatatatatatatataaatgtttacgtaataaatagtattgtttctttatatgtaaatgaacactattgt

SEQ ID NO: 89130 - DNA, 1704 bp, Cannabis sativa
ttaacttggataagtgttttggggctaatttcataattggcaagcttgaaatgagaaatagattctcttgggagtaaaagtgggactggagggtgtaacctcaaagtttctttgattaccattttgagatattgaagttgatgaatgtcattttctgtgaccttttcttttctcaaacctctaacttcattctgtacttttttcattactctaaggttcttagcaagctctgtcattgcccaagttaaggtgattgcaccagtgtccataccagcaagaaagatatcctaacacaaagataaattcagacttggaaaattaagtttttattttaattagaatagacattatttttaagaatatgatttaatctttttgataaatttaaaattgagtattgttgtaatcttatgaggccaataataaattatatcaatgaacttataccaagtatcaagcaacactgaaagagttcaaaaacttttaactcgagcagagtaaagacagaggaagaagaagcaatggaaatatgatttggggaaaattaatagctataacaaactctggtacaaaagaattagttacatagtgttagaattgtggaagtgtatagttgaggaagtatggataggtgagtgtatggtatagtgcatgaggttccatctcaaaattacaataagaggagtggctcatgcaacttatgtgtatggtatttagtttccactgactctctaacatcctctctcaagatagttagtggctcttttggttcactatccccgaatcacaagtggctcttttcgctcacagtagttctttttggcttattatccctgaatcacaagcgactcttttggctcatctttttggatgttaagaatcatgaggtttcatcttcaaatcaattggcaaaaagaggagtagcacatacatcttatgtatgatatttagttttcacatattgtcaaatcttgcacagcaactaacatcctaactgaaactaaccgttttcacgctataaattataaatttttataggcaatcacaaaaagtcatttcaaaattttaccaatcataagctaaacaatatttatataaatctaatcaattactatacttaccgtgagaacagccttagtacagtctctagtgaatttaaaatctgcatactcagattcacttctctctatacacagcagccaatcaacaatgtcttcctttccttcttctggtgttcttttcaaatgttcatcaatgacactacaaaagaagtcatccaattcatgaaaactcctctcaaatcttgcatgaagaccactcaaccggtcaataatccaacccacataaggaaaaagatcagaagctgtgaaggtcccaactacagtcattgctctatgaataatatcttcaagtgtatcactgtctagaccacactcttggaacctcttcccaaaggcagtcctcagagtcacacttgccatgagactatacatcttttcacttagatttacaggagtagccgaaggagaacactccttgagaaattctatcaaagaatctatctcttcttctctaacgaactgaaaagattgaacacttttaacactaaatagtttaagaacacatatttttcgaacctgtctccagtgctcaccataaggtgcgaaagacaagtcaagtttgttataagaaagttttgccaaa

SEQ ID NO: 89131 - DNA, 692 bp, Cannabis sativa
aaggatagcagaaatatattaaacatcgatatgccacgcaatacaatctctggtgaatgactatatttatattttcattatattctttaactttttttttttttttgtgtttattttcaaatattttatttatttaaataattttttaaaagataacgtataatttttatacataatttacatttactttctcactgccagataattcttttcgctgccatatgtctctttcgctgccattattgaacatgcaacttattaggtatttctaatatgatatactgactgagtgaagcttcaacaaaaattcttgaaggtttgaatatgatgagatgagatgagccacgatgcatgaataaagtccaaacaacaattaatataggaaggatacgtgtgtggtactttgtcgtaatataatttttgaaattttcataaattaacacatccggaatttgtcttaaatgaagaaagtggtacttgaatttaaatttacaaacagtaggtctttatatttacataaattaaaaaggaatgacaaaattattgagtctaaagacctcagtttaagttcagtgtattttgattaaaattaaaataaaaattatagtatccactttattatcggccttgaagtaatgacagagtggcttcattcagtgagcatttagttatgttttggggttgacgttctc

SEQ ID NO: 89132 - DNA, 587 bp, Cannabis sativa
accccaattgcttcggtcacattttagtatttattaaaggtcacttttaatttagtcgcaaaaaatttatttgtaactaaatttttttttactaaaaactaaattagtgataatttttattttagaaatgctaaagggcacccatgatacctaacactctgtgaggtgtaatatcaatattagtataacttaatattaaatctcacttattttttttttattttttttttgaataaaatctcacttattttaatttaaataaaattataatactcttttttgggtagtgttcatactttattttatatggaataaattaaataataaaatgttgagtcaaatataaaaatgtgactactccacttattttaagacggaagctatgattatcaaccttaattagtagtctcctttatgtataatgagtagactaattaacttattgaataagctatagttgactatggtagctgaataataatttaaagttgactgcatcagataatattagagaaatgttaaaagggtatcagtggtgtctagcaccctcctatgtgtcaatatcgctattggtctaactaagtatc

SEQ ID NO: 89133 - DNA, 503 bp, Cannabis sativa
acgaattaaatacattaagttacaattctgttacttccgtcactactattatgttaaatcctattcaaacaagagatatttttttatgaatcaaagattttcattgcactaacaactgatttgtacaacctaaagcctcccatatgtatgatcatctatacataagaaaatacaataactcaaactaatctatgtctctatgatctacttgtttaggcataacacaagttatcctagtctagatgtgccatttagcgtcctggattaacaaattaggactaacaatacttaattgcgaaaatctattattcctagcttgacatatttgatacaccaaggctactacagatgcaactaagaccatcttcttgaatttactcctcttggatccatcaatccacctgagaaaatcctgtaagacaacagagtgtgcattccatcagagccaagattttagctgatggaggcattctcgagagaataaacactcaaagaagagatga

SEQ ID NO: 89134 - DNA, 500 bp, Cannabis sativa
gtacttgtgttaaacgggttaattaaggaataattacaccctgaaatttttaatttttctatttttatactatagagtagaatttttttacaaaatactctgtaagttttatattgtgtatggtgttaagtttttattgttattttacggttgatttttagttgtttaactgttgtttttaattgttatgttttgttgttttacggatttttatgaaaacgatattttttttgtaaaaaattccgtgtggtattaaaattataaactttaactcaaaatttaatatttttgtaaaaatctcttaattaataagattatgattttttgaagggtaaattgcggcaaaaccttcaataattttattttgcttacattcaattcccatgactcaaattttggcggtaaaacttctaattctatttattagcaatttaacaataggtaaattgcggcataaatacctaatgttttttattttatacacttaaatatctaatgtt

SEQ ID NO: 89135 - DNA, 575 bp, Cannabis sativa
  modified_base (483)..(500): a, c, t, g, unknown or other
tccacaaaacatacacggacccgaagtcttaccaaatatgcactgaagtcttgatccgaatggtagaacatcacaacaaagtttccacaaaaacagttttgacttccaaaaacagtttgagccttatcttattgataccacaatttttttagatatgcgaggtgtacctttcttgatatagcaagatctcttgccgttaatattatgaagtacttttaatattgcaaaccactttaaataccgtgagttctatatagtcaagtacttctcacaaagagggtaaatttatgcaataacaaagattatctttcatctaatatgtaaatttaaaatatagctaatagtaagccaaaatatgctcaatatttgttatgatgtaaaccgtgttatttgcttaacaaaattaacaatacgtagttattaaaaaaaaacaaaactaataattaaggtgtcgtttgttaacacttttgttttttaattttnnnnnnnnnnnnnnnnnntaaaatttttgttttttaaaaaattatttttgaaaaacaaaaatgcgttcgataaccacttttgtttttcaattt

SEQ ID NO: 89136 - DNA, 762 bp, Cannabis sativa
atcaacacttttactaatctttctttgggtttattttttctttttgtaatactttgtttagctctctatgtgacggaattagatttgtcttcgatggtgacgagactggatttatgggctctatttaagcattgccacgagtaggttcaaggtaatttttattatttaatatttgaattctacaattttcttgttctcactataccgatgaccatcaattgcagaaaaaagctctcaacttgtgaggccttctctgcaatcacttatttataaagtaaatccaaataattgtttatttgtacatgaattgttgattttgctttttttatctctaaataaatttgttggaggcacaaataaccttgaagttataatgagccataacaaacagtgaaagaaagaaaaactacttcctactataatttgattaagagaaagagatggtggaaaagtgagagatgtgaatacgtatacttaaacctgttttataaatattgattagttgtgcaaagatttaattttttttttacttcaataactctctttctataggttacttgtacttcatatttgtttcataaagtagtattaacagttggatgaattataaaaccaaccatatgactataattacaatatttctatatgagtctcgttagcttgtgagcaatgatatagagctactttaagaattcaaatactaacactagcatattgttcacaattcagtgattaaacttttttagctaattagtacttagt

SEQ ID NO: 89137 - DNA, 682 bp, Cannabis sativa
ctaatataactatgaatttaactattaatgtgcctagcttatttcaatattttaaaaaatctagagcaataatgtatctcgataccctctctcaagtgtcgcataaagaatgtaaaaataatagtctatctctttataccaccattaaaccccactttcattaagtcttgctctagaaacaactctaaaaattccacctcttgatttcacaattagaattatttcggttacataagtaaatgcttatctctcaattttacgctacctatgttgatctatccaatgctgatctatccaatgcttgattgttcaaaaattctcctctcatggaataaattttacaatctagataatcatataaaatagaacaatatataacacataattatggaaccaattaaacaaggtagaatcacatgaaacatattagatggaactaaattttgcactaactcaaaaaaattaaaatcataattagatgtccatctaaaccttaacatctaagaaaactagccttacatagtataatttatcgtctcaattattatttaaaatctaaacactaccacaagaaaaggccttttatcccggtttttaaggctttttatcccagttttcgctaaaatgaaaaccgggatgtatgccagtgggataaaaagtatttaaaaaaccgggataaaag

SEQ ID NO: 89138 - DNA, 691 bp, Cannabis sativa
ttcaactactaaaaccctatcataactattttattttgataattaattaataaacaaatcgctcgcgtggggttgtactttgtttaacgataactaagttataaaaatatattaaattttaaagttcttatgtattttaaattttatgtttaatatgagttattattctgctaattttttttttacttttaataacataaaaaaatttaatattgtacctaacaaataattatttttaattaatcaacttacaaataattattttgaacttaagaaataatcatttaacttaataaataattaattaacttaacaaataattagtctttttttccttattattttgaacttaacaaataattatttttaattaattaacttattgtacctatatattattatagggtaagttttaaaatatatattttgtttgtaaaataaattgaattgtaattaaaaaaataataatataacaattgatgtatttataaaaaaaaaataataataataagaaaaaaaaatcactatatgatatgatttggttttcatcaccttatttcacttatagtgatcactatattaataaaagtcaatgttatcacgatatctaatttgtgattatcactatcattcaccataattgatttgctccataaatcagtgaaccttttttttaataaaggaaatatac

SEQ ID NO: 89139 - DNA, 635 bp, Cannabis sativa
agtatgtatcaactcaagcaccttagaagctctatatgaggacaatttaaatggtaatgcatgagatttgccaaattggcatgcttcacaaaaattttccatttcattctttgaaattattacattgtctgactcacagacaagtttaaggactctagtggatggatggcctagacgtctatgccataaatccttcttggaaacatgaaaactggctgtgttaacagcacttggtttagacagactcgacacaccagaaaacagtgaggattaacttgaacttgaagcagatttgtttggaaactggtatagaccatctctaagcactccttccagcagcaccttctttgtgatgttgtccttcacaaaacaataatcaggatgaaattcaacaaacacaccattatcagaagttagacttgacacactcaataaattcttttcaatatccggaacaagcagcatattatcaagcagtaatgaagtggactgagtatttgtgggtaatttaccataaccataatgtgaaatatgtagtttattaccattaccaatggtcaaatgttccttaccaccataatcttgctcgtgtagcatgttattctcatcagcagttacatgattgcttgccccac

SEQ ID NO: 89140 - DNA, 1376 bp, Cannabis sativa
atgcgagttgaatgttcatattctgatgttaaactcgcaggcctatcatttaattacgtttaagatgtctgcgttcttagatagtcgcctttgtggactatcatttttacatatattgtgacttaggggtctgtaaaccgtcgagcaacagtttccactcaggttgatcggcaatactttaatacagaatcaaggtaagattagtataataatatcatatgtgattacatgtttagcgtgcatgtttataaatgtctagtagataacataccagtaatggcgatattagtgagcatagagttacactaaataccgataaatatatgtttggcatagtattgattgacgttatcacatcggtacgagtagagtaccaagtataagctgatattatggtaaatagtaatatcttacaaatattctagacttagtagtggaatgcgggataggattgcaattggatgtatgggcgcctagttataatttggtttatttatgttacaattatgcttttcttactgagtttgttaactcagatatattgttatatgtataggtaaagccaaagctaaggctgaagagtagtgagcacgatcagatgaagattgtacatatcaaggcagttagacctagagtgttcgatcttcgagacaacatgctttattttgatagtcgctaagcgacaacttttgtaactgaatattttgtaaaatagtagtaactttaaaaacgggatcccagattatgtatagtaacttcaaagttaattatgaaaattttaattaatcacgtttttttataaaccctttgattagtaagcatggtattaataaatcacaataacaagcctaaactagtagggtgttacaatttggtatcaaagccactaggttatcttctgaagatcgccaagatatgtacaatcatcatcaaagttatgctcaacttaaggttcagtaagccttttatgctttagtagttttctttattagtatgttataagaaaagtcttataggaagcatattattagcttaatagctgaataagcttatgttttattttctcaagtaagcgataattagaatttaattttgacagctgttaaatgtcaaaatattacatatttcatagtataaaaatacaaagttaattaaattttaaataatattttcatgaaattaaagttatatatttttacattgaaaatattttatttaagattaaatttatctttgtttataaataataattagtatttagggcataatgaagaaaaaaatagaaagttaagaaaatatattatttttatttaaagaattacaaattaattagattttaaataaatatttttattaaaattattgtgatatatttt

SEQ ID NO: 89141 - DNA, 1066 bp, Cannabis sativa
  modified_base (1038)..(1040): a, c, t, g, unknown or other
atgatggtagcttggtttagggttgtgctgactgtgagtggcagcttgatcttgccacatggtgaaatttggctccactgaaaccatacatgagttgtttgcatgtggctctaggtcttctaaggttaatccatctcctgagtagagggctcttgcttgaacaagatgtttgatgattctctatcgtccttccttgaattctcaactaagtggggcatccaatgacaatcttcaacctacttgcaactggcccaggctagagtggagcattacccttagctggagattaaagtcgtacatatcactaaaaaagcgacatctttctatctaatgagaaattatatctcgtcccgcaactggttacactcattagtgtcatgaccgtaattattgtggtaacgataaaacttattcatgtccctcttccccgactctttgaaaggaagaggtttgcaatacgatactgttgattgagtggccatattgatctcctctcttggtgccaagagaatggagtagggggtgaagcgaggctcataatctctcaagggcttgcccctagtttttggcttctttcttttaggggattttccttgcttaccactgttgttggctctctttcctctgtttgatcctcccttttccccatttccctatgccttagttttagggggtttagtgtctggcaacttcttcttgccaccctttgagccatttgcttgggtgatggcttcttcaagtttgataaagccatctgctctagataagaagtagttcatggtgtataccactttgagacgaaggttggacaacagaggactcatctccttgagcgtggctgcgagtgccataacccttgcatcctcactaagacttttggtcttagcagctaccactaagaaaaattgaatgtaggccttaacgggcttgtcttcctattgcttgacatccaccaaattattgggcacgatctaacatttttgagaaggggagaatcggttacaaaaagcatccactagatgttgggttttatgcccnnnataaaactctttacaatctgattagt

SEQ ID NO: 89142 - DNA, 651 bp, Cannabis sativa
cctaaagtggatggatgactaggacaacatcctccctgccttccacgcagaagtaaattgtcataatcgggaggccaatgacctgatgagggagttcaatgagagaactgctagaagaggttaggattatggtaaccttctcaagtgggagttttttcccattttcgcttatttattttgtttaagtgctaatgtacttctcttgcctcgcggatatggatgtggaattggagaacgcattcaagagtcctcccttagtcgacaagaagtctaaaaagagagtttcccaagctagtaaggcctcaggttctaccaaagaacccaaaaggactaagaccatggccaacaagaagaagtcctcaagccagcttaccatcgaactagccaagtctccagagaaagagaatgaggtctctattgtggggaatgtcgacaagcaacccactatgttagtgaaccaggtgaaattctctagttctcgtccagagatggttctcttcaagtcctctagtcccctacccctcgaggctagaactgaaggctcgcagcatgctaccgacagttggcgtaatatcttgactcttgggttcggcgactcggatcttctcacgcgaggtagctctaagaatcttgccaaaaggagttatgaac

SEQ ID NO: 89143 - DNA, 895 bp, Cannabis sativa
tatagacctagtagttccaactattcgagccaaagttaatgggcttgactaacccttacaattagaaatttttcatcaaggtgtttcctaacttcttacaatagttttgcactgccaaagactatcaacctttttttttttcagattgttgtagtgacaatctcactctaactaggttgtttacaataccggttccaatcagctcacctcaatcacaatatggaaatgtgtttgaaattacaagcaaattcactctagaagtatgatgaaacaataaaaacctagagtgattaacaagcacaccttaaagaactaaacaccatttttggctcagtgtgtgaaaagtgtttgttggattttagacttgggagctcattaaactcacttgaatatgttaagtgtgtcaaataaatgctcagccaacttgaatttttgagtaaaaatcgagtttatatagggtttaaacaaaaactaatcatttatagtcgttagacatgaaaaacgagactgccacttggagattcggttcattgttccccaaacggtaaaccagtttctgggagaaacaattcactgtttaggaaccggttaaccgtattcattacagtggtaaaaagtcttttttttcatactaaaacgaccataactctctacttgattatctgatttcaaaaattataattttattttcttagttaaatgatatgtgatttaaaaaggcaatttaaaaattttatgcatcatttggtaaaataacttgtcgcacatgttagtggaaatttatacttaaaacttttttaagtatggacttaaaaatcactatacaagactaggaaatgtaaataaaccttcatggagtcttgttttgagttctttgagccttggaatccacttc

SEQ ID NO: 89144 - DNA, 702 bp, Cannabis sativa
aagggtcccttgccttacgcccaggttaactttgggagctccagaatgggtagttggatcccatcaagtcatttctaagtcactgtcctttagtattctaaacaaaaaaattcaagaagactctaagtccaaagtctaagaactaaaagatgtcaatttggcatctcagaagtcaacttgggcgcctagggtttcaccaagtgcccaagttgacatcccaatcaagggtttcagtttttagatctgtgttaatgcaaaatgctcaaactttgtacttagacatgaataagacctctcataaacatgctagaggcactagaatcagaattggaacacttctcattaaagacacctaggcaaccagtgcttaggttgacctggcaatgcacccagcaaggttgaaaaattatcaacctggggcacttctaactatgtttctgaagatgttttcccaaaattttctttgtcttcttccaaaataaggaacgagtacttttgggaaataagtgacctagtgtctaggttgacactagcttggtcactagtgcccaggttgatattttgttaacctgggccatttccattggaaatttgacaaattcttccagacatattctctattttcatcataaattaaaatacggatgctttctagtaacaaacagagcgatctggttaccaaagagaggactcagcgcctag

SEQ ID NO: 89145 - DNA, 500 bp, Cannabis sativa
tatatatatataaacatttatatatcaaattaaaattaaaacaattatatattcttaattccaaaaatattacactaatattaattggctttattaattatttctgactttaatctccgttaaatgatcatgattcatattgatgcaaatttttatataagataatattatgaatatagcaatatccaataatatataatgagcatttgctaggcttaacagtaatttatattagttattaaattaaaatatataaaactcaatattaaatatacaaatacgagtttactatctcttgtagcactataacttaacattttttaataatgatataagttcttaggcacctacatatacttaaattttttttgttgcttctaatttgattagatgtaattaagttatatatgatgtgagggcatggattcccccttatatttgctatttcaatctaataaatataggctatttagaatatttgtctcagaattatgatgtat

SEQ ID NO: 89146 - DNA, 893 bp, Cannabis sativa
atttatttatctatctatatacttttgaacctcaaagcggtgaagtggaattttcaatgatcttcttcatgttctctattttatctaatcttcttatttattagttttttaattatttatttcttttttcactttatctattaactcatgtttatatattaaatcctattaattatagaaatacatatacataatttatttctttatattatgtgacttttagacattgtatcctataatagttacaaaaactaataataatgatataataaattatataagtattttattttttatgtaaaagtactatataaaagaaaatctatattaaattgcactaagggaaaaaaaaaatatacatttaatgtgtgtatataaatttttttaaagagaaacacaacaaaaatttataattttatataggatgtatgattttttattttttgaaagatactatgttgtatgtgacattatctctttctaattttctatgttattttttaatttgtaaaatttttctatgtttcgtttttgaaagaagatttttttttttctttctaattgttctatttaataataataaaagaaaattgtaatatctctaatctataaatctatttgtatttgtgtgtttttattttttataactcatattgttactattgttagtatttattatagtgtcttttcattaaaactataaataaatattcattattattatttattacaaggtcttttcattttagactactataaaaaatacatttattattattatttgttatagtgtcttttaatttaaacaataactatatatattataataaattatattaatataacgtataacatattaatgtaaaaatttttagagaaataatataatgttt

SEQ ID NO: 89147 - DNA, 530 bp, Cannabis sativa
gagagcattgatggtgttgactcagagagtgtcaatcctgcctacgaaaactggatcataaatgactagttgcttatggggtggttgtatagctctatgacagagactatagcaactgaggtgatggggttgcaactgcagctggattgtggcaggctttcgaacagctgtatggtgctcattctaaatctaagatggatgagacacgaactttgattcaagtaacaagaaaaggaaacactcccatgactgtatatttgaggcagaagaagaactgggctgaccttctagccttggcaggggagccataccccgaatcgcaagtggtaacgaacgttctctctggcctcgatgtcaattacctcaccatcgttctgcagattgaagcaaggcctaaaacttcctggcaagagcttcaggaactgcgtctaagcttcgatagtaaaatcgaaaggctccaggctctctcatcgaataacaaaatcagtacgaacttgtctgaaccgcaagcaaactttgctcaaaaacct

SEQ ID NO: 89148 - DNA, 1019 bp, Cannabis sativa
agttatagacttctccttgctaaagtcttgggtaggaggaacgacgtcaacagttctactccttttttttaatttcttctttgacgtagcagggataccctaaataaatccttgaccagaggtacaacttcctttggcattagaatttttctgctttgagttcaaacaagatgccatagcagccaggaagctcctattgtctacaaaaaaagacaagttgttagtaaaacagaggaaaataaaagcagcaaagctcaactacacaacatggagcatcaaccacctcttgatttcccatccttctttggagaagttcaagtggaggttacttctccatcttcctagtttaagaacataaatattctccctaagtactcagggtcatttcaaactaaagtcacatcttctgatattttttgagactagatgatatttgcactttaagcattctcatgatccttcttgagtggcattgtccaagactcatcagggaagcaagtttaaacatatactcattggtaagacattatctgtccaaccttttgaagattttcagtattgaacaaagttctcccatctctctcccatgcttcaatctcaatcagtgtggcatctactctcctcttcatgtcaattagagcagcaagtcttttggaagggccaaccttttgaaatgttaagtctcttgatggaagaactggggtgtagaaatattcatcatggtaaaggctgcaattgcttttgtaatgttttctatgtatggggagaactggtggaagtgatagaagccttcttcttttcgagttggacttcttttcaagttgtaaagtaagtttatctcatgtggtgttgggataggccaatttctcaggcaataaaagatgaagaaggcggcaagaattatatagtcatttggatttttttagtagggacaaactccaaaaaatccttaagggtgcaaaggcaaataagcacccgcattcatatggaacctcgaccatgttgggttttatgcccta

SEQ ID NO: 89149 - DNA, 522 bp, Cannabis sativa
tccagaactgtaaaatcttcactctttcaatcaagtacaatgctggtaaaatacaataaaaactttcatgcaccagcccatatttgatacaaatgaacagacccttttctagaagataataagaataaaagtacacaaatgacataataactaatactgtagtatgcattataattatattaaccagttaatctaattagaatgaatactggcaaagctgagaactgcaaatgttgataaaccaattaatatttaaaaacaatgttatacatgaagttgacacaaatacttaacaacagaaaaggtagtcacacaaatctaagaggtgtttttgcttgtttatctccaaaactaatggaatttacaatcatagactctaaaccagtctctacatcactgtagttggcaaaagggcatgaaaatgaaatcctcattcctgttaaaacagattaagaaaaaaatgatgttataaagcaatggattcagatctactgtatctatgctttgacacaaatgaatgtg

SEQ ID NO: 89150 - DNA, 682 bp, Cannabis sativa
tttttttttatccttggtgtcgtccatcaagcttataattaagactggcaactgtccttgctctcctgtttaataatttgtcatggtagcataatctctttcttaccttaggcttaaaaacaagtaataccttttgcatctatcttgcatagaattcaaatcatattgtatttttccccaagtttagcaaattgtcttaagtatgtaataccaaagatgagaacttatagtgctcttgtgggcttgaaaattatttgctcagaatcattcttcacagcgaactatgatggtaggtagctcaacttgtcatggcgtttgaatgtgaactaacaaggtaagtcatgacatgatatagcatatcaccatgaatagcatcaaagttttattgtatcatatggcatataaggatatgcaataggtgttccctgagcttcaacaaacatacataataagagaaactgttagttttaaaaaatcaaaatacctaactctttttagttaattgtttttcaatcttagatttattccaaattctgcaccatttttattagaaattagaattagcattagtttagtatcagctgtatacattgttttttctctgcctttaattgtaaattctgttacttttagttggttaaagattgagctgttaagctagttattctaaccaactctgtca

SEQ ID NO: 89151 - DNA, 714 bp, Cannabis sativa
tgatggtagtgtaggagtgacgaaggtggatgggaatgttgatcacgtccctatgatcatggaggggatcgtgggtcaatcttctaatggccataatcgtggaaaagatatggggtgtaatgataatgaggcaattgggggattggatattgatagtcaaagtgatgagttggctcatgatgtattagttattactgatactaaaaggaaaagaattgatattgagttgaatggtcttggtggtccacgtgttggccaattgggcttaactaataattcttttaccactccagaattcggcccaggtggggaattagttggtgttgtggatgaagttgttaacaaagacactagtaatgctaatggtgttaatgggccaaaaaacttgaacaaggtgggtgctggtttctaagcccaccaaggattatgagctttataagttggaattgccataggcttgggaacccatgggctttgcaattcttaaaggatattgttatccaaaagagacccagttttgtctttttgtgtgaaattattagcaaaaaagataaattagaaagagtgagattgttgttgggttttgatggtgtcattgttgttgaacctcaaggtaaaagtgggggattggcttttctgtggaaaaatgaagacgaagctcgcctcttggggttttctcagtcccatatcgatatggaaatcaccatggaaggg

SEQ ID NO: 89152 - DNA, 760 bp, Cannabis sativa
gaggtagccactgggccggtctcggagcgccgcgaaaaacaagggtccggcggcggaaacaaggcggagatgagtttgggaattgagattgagaattggaacggagagcttacgtgttattgcgaagattagggcacagagcgttgtgagagtccgagttgacccggcgagttgagactcggtcggaggaggagaaggaggagcggttgaagctgcggcgattggagttagggttttgcgattggggaaggagagtgaaatttgggggcggcgcgtgagggggaatttgttgagggattggaattggagggagaggaaaggtttggtggaagtgaagagaggtcgggaggaggaagaagccattagagaagtggaaggtgaggccatggtcgccattgttgggttgggtgagctgagttgggttttggagagagtgtttggatggatgagattaaataaatgccaaacaaactaaaatcttatttatattaaaaagtaatttacatcataatacctaaatttaattattgtttgcaaaaaaaaaaatattaaaatttaatttttaatgaaaatataagttaattattattattattaaaaattaaatttaagtatttatttgtaatcggaacttaaagttaaatatttatactgtaaattaatttttttttaatataactgaagtgaaattttattgaagaaaaaatgagatagaaaatgttatatcattggagataaaagaatgttattcttaaaattt

SEQ ID NO: 89153 - DNA, 546 bp, Cannabis sativa
aaaatcacatgaaaaatatatcaatatataatattatacaacgtcagcatattttaataaataaagggcattttgcttagatttacataaatatatagtattacattatttttttattaagaaattcttaataaaatattcatggtgcaattattttataattccgtaatttgtataaagtttatatttaagtttaattattggtgataataatatcaaattataatttaatgagattagttaccatatcctctaacttatatgtttataaatattatcttttattacaaatatatattgtaactaactaaattgcatatataattttttttcgattttttttcagggaggcggaggcgactgctcgcctcggttttatgtgggtccgcccctagcgtttggtaacattttttcaatcaatttttttttaaaaaaaattaaaaatgtaaaaatattttccaaaattatgttttatatataaatatgtttttaatttttaagtttttaatgaagaatctaaattttaaaaacaaaaaaaaaatcaat

SEQ ID NO: 89154 - DNA, 588 bp, Cannabis sativa
gaacctatggtgcaggggatggacaatcttttgggaggaataactttgacagattatgtataggaaatatccagaattactatcatgtatccagaaacactaaaaaagaataatcagaatcaatactgactcgtggagtatgtagagtttgactaaaaaatcacataaaaattcattttgtcttatttatatttggttatatgtaatattttaattttatttataagacttcattattgtttccaaatttctatgttaataatttgatgctttcattaagagcctttgtcataaccaaacttccttgtcatggaaaacactcaacataatgaactagtggtggaagaagagacggtgcgcatctaccgagaaaagagccctagggatcacaacctcaaaataggccaaactaaggaaggggtcctactaaaaggaactccgaaagaggtgaccttgaggaagaaattccaaaaataacagagtcagttgcatatgaccctacgagttatgtccaaattatgtgattcagattgtctcttaaatcatgtacgtgtcccaacctattgaagactagttcacctagaggcc

SEQ ID NO: 89155 - DNA, 614 bp, Cannabis sativa
  modified_base (51)..(56): a, c, t, g, unknown or other
aaaaggtgagcccgtgacagttggtatcagagccaagttcatctcagtggnnnnnnaacctggttggcctatcctagaggggatgtagacatgtggatggattgagattgtctgaatgctggaacaagatgtcattgagccagttagtcttctaaagtggattagtagactaagatggagttgagactgggttgtttttcttcgtgggaataatggacatcctagagagaagacgatgatggttgcttcgaataaatttagggatgctagaaaaacgactaccatgtgcaattgtagaggcacaacaaaatgtttgaaactctttggcatattacaaggttaattgggtagtccctaccgtatgcttggtacactaggccgagttttcctgagtgacaacgtaagtcgcaagaggcacttttgttgaaaaagaagctcgttggcatgggtgtagaagtagtgtaggaggcatcaaattcttgttagttacgatagtgatcaagagttgatgaccgagatcgttcaaattggaatagacatggaatgcttcagttgccacgtttgtgtcaagagggacgcaaaccaagggggcagatgccgcaatcgtcagagga

SEQ ID NO: 89156 - DNA, 650 bp, Cannabis sativa
acaatttattatttttaaaataaacatttttgtgttataaaattttaaattaactttttccttattgcattatttctaccaaacttttagcagcataatagcttaaaaattataaatctaaaatttttaaaacctaaaaaaaacataaacaaacattccagaataatatatgcacaaaaaataatacatccatccgaccgttgcacatttaatcacagaacctacttcactatagatgcatatttaagatattcatactccactataacatgcataaacatattaattaaaaacataaactatgaaatttctaatatggaaaaaaattactaacttttaaaatccaataacaacagaaaacctctagtgggtagcagtgatttggggcaataaaacaaaaactaatttcacaaaacataaaatgaaattaaaaaattaacatatacatatatatatatatacatctacatatacaaatacatatacacatatacatctacatatacatatacatatctacatatattcccacatatataaatttacatatatacaaaataaatacacatatttatatacctatatacatatatggaacacttcttaatgggcattacccatgaatggttaataaacaaatttaactataa

SEQ ID NO: 89157 - DNA, 551 bp, Cannabis sativa
gcaagcccacgatcaagtctactcttttcatggctacccctactgccgggtttgtactccctttaacccaagtgaaggccgggcctaggaaacccaaatctatcaaacccgctctatccaccatacgcctgaagtcgaacgagtatctagacacactcccatggtaatgaaagcattcactatccttcaaagttccattcatgtcccctaagaagaggatcggctgagtagctttgagggcatagtcacccattttaagccaaaaaagctctttatccacactattgggaggcccataggtgcccactaaggtccaaggaattcccggagggtctgaggaaatctccccaatgatcgagtatctagaagagagctgaatattgcagctaacccctttcatccaacacatgcctaatcctcccgagagtcccactgaaggcacatagtgggagtcaatgaaatgaagcttagaacacactctattgaatttctcagttggcaatcgaatttcagaaaggaccaataattcgggttgatgatggcgcacaaga

SEQ ID NO: 89158 - DNA, 585 bp, Cannabis sativa
aaaaaaaaataaataacatcaataatattatataccatccatatatatttcttaaaataatatctttttctatctaatagtataacatttcaatattttacggcatcatattttcagaaaatattttctaaatttttcccactagaaatgctctaactaccttgtcaaaattttatgaggtgctggctctttatcccaactcttttatttatttatttgttttaattaataaactatttgattgctcaagccaaatactgcattagtcgttatataaagagaaacttcttcccatctaatatatcttgttaaatcatgtgttattgagatttatgttataattacaatatacaatattatataaaaaaaacttgaggtatactttctctagatactgaaaataaaaaaaaaaaattagggtagaaacaaaagtaatatccctactaaataatctcccaataatttaatttcaagttttaaatatttttaattaaataaaaataacattaaaaactactaccaatttaacaatttaataatatttataatttaacatgcaacatgcaacatgcaacaccttaactt

SEQ ID NO: 89159 - DNA, 577 bp, Cannabis sativa
ctatgttgattggaaatataagctattattaatgaatattttgcagtacttttctatttcgtgctgtccaagtgtccattgagaaaaataaatttgaaaatgagtaaagtgtttatttcattatttatgcatgtgctgtgaatttaatgtcaacatcatgacacggattaggtatacgaagattccattggctttgattgcttgtagaaccttgcgacttaaaataaatataaagataatattatcaactgttcggtagctagaagcatgacaatttgaactgttgcaatttttgttttctttttttcttttttgaaaggtgaaatgttgcaagttaaaacaatgaaaataaaatcaagacgtaatccacagatgcatgatctatatatttatttaaatcaagatttccgattagctctattagagtaaaaaattatagcaatagttatgtcctcaccaggagcatgatttacttatttaaatcaagatttccgattaactctataaaagcaagtcacatgcctcattgagccactctcttagatgccaggagtgacacaatagtttttctttctaa

SEQ ID NO: 89160 - DNA, 1726 bp, Cannabis sativa
tatatggaataagacaatatacataataaataatttaaaagagtcatttgctacaagttttgaaatgagaacatttattaacatagtcttatgaattgggactgtttactataatttctcgaaaaagtagaaaaataggctttttttcaaaaaaagaacaaaaaaaaaaagaaagtaggtcttaaaaaagagggagccttgtgcaatggcccaagctgtccaatacttgggtggacccctgcatagtagtcgtgccaataatatcaatattaattaaataataaaaaaaatataaatcataaattcaaggtaggttgaatccatatgggtggttgggcctccatttttgaaattattgttgaatcttcatcatctaataataatgtaaattttttatagctgttatctccgagattgtagatgccacaatcacaaggaactccctgaggaccgtatgagattaaatcagtgtcatgactgaaatagatgcaatttgatttacatccaagaaagtttgatgcacgcacatatattgaagagttatctcctagaaagagagcagcatctcctagacttttaactataaccctttttactcctccatcaacaaaatccaatttaaaaatatttacttttgtagtacgtcgtattgtcaaactatctttccattcacaacgtcttaacacttgtaaaatatctccctcaaatgacttcacaatataagacttgataccaaaccaattgtcagaattattccaagttacttttgtaccacagtatggctcacgactatcataagatgaaagagtgtcatgattatgattaagaaaataaaacttattgctattgaacaatatatcactaaatatttcttcatctggatcaatttttctccaaatattatctctcccgggacttataatggctattttccaacaatgtaaataaatgaccacaaccatataatcatttggatttattaatggatctgcagtgattgtcgctttgtaaatatgttgatcacaatattctctcatatcttccaatccttcaagatccccatcttcaacttctggaggaaacaaacacggaagattgatgattgcactatcatgatctgtagagtaaggcttgtatagtgtaaccgtgaaatcacgattcacagttactagccatccttgtgatgatcctccaaaacgcttatcataaggtatatgtaatttagatatttctttgaacttattagtcattggatcatacatatcccaagtatgttgttttctattaggaaccataagcatgggaacttggtgtgaagtcttcatcaagcatttagttttattgtgttttactatagaattccatgaaacacacacaccataaaatcgtagaatatctttgaaagactccaatttttccaaaattaaatcaagaagatggcatggtaatctagcccaatctaaaaaatagaataaaatatatattatacatcaaaattagctatactttttttttttttcttgtatgaaaaatattttaaaatttagtatttataattatagagaaaataatagaaagtagaatattaaaggcattattattttgagcatatatatgtatataaatagaataacgaggatatacctgggtgtactgtaattgtcttctgtttctttttagtaagagacattgtcatcttcttaaaaattgagttttctatcaaaaa

SEQ ID NO: 89161 - DNA, 544 bp, Cannabis sativa
  modified_base (159)..(168): a, c, t, g, unknown or other
gtaaaaatataaaaaaaaatattaaacgtaaaaatataatttttttacaaaaaaatattactttatctaattattcgtattcgataattaaatgagcgatttacatggtatactaatttttgctatttctttacaaatttttacttttttactgtgttnnnnnnnnnntttcatactgcagtatactgtattaagttttcactggtattctactggtgttttactggtgttatactgttgttttgagttgttctgctttgtgttttactggtgttttataaaaacacagtatttttgaaaagatttctatgtgacagtatttttgtaaaaattaacccaaattccagtatttgtatttgtgtaagttgccttaattaaatatacatgttcttatatatactgattattcattcatacattaataagcccaaagaatatcattcgagcccaaaggttaccctcatatttagtaacaattgtccatgatcaatactctatccactcaaccatacatgccagtcccacctttgatgcatggactgac

SEQ ID NO: 89162 - DNA, 942 bp, Cannabis sativa
actttaacatgtaccaaatcatggtcttgaaattttttggccgttaaaaattcttcctcgactattgagattgttaaatttaaagatttttgtctaattcattcaatttaactattttatattttagtgattgtttatgtactaaaccatgttgtttaattagactttgatgtctaccaaatcattcctcttgaacttttacatgtactaaatcatgttccttgaactttcatccatgttagactcttttttactaaaattagacaaaaaaatttgaatccaacaatctcaatagttcaaaggacatttttaatgatcttaaaagtttaggggatataatttagtacatattaaaattcggaggataaaaatcttaattagcctattctttataatattttacaaaatctttatattttttattttacttgaaatttttataaaacaccatatatcaattgctctaattttattataagaaatctaaatattatatttctaatatattttatttatttaatttgttttatgtatttattaatattgatgttgggaaagaaagaaaagaaaacaacaaataataaaaaaaaaatattaagctaaggggaaaagaaaacattttgttaatatagacatgtgaaaatgaacttaaagaaatagtgaaataattcagtaattaaaaagattatccaaatcccatcttaattaataaaattccgtacgtacactccaatgtcaattatattatataaaatcatagcaatgtaacacttaataataataataataatctgatgttaaccgaaaatacggttgagagttgcagccaatcgtactccagcttctgctagccttaagttgactattggcaatcgagacaggaaataatcatctggaaaaaagaaagatccaacattaatatcatattattaattaattaat

SEQ ID NO: 89163 - DNA, 882 bp, Cannabis sativa
aggcaccagtggtacctagcactcccctatgtgtcaatatcgctattagtccaactaagtatcaggtctcatatagtttaatgtaataacttttaaggaatattgctagctaatcgtaagaagatatatgtctagaggctctagacactactggtgtccaataacaatattcttttcaaaattatatactaacgtgactatgagtcacaaacagtgacacttaggatttttgctatgttggagcataattatcatataaaaaaaatattagttatcctatctattttaaagaaaaactataatcacctttaataagtttattttagttgcaggacgtttttactattattatattaaaaaaattaacgaaaattcagctcaaatgtgttattttgtaccttttagaaaataaagggtctgaattgttattaacaaaataaaaacttcaatcaataacttttacaaaacacaagatctaatatggtatttgcacaataccaaaactcttatttggcaataaaagtattaaaaacattattttatttttttttcaatactataattacccaacatttcttacattcgatcgagaaatttacagttaaaatacttaaattttgtttacttatagataaatactaaaatattttattttttgtggtaaaaatacgaagatgttaaaattatttttgttttgccattttgaattttatagtgattttatattaaaaaagctaaaatatattttaaaatataaaagtaatatatattttataacacatctaagtttgaaatatatatattacatatgaacttatttaaatttaattatttgaatattaaaaactaataataataataaatagttaaaaaaaaaaaaaa

SEQ ID NO: 89164 - DNA, 557 bp, Cannabis sativa
agtcttttattgtctttatcttaatttattttatatggattatcgtgtgtaatatctcaagaaatcaggcgttacatgaaaagctgtgctaaaattcagatttgtacccatggccttttggagactctcccagaacatagaaataaactttagctccctatcagaaacaatggactttggagccccatggagatgtactatctcctccgtgtacaattttgcatactgatccaccgtatatgttgttttcataggtaggaaatgtgctgacttggtaaatcgatccactatcacccagattaaatcgtacaaacatgtggtcctaggtaaatcaaccataaaatctatagtgacatcttttcacttccactcgggaagtgtcaaaggttgcaacaaacctgcatgtctctgatgttcaaccttaatctactgtcaggttaaacactcggatatgtaatccaccacatccttttttatactgcactaccaataatagagtttcaaatcttgatacatcttgggtgtacatgaatgcaacgaattgagagtagtgcgag

SEQ ID NO: 89165 - DNA, 3423 bp, Cannabis sativa
  modified_base (43)..(48): a, c, t, g, unknown or other
agggtcagtcatcaatccaggaagcagccaaagtgacgtactnnnnnntaagagtcattcattccgtgggtgtaaggacccaatagaggtatgaagcgggaacgttacaactcgtaacggtaatgactgtttccaaccctcagtcataaccgaggcataataaacacataatcaggatctcgatcataatcgagactataacaaacacaaccgttaatcacataaccataagtgatggatatcacttctcttacctcggtcttgaaattaagtgtgcgggccgacctgagtggaaacaaagctgggcgatcctggtcctatgtcacgacaactaaaattcaataaatgccttaaatcataacttcgggaacaatccctaattccttaaaccagacataacctaacctccaacaacaacaaaataggatatacaacacataaataatctaaatcaggtactaggtaaacccggccaaaacagaactcgaagaaaacaagagattttccccctgtagggcaaccggtcgatcggttttggtgcaccagaacccaccggtcgaccagttctggcagactagagaaactttggattttctccccaaaactcgaccaacacctaaccaaatttgtccaacagctccaaaatagtacataaatataaaaataaagtattcaactcaacaattcacaataattcatcatattatacaaatatccatgtttaaaattaaattgaatcctaaaatttaatcttttccatcttcacacataacagccacaaacttaagctaatagaacctaattaaccttaaaattaacacccaaaacaaaccctaaactcagtctaaacatacaactctgaaactctaggaaattcaatcaaacttacttgaaacttaagtaacttcaaggacaaagttttaaaatcttaccttaatgcttagacaagcttctatcccttccaaattggtccaagagttgaagaattagcagaaaatcaaccctggttgcagcctcttagggttcgagtaagaaaaagaaaaaggaagaaggagtttttgtgacttattctaattttttcctcacctagtaatctaataataataaatatactttattaatatcaatcctaattcactcatagtctataaaagacaaaaccctcattacacactcaattgaccattttaccctttctgaaacctttaaacttaaaaatcaatcctaggggtattttggtaattctaactaatttgccaaaccgacaacctaaaattctaaactagtccggaatacttccaatacaattcatcctttattgtcatgatatttctgacctctccatcaagttcccacgatcgccgggcctgaaaatattttatttgaaatatggtatctacgatacccacataatctaataaaatctttgtaattaataaattatttatcaaattcaaactaattaacttaagtaagatcataatcttacttcattactaaaataattacatatttaataaaatatgttaattaaataccatattattttctggaatattacagttaacctcttcttttaaagcattttttctcttcgaatcgaagaggcatctcttctgctaccttgaaggataaagttgatcaatattgaggtgatgaatataacattcgagttaatctcgactgtgtctgagtggctctaggtaaattgatcttggtttacctttaaaaataaaattaattgttattttaattcttccccaaccctttgccaatctttacgatcttggtagggttgttgggatccaatatcacctcttctgattattccataggcccaagttaagattgttcatcaataatccttggatctaaatattcaatttccttgtaattaatatcctcgttataatcaccattacttgatgagtcattgctctttccttcaaatctatactatagcattgtcttgttgttaacttatctcctttaacagtgcctattccagattgagatggaatttcaaagataaatgcttaatagagcttattgcccctattccggttagagcagggcatcctattatcatgttatatactgaaggcaggtctaccaccaaaaactcttgcatttgtgttgttgacaatggtggctctcccattgttaatggaagttctattgctccgaagctcgcgatactgtcccctatgattccacacaagtttaccatgcatggctttaatttgacatcatccaatcccatttttcttaaggtttctttgtacaagatattgattgagcttccattatcaaccaagattcattttattcttttgtttgtgatttgtagtattattatgagtggatcaatatgtgggtattagacatgtgatgcgtcctcctcagtgaaaataatagaaggttcttcaagttttgcgcatttaagcagtttaggagcaaacaccaagctctaattctttatttgattcatgtaccgcttttgggcattattaatggttcttgtgagatgaggtcctccagaaattaccaaaatatcttcaccatcaacgtgtggtggctggatgttctggttttgatcttatttgttgggtggattttgttcatttttcctatttcgcacatattttcagaagtaacctcgagaaatgaggctttcaatctcatccttgagttactgacactcctcggtagtatcactgaatctttatggaaacaacaatattttttatcatgtttactcctcatatttctcatgggtttaggttttctgaaggtaaccctgttttcattctcaaggaacatactttcttgtgtttcattcaactacgtatggacagagtatatcaacacattttttgtgctttttttttttttgcttcttcttatccttagatgaatcctttgtttcatcttttctcattccatgtaactcatttcctttgctcgaatttatatttgttgttgcaacattggatcttgtgttgctcgagcctggtttattttttgagtcaccctttaacaatttgagttatgtccaagcttcctctttctgaacgtatataaattctctattattgaactcgtttattgttcttacaggacaaccttgtatgtcatcccattgttctcctcctactataattctagcttgcaaaacggttaattgaatgttgtcattcaaattcctaactttggctgcggttgtttaatgttcattagggaggaggcctcgagtctcttgtttcttgcggccgagaatttctttttataatcccgcgataactgttcccaagatgtaatggaatattaggtgaatttatcgaactaacagctcgctgcccctgtaagggatgttgggaacaagatactgttgggttttgtgccctaaataaaacccattac

SEQ ID NO: 89166 - DNA, 830 bp, Cannabis sativa
ccatgacaaattaatcttccaatctaatcatgatgcaaagggaacaactctattacttactgatgtgttatagtttcataactttgtgccatgagaagttatcatgtgatgagagtaaataattgttatgtcaaagaaaagaacctttagtggaaaaaatctctagtctagtgattgctaccacattcacatgttatgagaataaataatctctcgtacttttaactctgtagatagggttgtctcaagtcaatgtatgcagaaacaaaaacaggttacagggaaaaccacctttgatgatccaactcatggtgccccaatacttcttcccaattaagcaattgaaaaacattatcatcttcattactcttcagcaatcttccaatgggtctcttgaatacaacagaatatgttgcatcgagaagaaagtatgtatgtaagatgaagtattccaataaaagctttgacgccaactcactagcttcggcaccattatgaccatcaaaaacagcaaccactccgacagttacctccttaagcccaaattttcctgttcaagtatttagtatgctaccatgagaatcacttgacaatataaataacccaaatgagaaaagtcttaaaattaaaaaatgttttactaaattcataacttgaatgatatgatagttcatgtggcagttaaatgagtatctagaaaaatgcatacattaaatactagctgattatataatatgtcacaattatcaaattaagttctagataatttgtcaagatgaacactactctttcaacaacaaaactgaacactcccggaggcaactttcttc

SEQ ID NO: 89167 - DNA, 871 bp, Cannabis sativa
tcgtccttcctaagtactcggacctcttgttggttgtagtgataactagatggcttggccttcttgttgacgagctatactcccacgtggcactaataccggtcgcgtggacatgccacatcaggtgggcaaaaatcagcctaccattaagtttcatacaaagtttttaaaggacccacgcatgagactaaggttgtatatgcctacaaggtcatgaaaggattcttaccaaggtcaaaagaggacaaaaaattggccacctacttggaaccaaaggccaggccgaccagggttcccaagccttgagagggttgaccagggtcccacaactcagccaagaaccgattagggctagaaaacccaagcatgaataggctagcttcctagggtgaaaccctagagttggccaactcccatgattgaatcctagggctagccaagtctcaaataagaccccgagggtcggccaaggttagtttttaatcaaaatttgtgtttttcacttgaatatgttcttcatgactcaaagagtcaagaatcacaacgaaggtcaaaatttaatcttttcataactatcatgcagatcaaaatacctaaaagatacaatctaatgtgagaatcaaaaagtttctaaaagcttaaaacgcttgaaacttatcaatggtaggttcaaagaagagatgtcaaagaaaaaaagatgaggcatatatggagagagaagatctaaatgcataccatgcgaaaatccaatactcgactagataagagtgctcgatagaggctactataagcaagacaagaatttggaagtccctatccgaccagatgatcgaacagggttttggggggcaaatattattccaaatttttt

SEQ ID NO: 89168 - DNA, 627 bp, Cannabis sativa
tgcttcttgtcagttgcaggagtatgagtggtggtacccaagtcatgacttggaacttgccatagttgtttttgctttgaagatttagcgacattttctccatggagaaaagtgtgaaatctatactaatcacaagggcctcaaatatttccttactcacaaagatttcaatatgagacagagacggtggttggaattagctaaagactacgattgtgaaattctctatcatcatgggaaggccaatgtagtggcaaatgccctaaggaggaagggccccaggcaagttcttagcacgactatgatttccccgcaattagcagtagatatgatcaaatcaagtattgagtttcttgttggcagacttaacattttaacactacaattagactgtttaaaaagaattagaaatcctcagttcatggatccagaattggtgaagaatcgagaagaagtcttagctagccaagctaaacacttctaaatatcaactaaggggatatttctttataaatcctgagtttgcgttccaactaatattgaactcaggaatgaaattcttcataaagctcataccactccctattcactacatcttggtatcactaagatgtaccaagatttaaa

SEQ ID NO: 89169 - DNA, 848 bp, Cannabis sativa
tgtctcatctaccccccccccccaagtacatattagatttagtaagattaatagacaaaccggtaatcttactaaaatcattcaaagcaaccttcaagtgactcacaacctaattagtaccttcgcaaaataaaattagatcatttgtaaaacagagactaattaacttgaggcttttacaaagaggatgaaatttgaaggtaccttcatttgattcttgcaacagtcttctagtaaggaattccattgccaacacaaacaacggaggagaaattggatcaccatgtctaagccctttttttcctttgaacctgccttgtagccttccattcatcattagattataagatgttccttttaaacatgtcataatctaattcacaaatttagcaaggaagcaaaggatattcaggaaactttccaagaagttccagtccaccgtatcataagctttactcaaatcaatctttaaagcacatcgaggagaaacattgttcctattataattcttgataagatcctgaaatatcaggatgttatgagcaattgatctctgttgaataaaagctccttggttctggttgattaagctcggcaagacttcagcaagtctagaacacatcaattttgaaacacatttgtacatagtagtacaacaagcaatcggtctatagtcgactgcactagagggaacatcagttttaataaccagggagatttttgtctcattaaacgatttagggatggaacctatcttaaaaaagttgtgtattgttgaacaaaattcttctcccaagacatgccacattcttttgtagaactccgagttaaaaccatcaggacctggc

SEQ ID NO: 89170 - DNA, 841 bp, Cannabis sativa
agttctaacacatgcatgcatgcatgcaaagatgccaatattgctaataatttatatatgagattactgtggttctacacttctatgtgtatatgtagccgtagagttcttgtcaaatttaaaaccgacttattggtaaactgatcgattcagtagcacgccaattaataattatatgagtttgatgatccatcttattatttgaaatcacatataatattcttttctctcaaaaaaataaaatattctcacgttgtaaatattaatatattaaatgagattgatatgatccatcttattatacacatttctttaaaaagaaaatattatttagatatatatatttaggatatatataattaatgtttacacaataattaataatttttaaaagagtaattacatgatatagaacactttatatgttgtgtgggtatgtatatatatatatatagactatatgctaaaatatacattgcaaactatgttcgagttaaatattgagaagtgaataagagtcgaacatatctggaactgaatttaatgataataatttgctccaacaattttagctgtcattgattttgttttgaggaacaacttaagaaagtcagctataacagcagcttatatatatgtcaagggtccatgagtagaaaagtgttattaaaggtatttatattatatatgatctcgcaaataagccatatatatttatataattaaaattatgtattttttttctcatcacgtacgtataattaatagttgtcttctttgttgtgaatctctaatttaattaaatgggaagatatattagtgcatgcatgctatatgggaa

SEQ ID NO: 89171 - DNA, 782 bp, Cannabis sativa
  modified_base (540)..(542): a, c, t, g, unknown or other
ctggtctgagtcccaagtctagttcgggaccgagattggggtgcggttctaggtcccgaccccaattgtgtgtcccgattttgcttccatgtttgggtcttagttcgagtccaggtttggcctcgagtctatgtctgggttgggatccaggtcggggttttggttcgggtctaggtctgggttggagttcgggtcctagtccagttacggttccgagtctaggtccaggtctgcttacgtttccaggtccaggtccaggtccaagtcttggtttctaacctagttccgggtcccggtctacttccagtttcggttctaatattggctcacaaggtacgtgttcgggtctaggttgcgatttcggactgcgttcaagtcttggtctagtttctggtcctgctctaggttcgagttcggggctgggtcccagatccagacaccgactacgggttcagtccaagccgcaggtccagatctggatcccgatctcgggtctcggtctggttccatttcgtgtgtcgagtcacgagttgggtcctnnnattaagtccgggtttgggttcgggtcttgggtcccggtccttgttccgcttcccaagtccgtatctcgattctgggtctaggtcccgattagggtcccattctatgttcgggtttgggtcctagtcgaggttcaagcttaagtctcggtctgggtttttatttgggtttgggctctggtctgtgtcttagtcttggtccttgtcctagtcctagtccaattccagttccagttgcgattc

SEQ ID NO: 89172 - DNA, 865 bp, Cannabis sativa
tctaccatattttcctggttttattattcgtattcgtcacattagaagtataatagaatctgcaagacaaaataatcgtaacttaaaaccaaagaaattacttttggattgagttaccataatttggaagttttaaatagaaagtaataatttaaatcaaagtatctaaatacacaagaaagtgattttaacaaaaaagttatgctgtactatagaaataaaatgaatattatgaattcttgtgtaatgtaatgcttgataagctaaagcaattcctaagtgtgtacattcttcaaaagatcttcaatccattgttatacaagaatcaatagagatttttctgaaaaataaaataaaggcttagtaagaggaatgagaagatagacataagtatacattaaaacatgcaaataaaaaaataattaaacctcatttatttttgcattgtggtgtgggtacgattatacttcaagtatatatataaatttctcaaattctaaaatcacatttccttgttatgatgatattagatttatcattgctagttatacctgcaccttaccaattcacaaaagtccttttctttcctttcctttcaaatcagccacaatcgttggattgttgcattacggagccgacggaagtaacaatggctgtttgaagttcttccatcctttccttttctcttcgatcagccacatttgttgagattgcggccttgcagacccgacagaagcaatggtggatgttaggagctcttcaattaaagtagtgtagagatagagaaatgtagagtttcgtgcaaacctaagaaaaacaagagtcaaataaaaagctacaactaattaaataaaaaaattattaa

SEQ ID NO: 89173 - DNA, 592 bp, Cannabis sativa
aattctcttagcaaggaggccactaataggaagagcatcaaaaattacacaccaccagagtaccttatgacgctccaaaattttagcgttctagagttttttccacaaggtgggggcaaccacgtaggcagtagctcgcttaagaacttggataagataagtagacttagtagtaaataaattattaggctcttttgtccacacccacctgtcactaccctgaccacagggtctaccacctttaatgatatgcctaatcgtttttgggtcgaaaatcgttcgaagctttggaatatcccagtccccgttatctaacagtagttacacaaccttcgttacttcccctagcccaaccgaagttggctttgggtaaaaatcctgaccatgaataacccaaggatctatccaaatgttcgtctcttccccatcagatatcagcttgcatgcatctttcttaaggatttccttagttttcacaacattcttccagaaccaagaatccgagcttttgtaggaacaatccaagaatgacttgcctctcagaaacttagttcataaaactttgcaacaaagcctgattaatttccaaagt

SEQ ID NO: 89174 - DNA, 1236 bp, Cannabis sativa
agagatttggcacaacttgtcccaagcttttaaatggaggccatgatttcctttctcaaaaccccaccagaaatccctgaccagaccatcgatacaagtgaccatacgattagaaagtttggtggtctgcatagcatacattggtaacgagaggcccaccgattttatcagagtagccctgcccgcctttgacaaaatcttagccttccatccctacagctttgaggtgagattatcaaggatgaagttaaagtcagggtccttttgtcttgaacggaacaggggcaggcctaaatacttgatgcacccttcaggcgaatcaatccccaacatttccttgatctctttcctcatgttggacggggtattgttactgaaaaaaaatagaggtttttaacttattaacctgttgaccagaccacaaacagaatttttccagaaaactccagaatccctcaacctcgttcaaataggagtccacccttcctcaaacttgaaacatctcttgattttgggctcgaaaccacccgactgaaggaacaccggcctgtgatcagagttactagtatggaccgagctgagaatagctcttggaaaaagattgaaccatgcaccgttggctaaacctttatcaagggcagatttaacatgacctctaccagaacgatgattatcccatgtcatcgtatctccttgtatggccatattgataagaccacgggagtcaataagattcgagattatcgggataaaggggtcccttcccgaggacccttctctttcagaatcacatagaacaaaattcaaatcccccaaaataagccacggaccaccaaatctatctcccaattttaaaaaatcagtccaaaaatttttcttagcatgcaagtaaggagggccataaacacaagagagtaaccacgggtgggtaggaggatccgaatacactaaaccagagatatgattgtgcgaacaggatatacattcaaaactaaaaccagacttccaagccaaaataataccacccgcagaaccagatggcgacacacaaatattaaagtaaaagtggagggtcttaagagtacgtaccagaggcttagggtccacttttaactcggacagaaaaataaaatccggagagcgcattgcgatcagggacttcagttccagaactgtagaggtctgccccaaccctctacagttccaagcaatgcctctcatggctcctgtggagga

SEQ ID NO: 89175 - DNA, 607 bp, Cannabis sativa
aaaataatttccataaataaaaatattctaatatccacagcaaagagtatttgtcattggtttagacctgttttttttggtttggtttggtttgtatttttagttgttgtattgtaaccacggttttcctccgccatatttaattaagtgagggctatcacataataaacttgggaagagctcactcatggacatgtgaccttcatctcatctcttctcttctcttctcttctcttcctatgcacttaatggtttaattaagtgaggtctaagttttcacctcatttggttgttaaaaaactgggagttagaaactgatttgaagtcattgatttaaactgcttttaaaaatcaaaggattatattggaatcaatattaaacatgtaactcaatgttgataaaaattatggtaaaatggattaatggtgcatgcaatgaatgagtctcataaaaatgttaattacaactacacaacaacaagatcaaatcattcccattaatcttaggctctacagtctataagcctaagattatcttcatatagaatgagacctcaatctctagtaacgtgttgaaatttgaaaagaaagtccctcgaatcctttc

SEQ ID NO: 89176 - DNA, 518 bp, Cannabis sativa
gttgcgtatcggctaaccttaccaccagtattatcggctatacataatgtatttcatatttcaatgttaaggaaatatagacccgactcatgtcttgagttacgaagccctagaagtacaatcaaatctattttctgaggaacaaccagtttaaatcctcgagaggaaggaaaaggttcttcgaaacaagaccatagcattggtcaaagtattctggaggaatagcaaggtggaggaagccacttggaaactagagtctggcatgaggagtaaatatcaagaattatccaggttagattttaaggatgaaatccttttaacggggggaataattataatgacggatgattagattatggattactagcgcaattaatattaattatgtgtattttttgatcatggtggtatatatgattgagggccccactttcaaaaaatgggcattagagttataatttctcaattctgaagattttaataaactctaagtgtattatttatgtcatatgtgaaat

SEQ ID NO: 89177 - DNA, 671 bp, Cannabis sativa
gaactcgaccaaatatcaatggtaaccggttgaatgtccaagggctgccattaataacacgcttgatatcgatctcatggtaaaactgaaataggaaaagattcgaccccagctccttgacaaacaatcctttacccggtttccacaatccagccaacgtgtgcttcatggcttcaaaatccaacgatctcgcgttcaaaaacctccccaccaaacaccaacgatcatccaccagaattgtctcttcaacgtcatcctcaatctcgaacccacactcttcctcatcatccaattcgatatgaccatactgatcttccatgtcctccatggccgtgctactcgaagccattaaaaccagaaaaataagcccagaaaccgagagagatcaagcccaaaacgtacccctgaaacttctggaaacgaggaagaaacgacaataaaacttcaccctctacaccctgctccaccaatgaaacgcaaaaacccagtcgactgaaacctgtaacaaaacgcaaaaaaatacgcagcagaatggacacgagatacccagtcgcctgagcctataccaatcgcagaaaaaccttcaagaagccgattgaccgtatataccagtcctaaacggaacaaaaaaatccaggtgcaataacttagtcgcatacgctgaacaaccc

SEQ ID NO: 89178 - DNA, 551 bp, Cannabis sativa
cttcggtaggaaatataaaacagtaaagactaaagagtaataatgtaagtaaaaatttggactattgtattgtagcgtatcaggggagtctattacatgctctttctctcaaattttgggagttctattaaaaaaaaaaaaattaagcttaaaatattttttaaaaatcacttttagtatttatttaataatttttttttctacattttctattaatttcaatacttatttttttaattatgtataatattttttaataaaatttcacgtaattttttattttaacttttttttattataatatttaaaatatgatttttttgttataatatttaaaatatttaaaaaaaattaatataattaaataggatatatttaagtttttgaggtggaagtaaaattttctaacttttattattttaaatagtggcttttgtaattttgaaaattaaaatttaaatttttttcttttgttgttgttatttttatggaatctatatagtaaataagagaacaatttaaatcgaaactaaaattcatataataattta

SEQ ID NO: 89179 - DNA, 627 bp, Cannabis sativa
gggagaattagttagtaataacagaaattagttacaaccaatattgaactactaacagaatcaactaacgcatggtaaccgaattaactaactaatactcctaacaatactatagccaacactatgcataataatagattatttttcttttttataaaaataaaagaaataagtggaagaaataaataagataaataaggttcagatatttgaataaattcaactaaatatatataaaaagaaataaatgagagttgaccgatcaaataaattgatcatattgataattctataagagaagatataatggtttaaataattaagtcatagcatataaaatataaaagtattattgtcattaatattatcacacaaacactaaatttttataatagtaagattattgaaacaaatactttataagatgaactatatttaattaattttttttttaataaataataagatcactaatttatatctccaatggagaactctaacatccagcaattttaagcaaaagaaatactaggggtgagcaaaaaatccaagaaaccgatcaaaccgagtaaaccgaccgtccgaacaccgaaaaaaccgacaccgaaaaaaccgaaaaccgaaaaa

SEQ ID NO: 89180 - DNA, 2506 bp, Cannabis sativa
caaaagaacggaagcctatacctctgtcaaattttgatttggataacattttccatcgcttccaatggatcttcgacccgtctttgtttgacccccaccagaagttcgccatcattgattcaatttggttgcaaaactcaattggcaatcagaagcaactcatagcatacgttggtatcgattgtaccacaacctttaataaaacttctttaccaccgatggagaaaagcttctcattccaagcatgcaacaaccgccaaattttttcctcgatattactgcatatttcctttttattatgtgttgaataagcagggagtccaaggtaagattcatgacactcacaaataggcatgccaagtatttgactaaaaaaattctttgccacatctgaagtgttgggagagaatgacatgatggatttttgggtattcaataatttccccgaagctctatggtagacagcaagaacatttttgatggctaaggctgaagcttgatcagcttgacagaacaaaagactatcatctgcaaatagaagatgtgaaattgatggagcatgtctagtaagctttaatccttgtagatgacccaattgttcctcatggttgaggagccgtgaaaagccttctgagcaaatcaaaaataagtaaggggacaatggatcaccttgacgcaatcccctcgttggccatacattataaatctattataatcatggtattttatttaaaattgttgttaatttttttttttaattattatagtattagatttacaattcacaagaaatgtcttaaagtttttaattattataattattttgatgcgtattagatataaaattaactataaaaaataaaattcttaattggtattatatttacaatttcaataccaaaaacataatatatttgagattattcacaagtctacgcaaattataaatatagcatcattattttactattttattataattattattttgtttttagatcaaaaattcaaaaggtctttaaaaatattaattatagaataatttttataaacatgaaaaataatatatattattgaatatagatttcattttttaattctattcataaagtttacacttagatgtaaaaatcgttacttttttcctattttaattatttttttaatacatttatttaccagattatgaaatttgtggtatagttttaaatgaaaaggtctccaaatgacattcttggaaaattgttcgctcgcggaagctagtcctggaaggctttcttgtccttttgagaagggtcttcaggctagcattctttcgaaaaatagttgcaaatagctagttgttcttctaagaaggtagtcccggatagtcgaatccagctaactctatcctatccggaagctccttcagtaagtggctttagtcagtgatcccagaagctcttatatgttcccggatgcactaagtcttacgatgacgtggatgttcacgctcaggggagagttggttaagttaattatttcctaactaacttaacaatttcgtttcttgcagccaccgaatttaggatcttgatcctaataaggctataaataccacattatctggtcatttcagaagaagaggttcagattgagattgagagctagagagagaaaagattgtgaggtgcagagaaaagagagagattggatttggattttgtaagaagaatcttctatagatgaagaagattcttgggtaagagtgtgagagttaattaatcttctatagatgaagaagattcttggataagagtgtgagagttgaaacactttgagagaactcattagagaatcaatctcgactgtattatacctgttcttggtcaatcaataaagaggatttggtggtattccaaagctggagtagagtcatagattacatcgatctatcagacataaaccagtatatatcttggtgtacttgatttctttattttatgtcatttttgtttctggttttccatatactctgttcatccctatttttctctaattacagtttgcacttattaaatcttatcattgctaatagtttgattgtttaaaattttgataatttaattttgcactattttaattgtaattttccaacaaaatttttatttttttcattaattatttattatactagaaaacaaaatgtatattacattaagtaatagaattactgtttggtaactttagatactatcatctcaaaagataatagactaattaaatacaagctgataaggataataatagtataacatactcaattacaaacaccataaattaatggttacttagatcatctccagagatataaaaattgtgttatctttgacacaaaaagtagttttgtgataaatttacatcaaattttgacattgtacttcaatgtactattgtaaaaatttgatataaaatttagggaaaaaaatagaaaaatacaaaaaaggaaaaaaaattacaaaaatac

SEQ ID NO: 89181 - DNA, 765 bp, Cannabis sativa
cagatcctaattgccatcctagtccggttcctaggtcccagtccgagtctaggacccggttggggttcaagtcctagtccgagttcgggttcaagtttccgatcccgatctgggtctagatctaggttcgagtcctaggtttgagtcttgattcatgtccgggtccgagtctcgggttccgattcgggtctcttttctgaggctcgggtcaaggtaccccatccaggtccgggtccatgtttgggttcaggtcctagtcccagttctgatttcgatttcgtgtcaaggttcgggtttgggtctgggtctccgtctaggtcggggtttgagtccttgttcgagtccagggttggctcttggtccaagtctagatctcggtctggatctcggtttgggtccaagtccgagtccaagtcttgggtacgggtccatgtttgggtctagttctcggtccgaatccaactcccaagtttcgatcccagtgggtatgggtctcggtctgggttcatgtctaggtccgagtttgggtctgggatcgggtcccaggttcacgtctgacctgatctcggacccaaaactggaatcagactaggactgggactagaacccagatattggaccgtaacagggccaaaacctaaacccaaactcagaccagaacccataccggcacttggacccagaccgcgagctgtgacctgggacctaaaccaagaccgggacctagatacagaccaaaaccaagacccaaaaaccagggccgaa

SEQ ID NO: 89182 - DNA, 612 bp, Cannabis sativa
  modified_base (549)..(558): a, c, t, g, unknown or other
caaaggatcacgagacacttcaataaaagagtaaaggaaagattctttaaaattgaagatctagtattgcaacaagtattcacaaatacacgagattctgcagcaaaattatttaatcacaattgggaaggttcatatgtaattaaaattgttatagcaccaagagtttataaattagcatggttgaatagttcgctgataaaatacacttgaaacaacaaacatttgaaatcatattatcaataattatcttgtttgtaattgtttatttcctcaaaaattatgtaaatttaaaatatatattaatggaatttcaatcttttttctatttcaagtaatgataaagttatactttaaattacttggaggacatataattgtatattaacttaacttttgataattataaaaatataaaagtttagaaaaaattatttaaaattaaagcctgaaattctctaaaatatatatatcttttgcaaagacagaatattcaatcaaagttggtttgcaacgataaaaaattgaatatgttaattccatttttgnnnnnnnnnnttgacaaaaatattttattattctttgtataatttcggctggtatactttaata

SEQ ID NO: 89183 - DNA, 587 bp, Cannabis sativa
tatagctctacttagctctacttattaaggtaaaaaaaatatttttagattgactccattccgtttatcaaatgaattatttagtcttggttataatgtttagtaatagtttttgtgataaatgcaattgggttagaatcatgtctatttggctgttgctctcattgtaatttgcataatgatagatatttgttcgtatgtgcttggttgacttggttatataagatccaaatggttttagttgtgtaggtattttaggattatggtgtccatttcttgtagattacaggagaaacttttttttttttttttgtgttttggatatatttatttttttgatagtgttttggatttttttgaagttgcaagttggagttcattataggaacgatgtttctgttgagaaatagaaagtgaaaacataatgtacttgtttgagtcagcagattggatccatttactagctaatgattgtattttacctttcttcctcctgcttgggatttttggctttttagatttgttattaaaggtatttattaatgaaatttttttaatttatacctttaagtttaaattaattggta

SEQ ID NO: 89184 - DNA, 727 bp, Cannabis sativa
caaatttcaactgcggccaaggtttcctcaaacccatttgcgagttaaattttcaaaaaaaaaaattgaataatttataatgccgaaaataagatttacatattttattgcacgcacaataattttttcttctacacgtggcaagtaattatttaaatctaactttcggtactataaactattcgaaattttataaaaatttgcaagtggttctaaatagctttaacgtaagagatcatataaaaaacaaatagattaaaaaatttatctgaatgccgcaacagataaaaaatctaccgaacaatctttttgggagtctactagaggaatttccaaaaattatttacgtaaaacaattaaagaaaaataaaacactcaattaacactacgttagtgtataaaaataaatggataagaattattcaattagttaaaacattaaagacaaaagaaatgaataatcataattgtttttaaccttctgaatgtacgagaattttaaattatcaaaatgggtgaaaagatttacatttgcaataatagttattttatcaatttaactataataataataatatagatctatcttatactattgtcgtttttagggatgtttcattcaatctaatactcactattttgcttatagtacattcaattcacactaagtgtggatttcattttttattccaatctaatacgcacaataactcaaattgaatccaat

SEQ ID NO: 89185 - DNA, 1009 bp, Cannabis sativa
ggataccagcttgtcttgaaccacttcaggagaggcataaagatgagagcattcagcaagattggcactgcctgaaaaaccttgaaaagtttctggaccagtgaaggttttatcaaacctgtaaaaacacttttgagccgtgtgacccattttgtggcacagttggcactgaagtttttgtccccaagcagagtattgtccttttgtagacacattgggtcctttgttctgagacatgttgccacggccaggctgataaccacgagcttgaccattgttttgattagaaacaaaacctggtggaggatgagttgcagaaaaagtgccaagtggtccatagtggggataataacccctaaacataggattatatggagaagaaactgaagagggataatgaggtgatgagaaagtacctcgaccacctgtgtatggcttagtgtgagccaaattggcttctggtttgttgatgtccagatcagtggagtctttttcgagcctgacttcttgagccatgagtaaagcctctatttctgcaactgtgtaagcatcaagcctggtgttcaccgaagttacaaacacattgtattcactcgaaagtccattaaagattgcctcaatatgatcttgagctgacattgggtgaccaattgaagcaagaagatcaacaaggcttttaatctttaatagaaaatcattgagagacccctgcatctttgagtttcttagctgagttttatacttgccaatgttagccctgtttagtgccgtgtagtagactcgaagtgtttcccagatttgtgctgcagattcacatcccaccattcttgtaaggatcttttcggccattgatgaaagtaaccaagaaaccaatatgctgtcttgttgatcccagctttcgtattcaggagattgccgattttgtagtcgatcttcattggagagaaacttgggaggagttcgagtaggatcgaggtgatgttgaagtcgactgcccttaatagctgca

SEQ ID NO: 89186 - DNA, 501 bp, Cannabis sativa
cccgcccctaatggggcgaggacgggggttgacttttgggggcggaggcgagtatgggtttaaatattcatactctagtcggaaacgggacagggcagaggaatagatacccgccccgatatgatatatgtacatatttaagttttaaaatcataacttctagtctactacaattaaaataacttcatgatttatgttttctattgattatactctatttttttaatatacacatcattccacttaagtattgttttacttaatttttatgattattttttatttaattctctttgagacatcatttttatttcaaaaatatatgtaatgagtacccacccgatggaaatccttcccccgttgggtaattctcggcttgtccccgctttaatttaaacaagtattagggcgggtatgggggtgaatttaggaagcggatatggggtgggggagaaatccccgcacccgccccaccctgtttacatccctactgggaagtct

SEQ ID NO: 89187 - DNA, 644 bp, Cannabis sativa
aaaaaaaatgtttaaaattccgtgagtatttttgttgttttttttttgttttttgttgttttttttttgttgtttttgttgttttttttttgttgttttttgttttttttttgttgtttttgtgcatttgtgaaattaaccctataaatattttaagtagtatgaaacttgtaaaatttgagtcttctaatttgtttttttttttttgtatgtcattgtttaacttatcacaaagaaataacaattatggttaagcttgtaagttatttttggatgtaattttttttttttgacgcggtgatcaaaatcacacatgattaacgatgcagcaatccacaatcggcagtggttcctcctcgaaccaggatagctcattgtctaaccgaagggcatgctttgtcaaaccatgagctgcaaaaatcttattgcgagcaacataggacaaaactgcccccgaaaatttagacaataaagctataacatccacaaatagcacccccagctcattaaaatttaccattcctttgttaatagttgtattaaaataaagaaatgcctacaaccacaaaaactaatataaaaatgagaaaaacacaaaattgaaaatgataaaaaaaaaataattttatttaaaaataaactta

SEQ ID NO: 89188 - DNA, 517 bp, Cannabis sativa
aaatagatcttgggtttattattaatttttctaacacaccatatttaaatctcaaatgaaaaaaaaaatcgtagcattatatctctccagccgcctcttccctttgtcttctttcctctctctcggtacaggtgaggcagccaccttaccttttctctccttctcgtttctttgtgcgacgaccattgctcagctgccctaccggtcgccgcccctcaaccacgcaaagacaaacgccctgaagacctgaatgaagaccaccgacgatcccgttgtcattattttcccagaaaaattgagactcatgtcgtgctcttcttccttcaatctccgtctcgttttcgtctgtcgtggataatttggcgagtcatcgtttatggatccgagctacaacaacggtcaaatatatttttcattttttttatttgttttaagtttgttacaacctaaagattttttgagttcattaaaatagtttgtttgcaggtacaatggttgttgagaatcatggggttcc

SEQ ID NO: 89189 - DNA, 727 bp, Cannabis sativa
gccatgtaatattgtaacgtaaaaggagtaaattttataattaataatgttcttttttatatttataattttataattaataatattctctaataagtttcctctagtcatagtcaacctcacatgttaagtgccatgtaatattaatgtaatgtaaaaagagttaattttataattaataatattctcttttacaaaagggtaattaattaataatgttttttgaaaatattatatcattattattaaatttacttgtaacctatattaatttctataaataaatttaatttttacaggtaatataaaaaatcagtcacccttgaaacaatagaaactctcacacaacataacactttctcaggtatcatgttctttcccaaaactttttgatatatttatttttaatcttcattttctcatttacttttgaattcaaacaatgtatggataacttttcctattgtgttttctagagaaaattaatcttcattttctcatttatataagggttttcccctgattttgggaaagctggtggccgtgtgtgaattctttcaagacaagggtcggcctaattcgacattgtttttcactttgatccggtcgaggtgattttcgtttaccagcgcgtaggtggtttaagttcctatgattgagtctttctggccccttttttcatcaaaccttccacaccggctacaaaaatacaatttaaaatcttttg

SEQ ID NO: 89190 - DNA, 1080 bp, Cannabis sativa
cagaaaggtagccttcatctcagtatgtgcaacaagtttttgggcttcaaccttctttaatctcttcgccaaccctaggtaattggcatcattggcagtatgagttgaggttgagggcacagtggcagatgtggagggctccgttggttctttcgatggtaatagtggaatgatttttgtactttaaacatatccggtcacccattttgcttggttctcaaatacagtagaatcttgcataccaacttgtctttcttctctctcatccaagcccatatccactgtgaggattcaccctcacaattagacttttcaacctcccaattcttagggtacacaatttgaagaacaaccatcacaaaacaaatacaaatcgcattaatgtcgcccaatatcgcacaaaaattgcatacaaattttaagataaatcgcataatgttgctcaaaatataatgtaaattgcaaaataaaaaaggcatacaaaaattagggtaaatcgcacacatattgtagtcgttcaaaatataatgtaaatcgcaataaaataagaaaatctcataaagtttcacaaacaacatctacaaaagtcgcacataaatacaaataacacatagcaaaacagatatcagaacaacaatgataaatagagaaagattcacatacccttttcttaaacagtgcaaccacatcagtttgcttcacatcgtgtttcataaccgaattagggggtgctctagtttaacatttgagggaatctagtccctttgcactggccatacttcttccccacatcttgcatgacctcaaacacccaatattgcagggtcggtgcatatttttacacattatacttcatttctagttgagtaacctttttctccttcttggatttcttcttcgtcttatctttcttactcgagaccttatccatgtatttttgcctaagctattgcatatttttagttttggaagataaaaacttctgataagaaaggaggcccccaggatactcaaataatttttatacattttaactaactttaggatatctatttggatatgcacactctcagaccgtga

SEQ ID NO: 89191 - DNA, 588 bp, Cannabis sativa
  modified_base (85)..(97): a, c, t, g, unknown or other
attgacttagaaagatagaacggtaagattataatatcttaaccaagatcaatattgatacagtcaaatgtatactccatacatnnnnnnnnnnnnnactttgccaatgttctggaaaaaatataagcaaagtgtatgtaacgcccgtatttgaaatttacaaaactcaaaagataactttataatattataattttataattatatgggttgggatcccgaattttaaaaacattcataaaagtatttttctaatacaaagtctactagtgatatatatatatatatatttttacaaacaacaggcaactaaattataactcaaaatattgaaagaccgaaaccctccaggttgcactaccgcgatatgtacaatcactatcgagttccatctcactgttcctccagcttcgcttttcctttacctacacaaggtagcaaactgatgagtcaacaaactcagtaagatatacgaaacatatatacaatcaatgctagaccgactttatgcttaagccgccctaagctcaacaaccgagcacatcaaatggttaagaatgttcttaagggaagtacgacccctgtacc

SEQ ID NO: 89192 - DNA, 834 bp, Cannabis sativa
gaggtatattttgtctattccattctccatggctccaatttactttcctttgaggaggacaaagtaaattgtagccattagagatcttgtattgtgtgctaatgaactgctgtacatccaatttctttctgatttgatctttaacacatatcagtttttccaataccaacttgcttgttgtgaagcttgataactctaccaatcttccccctttatatagacacaatgtatccatttgatccacaaattgtcctccttgtttgctattgccctaacatattttgtcattgctaccatgttccattctgctattcttttgaggcctattccctctgcagccttcggttgacagacattttcccatgcaactggcctggagccaagtgacatatgttgccccttccaaagataggcacgacctatagtttcaatgtctttaattgtcttctttggtagcaccatgatcaatacaaagttcacaagtacaactctacctgctaaagacaaattcctttaactccatgatcttattctcgctgtcatttttttcagctagcaccatacattctttaccaaagatacgtttagcacatataagaatacccaaatatttaaagggtacctctttcttgctgaatccagagctatcaatgacccgttgtatttcattttcttccattccacaacagtagatggcagacttggatggattcagttgtaaaccgaaggagcatgaaaaaagtttcaagccttgtaacatgaaattaatgcttttgaagtctccatgacagaatagaataacatcatcaacaaacattagatggttcagtttga

SEQ ID NO: 89193 - DNA, 665 bp, Cannabis sativa
  modified_base (395)..(402): a, c, t, g, unknown or other
aagacattccaaatcttccttaagaagactcattaaaatttggtcaccaagactttcctttttttcacaattaataattacccaaaaaaaagttacaactttacataaattgataagtaaataatttgagtcaaactctaacaaattgaatgcaaccactacaaaagtgaaaggaaataaagaataacagagctaataccttttatacgacagaaataattacctcgctaataccatcatagtaaatgaagactgctaggagcattataccaatacttagcatttttttatacaaaaacagtaaataaggacaactcactcttagtgagagacaaccttcatagtcagcagtgacaaacccagaaattttactttgtggaggcttatttatcatnnnnnnnntatttatacttatattataatcactcttaataaatttatttaattttgtgggggggtttttctactatttttgatttataattatcaaattaaaaaaaaattaaaagctaatatttttgttagtgggagttctagccccaacatgattactagtgggtccgtccctgatagtcagcataactatttaagggtaaatacaaaagatcggttgggtggttattaaatattatcccatgtgcataaaaatgaaatgtggggaatgt

SEQ ID NO: 89194 - DNA, 1120 bp, Cannabis sativa
atgctagttagggtgttacacatgagcataaggttgccttcggcaagcccgagcccatgaggaatgcgaagggcaaaagagatcctaacaggtattataaattcaataaggatattgggcatacgaccgacgaatgtcaccaattgaaagataagatagaaagtctcatccctcgaggtcactttgagaagtacgtgaaaatacagggccatggatacaaccagcccagtctgcccaataacccaaacaatcaggggttacaacctcttcctattgaaggggaggacatcctagttatttcgggagggccacatatcgcaggggagagcaataacacccagaaaagatatgtgaaagagataaagagtgaatagtcggtatttgccccagaaccatccaagaaggtgaaaatagaggaaccttccattatattcacggaggaagacgagaaaagcgtgagatatcctcacgtcgatccattggtgattaccattcaactcgccaataaaaggatcaagagagtgttaatagacaacgggagcttggtaaatatcctttataaggaaactctaaggaagatggggcttgaaaaagcaaaattgaggccttgtatggtaaatctttacggattcatcagagacagcattgcaagtcttggcataatggagcttccattaacccatggcgaggcacccctaactgccactgttatgcaagacttctaagttgtcgacctgccatcggattaaaacatattgttgggtcgtccagcattgatcggactaggggtagtcagttcgatcaagcacctatccttaaaaatcctaacaccagaaggtgtaggagtggtgcgtggtggtgaccgaccaatgctgtggctgctcgcgattgctatcgcatagagctacagcatagaaaagctggtcatcagtggatggcgatcttggcagaagaaactgaaaagaaagacaaagattttgacccccgagtccaagatgagagaaacctactgaaaccaatcgaggaattggaagaggttattctcgacccaggaaatcccacaaagtttgtatacatagggaagaacctagacgaacagctcaaatagcagctaataagt

SEQ ID NO: 89195 - DNA, 534 bp, Cannabis sativa
atgctcgaaaaaacgcatgcccccttagaggttacactaggatacacccagccgttttttgagatgtccttctatttgcacacctgtgattttgtgtcttggtgggctgattggttttcgcaagaatctgaatccgtcctctaagaagattttaaattttgtatgcgggtgaggtcactgattttgttttcacacattcaccatgctgaaaagatcttctatctttcagatgagcgatctgtcagacagccaagtgcttggctcaggaggcgatgcattcgatggtgattagaagcatcaggaggatagctttatcccaaccttgatctgagaagaggagatccttactgtcgaagacacagagttaggcccactatcctctacagacatcgagaggatggtgcagaagctcgttgaaccaggaactatcgaaattagggacagcgagtctatggtatcagctcgtgaacaccttgttcattccaggcatgctcctgatgtcgaggtcgaggagatggacgaagactggatggc

SEQ ID NO: 89196 - DNA, 2052 bp, Cannabis sativa
  modified_base (1866)..(1870): a, c, t, g, unknown or other
cgttcggttccgttaccgcaagtcttgtcttttgtgacatggtgtgattgttttatggtctgagattggttcttgtttattggtttgagattgttcaggtatttgccattgttttctggtttgagagactaagtttctagtttgacatgttttatggttgtctggtttgagatggttgaaggcaggtttgggtggagttgtgtggctcgcgactgccatggtaatatcgttgcggctttcaatcggggtcatgtagggttcaacttgaagttgctgagatggttggcatcaaagaagcattaagttggattgatcgtcacaattggggacaagtaattttggaatcagacagcttggtatgcgtacaagctattcaaagtaaaatctctatgtcatcttcttttagtcttttagtgcatgatgttcgtatgttgcttttatctttaaacaatgttgaattgcattttatcaaacgatctacaaacaagctggctcactatttagtgagagattcttgtttctctccaggtcgtgtgctttagttggaggattgttcatctgaagcacgttctgttatttttaacgatttaattaattaataataagataccaatttgagtaaaaaaaaaaagtaataagataggaatgatgattatatttagtcataattttttcacttttacactttcagtcataaattttattatgattaaacgtatttttttatagttccaccaacatataaaaaaattattctattaaaatgatattttagtattttaagatgcaatcaaataaaggattgagataaaaattaaatcacttcattatcaacaatcacacgttcctaagaatatgatcttatctatgtcacataaattgtaacgccctattagtttaggcacattattgtattttttttatcactgtgctaacatttgctaatcaaagggatttaatatacaattataatttataaaaataatcataatatataaaaattttactaaatatacattacaaatatacaaagtttacaaatctcgggatcccgatttatttttcaaacacatgaaaaatacaatatatcagaaagtgtcattctgcgactaacaaaaactgagtccatgtcgtcccaaagatctgaacactttaggtgtaaccattcatatatgtacaatttttactaagttgtagactcactattgttaagctttgagcttgcctttaccaacacataaaaacatacatgtgagtcaatagactcagtaagaaaactataaaacatatacatatatttgacttgtaattaagcgtccatacacctaattattatcagtcagctactcatatccaatgcgtatgactgagtctcaaacgttcttaactatagttcgattgaccataataccatatgcactcagtaatctaggtgtactagtgttggtagcatcgatccatactataagtacaactaactataataccacatgcgctcagtactctagctaggcgtactagtgttggtagcattagttcgtaccttctattttacctaacatatatttattggtatctcgatgcaactctgtgtacaccatacctataccctgatatgtaaatctaatgaaaattgaaacatgcatgccaaacatgagtatatgcgcatctgttatactaatcttaccttaattccgtaatcaggtataccagtcaacctacatggaaaaattactcaacaatcagtaaaatacttttagggacttaaactcataatcaaaagttatcttatcaataaatagtgtgacgataccttaaatatcaagaaaaagtaaaaattgagtgttgcccctgatttcgcccaannnnngtggaccaaccagacagggacacgtggatcaagcaacttataatccaaactattcgctaagtctttatgcaatgaagcatcatccgggacatatctcctggagaaggcatatggaaccccatatgctcccggaagcctaagtaacgctaaggcatctccgcggggtgtcaggtttcccctga

SEQ ID NO: 89197 - DNA, 1002 bp, Cannabis sativa
ctatattgactaacaagggtttttgtttgaatgattaagtttagggctgcacataaattgttttactcatctcctactcaatccaatctaatctaattccaacacaactaaagcatagcataaatagcttataatgttcatagaacaaacttattgggttggagcctaaattaacctacctaactagaacccgcgcgaatcctccacctgctcgcttgggccctgcgcgtgggtgacactttgctagcactcccacatgagcggagctcccccttgctcatttgtgagctctcgcaccactagaggatatccccctcgctcctttgcaactcacaccatgaccccttgcttgtctgcaactcccatcatgaataaagctccccctcgctcattcatatccccacgcgacgactcactacccctcgcttgtctatagatcctcatgacatgacgggtccttcctctcgcgcattcatccacattatatgactctgcatgggaatcctccctcaaagcacttgatcactcaaaaggaatctcaaacacatcttctcttatgagtgatcaacataacctagacatcactaaattgctaacggcagtagtggttgtacaatgtgtatatggacctatgataactcttgaatagagagttttttatcatgcttttgagcttgattagttagttgtttatttttccttttttttttgtgataatatgtgtttttgtgttcatttggataatttagagtttttagtattaattataaaatttatttcggtttttggtgaagaaaagattctaaaagagaaaatgcaagtttaatttgttgaagttttacaggaatattgttgttgcaaacactactacaaaatatcatttttcttttgttggtttaaaactgagaacttcttttttttcgtcagttcaaacaaccgatggctatgtgggggccataaatttaggcgtctttattagctgtcggttaaaaactgccactc

SEQ ID NO: 89198 - DNA, 559 bp, Cannabis sativa
  modified_base (78)..(79): a, c, t, g, unknown or other
ctctgataccatgatgagaatcatagggtttcatctcaaaaccaattggtgatgagtggagtagtccatgttcttatnnatggctcaatacttttacatttattccaagtgggataatgttctccaatatacgtacattgcacgtaacatcaacctaatatatatataagcatagctagtcgacaccttatggtgcccaaccaaaggtggagccacgtggagctcagagacagttgaaggccaccctgaaatttgaaaatacattaagacatatagatatagtaatcaaatatgatagttggttaatatgcttaaaatttacatatatttataattcactgcctttttttctatgtgtatttacattttattttttttaaaaaaaatccacaaaacataaagttcaattcagatgcagacttatgaccactaaaacaagtcgatgacattgttaaaccatcattacatttatatttagcttgttattaactttaagttcactctaaaattaaattctgtgtttgttattgtgcctaatagcacactgatgttgtgcgtc

SEQ ID NO: 89199 - DNA, 605 bp, Cannabis sativa
ttttcttccctgctaatacactactccccaaatatcagcatacgtagaaactagcttgtctcccacaaatgtacaactgtccttttttgctgatgtagactggggagcatgtcaagacataaggcgctccatttctggctactgtgtctttcttggccaagctctagtctcttgaaaatcaaaaaaaaaagaaaaaagaaaaacaggttgtttaacagtcttctgctgatgccgaatacagagccatggacaatgccacctctgaagtcacatggatccttaccttactcaaagactttggcatctcactcaacaaacctgtctctctctaatgtgacaacactacaaccattcacatcagtgaaaatccagtctaccacgagtgcacgaaacatgttgaaatcgactatcatttcattagagaaaaggtccagcaaggcatcctcaaactgcttcacgtacaatcccaaaacaacctggctgatatattcacaaaagccttgctcgcctcctcctttaacaacattatatccaacctgaacatttcgaacatctacactacagcttgaggggtctattacgatactacccctgatcagcatcat

SEQ ID NO: 89200 - DNA, 692 bp, Cannabis sativa
catatttttgtaaatagcccacaatacaaactatctcaagcccacataggctaagggcttcaacaatacaaattatctcaagcccacataggctaagggcttcaacaatacaaactatctcttagctcttaagttgccaaaattatctacatcatctaaaatataattttttattttatttctctaccacactatctttagcaatattttttttataaaattgctctaatgttaatcgacaccataaattgtcaccaaatcccacatatcattaaaaaaaatattgttattatttttaaagttgcaatattttcttaaaaaaaagcacaattgcttgacaaaaacaaccatgcttcaattattaccatagctccaaaaggtccaatggatcggtaactaggcccgaagtataggcgggctaagcatatacttaaggcccacttaatttaggggcccaaaattttttccctttttaaaattatatatctttttattgattttgaaaaaaattattattttttttaaataagagcccagtttttttttttttttgttatttgtatattatttttatgttgttttgatattattttcttgttactttcatgtaatttttttttgttgttttcttgtattttatagaatactataaaaatctaaaaataaaactttaaacgtagaaaaataaaaaa

SEQ ID NO: 89201 - DNA, 994 bp, Cannabis sativa
gaggacacctcgggtcgcctatcccttgcagcctggaactattttttgaagtccttagacaactgttcccaagaggtgattgaataatgggtaaatttgttgaaccagatgcttgctgctccaactagcgaagtggggaacaaaatacagcgtagattgttcgtaacattgctggctcgcatgatagtattgaagttattaaaatgcgagactagatcggtggtcctatcatatgaggagacgtgagggttctttaatccctgggggaatgcagtattcataatgtttgaatggaaaggctcgagttccttgtctgagtcatatcctgactgctttccacgttccctgacttgatagctcctcaatttttcctccaactgatcaattcacaattggataggatcctcttgcttttgactgagttgttggcgaagatcaggtatttttagttcaagtgattacaaagatccggttgttgctggttatagttactaacagagctcgtcctactcatggacctcgtccttgagtaactttcagttctacttgtgcttgtactttctcgatcagtattgtgacgagttccatctcctcctcgtgttgatcgactatgggttcttgtgcatcccgagctgacactcaccttgtcacgtcccgtccttctcccttgggtatgggttgttgcatgccccctgttggggtttgtgcgtgccctttccctgttggtttgaaacccacatgtcccaggttgagtctcaggatttccctcattctcacgggggatttcctgttccctggtcccgggtcgccttctgctctcattttggtgagaaggctctggttggttatttggttgttcattcttagtgggaccctcagtttccccacattgttcttcttgagtgttcttaggattctccttagccgtctcttgcctcctagttcgtgaaccacgaggtctacctcatggtctcctcactccaggatcaggttg

SEQ ID NO: 89202 - DNA, 528 bp, Cannabis sativa
ccactcattgccaattggttttgagatggaactccataattctcaacataatgaaacgcttccgacacaaaaaatagcagctatggttaattggcctcaaccccacaatatcaattagaggattccttggcctcataggatattataggcgatttgttcctcactatgcttccattgcagcccctttgacagatttgttaaagaaggaaaattttaattggaatcctcaagcttcctttgcctttgagacactcaagtctgtcatgactcacgcacaaatacttgctttaccggacttttctaaagaatttattattaaaaccgacgctcccaatgtaggtattggaggagtccttatgaaattcgaccatccaattgctttttttagtcaaaaattgagtccacaattttcaagaacttctgcctgcatgcatgaattgagagctattgttgaagccattactaaatggcatttatacctcctcggtcgtcattttgtaatacacacattgaccataagagtttgaa

SEQ ID NO: 89203 - DNA, 577 bp, Cannabis sativa
cacgtgtgaacaacactcactgaaaaaatctatgacttagtttagttggtaatgttttattgactttttactcctagtagtagtagtatatgtacttttacctaaccatgattggagctaatgatttaaacttgtaataaatgttaatgataattaaataataatagttcttgttcttacctacccttctgaaattctctgcactttattggtaaaattaatcaatacttacaatagtttttccagccacatgacatttttagattgattagttgttgtttcccaaatttgtatatcatgtggctcgaaatgaataatattattaacagtattgctatcagtcatcagtagtgctttacatttttcttataggtggcgctttaagattagttaatgatattctataaaaattaattttttaaattataaatacttaattataccaatatcaatttattaccgaaaaaaccctaatatcttttaacaattctctaaaaacaattttaggatatgattacaaatttacaagctggtttattgtattagttgttttagtattattctttttttttttttt

SEQ ID NO: 89204 - DNA, 879 bp, Cannabis sativa
  modified_base (128)..(141): a, c, t, g, unknown or other
aaaaataaattatattttaaataatatgacaaaaaaattaaataaaaaattatataaatttttttttagaaaaaatacaatatatatacataagttagaaaaatttatgaaaataaaatcaaaataannnnnnnnnnnnnnataaaataatgtgaggaaaaaaattaaaaaatatattaagagtaatttttaaaaattattttaagtttatatttttttaataataaggtgtatttatcattttatggggtgcaagcaaatagaacttcccttaattttattattgagagttaaacaatacattaatattatataagaacaaattttttctaactaagaaacatcattatatatctttagtgcatatcttacttatttattttgttaaaattatatcaaaaatctcaattagtgatgtaaatatatgtcgtgccataaatatgagtcgaattgtaccgtgtcgtgccataaaaatatacaatcgtatcgtaccgtgttataaaaaatacaaatcgtatcgtgccgtattattaaaaaatacaaatcgtgtcatgttgtgcttagacttgtgttgtgctcggactgacctattttcttatatgagctcaaattagtattctatttttcctcattttatatacataatcaatgagataattactaaatttatgtatttttttatagtttcaattatttttatataatttttcacataaaattacacaaggagatcatcaaaagtattaaaatttgaatatttactaataaatatttaaattattattatttttattattaaatatatgatttttaacatggtgtgctttcataatagattattcttgcttacgtgtcatgccttttagacttgtcatgaca

SEQ ID NO: 89205 - DNA, 625 bp, Cannabis sativa
aaaaaaaaaaataggaacaatggacaccacaagtggtgtcaatagagtttcctatagtgcctaaaataatagtagatggggtgttattgagttgaaacttggcacgacacttggactataggtgtgccacataatcgtgccagtagaggatactattggcatgccatcacttatcgtgccaaaacaaactttttggtgcgaactttttggcacgatatgtagttcccataaaagatataggcatgaaaaaaaaaggctattaggcactacatttatcgtgtccataacacttttttttttgtagtgattagacatatgttatcttcaattatcaacaatttagcgattctttttaatttttttttttttattttacataattttaagttgtgtttgttttattatttgagcattaatttttgttttatttttagattaatttaagaataatttgcagttagattatcaagattttttaaagcatcatacaaattcattaaactaaaatcactaatatattgcattcagtatttagttttaatttaaaacaccactatttaatatacctaaaaataattttaaataataactaataatattatttctttaattattaattgtatta

SEQ ID NO: 89206 - DNA, 1132 bp, Cannabis sativa
gagaaataatactactcagatcactagaggtgggacctaaagtagctcttttaaggttacaatgtaagaattagacatggaaaatctctagttaagagagaagcaatggtgggcctgtttgtgagaaagaaagagttcatacttagcttaggatttgctacttatgacttagaattcagcttagggtcttagggtttagttaaggctctttatataggagagcttaaatcctttaattaggtaaattaagcagatatttacatattaaattagtaaaatataaatgactaaaatgccccttaaaaatagatattttccctctatttttgtgaactgttaaggcccaattcgcagtctaggttgctaaccacgcatgaagttgtacaccaaagtcctactaggtcaatgtctagtcagccatgcatctgtaggatgtaggctacctggccttgtgttgtctagaagctggccggccagcctccttcaggtggttagtttgtcattcgtcgtctcgtttgagtgtcgagaccccctattagttgaagtgttgagtagatgatttagccttcttattgctaagctgtactaccacgtggcactgatattggccacatagacatgccacgcaaggtgggaaaaaattggaaaaacatttgcccctaagtccctgtgtggacctctgtgcggataaggactttctagcttagttaagactgatgtagccttagctgagtttatttcgctacatttttagtctttgagatgactgcttttgactgtttgatctcatatgttgtagtaagttaattgcattgtacttccacatgatttttagttgaacactgtgtggcaagtgaagaagtggtcccacagaagctatataagccttaaggaggggaattcctcttcaactttcacttttcattctctcactaaaaaaagtaactttgaaaagctccgcattctctctagaggctgaagcccacattgctccatctcccaagatttttgcgttatttcaacgatctaagcttcccattctcttcgtcaaaggtttcttgtagtgggtaagctttatattcttgctatttacttgatttagttgactttaccatgatttcatgaatctttt

SEQ ID NO: 89207 - DNA, 1712 bp, Cannabis sativa
gagatataaattttacctgtggtgcttaaacatttgtagcctttgtaggagtcattgtattccaaattcacacactttagtgagtgaaacttaaaacttgtggtttttgtaaggcctcgtgcaggggtagcaagtagctccaaaagttttaatttgtttgtaatctggttttctacgaaaaaatatttcaaaaggagttttgttatgaagaatgggagttgaaagcctagtaatgaggtacacataggtttgaaaggcatcaacacaatatttgaaaggcaagctagcctgtgcaagcaaggttagacccatctcaacaatgtgtctgtgtttcctttcagctctttcattttaagctgaagtgtgaggacatgagtgttggaagtgaataccattagttttcacgttttcaaatgcttggtactctccaccccaatcatatttaatacttttaattctggtttcaaactggctttcaaaaaaaaattaaattctatgaaagcattaattaagtgcatcatatcatgtatatctgctaaagtcatgaataaagtgtacgtagaatttgaagtttgtgttagatgaaattgggccaggtccccaaaagtctgtatgaattaactcaagcaccttagaggctctataataagacattttaaaagggaaagcatgtgattttccaaattggcaggctccacaaaagttttctatttcatctttgggaatttttacattgttggaatcacaaataagtttaagaactctagtggatggatggcctaaacacctatgccacgtatccttcttggaaaatttaaaactagctgtttaagcaacatttgatttagacacacttgagacaccagagaaatactaaggttgattttggctaagaatagatttgttggtgaatcggtagagaccatctctaagcactccttccagcagaaccttcgttttgagtttgtccttcacaaaacaataattagggtgaaattcaacaaatacaccattttatgatgttaaacttgatacacttagcaaattctttgcaatatttggaactattatttaatagcagggacttagacacattgttcgtctataattttccataatcaggatgataaatgttaaggctattaccatcacctatgatgagtttttctttaccaccatactcattcttctgcatcatgttattctcatctgcagtcacatggttactagcatcactgttcacaaaccaagcctcattgttgacagctttaggtgtagcagtgtagaatgcagctccctgattaactttgtgattggtttggccaccaattttgggatcagatcccatgtatgcttcatcatatctgtgagcacccatgtcgacctcttccagagttgcttcaaccaccacgagcataatttcctcgaccacctcctccttgattctggtagttgtttcctcgacctctgttgtttgtgtttgagcgatttacaaagttttcattaggtgaaataggggaatgagtaggtttagtattgttgttgagactcagattttgaaggcgttccatcttattgtcaaaggtgagtagtatcccctacaactcttgccatgcttttgatgagagagcttcgatttgcagaataatcagaaagtactcagtatccaagtcgatcggaggtgacattagatatgagttgattctcaggat

SEQ ID NO: 89208 - DNA, 637 bp, Cannabis sativa
aaagtagatgtttggccgagttcagccagttgtcactgaggcaattggtttgaaggaagcactaagttggatcaaacaacaagggttcaaacatgttgtggttgagtcagattgcaagagttattaatgctcttcatcgttcaactcatatggtctctcctttgggtttaattatttctgattgtcgtttccttagtttttgacataaataatattttgtgtgtttttattaaacgatctgcgaacatggtcgcttattgtttggcgactattacttgttcttttgctcgtcgtagctataatggggggcttgtccctgctgctttcaaacaattatttcagacgatttgtttatctaatgaaattgtaattttttggtaaaaaaaattacatttaaactaaaatataattaacaataaattttgagtattgttatgtttttttttttttttttttttataaatagtaattaaattaaaggcttcttaataaaaaataatgctgtttattgaatcattataaaaaaaataattatacaactaaaattatatctaaccaaaataaaaactaagaatataactaaatactatacgtgcattgcacgtaatattaacctaatatctattctatataaagt

SEQ ID NO: 89209 - DNA, 1012 bp, Cannabis sativa
aatggcaaccaagatagattgatttttcttgaataaaaaaaaaactagttttatccaaaggaactgagtgaataaatttaaggagtttttacactatatactactgaaattttcaattttttctttttaatgtggggcagaatttttttcaaaaataatatgcaatgtgttaaattttcactgttgttttacgattattttttagttgtttattttaattgttctgttttattgttttataaaaggtaaatatcatttcgaaccctgtgttttacaaaagttatcaatcgaatcctctattttgttaaatgataaaatggatcctgtatttttcaaaatagtataaataggatcctgaccttaatttttgacaactttttatgaatataatcaacttaaaaatacaaacagatacagaaaatgtaaacagttttctcataacacttttagatcggatcattattaaattttattttgacaaaaaaatcagttcagagtcctatttttaccattttggaaaatacaaggtccattttgtcatttaacaaaatagagagtccaatcacaatcagtaagttttgcaaaatacatagtctaaaatggtattcacctttttataaaaaaacagtatttttgtaaaaaattcccgtgtgacagtaaaattctaaatttttatccgaaattcagtattttcgtaaaaactcgtaaatttaaagagaagaataaggaaaacatactagcccaaagctgcaacgaaaatgatccaaagtatagctctaaacttggtagattccttgtaatagatccaactctgatatgataattaatacagagaatcaatttccaatctactatcatgataattttgtagagttttgttttgcgaaaaataagagaaaaatctctcaaattataccaactatttcaaatttgttgctaattatctaacataattcaaaagttcagataataaaaatcaatttaataatataatttctgtaaatatttatga

SEQ ID NO: 89210 - DNA, 788 bp, Cannabis sativa
  modified_base (712)..(744): a, c, t, g, unknown or other
agctgttggcgaaggtcaggtttctttcgattcaagtgctctcgtagatctggttgggagtaatagctggcagatctcatcttactcattgaccgcgtgctacttatagactttgttttttaagtggctcgcgaatttacttgttcccatactctcccgatcattagcttgttgagtactttctcctcttcgagttgatcggctatgagttcttaattgcctcgaagtcacacttgcctgttcacactctattcttcctcccgagagcagtttgtcgtatttcctccatcagggtacgtacgagtcctcgctctatgggtttgggaagaacgctggtgattcctagcaggtgatctctgttctcctggctgagttccaacatcctcctcattttcatgagagatttcccgttcatcagttttcggttgtctcctttctggctgttcatcctgattctcaaggggtatctcatttttcctgggttgttcttctcaggcctttttctttctcctagttcgtgagccacgaggtctgcctcgtggtcttctcactccaggttgaggttgattttgagcactaatcccctgtgccaccctagccaaggctgcctctcgttctaactcagcgtttcaacgatgtgcctcttccaaatggtgtctcaagcggcggctctccatttcataagttcaatttgttggaatttattttaccnnnnnnnnnnnnnnnnnnnnnnnnnnnnnnnnnaacaccctaaatatgaactttcgaaaacgatgaaataaacacat

SEQ ID NO: 89211 - DNA, 547 bp, Cannabis sativa
tcatgagaatctacacaagagaggttgctttggcgacatcttatttcaatcaactcatttagaatgaaagacacaaactttagtaatttagaatgccaaacttgaacaaaaattaatccaaaattaagtattcttaactttcatccaaaagcttaaaatttatatatgtatataaataaccaaacttagttaatccattaacaaaggcagcaaagttaagaatccaaataattttaaaataaattgaacaataataaaagttgaataactcatgtactgaaagtccaaggcaacatgtcataatcttaaatatatatatataaaagtcaaaatatatatatatactataacacattatatcacatatgcaattattaacgtcttttcatatatgatacatctctaattacttgatttcattatattgaatcagtaaattgaacaacatgttgtcaattaatagagagaaaaggaatgaaaacagaccatcgcacataaaaattcggcaatggctatatgtatatatacacactgtatcataactaaa

SEQ ID NO: 89212 - DNA, 740 bp, Cannabis sativa
ataaactgttgcaaaaaattctttttaacatgttatttactattagattttaaatttattttaaataaataaataataaaataattaattaaagataaaattaaatagattatatatataaaaagtataatcttaatgtgaaaaatcaaattgaaaataataaattattttattagattggaaaaatattttatagagttttcttttttttaaaaaaaagttggaggttatatatacaaatttttttatttatttttgttaaatttaaaaagaaaaatctagaaaatatttttttacataacttttttaaaaaatacttcacccgtgtaagttctaaatttaaggagttgtgtgtataagttaatatcttatttatacatcagatttttaatcttacaatatatattttttatttttattaaacaaaaaagaactaaaaaactaaccctaacacacttttctctcagtcgccgcactaaccctaacatatttttgccacacatcactttcttccctctctcttcacaaagctaagtctcaaagtttctctctctcgatcgcaagagaaggtggaggagatggtgacgagcttttcacggtgaggattggtttggggttatcgccaggagtagggctattcccaatggtttagaagagggtcaattataggaaccgttggaaaaagtaagtggaagtttttcccatcagtttagcactgtagcaaaaaaactgttgggata

SEQ ID NO: 89213 - DNA, 727 bp, Cannabis sativa
tttcttctatttttattattttttataaaatgtttattaactagatatttataagtatttgtctattttaattatacattatacataaatagaattatctgatcatttattgtttttttctcaaagaaatagtgaattttgaaatcatcaatatataagaaattatttatttgtgaaaaaaataataatagtcaaggatttgaatttgataaaaaaaatttattatatttttataatttgaatgtgatatgaatttgggttcattttgatttgattaattgaatttattttgatcatatttgtttgatttataatttgtttaatgtatgtgtgtgtttttttttttcttttgttaattaataaggataaataagtttgtcgcaaaggaccacaaaagatatgttacaagataatataatatagagggttaaacaatagttttacatcaaaagagatacgatgatgatattatatatattttttttttggatgattacgatgtagagatgatgctttgcgagggaatgcacttcatcatcgaagaaaagactagactgacaacaaagtatacacttatttatttatatataaatattaaacaacaaataaatatctataattaataaccacatataaataaacataacacacatagggtgatataataaacttatgtgaatattattattttgtttattaaattagtatgtttaactaatagaaaata

SEQ ID NO: 89214 - DNA, 558 bp, Cannabis sativa
atatatatataggaattttctacagtagggaatacaattcttaactcatgctatagggaagaaaattaagccaataaaaaattaaagataattgattgtacaaaaattttatttaacatatgtaggggattatttcattttttttgtttatgatgatttttttattattaaatatttagttgatgtatatatatattaaaaagacttcatgttcattgttcatgggcgatacagttttttttttaaaaaaaaaaaattgataattttttttttattttattcatttttgcactggctgtgtccaagctaatttattggtagttcttaacaattttaatcagggaaattctaaaatacatccctctaaaactggtgcacttgtgcactgatgcacccttatttttattctgatattcgagggacgtttttagttaaaaaaattttcatggtcgtgtatataactgttatttaagacattttgtaaaattttaagaaattcagaaaaatataacacgccgataataagattataaaaaaattaatagcaaaaatcgtaag

SEQ ID NO: 89215 - DNA, 621 bp, Cannabis sativa
cagctgatggagaagagagaaaatgtttttagagtttttggatagagtatctcaaaacaaagaaaactctattttggtgttttcatttttacttttataaattagaatctgaatttgaattttattttcaaaaatagggtaccaatcaatgatttacatggggcccacagattttatgttttcaaatttaaaagattggattcaaattagaaaccaatcagacccttagaatctgaatttgaatttgaaaccaattagaatctgaatttgaattttattttctcatatttttaaacctttttctcaattttcctatgaaataacatttttttttaaaaaaactcgagaccgcagtcgtcatttcctctcactcagtgccagccccgcggacgtctccgtcccagttcccaccctctctcgatctctctctctgtctgtgactctgtctccatgtctccctttccttcagcagcccactgacgactcccacacctaagactcaatctcgtcaacgacggctacgggtgacaagcttcaagctcccacaggtgaattcaatatcttcgtctttctgtgtagtttctataatttagtgattcaattttttctttgtgtgttttt

SEQ ID NO: 89216 - DNA, 532 bp, Cannabis sativa
caagagcttttttgtatcatcagagatacctccaaaataaatggagaatttagtagcattggctgttaagccagtggcattacaaaactctgtaaaagcttgttgtgtgatgttcaaggaagaggcattacccttgcaaaaaattaccaggtcatctgcaaaacacaagttaatcagcttcaaagatttgcacattgggtggtatccaaaccccttggagtttgaggcataagtaaacgagtgaggtactccatcacaagaacaaagagcagggggggagatgggatccccttgtctaagccctttttttccttggaaagtcccatgaagtctcccattcagcattaaagtgtatgaggtgccacaaagacaaaccataatcgacttaatgaattttgtagggaaacaaaggactttaagtaaatccataatgaactcccaatcaacggtatcataggctttgcttaaatccaccttcattagacatctagccgagatgtgtttcctcgtatagcctttaagtaagtcttga

SEQ ID NO: 89217 - DNA, 571 bp, Cannabis sativa
  modified_base (527)..(535): a, c, t, g, unknown or other
tgccataaacaagagctgcataaggtggatgtcaaaacaacaagtggttgctctatctactacagaattagagtttatggtaactattaaggcttttaaagaagcaaactggctacagagtatttagcaagagttgaaactgctcaaactttcttttataattttcttactcattcaaaatgattttttaaatatttaaattaattttttaagatttactaaaaaaatattgaatttttctcatttttattttgaagggtatgatttaatagttgtcaaagtttggtaagcaaaattactcatttacaaagacatgtcagcatttaaatagaataataggaaggaatctaacagaaggattaaaattttataaatgtaaaaattcagggagattcttaacaagttgtatattttagggaacacaatcaatattatcgtaagttcgagggataaaatttctaaaaattctatattttaattgtggtatataatttggttggtatagtatgttaattccatttttggcnnnnnnnnntgacaaaaatattttattatttaatgtatatttcgg

SEQ ID NO: 89218 - DNA, 748 bp, Cannabis sativa
tttcggtgtgatagggttcgtattgtggttgatgagagtggagttgttaccacaactcctcaagttggttaattataaagccattctctattaaattgatgtgttaagttattatttatgtattattttctatatattattgttgtgctgtaataagaaaattggaatgtgtatgtatgttatttgttttacatcaataagatccttgtaaatgatcaaatataagatattgaaatgaattattttgtgaactaaaattgaaaattaagtagttttgctttgatgggtatgctttcaaaaattatggttcaaatctcaattaaaacacttttaatatattttttattgcataatttcttcctttgataaaatttccttaattagcattaaaaattagaagaccaaaataataacatagctacttgatatgaatcgtaataaagctaaaagcgcaaaggcaaagaaaaaggcaacttagcatagaaaaatagtttagttggtgctcctaaacatggaagcggatcttctgtctaggattcttgtccattttgctgtccacccaattaaaatagtccaagtcattaatgaattaatattaccattttaacatctatctttttgttaacagtactgttaagagtataagtattaatataatacatatatttgtttaataaataaggacatattagtgcagtgagacctaactatgaaatttttaaatttgattcaagtgaaaaacactttc

SEQ ID NO: 89219 - DNA, 1220 bp, Cannabis sativa
ttcaatggcagtttaaaccgttagcggttttttcggttttcagtttcgtcggtttcggttccaacggtgttcggtaggtcggtttgaacggtttttttagttttccggattataaatattttgtacttatgccactaaagaaaatcattaagtttatgtcgcttataatattaaaatttgaagtacatgtgctgttatttaccttagtatttgcgtagaaagaaaaaaaacttactgaaagaagaacaattatgaaaaagtactttcatcattaataagaaacttttagattttctataatgaatgaaacaagtaacgagagaaggcaacactttattagaggattatttatttattttttaaagaaatatttgcgtcatgacaatttaaaattttaccttcataattggttatatccaatgatatatttttagtgccaaattactcaagttactaaaactataattcagtcactttgactagtttacttccactaaatggttattagaataaaaaatgtgtcatgaccgaaatttaaattttgacaaatatgtaatatccataccataatataacttaggtgtggtcaaaggtcatactttaatcattattggaaaataatatttccaaataatcatttattttaacttgtaaaatcatattaaatacataattgaaataatgaaacaactctaataaatatattttaaatattaataataaaataattttatttctcattatatatagaatagtaataaatccacaattatgtaatcgcataatagttagattttgtttacacaaaaatttgacgtgatgacatgagcattgttattcgtatttctggaagagagatatgtgtacttccacgactcaaatacaactaacaaaggcacagattgcaggcccaatcaagataatagaccaaattcactaatttaggccattaggggttctagaaagacatctcgtttgaaagaagtgtccagtgaagagagcatctggataccttcaagcgatgcttctagaaagataattaataggcctccaaatgtcaaggttgatttactgctcattttgtaccgaatcccaccacattaggactttgtttccaaagttaaatctagaaatcaatcattccatgaagtacagtgattttcaagcagtcattaatgatagccctggtgtccaggttcaaaggcctaccatttggggaa

SEQ ID NO: 89220 - DNA, 557 bp, Cannabis sativa
catatcaactcatttaaatgaccataacaaccatccaacttgaatatccaccactagaattaaaattaaagttcaccacaactaaccctagagcatttagatattcatttttctaaaaagtgtaaattctcaaatggcggagaattatcgccattaatcaagaatgggcagcaatgacaagagtattttcaaaacatttgagacagagatttaccccaaaaacatcacaaaccaaaccttgaatagaaatctcaccacaaatggccaatgacagctccaattaagaacaataatcaaaatagcgtagcatataccagaataattttcagatttagaatgtctctaatcaagctcattatattgcaagaaaatttctcaaaacttacagaaatttcaacgagcaattgggcatcggctaatgttctgcttgcattataaattgagtgaaacactttctctcttctttggctaagaacagcacctactgcaaaatcactagcatcacacattagctcaaaaggaagtgaccaatcgggggctacaataatgggagcgga

SEQ ID NO: 89221 - DNA, 610 bp, Cannabis sativa
ggcattaaaaattgcagacttgtcgaccaacaggggagagcagcctcgtaggatgtgtttatatgttcatatctactcatgcattaaactatttggaaatggggagttgttttaattaacaagtattcttgctatggcaatggagagatttcgtttggactaatacaattttcatattcaagcttattctttttagaacactttcgatttcaatttttctcttagcttttattcatatataacatcaactttagatgtcatatgcacaatcataacttctttttctttaccttcacacccaccaattacatttacaacaattcatattatcttgcataattacaaagttcactcataatgggattttcattattatttccctttttgtttccaactaaaaaaaattccagttgtttactagccaaaaacaacatatacactcaagcaaaatcttttctaactctttaagtttccacttcttagagctgaaatactccgactagacctctctcaactttggtttaaccattctttcgaccgattactcggaagaaataatgagttgtaagatatcttaacatagaaattttcaatatgtatactggtactt

SEQ ID NO: 89222 - DNA, 639 bp, Cannabis sativa
  modified_base (52)..(67): a, c, t, g, unknown or other
ttatttataattggcccaaattgggactttatttttttataacaaattagannnnnnnnnnnnnnnnagtattcttaaatagaggttctacggtataatattttttttagatgttatttaataaacaatatcattttaatttaagtgtttataacattaacaaaaaaaaatatataataatattcaaaatttattcttaattataattttagtttaatagtaatacttttaatatttttttagaagtatctacacttttaaatttccttaaagctaacacagttaataagccaagtaatcaatagctggattattgaatctaattcctctgctaataaccaaacggttagaaagtatagcagtagcacaatacacattttataacaacacagaccccaaagataacagtaaaagtaccttgaaaccaagcaaagaacaaagctttacagcccctggttatgtatgtataaatattttttatttatatacgtgttttggatgatgagtgagataaagtagctagtatttaaaatgagttgttttattttaatggtggtgattaataaaaattataagggagctctagagagtggactagctataatggaaaaactaataagaagagtacagttcattcat

SEQ ID NO: 89223 - DNA, 1055 bp, Cannabis sativa
  modified_base (1027)..(1029): a, c, t, g, unknown or other
gcattggaagggaccgatattgagtagatctaagatcctgataaaataatttccaacactgggaccgagcactaggtcaacttgggtgttggatcctagtttttgcctctaggttagtccaattctttcctgaaagcatttctttcctcattttggatgaagataaatgaaattcttgggaaacatcttcagtattgtggttcgaagcgccataagttaagaacatgtcaacttgggtgctgggtgcatcaccaagtggcttgggcactgggtgcctaggtgctccgaacatgaagtatcctaatttttattttggtgtctctagtatgtttgtgacaggttttaacaggttttatttatgtatgagtacaaatttacaaattttgagccatttgcactaagacggacccaaaaattgaaaccctagctcgggatgtcaacctgggcactgggtaaaaccctaggcaccctggttgacttttgagaggctattttttaagttctcaggctttagacttggagtcttcttgacttttttttttcagaatactaaaggatggtgacttaaaaacaacttggggagatccaaatacccattctggaacccctaaagtcaacttgggcgcagggctagggacccttctcatagttgaatgctatgactcgtaacacttaactccatgaatgtttttcttcttaccatttatccacgtcatgagggatagttttcgtgtaaacatttgcccccaagtctgctttacacatgtgcaaggctgacttcatgacacatactaagtttgtttcttgtgaaactaccatgtggacatcaatttttatttctagcaattattttctagttgtcttaagtgatacccttttatttggagactttagaaatatttcaattcaacaccaaaatgttaacaccaactttaatctttggctattgtcttaacattgattcccgtgtcacactgtgtgtttaagtaaatatagtgttggatatattttaccatgatctagattnnntaccatgtatgtttcattaacatcct

SEQ ID NO: 89224 - DNA, 1062 bp, Cannabis sativa
gaaaaactagatgaatggtcaaaagagaaccagaatcggataagcaaaacccagcgcatcaggatatttgtcaacatgggtgctacgtacttcatttccaagctattaggttttcattttgatacttttatggttcttgacttgaggacgagaacttctaccctattttagaccattccagattcaatggtcgaattagatttggcatttgagtgatcgaaacctacacacccagttgattgtcaacttgggcactgggctcagcactaggtcaacctaggcactgggccctgtttctagggcctcaagattgtagtttgctccctgagtttgcttgaatcatcattatttctggtgataaaaaaattcccagaacacttttttaagaacttggttagaaacagcccaagttgacaatatgtaaaccttggtgctgcgttgagtgccaggtgtcaacctaggcgctgggtcccagttttggccctccaaaagattcgttcgatccttaaaaatagttgaattttaatctttgcaaaaaaaaaaaaacagagaagatgcaaggaagagttctcaaaaaacatcattgaaattttcctaggttgacaaaatatcaacctgggcgctaggcaagccacaaatgtcaacctaagaagtgttgtttcttctcctaaaagtacttgcttccccattttaatgaagacatagaagatgtaaaagttggatagtcgatttgattcttgaaaggagcccagatagacaaattgtcaacttgggcgctaggtgcctgggcaccagtgctttggattgtcaaaaatgaacttgctttgaatctaattctaatacctcaaatatgtttgtgttatcactactacaattattggtattcgcgacaatcctaaaagtgattttgtaggggaccgttgctaaaataattaagcaactatttaaaaccaccaagaaaaataggtattcctggcggtttataatagttactataataatcggcgaaaatttttatataaaataagaacattaatatacccctatacctgacagctttta

SEQ ID NO: 89225 - DNA, 841 bp, Cannabis sativa
  modified_base (794)..(809): a, c, t, g, unknown or other
tcagacaaaagtcgtacagcttcttcttgggtaacacatctgagcaatggcatggataatccttgtctatacataactccctccactatgatgtaccgtgcatcctctaattatactattaccacacttacatctataagtaagtaactacaatatagaattatggataaatagtatattataaatatgatatcagtaaaatattaatatactataaatataatatggataaattgtatactataaatataatacaagtaaaatgataatataaataagataaaatattgtatatacatattagtagtgagatatttgttaaataatttattgcaagaaaataattttttttttaaaaaaagttacgtgattttagtgtaggcaaaatgaattgagccaattggtgggaataataagacaaaaagcaaattttatactgataataatgttatttaataattttgttttttgggctagagatgtatactaaaatcattaaatactaaaatttgacttttaaaggtataagatataggatatataggatatatttgtcattacaaataatacactattaatctaaagagtatatgtgtcattaaaattatcacctcattaagacactcttaaaatagtaaaatatatgaaagaaagattgcattgaaacaaaacatcaacaattacaaaataacttaaaaagtgaggtcaagtatgtatatatctaaattgactctcctaacaagaacgtaatgttagaaaaattaataataaacccaagatcaatttgtatatannnnnnnnnnnnnnnntaatatataataattaggtatgcgtacctgat

SEQ ID NO: 89226 - DNA, 673 bp, Cannabis sativa
  modified_base (613)..(613): a, c, t, g, unknown or other
aaccctcccacatattattcagtagtatatcacattaagggttagtcctaaagtgtgatctagactaatgacttggacttgcagccatcaaccactcataagcctcgttactgatctttttaatctcctccattgcaaccttaaaccttcgaatagtctggtctctagcagccttcgagaagaggtcttttagagttttatccttgaataccttgataaaaattttctacaaatgcctagcacaatgacgatgttcagcttcaggtaccctttcatcccacatacccttcaaagattgctccaatcgtttttgttccgctgtgataaaagtccaatggttggagttctcaattttcaaatctatcctcaacagatttagaaaccaactccatgaatctttgttctctattttcaccacggtaaatgcaacaggaaacatttggttgtttccatctactccaattgttgtcaaaagctgacttagatgtacaccttttatatgacaaccattcaaaccaataacaggtctactgccctcattaaaactatctcttaacccagggtagcacaaatacatcctcttgaaccgtggaaccccattctcagcattttntgtcaagaattctattgttgatcccttattagtgtatttgatttcttctgcatagtccca

SEQ ID NO: 89227 - DNA, 581 bp, Cannabis sativa
aaaaatctccccaatatattaccactatattaatgtcccccttctgttaagtttttcaacagatacccgtttatttaatgatgtggcataagaaaatctgaagtggcaaaataatttgatgatagttaaaaatttattgcaatattaaatacccttaccaaacaaaataatatttaattagaaattaaataaataaataaaaaaaaccctattttcttaccgaatttaattcaatagttgtcaggaaagtaacatgaatccatttaaccaatcacaaccaaaaaaaactcagaaccatagacacaagggggaaactacaacttaaaaaacaatttttttttttaaaaaaattaaaatataaaataaaaaatccatttaatttgagcagtctaaaagtaaagagtgataatagcaaactggtttattttccaaacaatgcagacatcatttcccatcttttcttcaaaattgcagagaatgttttcattcatgcataattcaacaggaaaatgccattaaacacgtagaagcttccctgtggtgttggcatcaaatcaaacatctggctaaacttgagagcg

SEQ ID NO: 89228 - DNA, 736 bp, Cannabis sativa
aatttatatttgcacttcccttttctcccttttacataataagtaacaacaaataattaacagaggatcaatattttgatccataacttataattttgcaaatttgatatcttagttgtctatgtatacattaattttccaaattatttttatatgaaaacttcaaatctttaaaacgaaccaacaaatatagaatttttttttttattcttttgtaaaaaaaatacatatagaataatcttgttttacaaacattacataattgtagattttgtaattatcaaaaaaaaaaaaaaattgtagattttgtaataaaaaggaaaacataaccgggccaaatataggtttcaatttcaaaccttaaaagctcacatattttatttataattaattctaaatttacattctttttttttaataaataatgaaattttattaatgacaatcaactaaaataatagtctgcaattcaataaggatatcgttaaagacacgattaggattaaaattaaaaaaataaactaaataatcagccgcttaattctcagatcatttgacaaaaaaactaaaataaaatcaaataaaaatgattgcaacatcacaattaactttaagaacacttatattttgcttcatctactgctccaaaaacacagcagtaaaaactgttgctgcaaattcattcaatctcgtagcttgagcactcagctattgtgtaaggtacataattgtacta

SEQ ID NO: 89229 - DNA, 516 bp, Cannabis sativa
taatttttcaattaagaatctaaattttttattttttttttaaaaaaatactttcaaaatttttttacagttttttaatcaatattttggattccgatcttaatatagaccttagaaatcgtacttggacctgaccctagacttagacctacccccggtcccgatctcggacccgacttaaataaaatcaacaaataaaaataaaatttacaaaacacacttttgttttttatttttaaaattaaaaagcaaaagtggttatagaacacatttttattttttaaaaaaaactttaaaacaaaaattttatttttatttttatgattaaaaaatttaaaaacaaaaatgttaccaaatgccacctaagtgagtaaatgttcattttttttaatgtagggaaatagcaaaatataataaattagctaataaatattataaaaatatatttaatacaaattatttttttaaaaatattacataatttaagatcggaagagcgtcgtgtagggaaagagt

SEQ ID NO: 89230 - DNA, 627 bp, Cannabis sativa
atacattttgcaaaatacaatagctacccttaaaaaaataataaaattttattttaaaaggataattttgtaattttactaattaattttttctccatccttctcacctcacacctaataccaaataatacaaaaaagattaacaatcttctccatccctcttactcctcatcttctttaacctctacatccatattactctccctccctcccaccaaacatatagtttgaggtggggagtacggaaattcataccttcatgttagaatgtgaaataaggttaagaaagtgtagtaggatgggtagcttatggtatttactagtattaagtttctacacataatcaaattctctaacatcatcttaagataacgtagatatttgttcaaaatcttcttccgctgatgataccatattagactgtaaaaaattcttagaaatcttattaaaaaaaatatgtgatatttttaaaaattattataaatatgtataaattttaaagaaattattttagattttttgaactagttgtgttcgaagcgcgcgcagaccaaacctggcaatcaagaccaacttgtgagattgtgtaacattttccaaatttatatatatagaaatatataaata

SEQ ID NO: 89231 - DNA, 875 bp, Cannabis sativa
aaaattattaaaatggggtgtctttaaaaatttgtagataaaatttctttttttttaatagggtcgagattaatttcataaattttatataattttcttatagaacatttgtggtattaacctcatcagttgtgttaatacaacaaagtttgtgggactaccttatgtagaataagatgatagaacactatggaattgaaaatctctcctctactttactttcaaatttagtcacattcttagaaagtagtattcgttgaaacaaatactttcttatcttgatgaccatatgatggtccatctctaatcactttaaaatagctaccaaacatgcaaacataagttaacagttctagtttttcttaagttcatgatcaagacatccctgaatctaaacttagcatttccctagagggactcaggcaactgctagtaactaatcataaaccttttatttttatcaatatgcaatctaaatttttggggaggtaagtttggatacaattcaaagttcaacttaatgatctttgaaccgcataaccaaatatttctccacccctatcagtttgcaaacacttaccttaatagttttcaccattgcttgaaattcatgaaaattttcaaacattttaaatttatctactcaagatatattctagagagatcgtctaagaatttaacaataactcatatccattcctgaatgcacatccatatgttcgtatacagatgatcctacttccaagtggatattggcttattactctttacagagaatgatcttgtcaaaactactatgaaaatacaaatgccatagaaatattactgtggttgtggtcttttgatgatttctaggtttagttacaacaaagagt

SEQ ID NO: 89232 - DNA, 822 bp, Cannabis sativa
aataactaatgaatatatgaaaaaaaaaaattagattaaaatttttttctgaatgccgaaacaagtaaagggtgcattaatatatcttttttaaaagaatgcattgtagaatcacccaaaaaaaatattttataaaaaaatagttatataagtccaaagtctatattactctatttttttaatatttaataattataaaataaaattaataaaattattttaattaatagaaattttatttcagtacattctcatataaaatcaatataataattttaattacaatatttattttaattaattcatattactatttttattccattacattaattaccgttgctattatcatcctgataatcatgatgcggtattcaaatgacgtatctaaattaaagaaacaaaatgtatagtagttacaacggcacttacactgtgagtagggtagggacggttgaactaatgtagtcaactcaagacccatgtgatttacaggacttttttattatattttatttatttatttatttttggtgagaaaaaacacctgaaacaacaaacaagtttaacaaacgttcattctactcccctgccaaagtcaataaataagagtatttccatgtaatttactcttcaactacagcttgttacattacctttaataatgtaacgttcgttagttttgttcattatatatagttttgctctcatattaattccttgttttggttggtttctctgtatgcaaaatttcaacaatatatggaactaaatatctcttaaataaaaaatacataattttttttttttgatgaaatatca

SEQ ID NO: 89233 - DNA, 641 bp, Cannabis sativa
tttgatatatttttatgttgtactcttgttattttactgttaatttttcattatttatatattattatttttatgctgttttgatgctgtttttcatgtgattttcttgtgtcattatagaacatacgtgacttggcacgtaacatctgtctaatactataaaaatatataaaaaaatattaaacgtaaaagcataaaaaaatttacaaaaaattacaatttatgtaatttgttttattactatcattttttttaaaataatatttttttaaaaattatatttatatacattatctgattagtactcttttttctctttgaagactttctcttggtgttttgataatggcaaatgctttcaaaaaataaaataaaattagatattgattactttcaacatcaaaaatacatccaatccaaccacacatgtatgtactctcgttattataattattttcaaaatttaacattgcacatttttttcatcaaataattggacattagtaatgcttaatataaaatgaccgttcatgattagttagcgatattttttaaaaattattttgttaactacttatatgagacctgatatttaattacaccaataataatatgacactgaaaatgatacttgtttaaca

SEQ ID NO: 89234 - DNA, 736 bp, Cannabis sativa
  modified_base (47)..(47): a, c, t, g, unknown or other
tggatcgattggatgactgaaatcaattggatcggatcggatggtanaatctaacatccaatatataattggatcggatctggatgggcctaaatacattggatttaatccaatgaacacccctagcagagtagaataggtctccttatccttgacaaagcaaatatcatcgtgaaattaaaaaaattcactgttatctttaacaaatttggaaacacttagcaaatttttattaattttagggacatttataatattattaagtaagaaagattaggaagagttgggagtggaaaagaaagattgaccaacatgggttattgacaaatgcgttcattttgcacaaatatcttctctagacaatcatactcaacacctgtggacatatgataggcatcaggagtacaatgatttgtagctcctgaattgggatgccagtttggatctggcatgttttgagtggcaatgagattagcctgagctatgccattctgagttgatccagatgagcttgtcagataaggaaatactcctttgaagcttttatcaaatttgtaaaagcattctgatgtagtatgaccaatcttgaggcatcgttgacactgtggtttgctagttgtaacaggagctcttgcttgtccacgaccaaaatgagtagcaattgctctatcatagatctatggggaggaaactaagagctgtagtaacctctacgagtgtggcctcctcgaaaacc

SEQ ID NO: 89235 - DNA, 906 bp, Cannabis sativa
  modified_base (207)..(207): a, c, t, g, unknown or other
atcaagataaccttttgccaacaccacaattccttcagcgtttaccaactttttttgccaaacaaaatcatttctagcgctccaaattgcccaacagagcgttgccaccaaacatttcttgctcgaatccacaccaaaaaaaattccataacaccagtctaagaatgaggtacgatcatgaaggatatttgttccaattccaacacngtcccatacccttttaacatgagagcaagtaaccagagcatggagagcagtttcttcttcaactctacagatcgggcagagagattgtacattgactcttttggtttgcagcatacacagcgttggaagacaattcctacccgcaggccacattatgttctttactttgggagggattttaagccgccacatagtagtccaaaatcgtgaagtagtgtcatcatcattgtcccatctgccattaacttgttgaagtactttgtaagtacttttaactgagtatatacctgaagcttcaagtgcccaagtcaaggtatcatcactaaccgatggttgcaaagggatcttctctatgagcttcctatctctttcttcaaaaagatcttccaaaatttccaagtcccaacctgtgccatccatagtcacgaggttattcactttcgcctaaagtaaactggggtgagaggtagtgacataaggattctcaatacaaggtaaccaaggttcattaaggatgttgatgcttgctccacttcctacacaccaacaaagaccttttctaacaagttgttgtgcttcccaaacactccgccaaacatagctaggattgttccctagtgaagcatccaaataggaattatgagggtagtatcgagccttaaaaatccttgctaccagtgaattcggttgagagatgag

SEQ ID NO: 89236 - DNA, 911 bp, Cannabis sativa
caaatatctcaataccctcttggcagcactccaataagcagttgtgggggcttgcaagtactgacttaacttgtttactgcgaaggataaatctggtctagtgtgggcaagatattgtagtccaccaatgacacttctgtaggctgtaggattttccaggaactctccatctgttttcgacagtgccttaccaactgtcattagtgtggagcatggcttcaagtgttgcatcttcgttcgaatgaggagttcttttatgtattttgactcttcaagtacaaccctatttcatctctgtggatttagattcctaggaagtagcggagtgagccgaggtctttgagagcgaacatatcatttagtttggagatgaattgctgcagtttcttcgagttgttgcccgttataattatatcgtccacgtatatcagcaccataataatcagatctggtgtcttgtagaagaacagagaagaatcagccttagaattctaaaatttccagctggttagagtatttttaagctgatcataccaggtcctgggtacctgccgaagaccgtatagagatttagtgagtttacacacaaaatctggtttgtccttgtcaacaaacccttggggctgtgtcatgaaaacatcctcttcaagctttccattaaggaaagcgttgttaatgtcgagttgtcttatctcccagctcttggagacaactattgtgaggatgattcggactgttgatggtttaatcaccggactaaaagtttcaccaaagtcgattcccggtctttgagtgaatccttttgctaccaaccgtgccttcaatctctctatggagccatcagcgtttcttttgatcttgtgtacccacttatttcccactatattcatgccatgtcttcttggtacaag

SEQ ID NO: 89237 - DNA, 1048 bp, Cannabis sativa
aataagtagtgtaatctctcattttgttagaataattgcatatgcgcataaatacatttgagttacaaaaatataccaagctcaagttttattacaaaagtataaaatttcaactttagactatcaaaataccgattttgttttcatatctaatactctgaaaaaattacaaaaatagcagaccaaaattttagaaaaaaaaactacaaaaatacttcaacatatatagaatcaagaaactgaatttaattattatacataagagtagaatttatatacgaatttttaagattttatggtgttccttcttacttatgataatttttatcccatattttttttaaacaaatatcatatttggggaattaattaagtttgtatgctgtatattttaaaactttcatttttcttatatttttgtaaatagcctaaatttagaagctatcaatctgaattagtctttaatcatgatatagaattaatttacacttagaaattttaaaagatttttaatatgacaaatttaactttactcattttatgatattttattatttttgagtctttttgtgggcttaagtttgccatattattgtaacagaaaccagtttcttaaactgaaaaatcaatttcatgacaaacaaatcttaaacataagcatataacaataaaaaagatttaatatataacattaacaagtttttgatcaattttcttaaaaaaaaaaacaagttattattgaatttaagtatatgagtatatacatcaaattttactataatttttagacctatgtaaataactattttcgtatgctatttatattatattttatagtgattcagttaagaagcaggttattggatattattttcttcatatatgcatcaattgctggttatacttatatatatatgtaaaaatactatatcatatttggtcttgaattaattgtgaccaggaacaacataatatatatatataatactaataatactaataattctgttacatattattgatctataaaagtaattaataataacat

SEQ ID NO: 89238 - DNA, 525 bp, Cannabis sativa
agagagagagagagagtaggcgtgtacggtagaaagaaaatgagagtgaatatcaattcctattttctctcttattaattaccgtattgttactcatattttcagtctcttatttatgatattatatattgtatatataatgctataaataaagttttttaatcttttaataaagtaaaaagaaaatatttaatttgatttgaattcagaatttaatttcaaatacaaatatttaaaaactgaataacaaatatcagttatagttttttttttaatttattattatccttttaattaaataattatcatataatatatttaattcatcaattaaaatataattaattaatgtaatttaaattattttcaccaataaaataatcaaactaaattaatcatgggccgttatatgtgaccctacacgtgtgagttaggcctacatgtgtgggccatattttaaggcctaaaattaatttctcaattttgtcataaataagattcattatttattttttcaataaataa

SEQ ID NO: 89239 - DNA, 708 bp, Cannabis sativa
agactataaattaccttagtgaacttgttattgcatagaataatttagtaataggaatagaatcatgttaaaccataatcaatagatgcaattgaaatcaaaagccctaacttttgatcatcattaattttcttattgatttacttgcttcttatcttcattgtttctttatttgctttctaattttaattttctcttaattttgatataaccaaatagaagtaaagatttatttttgaagtacttaactacaatcattgtgggatcgacctcactctttgtgagtctattacttgttaataatacgtatacttgcgtgttgagaataccacaacaatattttagcgttgttgtcggggattgttagttaatattattaaaaattaaattttgtctaatttatttctttttatttaattttactaatattttactaatgagtttgacctacagggtaaacccgtatgatataccttaatgattttctccaacaacacaataagtcattctattctgcttgggggagatttaaagagctcggagagagatgttatcccaatttctcaagtgggtattttacttgactctttataacggacttcatgatgaaacaagaagttgggttgattatggagcaaagataattggagcgcctctattaaggagaggttatgatgtaataaatctgttgaatgatatggcagattt

SEQ ID NO: 89240 - DNA, 567 bp, Cannabis sativa
tttatatttgcacaaaaaaaaaaatagtcaaaaagaaatatcacaaggcaaacaaatttattcaacacatatgattagtttaattaagataattatgtatgtttatgttttcgtacgtaattaattagcttctactaagaatattatttaaggacaaagcatatatatatagaagattaattaattaaataattaattaaactctttcttattttttgttattttccaatattatgtatatatgtaatatacgtaatagatgataagtccctttaaccaaccatgtatgtttataattgttctaattttattacctatatatgtcgtttagaatattattaatgatttaatttaatataagtatgtatttaaccaacttgctaattatcactttacttttctctccattaattaatgaacccaaacagtgtgacgtcattttgccgtcttcaccatttgaaattaattctactctctcagagtcccactatacatatattaaataattatttttcatttattttagggtaaataccattttggatcctctgttttacaaaagttacc

SEQ ID NO: 89241 - DNA, 710 bp, Cannabis sativa
caacctcatcaagagcacactcttctgtatgcttcagagagggaggcggatccacaacttctctagtagggattgacaatagaactttgtcaactgcttcatcaaaattcatattagccttctaccgtaaataagtgtcgagagattctatcaaacctaaacataaaataaaacgtagcacatgtagtcactaccttgaccaaaactatgttcctgaaacaaaaataaaacaattcaaataaggatttcactgaaatgttgcaagtagtagaataactatttagggaggatcaaatgattaaattttaaatgataagttcaaatgcactatctttgaaagttgtcttactgcttcatgaattcatagcactttaacatattctctaaagaacctagtgcgacaacaagagaaaaaaaattctcttatcaaatagtttcaagtctaatcaagtatcacaaaatgtcctaccaatgacaaagaaaagcatctccataactactcatttcataaaatgatagttaaatacaaattacaaaatcattaattttgatggtctacaaattatttttcatcaccctgtatcatacactaataaaaaaggttccttacaactccattacaattgtgtaactgtaagaaaaaataaaaaaaaacctttctatgttacaattgttaaaacataccagaagaagaatataatatgcacaat

SEQ ID NO: 89242 - DNA, 1713 bp, Cannabis sativa
gtggataggtagttttttccaagaagacttttgctttgaacactatatgttatatagagctcttctcaatattagtaaacttgctttgtaatgacctgtgggtctacctttcctattaatatcaaactattttattttcaaaaatttatggactctcttttttcagtccaaacttggacagaaagagctcatagagaaaaccaaagatgtaaactacagggaacttagtgacctatttcttctctcagattagagaaaatatactttttcctataaaatttctgttaagaaaatatatcatgtacatgcatactatttcatgtctttcactttatctttatgcacactctcacatataattcattcacattcatacattcatatttgctctttaaattatacattaaaaattcagaacagttcacaaaatagaattgatgtactagaagcaaaaccttgtacctatatcaacatctgatatggttgttctcataggtaaaagttagtattaccttttattttttattagttttaatagcagaaaagaaatatattatctattttatcaatatatgatttctcagtttataaggcaatatatgatttttcaaaataccattttttattatacatttcacttcatggaatgataccatcatgttatgttatcttgctttctttttcttttcagggtgttctaccagatgggaaggttgttgcagtaaaaaggcttttcttcaatacaagacaatgggtggatcatttgttcaatgaagtgaatttgataagcggaattccacacaaaaatctggtggagctgctgggatgcaacattataggccctgagagtcttcttctgtatgaataggtaataacttatttggtggtactgaattctcttaaagctaaactttttcaatgttgaagcaaaatgatcttttctattcattttatttacttatcctttgtttgttacaacttaggtgggagtcgaggtataagatcatattgagtgtggctgagggtcttgcgtatcttcatgaagaatcgaatttgagaatcattcgtcgagatataaaactaaacaacattatgcttgatgaagatttgacaagataaataactaacttcggagtagctagactattcccagaagataaaactgacatcagcaccgccattgctggcactccttttaacgaatactattcttctaagcccgaatctaacacacaatcctatgggaacaacatgacagaaagttgggtcgaaccaagatgagatgaatatttttaagtgtatcaccttttaataaaatagaaaatacctagcataaaatttagtatatgtgtctcgcatgtagctttttactagcatatatatataaatatggccatggattcaatccctcaccacttcttttcaaaccggtcactcacttaatataactcatttatttagtaaatttagactttcggaaactaacttatatgtatgtggagcaatatattcacacagtgagtaataattaatatccagagaaaatattatatactcatgtgctgatattttatagttaagctagacatcgtcttattatatactatcactacaataaaatttatcaatagccacaatattattagcgatgggcaaaattcgcccctaatagtggtagcattagcggcggaaccagaattcgccgctaattct

SEQ ID NO: 89243 - DNA, 626 bp, Cannabis sativa
aaattattttgaatttttcaaaaatttgcaaggtatatattttagataactatgatgtacaatgtattataaagaataattaatattaaaagggcattgctattgggcacacgtacccatcaccttctagaggtagcattatatgattggttagtgttgttttaatttctaaaagttattacattaaattatatgagacgatcgatacttaattacaccaacaataatataatattaagaagaatactaagcactaatcgtaccttttagcatttcacatttttaaaattatctgaatgtcaaaaaaataaaaaagaatacactattaccttatttatttatttatgaatagtactactagatatgtttaattctcaaattttattaaataattatttatctattttagttattctttttaatattatttggttaagttatttaaaagtaagcttttaatgtaatactaatatttaggtaccaaaaaaattaaatacatatattttatataattaataatataactatataatttcctttaaaattgttgtgttcgcctttctattaatatatatatatgaatttgatggattgatcaggacatgttttttggaggaatagaaact

SEQ ID NO: 89244 - DNA, 1073 bp, Cannabis sativa
gaactaactcaaaaagaacactagaacatttattgactcaaggactcaaactaacacgatgatgtttggcaaactgacatgactcacaatctaaggaagactacttactatattggggataaagtttcttaagctaagaaagggatggatgacccaaacagcaatgagccttaaaagcagaagcaacacatgaacaagtaatagaggttggtggaagtgggtcaagaacataaatgccacaagattcatgtcctttaacaagaatcttcttcatcaaaagatcctgaaacaaacaatgatcaggaaagaatgagatgcaacaatttagattacgagtgagttgaataacataaagcaaattaaaggaaaaataaggtaaatgtaagactgatgacaaagtgagcataggtgtaggaacaacagtgtcagatccaagaacaaaagatattgatccattagctaaggtaacaatagaagtgagattgtgagactgaaaaatggaaaaagactggaattacctatcatatgatctgtggcaccagaatcaatgacaaattttgaggatttggaatgaaggcatgcacaagagttacctgaatcagcaatcgaagtgacaaaggaagatgaagaattaagtgttttacgataccttgagaacttggcaaattcatcagctgaaataaggattgatttattagatgcatcactagtgcttggaatattaggagattgttgttggttatttttgaacaataacttcttacactcaaatttggtgtgagttggtttcttacaatagttgcacataatgctcctaaaatttggtgtttgattatctatttgagtttttatttagacttacattaacttttattcgtttcattaaaacttgcatttattagatagttctttgctgtgttagcccatattgttagtgatcaatagtttctgggcttagcatcttttgtgtaatgtctaagtgaagcagaagtacgggctttctagttaactaaagcctttgatgagcaggcccagtccaactagggttatgtagctaagtcccctccctaact

SEQ ID NO: 89245 - DNA, 4592 bp, Cannabis sativa
gtattagaagtaaaattaaaatgatgtaaaaataattatttattataattattatagtatctttatttatttattattaaataaatttacgatatttaatatactttattttctcattttctctttcttttgatttttaaaagaattgaattttgtatatttaagaaaatatacttccatctctccttccatccttttccttccactcaaaaattcttcttgcctagtgtaaagagcaaatcaagaagagaaaaaataagaaagaaaaaacaactcatgcacacaaacaagaacaaaagaaaaacaaaatgcaagatgacaaaaaatggttgacaaaaggttgaatagttccatatatagtcacaaaatctcatcccataattcttccacaagcttgcacattgctctagaataaacatttctttactcttcacttaacttttatgagctatattttagttacaaggaaacaaatgaagaagaaaaagaagattattactgcattatataaagagatagtgggtataataatgagttcagagatgaaaatgagaagagtaccatgtggttgttatttaaactataaagattctgatttggtaccaaccaagttgaaaaaaatgggaatatgagattagttgtcccattcaaaatgttgcgactttatattggtagtatccacttccctccaaacattttaataattaaatttaatatttcaatatagagagtccatcctcctaaataatatttatataatataatttcatgcactaaacttactcatatattgctacactcgtccattttatgtcaacaaacataaataattaacaattaaaacttatacacaatagtttttacgaaaattatagcacatcgttccgtatctataatatttgctataattaaacaatgtttcaaatttgattaaattaaacttcatttccttactaattttacgttcattattggcattttcacattaactataaaaatcttggcattaatgccatatctttgatttttcatcaaaattatgttatcaggagagtggggtttcgaatttgaaaaattctctctctctctctctcttaataggaaatgtaattataatacagtaataaactacatgtctatgaattacaattaataatctttatctgccacttttaatggtaaataattttaaaagcgatggaaaggtttccttaattagtcggacagtacagaattatcaggaaaacgaagaaaggaatatggcattttagaaatagtgggccccactaggcccagatatagcagacaaggaaggcccaaagtctaccaatgatacaaaaatttcccgccacgtcaaaaatggtattttatgtaatttaataagcttgtacgtgcacttagttaagagactcccatcaaacccaagaacccgcgcatagcgtgaaatttgaattcagacagcgcccccctgagacatctgcaaaagttgccacgtgtcctcaaccacatccccttcaacctttttcttctcaaaaacaaaaacctcttcatctcacttctcctttcttctcttccaaaacctctttgctaagaagaaaagcttcggagagtaccaatggcgtttgtaatgaagccttcttcgcgctacagttcgtacgattcacgctcttcgacttcgtctcacttctcagatccctcttcgtcgacggagttcatcaagcgcaagtcccctctacccgcaaagaactcatcatcctcacgcgctcttgtcaaatccaagccctctgatatatccaagttaaaatccaagccatctgatccaaactttactaccatggtcaagaaattcatggagaagcgttctaattcttcttcatcgaaaacgaaggtggataatcgagtgggtctggtcattccttcggatataattgctgaagatttgaagaagacggcgaggaagggatcgaatttcggaactctgcacaagaaattgtttgggaaaggaacgtcgtcgtcggagaaggagaagaaggaggtgaaggcgttgactgaagtgaaagggaacacgaggacgctggctatggttttgaggagtgagagggagctcttaagcttgactaaggagcaggaaatggagatctccgagcttaagttggtgcttgaaaagaaaaatacagaagtcagtctctacttatatatatatatatatacatatatatatatatgtctgtatatatatcttttatttttaatgcaacaagtttgcgaccgtttctgttttagtcaatctttaattcatggttcccttttttgctatatccgtggggtgtgtgtatacaatctttatgtcttcatatatggtagtggtctaattgtttgattgaaatgcataggtggagaaattgaaggacttgtgtttaaaacaaagggaagaaatcaaatcattgaaaaatgcaatactattcccagatgctattaattcacaacttcaagacattttagagaaacaggactcagagctgaagcaagcaaaacacttaatccctacactgcagaggcaagtgacttctcttacaggccagctccaatgcatagctgatgatcttgccgaggtatatatattgtctattaatttatgaatagtgtcactattaatcattctagtaaagcaagttaagggcaatcccattacactttcgactatagtcattttgaagttatacctccaataaattgttttgatctctactagccaacaatgatacagttttagtagaaaataaggtacaaagggtttatggtgtccttttgtgtaatgagaccatctgcaattaagagcaaagcaaacgcttcttgtgctttcaccattgttgatttgttgtgttagattgctgatatttattgctttgagcaggtgaaggctgataaatattctgggagaactggttttcagaatcacaatagttccccgagaacaccaacatttaatcatgatgatgcttccaattctttggtaagcaggaccatagagtacacttagtgtctagtgatgacaattaaaaagtttgggagttttgcagttacatgactgttgataatcttatattaggaggcaacatggttttcctgtataatattcttcccaatatggctttaaatatcttcctaaaaatgtttactgaatgaattcaggagtttagctctgaagatcaagccagcccctgtagtccggatgacatgttactcaaagatttaaatccttgtttgacaccgtactacgctaaaacaagatccaaggtatccgtctttaggtctcggttttcaaatgtgcctcttatagagttcatgatttttttccttccccaaacatccatcactacgatgggtttttaattgagaagtttcatcttttacaggaatttgagggaatgggatatgattctcctcaaccacaaaatgaaagcttatctgaaaacaaaatggaatttggattcaattcctttagcaagaagttttccagaagttctgattattgccaaagttccaaaacagaaaacacaataaatcgagctgctcgtcgatcggatgaaactaaactcacatatggaaaacaaaagcaccataaacttttttgaattgtgtaatttttgctgttgatctcacctgttgggtttttacattagatttctcaagttttgcctgtaattcagtcagcatgtggtatcatgcactattataagatgaacaatagaaaattccaagtctataccataattgaaagggcttgtatgttcttaaaagcacttgctggttgtacatgctgagctatgaataagtccaatttttttctctttagtgaaaaagattgcatcattgttccctaatgaattttcgctctttaggattttttaataattattattataatacaggatgaaaacatggatattcaacactaatgttactctcgttaacaagtgagtagataaatttgactattgattaacatttgttactaagttttcattctttttgaacttatccttttatttcacaaggggagcaaaatattcccaaaaaaagaggcatcgccatttatttattacacaagatagctacaacttttaactggagtttataacatggtatttaactatgcttaacgcatagtatagtacaacaaacaagtacaagacttccatgtttcatgcgaagccatttcccttaagccatgccaccgcttgtagctgttctaattatctggaacaaggctgcaaatcaagaagaaaaagaaagcaaatatcagttttaagtggcaaaaaaagaagaggtacaacaatattaacaaaatgaatcatgagtatacattgcctctatgtggaaagtaggccttcgcttcacaatgagtaacaacatcaatatgacatgacagaggtcttagtgttcatcattattcaatcatgttccgaaacaataatttatacccataaaaggccaaaggtcaagacatgatattttgtcccacacactaattaaatgacaaacaaatacagcacaattatacttattagccagccacgaacacgaatttg

SEQ ID NO: 89246 - DNA, 671 bp, Cannabis sativa
tgataatcagataaataaaactgtcgatttagagatctagggagaaagacatagttgatagtattgcactatcaaattacagtaattactatagatcaatcacgtacgcatatacataattaatatatattgttatcgtgttctatattatatacaaattaatagatgggtttattattaatttttctaatatctccttctagtgcaaatgaatctttgaagaacgtaagtggttagctacacattcttattaaacccaccatttttttttttaaaaaaaggagttatctttatatatatatttgagttagtttagattaaattttgatagttttgaattatatttaaaaaaattaattaattaattaattgattaatatttataaaactaataaaataatgaaaaaaaataagaaaattaaagagaaaataaataaaattatttggaataattttaaactgccaccaatttattcttcttctttataaatagattatatataagtaatgaataaagtcacatacatacttattcgtgtgattttttttttgagataatacttattcgtgtgattggtcactcagtaaaatagtattacttagggggtgtttggaataggttaatgttagcaagggaatggtaatgttaaacattaccttgtttgtttgga

SEQ ID NO: 89247 - DNA, 928 bp, Cannabis sativa
atatatatatatcaatataaatattttttaatgtatataaatataattagattgggtcggtttttaattaaattttgagattgacatccaataaccgacccaatcaaattaaaattaaatttttagcatccaatccaattaaattataattgagtatcaattttttggtaattagattggattagatttgttcgcactacaaaaaataactacctttagtaacaatcttttacttaaaacataaatttttgtgataaaatgtgacttttagtcataataaaaaactacttgtgatcctaaaatataatattttaatacaagccgtcactaatttacttttagtcacaataagtattatgactaaaggcacattttgtcacaatagaatgtgattttttattttttattttttttaaataattttttacgtggaccagtaaaattgtgccacgtgaacactgtgtccagtccaatatggcacttaacacctaaaatggacggaaagggtaaattactaacagaatacgagtattgagggttttaccgcccaaatttgggttttggggttaagtgaaaccaaaatgaaaattttgggagttttgccgctatttaccctatttataattagttatatttttttaattttatttataaattttattgtgataaaaaaaaaaaaaattgtgttcaatttacgaaaattggagaaggccttaatactatacaataattataatctctcttacctatgaaaacaaagacactcctatttcctattgataaaaacaaaaggtacacgactagcatatatttataaatatttatatagtattatgtacatagttcaccttcggtgactgctgactagacaaaatcattatgtttaacacttttgcatgtaagggaattatgaggtgtagccccatct

SEQ ID NO: 89248 - DNA, 1942 bp, Cannabis sativa
ctccgggacctaccaccggctgcctcgggacgaggagacacccaaccacaactatgggggcttcggagcttggacccagacccatttaatgtccgggctatggccccccatcaagactattttgtaaactttctcggttttgtcgacctcgcgccatatcaactaaaccctcaagcttactgcctgctttcaggcttgtttattttttatgccgcccggagttggggttcgcccagtccggctgaaattttatatttttacgagcttgtttctatccccaagatttaaagacagattttatggcctccgggcccatcctttgaatgagggcccaatccctttcaaccatcaaaaacatgtgaagaagtaccgccaccgcttcttcttctcctccagtttccaggccatggaccgcccgaagcttctcacggagtggtttaggatctctccttacatgcgtatcgtgcctatccaagtattcctccagcgggccaagaccttctccacgtatgataagaaggccctcgacgttggggagttggtcacgacggagaactgtccgaaggccaagctaatatcggggaaccagtcggtggatgacttcaatctctccaaggtcatcggcccgaacgtgagggcttcggtagaagaaagggcttttcaggaagacattatcgccatggcggaggaccggtaccagaagtacctctttaagagggaacaggagctggcctacatcaaggcccaggcgcctgccgggaggaccctttgtctgggagctccgccggagcggaggacccccaggcccaagcctgtggtcccggtccccaatactggtgctcccgacgccagcacttcaggttctggtaagtctcctttaataatacattatgtttctcccgcccgagagtatacccaccttagacctatagggttcgatgagcgtcgtcgtaggtttagaatgatgccgccttctactcgggtgggggaatcacgccaaagaatattatttttcccacttaggccatttgttaggtcgatcccagatgggttttggacctccgacgcctattccactggactattcagtccatttatcttccagctggtttctcccctcagacagctttctcggggatgatgaagccagcattttgattcgagactttgctagggctgaattagagagtcagggtaggactagtcttattgcttttttgttgggcacatgcctttctcatgaatatcctaacacttaggttatttctttgttgcagcagtcaggcctattgaagatctcctggctactcttgctgaggcctacagtcttgatgcctctctgcctccggctccctcccagtcggtgacccccgggaggtcatcctccagtgcccctttaggcacgatcgtcttgatagacgaggagggggaagtcgaggaaggcgaggtggaggatgcggccgcccttgagcgcaagcgaaagggcaagatggttgaggctgaaccacccaagcggacccggaggggggacactccggcggtgagcaacgactttaggattcctgaagcggaggaatacactgtgtcgcatgacatagtgttgaccccgattcccgcggatgagaagaggcaaaatctccgagtcgccaagcacaactatgccctggataattacagtcgggggcacgcagaggtggaggccttgaagaagattctgcgggaggagcagaagaataccttgcacgaggatgccttccagaatccttgggaccttaatatgatccctttgacggattggttcaaccgcttcatcgggcccacgctagcccccttcgccttggagatgaccagctagtttgtctcccacctgactcaattcccagctaaaagatatgtggcttgtgcctccctgaactcagtttaccaggtccaagacatcagc

SEQ ID NO: 89249 - DNA, 633 bp, Cannabis sativa
atgctccttgaagctcgtgctgaattaaatagccatcaaaacgtttgagttgccacatatgtttcgtcaattgaacggagatctcgcaagctaaagaaacaatgccacattaccaagtaaatagaatttgtctttcatattcgaattaatttagaaaacaataaacgtttcacttttagctcccatttatctgtctatgtagactgaagcaagcttccacaatccacaacattctggaagcttatggatgaatgttatttatatttttggcaagacacgtggacacaagatggattattaaagcccaacagtgggtcctaaaagacagattgggccaagcccaacattagactggcttttcgagaaggcactcgcattactcacacagacgagtctctaccaagtgtagcccgtacctggaggacttatagctccctgtagccgaaagggtctaccagcatgttcttagaagccaacgatagttcccttttaccattttgcatagaattaggaaattactttcaacaaatctcaaacaggagtaatatcaagccaaaaaagaaaactacatagttgatgatcaaacaattaatgcacaattaattacttgccaagttaacatacaatcactgc

SEQ ID NO: 89250 - DNA, 560 bp, Cannabis sativa
ccatcttgattgttgctggattagagatagtacaagaacaatgatcagaaatagtttcccattgatatagagctttcgcatcaggaaaagcatcaaacgagtcttccttcgcaaatacatgatcaatttttgagaagattctgctgtccccttcttgattattagtccaggtataattagatcctaaccgtggcaaagattcaacattagctgaggctaaccaagaagaagagtcttgagcgtcattgaaggtaatcgggttgcctccaactctatcgtccacattgaatactgcattaaagtctcctaaaatcaaccaaggtttcactggcagtttgctttgatcaagaacctcccataaactttttctttcatctatcgtattgtgaccatagacaaaagtaacacaaaaagctttatcacaacccgtcatcttgacaaaacaatgcgtatgttgagaagattcagcaatgacaataactctagcaaaactttttctccaaacaataagtaagcggccttcaattgtggaactagtgtaatactcccatttagctagt

SEQ ID NO: 89251 - DNA, 864 bp, Cannabis sativa
tacgtaaatgtatacaattataataaaataaagcagtaaataattacgacgttaaataagaaagatataagtaaaattagtttaataaattttttatattaaatatgtaggaaaataatatatactatatatatatgttcagtcggttttcgatttaatcggtcggtttgccattgatactaaaattgaccatgttcaggcgattttaaccgaaggcatggttttttcaattttttgacagtcggtatactcagtttggtcgatttcttagattttttgctcacccctttgtatttggtttcatggttgaataatgaatatatagagagagaatctgacttgcctaagagacttaatttaaaataacaattaaaaatgatattaacaaataaaacaaatcttaattgaacaattatttgatattgtggaaaaattacaactagtggtatagaatccaatcaactaaactttaaacgatcaaacggttaacaataacaatgttaacaaatcacaaacagtaactgaacagagtatgaacaacaagaatcaattaaagcagtaaaacaataaaattaacatcaagatatatactggtttaagtccgatatatcgatgtgatctatgactctactccatttttagaacactaccaaatcctctttattgattgagcaggaatatgtacaatacagtcgagttcgattttctaatgagttatcttaaagtgttttaactcttacactcttaccgaagaatcttcttcatctacaaaaaaatcttcatacaaaacctagactcaatctcttttttttttctttgtaccttcctttctctctctctctgcctctctttctctctctctct

SEQ ID NO: 89252 - DNA, 530 bp, Cannabis sativa
atcctaatcggcatagacctaatgcgcctattataaataactaactccccactaggcaataaggttccaaaccctctttcaagaatatcacaaggcctaaccaaaagatcaattacccgtgtagccacatatgagcgtgtagctcctgaataaaataatattgtacataaggagttgctgacagggagctaacctgtcaccacggaaggactggctgcagcatcagcttgggtggtagcaaacaccctagcaggtacacgttttgcttctgtcttcgattcttctttcttcgcctgagggcaatccttcatgaaatgccccaccataccgcaaagaaaacatatcttctggttgcactctcttggatgatgtttcttacaacgtgggcactcagggtaagaataaccctggcatcaacctctgccctggtttccacggaatcgcttgctctgccccgaaccactagatgctggggtaactttcctcttctgatctgtggttgaattaccaccatccctaccataggcagg

SEQ ID NO: 89253 - DNA, 1520 bp, Cannabis sativa
ctcagatatggcattgtccttaaccaaaagggaagcctccaaggtcttcacctactcccgtagagcatctgaggatccccgggagccatcacatgctgagcttagcttcattaaggcctaaaaataaaacaaaaaaacatctttgtcaaagccataacactggtcggccagcccccccatgggattgctatggctggctagcccctcacagcaacatccaaggccagccagacacatgcaacaaaccctaaggttgactagcctacatagggcaaaaaaggtgaacagagctaaaagtacaacttaccacagaaagatcccaaagactgggaaagtatagcctattcggcttgtcgtcaccaagctcctttagatccacatccatgaaagggagagctttctctgtgcatctattagctgccttagcaaccctctatctagtaataaacctcgctcctctaccgagcctccaagtaccttggcatgtcggtcgtatcacaggctgcccaactggtgtaggccctagcgaagggggaggtaaggacgacccagcagcatctccaccatgaaaagtcttggccagcttggccttcacttgtcttgcgggctcatttgaatgtcccccagcaagacctctcagcctggaagacatatctgcaaaaagaaaggaacaaagtcagaaaccaatcacaaacattcaattcaagataagagtatggtgttatcaactatcaaataccattttcattagaggaggaactatcaaaatcctccacaaccgccttgcccctgccttttgatgtaagtaaggggcgagcaggtccttcagaaggctcgcctctagacctgatttggaaagaagcattattaattgagcctctgctaaccacgcgctgacgaagggccctctccttcctctctagattctgtgcaatgtgagataaaggtacctcatcatccaagtcaggagcctgcccatctctaaggtaggcctcatctacagctggtgcccctataactccaagaacaagagatataagccatatttccaaaagttggccacacaagtcaacctaaatgtgtttctagtctcttccgatagagataagttgctgttttcctatcgcttatttgcaaagttggtatacagcgcttgaagaacgacaccctccaaaagcaccaatgcagacacccttaacatcccaagcaatgaagtattttttagtgtactcatcaaccttcaccataggtgaactgtgggtatcacctaaccactggtgcccaacttggccaaagtataaatatccaaaccaatttttctgcaaaacatactccaaatcaaagtaatatccaatctcataatgagtaggttgaggccaccctagctccctatacaaaacaaacatcattgataggtacttgattcaccaagtttagtaaagagcataacgaccctattgtttcgatggaaagaagaacctatgattagcttttaagaaatttccaaacgaataatttca

SEQ ID NO: 89254 - DNA, 988 bp, Cannabis sativa
tttttttttttggaaaaaaagtctctcgattaaaaattaattagagtatttgttgcaagtgtatgtatgaaacaatactcacataaggaggtcgaacccaatgtaaattgtaaccgaatacttactaaattgtacttatatttctatttagtgataataaaatttagaaataacaatgaagcaaagctgaaaattaaaataggcaaataaaagaatttaataatggatgcgaaattaggaatatgatttcaattaatgcaattacgtacctaattgttttaaccattttctcctatgtgatgacaaattacaaattcacctacactctttttagatcataaaaatcttaaattgcatgtcaactattgcatttttgaaatagtacaatatataaattcgcattaagcaataatctaaaaatcgcataaactatatataaatactttcatttcatattacaacttatgttcattaattaaaagcattcgttatattcactttttcaaattttatattaggatcattaatcatgcataagttgatcagttttaaacatgtattaaacacaaagataaacaaatcacaaatcacaataacaaggaagaaaaaacaattaaattgtatttaaccatcatataatctcagtcaatattcattaaattcctaaatagaaagattaactcataatctcagaatacatataatcaaattaaacatagatattaatacaaaaaataaagagaatgagaatgatcaaaaaaatccaaactttgcacaacaaggacaccacagtgcacggagccttctgtaaaattctgtcatggtgctttgaggagctattttcgcgatgctagtgttgggcactgcagcgcttggcacgtgaaatgacatttcaatttcaatttcacatcgtatttccgatatttgatcaatttgtacattctaagtgtcgaaaattgaaaagaaaaaaacaagtgtaaatttattc

SEQ ID NO: 89255 - DNA, 750 bp, Cannabis sativa
tctgagttgtaaccaggcagtttcccatattctccatccctgtatttcttgaatttattttccaactcactattcgcaattggattggatcctcttgcttttgattggcattgagttgttggcataaattaggtgcattctgatttaagcactcgcgcaaattaggttttctccgattcaaatgttcacgaaaatctggttgtttccaattcaaccaacggtacatacctagtgggatcataggcaccttcactcataggtacagagccaccaacattattattggtttcctcattcccagtttttatgttttgatcatgaccacgttggcttcttctcgtacatgttgaacgtgtcgttcttgaagtgggtggtctctgtgaacccatcggtacttttccaggatgacggttagtctttttaggatgactgttattgttttcatcatgatctgccatggaaacaaaaaaaattcctttggttaggagggatttttctgaatttttatcacacaggctctcaatgaaagcactaaactgttaatgtagattttcgttaacgaattaacaagccttcatcataataaatcaaacacagacactaaaagaaattttagaaaaataatatttggaataatgacactaggttttttacgtagttttgcagttaactctacatagtccacgagtctatcttattaggatatttctagatacaaaataaagtttttacaattaatgatctttcctc

SEQ ID NO: 89256 - DNA, 680 bp, Cannabis sativa
attcattaagtccataaatgttgctggtgcattagtcaagccgaatgacatcactaaaaactcgtagtgcccatatcgagtacgaaaagcaattttgggaatattctcttcacaaatcctcaactggtgataaccagatcgaaggtcaatcttggagaagatggtcttttcctctaactaatcaaacaaattatctatccttggcaaaggatatttgttctttattgttaatttgttcaattctcgataatcaacgcacatacgtaatgacccgaaactggtgcaccccaaggagaggtactcggcctcgtgaatcgtagatcaagtaggttctgtaattggactttcaattccttcaattctatcagtgccattctatacggggccttagaaactggctcagcccctggtactaattcaatttcgaagtcaatctctctctttggtggtaatcccagtaactcttccgggaatacatctagaaattcacatactactcgaaccttttctggtccctcaagtatatctttcgtggtatccaacgcactagccaggtatcccatacttccttctcgcaataactccctggtcctaagtgccgatatcaaaggaatccgagatccctgcacctttcccataaaaacaaatgggatctcaccctctagttcaaaagtcaccat

SEQ ID NO: 89257 - DNA, 680 bp, Cannabis sativa
tagtccttttgttgaccaagtacacatattgactaaattaaacagagcgcaaattaaacgttttttttgttaatatatcacgtgagagccttcctttcttcaccagcctattttttcaacaccagcttagaaatatactaggaaatttacaccatacatttaaaattatttttttacatttttacaaacttttttttttatttatatttttacagttttgtattgtttcaatgttgtttttacattgtcgcaatgtgaaaataaggggtttttcttagaacaacgtgtgaaaacaaagttttgtacgaaaaaaatctataaaaatgtcaaaaaaaaaacgtaaatttttagttgtttttggtatttctgaaataatcttaaatatatatatgcttagggcccgattgaagaaaaaaatcatttcaaaaatacacacatttattaaaataccaatcaattttctaagttccaatacaaactcagaacccacctatgtttctttgtaatttcttttccatcaaaatcattgggtttttgagattttagatctgaaataaataataataaactaaagaatattaatataataataaaacaggaaaaatatatatctggctcacaggcctaggcccaaagcccaagagtatggagttctctttcaattgtgggcccataattaa

SEQ ID NO: 89258 - DNA, 613 bp, Cannabis sativa
gcttcttcatcttgcaatataaattatcatctcaataactttattcagaaagatactttttgtgcctaaatatattctggataatacttcttgcatccttctctaatgtcaaaaggggtaaatgtgaggcactatcatagtgtgacaaagagataagttataaagcatgcaatttccttagtctttcaacatatttatgagtatgtgagtcaataagttacaacctcttaaagaactcgttatctacactttccaagcattgtcattatgttatgtattctggttgtcccgagatggaccttattcgttggttatgtatctagctcgctagtctcataaaccggtagttattattcatggctcgcccttatctttaaaaggataagttcgaatatttctaccaattgtactttctaaggcgagtttattaaacatatttactattttataacactagataatttattctctggctttataatatgtgtcattaccatatttattgcttaaaatatgggtataataattgctccttaaaaagtgctttttagaacaaaaatgactttctaattactagagggtacgatcatattttctatttttgaaagaaaat

SEQ ID NO: 89259 - DNA, 743 bp, Cannabis sativa
  modified_base (694)..(694): a, c, t, g, unknown or other
acatttacaatgataactagcttcactccatgcttgaatttcacataacctattaacaacaaattctgtagaatacgagtacacaaagataatgaaagttttttattcttctttattttttattttatgcagcaagagcaccaatccaacactcttatacaaataaaaaagaaaaaaacaaacaatccaacactcttatacaaagtgagcaattcccaattatcatacaacacaagtgaaaccataaaaatctacagaaaaataaatagagtaaccacaaaaattgaactaaccttgttcatcaacttgtcttctctttagagtttagatccagactaattccattccaaatttaaacttaattaaagtaaatcaaaaaatttaaaagaccaattcataaatcgataagagttataaataatcacattgaacaatatgcaggagattttagggaaaaaaagaagacttgtaactagtttttaggacaaaaaagaagagaagacctgtagctattaggggaaagaagaagaagaagaagaaaatacatgatttagaggagataagctctgagtaaggagccatagatctcttcctcttatttttccaatcgatgttatgagaacacggagaacaattttgaaaaataatttttagaattcagaaaacaagagtatgtttggtattgttttctgtnttttgttttcaaaaaattgttttttaaaatgagaacaaaaaatagtttt

SEQ ID NO: 89260 - DNA, 1152 bp, Cannabis sativa
  modified_base (1086)..(1090): a, c, t, g, unknown or other
atgctcggggccgaggtagaggtcgtaggggtagggcacgtggtcggggcaatgctaactaaccacaggttgcccaggctacccaagctactcaagaagcccaaaattgggaaaatagatttgcagaaatgaaaactaaaattaatgaacaagaagaggtaattcggcagctaagacagcagggtgctcctgcagtgcctgttccagaaatctcagtggcaaatgcccctgttgtccaggccgaacctatagttgcagtgaatctgaaggaacctctgtatgaaatgttccgtaagcagggacctccgatttttctaggaggtctggacgttatgaaagccgagcagtggctaagggtgatcaccaaaattttgaacttcatgtgcgtcactagaaatgatggagtggtgtgtgccactttccagttttaggtggatgctttagtctagtgggacatggtgtcgatgatacatgacgtcactacgatgacctgggaaaagttccaggaacttttcaatgcgaagtattataatgaggcagtcagaagtgccaagtgaaaagaattcacccacttgactcagaaggaaaacatgagtgttacttaatacataacacagtttgatcggttggcgaggttggcctcgagtatagtgccaactgattttagtaaaaaggagaaatatctggatggattaaatgccaagatacgacatgatttgatgattactatcgacgacaaaaccacctatgctgaaatggtggaaaaggcactgcgagctgagggtggagttgggtgcatgactgagtctgctaggactccagtggttggcagggctccttcccctcctgcatcaggctttagcaggggaggtagtcgctcgaccatggatcagaaaaggagagcatccactgcaactggtggctcaggtcaaaacaagaggttccgggggaaccagggttgaggcagtcgccagggtagttcttggacccgatacacttacccagtgtgccccagttgtaaaaggcaccattagggggagtgtagaggacaagcgtgctttcagtgtggcatgccagggcattacnnnnnggattgccctcaactcagaaccgaggcaccaaaggctccaacaaaacccactccagcaaggg

SEQ ID NO: 89261 - DNA, 667 bp, Cannabis sativa
  modified_base (637)..(641): a, c, t, g, unknown or other
attactaattttttttttaagattcgttcataaattttcaattataaattttttatttatgtatatataataggaaaaaaaaataggtcttttcttaaaaaaaaaataaaattgggccttaaaacaatagggaccttgtgtaatggcccaagctgcccaatgcttgggccggccctgacatcacctaaacatataaatgttttatttttaggttaattgcggcaaaactcccaaaactttcattttgcttccatataacccccaaaacttaaatttgggcggtaaaactttcaaaacccgcattctgttagcatttagccatttccatcttatgcagttaactgccatgttggactgtccacgcgtacataaaatttatccacatggacacagttaacacatagcacaatttaattggcccacataattaattattaaaaaaattaatttaattaataataaattacaaatatgtaaaaataaaataaatttttcaataaaaaataacaaaaacaaaacacattttttttttccctcagatcccctctctaatatctaatcacttactctctctaatattttgatggggtaagttgaaaaatgcctcttttattcatcaattaatcaaatttacctnnnnntttatatttatttgaaacatacctct

SEQ ID NO: 89262 - DNA, 576 bp, Cannabis sativa
ttaactaatttttgttaactttattaaggtttaagtttttcataaataaaaaattaattgacgtgtcaaactttaattagttaaacatatgggacaccaatttttaataaaaaaatttgattcattattgaccggtcgaaattacggtcctttataaaaaaaattacggtgttagacaatgtccttaattaacatatttatatttttaaatattcatatatagagaattaataaaatacggtagattaattgaataaattctatatttagtgtcatttataaacaaaataaaatgtacggtagattaattaagtaggtaaaataatatatctttataacaaaaattgcattagacaataagaggaccatcattgttgaccggtcgaaattaataaagaatgaaatacatatattgttgggcttggctattgggaatgggtagtgggaattgagttgagtatggcgtatgcatgttgcttgactacgttccaagcctcaatgacatgagattcttgggtgagagtggctccaacagcgaaacgaagcaaatagataccaccaacaaccgaatgggtc

SEQ ID NO: 89263 - DNA, 567 bp, Cannabis sativa
ttaaaataatgtataaaagtgttttaatcaaaatacaagtatggaaatggataatgtaatatgacagaacactactataaaattgaacttttcgagacagtttttaaggatttttagcatcagttttggtgaaatttactaccaaagcactgtagggattaaaacaactgatagtgtacggaactctatatatggagtcaattattatgaaataataaactcgcttcatatgtaggagcttcttattatgatttttttcaactttaaaattttgtattttaacattatttttttatttttactaaaaatttaatttaattttacttttataaatatatagaattttattattagtataattaaattaaatataaattatatataataaacataactaaaattaaattaaaacgttaaataaataaacatgtacattacactaaatatttatataagctattttttattaatattttatatgctataatatatcactacaaaaaatttgacttttagtcataacaagtattgtgactaaaagtaaaaaatatcgtgactaaaagtttt

SEQ ID NO: 89264 - DNA, 798 bp, Cannabis sativa
gtaaaagatgagcaatagaattcgctggtaggcactaggcgctgttccagagttcgaatacccttagactcataaacttgggggccactgggaggtgtttaacatatgtttgtttgcgttagtgtcactagtttcacataaagtgaataatggtagccccgggtgaggccataagaatttaatctagcagcattgtttcgaaacttcattcataaaaatatagggaagtgatttacaatgtggcttccttctggtcatgcagctattgtctctggtggaaaaggcacagcacaagacaaaatcaagacactcagggaagctggagttacagtggtggagtcacctgcgaaaatcggaactgcaatgcttgaggttttcaagcagagaggccttgtgaattaaaattagcatttaaagttgatcgatggataatcccatctttaattctttcttttccaaaacaaaattcagaaacaaagcgcacatgcatactccaatcttgaattttcttacaatgatttatcatcgcggaacagcgtttgaaaattttctcaaccttttgagctataatatattgctgttgttaatctaataaagttatagaaagttgtctagatctttccctaggtcagactcaaatggcattcaattcatcgtgtttcttttttctttgtttgctcatctttacattttttttttcttctttcttttctaccaagaaattctaacatgtcattggtcaaataagctttgtaggtgagaaacaaacaagttatgaaactttccaataacaaagca

SEQ ID NO: 89265 - DNA, 827 bp, Cannabis sativa
  modified_base (39)..(39): a, c, t, g, unknown or other
  modified_base (66)..(66): a, c, t, g, unknown or other
tttttccttgttcttgagttaatacaaataacgaggatnaggctattaccgaactgctcgagactnaacctctataaaattcttgtatctttaagcttactttatttcaatcgttataaactacttgtcacttattaaaatagactcaatatcgttggctaaaagcgaggtcaacaatctatatatatatatatacgaagataaaaaaaattgtttgaggaaaaaaattaagagagagagagagagaattgaaataaaaacattaaaaaaaaatagagagagagaaaaaaaagacatgaattgacttaaaaaaaaaggcagccagagctgactaaacaaaatatacagaagaaagaaattttttttaagctttaataagaaaaaaaaaccaaaaaagaaaaaaattaaatagggaaggtataaatataaaattttcttctcaaagtataaatgtataatttgaaaaaagatagtatgtagtctaaatttcccttaattactttatttttaatgttttttttttgtcgggattgtttaatttatcgtaaatttcattataatattttttaattttagtcacaataaaatttgtgactaaaaactaaattatttgtgactaattataaattattattcttatattattactaaaatatttgtggctaaagatatatttgtcacaaaaatcacaatttgctgtgactagatgtatttttcgtcacaatacatgttctgactaaaatataattattaacaacatgtatctaaatactatattttagtcacatatttaattacaaaataattatattgtgtctaaaaaatta

SEQ ID NO: 89266 - DNA, 786 bp, Cannabis sativa
cacaatagtcgactattaccaactaacgcaaaatgaaaaacaagtttttcaatttttactttatttcgtcggtttcttttttatcatcatttaatcaaacgacgcaaatattatgttattagtgacgtttttaagcatacgggtctaattatttggacactattcacttcgatcaacactatgaatagtagcattgaccgatgtgaatagtgtaatttgtagtagtgcctggtcctagacccagacccgaacacaaacacgaacatagacacgaactgagacccaagatctgaatcagaacgagaccgggatcgaagattgggatccagatcttgacccacgacccacagcttggacctaattcgtagtcggtgtttggattttcgaatcgtaccaagaccccaacctggaaccatttatagaccaggatccaaaaccaaactcggacccgggacccgaaatcagaacaagaaccgaaatcaggaccttggaacaggaattggacctaaacccaaaacaagatctagacgcagaaccaaacatggagccaaacctagactagggatcgatacccggacccaaacccgaaaccggacacagacttgcgccaggacctgcgacccgaaacatggaacccaggacttgtgacccaggacctggaccaaaacctagacctataccgaaacccagacccagacccaaaccaagactcggacctagacccagacccggaccgaaaccccaacccagaccatgacccggactcaaactcagacctagagccgg

SEQ ID NO: 89267 - DNA, 909 bp, Cannabis sativa
cagtccctcgtaaaaattaactgagactttttgacggaagggtaatgacaaagatagaagtgaagtttagatagttttaccatcaaaaaaattaatttttgtggtcactgccataaccttatagcttgcgcccatattgtttattctacaaatatcaactttatgttagtttttatctcatttcctaataacatattctaaccacacgttaaaactcaggtaacaataagactaggccttcgcatcttcttctctcaaacaagcatgtttgcgactcaggtctcatcctcgtcttcatccaatttccagagtagtgatgaatctctcaactttttttcccacccatctccgtgtcgtggtggctctgcattaaaggcgattgacagccatccgtcctcccattatcagttgagatcggaatcgtcaactttgctgacgatttgggggcaggcgtgccaatccattaatgcgtcccttgtaggtttgatcccccatctgaaaaatctcatgtgatccctatttgttcttaatcattgctgtcttttccacttctaatagggtttatggtcttaattgctatgtctacctacctggtcagtggatggatttggataatcccccgcctgatctagtattaaatgtttgcctcttgttcttcctgattcactcgagtacaactcgagatatgacagatctatctgctaccatcttaattgctatatttcgtctttcctatttaaactccattttaggtttatggcaagttaccttttttgtgtttaaaccatcaatactatcttcgtatattcctatattgccgaaaatggaagacttagctagatctttttctgcagccctccacctcactgatactgaaaacacaatccattcacttgctgagcatgtcga

SEQ ID NO: 89268 - DNA, 647 bp, Cannabis sativa
aaaatctaaagtgtagatttataatgatactctaatttcttaaacatgcattttacataaaagagatacggtgatgagataaactttgaatataatagtgactataaatgaaatacggcgatgatagatgctttgaatataatagttactacaagtgaaatacggtaatgacaacattgactttgaatagtggcgactataagtgagatatgacattaatgacaacaatgacattaaatatagatgatgagatacgatgatgacaacagttttgaatgcaggtagcggctgcaagacgattacaataattttaaaatatatgatcattttttatagatttattaattgtcttttttattagatttttattttgtttaaggattcttcaatttttattctctttttcaccataacaattgaagatatctctttattttctttctttattagataagaaattgtatgcttgatttttttttttttacaatatttatttattttttcgagttaaaaaataaaaaattagtagaataactattcatattattaaaatatatatacataaaatataaaaatttgaaattcgatatatgatatcatattttttgtactttgacgtgactatgagaatgaatgacacgtgtccc

SEQ ID NO: 89269 - DNA, 524 bp, Cannabis sativa
  modified_base (218)..(225): a, c, t, g, unknown or other
aatgctttgatgcttatccgatataaacactaagttttgaacctccccaatcgtttcccttaacttctacaagaaatacttccaagagtcatgattctcactatcaacaattacaaaggcaattagagataattagttgtttgcatcgtacgctacaacaactaacattgtgcccccataccttgttttcaaaaacgtgttgtcgatactaatcacannnnnnnnaaacttaaatcccctcctataagcgtctagtgaccagaaacaatacttgaacctattgtcctctatgaccatgtctgtaataatactcaaattcttctgttccaatatgtataagtaactacgtaactgacgataagcttttgctggcctacccctcacatacataagttccttctccctgcacctccaagccttctcataactcatcttgatgtcataatcctcaaacatatctctctgtatgtcttttatcttatacttagttccacctaatttgaacttgttcttaataaggtggc

SEQ ID NO: 89270 - DNA, 2354 bp, Cannabis sativa
tattcaacttttgtgggttttgtgtttattgttttcattattttaggttttagattttctaatttattttagcaattcttttgtatttttttatggtttgtaatgcttctgttatattaatttattgtatgtgttattttattgtgtttttcatttttttttagttttaatttctgttacatttattgttgttttttttttctttttttgattttcagatgtgttgttgtttttcatttcagtttctttatttgatcagttttcattttttttttatagttttttcatagttttattttatagttttaacacctttctatgtgtgtttgtattgaaatagtttttaactagttggtttggtgtccatttatatatcattaatgggtaaaaattagaactatcatggatattgatattgaaggagtttaattcggttggtctactactttcttttatttttatgtttttattctgttttctatatgttttgctatttatactatgtttggttttatatctatgtttctattattgttttttaaaaaatttctcctgtttgttagtttgtttatagttgttttgtagttgtattatagttttgcaactttcatatgcccattcattatatttactttctttgtaaaatgtaggagtgggttaacaaattcagtcccagtgatttttatagatccaagtgcgtatgtactagcaatttctctgttattgttaatattaagaatactttatctgggaatttgttaaaaatgttctgagacacgcagtttgggcatttcttagatatcccggaatttgtttttcatccccacgtagttcacaaccttcttttgagggaggtttaccagcccaatctcaaagaattttgggcaaagattgctggccgttgtatatggttcagtgccgaagagttttacttgataactgatcttgattgttttggggattgcaataaactgttattttcccaggaatcaaaccagttaggtgaagtctgtttccttggcataaaaatgattaatcataagtctatagaggatgcttcttgggcactaggtggggacatgatgaatccctaggattgaaactgactgtgttgtatttcatccaatgtttccttcttagcaatactcttgataaggaagtttttaggtctaatttagatatcattgacagcggtcgatgggatgagtattgctggggtagggagtcatttgagttgactattgattctttcaaagacagaatagagcatggtattaaaatgaaaaacaaaaaagaggaaaagggaggttagtcttacgatggttggtacagagcgttgggctgtccttgggtgttcatagtctggttttatgaatgttgtcctgcaatggtaaatactttttgcaaaagagttacatccaagattctaagaattctgaattggaccaatgaggttgggaccacaaatccaacttttagggacttgaaaggcaagattttttatttgccgtttaacaagtgattttcagtttctttactattttatctttgttttgttccattttattaatctttgttatttttatttttttttgttttatattttctatttttgtttctgtttttcagttaaaggttaagaacattcgtccatctaatgaagaaaagcagtagttgcaattggatggcttaatttaagatgaatctatcgatgatgatcgtgatactacaactctaagaagcaaaattcgagagtggttcatcttctagaaaatctgattctgataacataaaaatgttaaaatctaagttggaattggttatttccagtcaagaatccttggccgaagattttatatctttgaggtattttgttgaccttaatttcaagtctgtcatgtttgttattaaggattttcaagaaaaagttaatgtcatttatgatcgaccttctgttcaggtatttattttcacagtttttatttcatatatttttttttctgttattgttagttttttttcctgttttatatcagttgcaatactattttcaaccaggttaagtcatctgaagaatttgttacccaagattctgatgatgaggaggaggatgagaatgatgatgataatgatgacaaaggattacctgatccagagaatattgaaattgattctgataatggtgatgagttgggtaaagatggtggtgatggttttggtgttgacaaggttagtggtgatattcctactgttgatgtgattcaaactgaggttgttgcaggcagtgaagataagtccaaggatgttgaaaatgtcaagggcaaagaatctggtgtaaaaggagatgatttttt

SEQ ID NO: 89271 - DNA, 802 bp, Cannabis sativa
caacaatgcgtagcacaaataattataattttagataggggtagacagaatataatccaatccaattaaaacgaactgatctaattcaattcaattataaaaaattagatatccaattacaattggattggattggatgtcaaaagttagattctaattaaattagatcgcttattagatataaatctcaaaattcaattaaaaatcaatctaatctaattacatttaatatatattaaaaaattatttatagttatttgtatataataaaaaatattaaatataaaaaaatatacattttgttttgtgttgaatttgtaatatttgattgttttgtgtatttgtttttgtaatttttgttttattttattagttagcagtattgttatttgaattatttcaaattggtttttttttttttttttttgagaaattatttcaaattgttaattgcaataaaaaatgataatattcttaccaaatattgaacttaaatgaatgataatatcttttcaaaaaaaaaaatgaatgataatatttagtttttgcttattttttttttttttttattttttcaagtaaatattaaaaattaaatatgtaattagatattagtaatttgattaaattttaagatctaattgaattgaatcaagagaaaaatattaaattggattggatttctaaccctaattttaaagagcaaaacaatgctcatattgatagttaataataatcccacaaaaaactttataaatacaaaaaatgatactactaatccagcatatatgtgttcaaaaat

SEQ ID NO: 89272 - DNA, 521 bp, Cannabis sativa
acgccaagtactgcaaaaacccgatgcttcaggacggttacttaaatgggcgggaaccggtgaaccacgcgagctggttagatggtagagttgggtcagtacaaaataatatttcaaccctgaacaacagtcaaaggacaagcattggcagactttgaagttgagtgcacgagcaaagaagaaatcagcttaagggataacccggagccagtacaagaatccttaccgaacaacaacaaagacagacctacctagaaattgcacgtagacgggtcagcgacagatcaactgtctagtgcgggaattgcccttgtcacacctgtggtgcaacatctacacgggacagtcaaattttaattcaaagcttcaaataatgaagcagagtatgaagccctcattactggcttaaaacttgctcgggaactacatgttgaatacattgaggtctgtagtgactcgcaatcggtagtaaatcatgttttaggagagtacgaggcccggggagagacaatgatagctta

SEQ ID NO: 89273 - DNA, 559 bp, Cannabis sativa
acaacgaagatgtatcatgacaccaaggcattacattggtggccaggaatgaagagtgatattgctaaatatgtttcgaagtgtttaacctgtcagcaagtgaaggctgaacaccaaaggctagcaattttacttcaacctttgaggatacctgagtggaagcgggaagacataaccatggactttgtagtagggtttacctaggactactgggttacatgattccatatgggtgatagtagacaaattcaccaagtcaatgaacttttaccagtatggcgaattgtacattaaggaaatagtgagacttcatggtgctccgaagttctaggagagtttacagaaagccatgggaaccaagttaagatttagtacagcctttcaccctcagacagatggtcagtcagagagaaccattcaaatattggaagacatgctgcaaggatgtgtgatagattttaagggatcttggagcaaattcctacccttgattgattaacaaaatgatggtctggctttcttcattaaccttgtaatttatattacccaatcctacaat

SEQ ID NO: 89274 - DNA, 583 bp, Cannabis sativa
  modified_base (487)..(490): a, c, t, g, unknown or other
gaggaatacttttggaccttaactccttcgttcctctctctataatgcgaactggtcgcacttcataactcaagtcctgctttagctccattctttcatagttcagaatgtgtgatggatctgacacgtctttccgtagcatagaaacgtgaaacacattatgtgtctcagttaatactagtggtaatgtcagtcgataagctacctgtcccactctgtctcatatctcagaaagacctataaatcttggacttttctttccctgctttccaaaacgcataacctcttttataggtgacactcgaaggaatactttatcgcccactgcaaattccacattctgtcgctttgcatcggcataacttttctggcggctttgtgcagtaatcattctattttaaattttttctaccgctttagtggcctctcttgctaggtatgggcctaagtattgctttttgacaatctcatcccagtgtagtggtgnnnnacacttcctcccatacaacatttcatagggtgccatccctattgtagattgatagctattgttgtacgagaactccattagtggcaaatagtt

SEQ ID NO: 89275 - DNA, 518 bp, Cannabis sativa
ttaaaaatgtaaacgaaacagtacttgggagggttttcctactaaaatttgagcttggatgatttcttacaagtaaattaatagttgaggggggttttgccgtaaattactcaaattttatttcatagtaaatgtttttctaaatttaataccagatttattatgtgctaaatttaagttaccttttgccatatatactattgaaatatatattttgctatgagtcataatttagctttattttatattacttatttctatttacattcacagtgatcttatttttgtgtaattggatgaaaactaatttgagttataatttagtgcatatctcaaaagtaatactgtgaagattctatactaattttgttgaattgtagaccattaaatataacattatagtatagctcattgggatgctagatacccatttgcatttcccattataaccaggttagtagtacttaaccaaaacaggcatgtaagagtacgatagggtgtgggaccagaagttgagt

SEQ ID NO: 89276 - DNA, 3746 bp, Cannabis sativa
  modified_base (2526)..(2527): a, c, t, g, unknown or other
ttagtctcaggtctgttgagcttaactttgtatataaggttggattgtaattctgttcaatgagattaatctttcttctcaattctttcctttctttcttctctgttctttctctttcataaatctttgttctgcattttctttcatcttgttctatgattctgttctgcaatgaatcctagatttaacaaatagtgatcaaagcaatctgtagttctgtacccattcgtttgcagagaaggggctccttgaagcagtatatatatacagaagcttttactacacaaagatcaaaacaaacatgcaagtgaaagacagagaaacctagcatacactcagctgtatctccaatcaatcaccatccctgaccccattcggagtttagtcgactcaagtgttgcacccacattaattttagtggagccattaattaatttactctatttatgtacatacatgttttttttaaccttagatagtaatttattattatttttaacaggaattatgtgcgtaagaggatgaactagtattagccatataaatatataggcctcaataaaatgttaattgtaatttcaagctaaaataaggttgtaatcatgtaatgttttccttgtgataattaatgtgaatgggatacatttacctacaggctacatgtattagtattaaacatgtactctgtgacacagttcgagcgaagtaaattaaggtgggaagtaacatactccaacaaggacaaattaacaagaagagtgatgagagatgataaccacacaatcttgagacactaacggataagacccctcttcacattttcttgtgctcaactttaatctactatactctgagccagaggtcgtaacaaaatattaacaaattttaaaaaaaataaagagttatcactgtgacattgtaagagccaatatcaatcaacatttatcccaatcataacaacatggaagcttgaaagactaattaaccaaacaacaaggacaatttcactttcacccaacaaattggcgctttcatgagaagaacagtaattggagtaagaggatgtaccagtactagtcacgagggaggaggagacgaatttaatatcttgactttagaacaagctggtcttttcaaaatttctggtcttagccctcacgtctttggcctttttctttgatgattaataaaattgtcaagttgttattcgtgttctatgtgctctgttcttttctgtgatatctgaccaagatggattgtgaaacatgcgattagtttgtgaaacataagcccaaaagctcaaaatcgaataataattttcagattttcattttttttaataaaaatatgaaataattttattacttttcccttgaattgaattgtaaggtaattatgagctagtgtgtaatgtcttgtgactattttttagtataatttgtctcgtgggttggttggactggagtgtttgaactaaatgtgaggtctacgacaatgtcgttttttgatccgtgactagagaaacctttgataatgaatagtatgaaagaaagagtactagtcaacaattcttatcaaataaggccaatgtttgaatcagttttggtgtgtcatacgcggttttgaaacatattaattctaactaaactaatgtttttgtatatatattttttttcactacacataagaattcaaccttgagaaagtctagtatttaacgcgggaagggaaaaaaaactaattatgacatgccttttagtgttatacttgtatcaagtttggtgaaggtggaaccggactaaactaattttgtatgtatcttatttttaaatagaaagtggtactggtagcacataactgagtactaaacaaacatttctatcaaaaagaaaacatatttgataattgagagcagcattaattgtagcgtacgtctttgttattttaaaaatccattagaatagtatatgtacccgttttcttatccacaaacgcgcacattatttgtctaatggagtgtatcattgtaatggctatggtccatttgtatttaaaataccacagtcttgcctcacctccaattttggcttgattgattggtacatttgattaaaattaaggtggggtcgaaattgaatatgttgttgttgcatgatcacataggaattagtcaaacaaaaaatcagcatctctgtcctgtccttatggtaaaaaatggccacttcctttccactactaaaatttctctctttcaaattcttttattaagcaactaataaaaatttaaatacaatacaaaatttgaccttttgttattatttattagtaatcaataatactaaaccgaaaggtgcaaaataacttttttcattttctttttctttttgtgtaatgtaagtcaactcagcttaacagctccacgtcaacgggttgtcctttctcagacccactcgccaaaaatccattacttgaacgaaacacacggcagcagaacagtataaaattcctttattattattattattnntattattattattaataaaaaaaatttaaataaaaaaaaaaacaatattgatttttcaaaagcagaaatttatttattttgagaaaaggaaaaaaaaaaaaaacgaaacaagaagaagaagattgaattttaattattataattgtataattatattgaaatggcgtcgtttgtctttgtggagcaagaatttgaaagttgaaacgaaaaggtgaacataaaaaagggacggatgtgaagaggagtagtgaaatacaattaaatagctccactgagttccgaccgcacctgccccaaatccaaagtcccaaacccaaactcctctcttccaacgcagcttcctaaaaagctaagcaagtgagcaccgttttagaaacgcaagcaaacaaagcgtgaattcttcagagaaagataattaatagagttctaaaacataaaaaagggaaaaacgacgctgcgttttgggtcccaaatgctctgaaatggctatagctgaccagaagtcttcttcgtcatcctcatccacctccgccgacggtaaactatggggctttttgaagaggccttttcgcccaacggcgaccaccaccaccaccaatttctcgtcctcgtcttcctcccaacataatcatcataaccataatcataatcatattaatgctaatactaatgctcatcatccccacaactcaaactcataccacgatgcttccaatcttcacgccaccaacaattcggtttcttccgtcgccaggtcgctgctcccaactcggcgtcgcctcaagcttgatccctccaataagctctactttccttgtaagtcaatttcgtttttcattttctcatcttcttcttactgtcatgcgatctgattcgtttagtggcttgatcttgttttgacttttttagtctttgaattttgtttttctttgctaggatttgtgcttaattttccttaattgattaattgacttgggagatatgcttattaacatgcgattactccttttatttttcctctctagaaattgggtttttatatttaattttttttattaagattctctcttcttattccggtagtacaggatttatttattttttcttggtttacattacactacaatcttgttgtgcgtgaattctttcctcaacgaatgtaaaatcaagcaaacttattaggattaaatctatacactagaggcaattgctgaagaag

SEQ ID NO: 89277 - DNA, 1309 bp, Cannabis sativa
  modified_base (736)..(739): a, c, t, g, unknown or other
ttttgtctcttaatgttaaaagagggttagtgggatactggtcggtcttaaggtatatggagtctaaggcagaattaaatttcagggctcctatatatatatatatatatgtaatttaattattatcaaaatgatatttttaatgctttagtgtaatggtaaagttttaacaaattcttgagagttccaaaattcaatccttcattgctatacattaaaaattgaaattgggattatatcatgtgtatccttgaccctcaaaaattctttaaccatccatttaagtgacttggggattagtgccatgatctctagtgtgaattatagatctgcttgatctctaccgcctttttgacaaggcattgaacctttttccttcgacatatcatgtcttgaaggtggttgagttagtggaccctatacaaaataccatataatatatcaaatttgatcttaattctatcgaacttttggcagcataacgacggtaattgaacgcctccaaaaattttaaacatgcataataacaaacaaaacagataaaataattgattattcatctattcgaccgcaactcatttaatatttaaaatattcaaactccactaatgattgataattaatttgtaacacaaaattcaaggtcacccttattgagacaggtagtctgatatataataatgagatcactacactgatcctatcttatataatacactacaaaaaattttacttnnnntcacaacaaaacttgtgattaaatatagattattaatatttttatgttgtgactaaaagatccgtggctaaatatatcagccacaaataatttattgtgactaaatgtatttttagttacagtacttgttatgactaaaactaaattagtgataatttgtgtctaaatgctatattttagtcacatataattttttgttgtgactaaaactaaaagaaatgtcatttttgccagtacatttttgtgctggcaaaagatggtattgcgctggtaaaatagaatttacttgtgatgtgttggcaaaaagggattggcaaattaatgttggtattagaacgtttgccagcataaaatgaaaagcgctggcaaaaatgacttttttcagcgcgtaaatgcgctgataaaaggtagattttagccactgtaaatgtacgcttgtaaaattttgatctatttgccagcgcagtttgcgaaaaacaaactgtgctggtaaaagtgacatttattgtaaaagtcatatttagtcaaaagaaaatgtatgttgtgactaaaaataacacactaatgtag

SEQ ID NO: 89278 - DNA, 599 bp, Cannabis sativa
caaattttgccaacaaatgagcggtattattagcagacctaaacacatgagagatctgagcaccagggaagttggatactaaaagggaaatattatctaagatacaatgaaaatcaaaaactgacatttgggcagtttgcaatccttgaaccaccaaaagagaatccgtttcaattaaatgaactagtagttttagctcccaaagccatttcagactgtgcattaaagccatagcttccattatttcaggtttaaagcaacctttaaatgggacagccatagcggcgactatatcgccagagctatttctaaagacagcaccaaagcctgtaacttgcttcattctgtctactgcaacatttgtgttaagtttcagatggccacagggggagcaattatgaagcatctcgtgacactgatcttgcattggagtggttgtttgctgcaactcgatttgaaccttccctagctttatgataatcttccgagaaagagagggcaaaataaaaaatagtatcaacattttttggcacagaaccatgcatttctttgtttcgttcactccatatactccaaagaatagttgcaaactattctaa

SEQ ID NO: 89279 - DNA, 854 bp, Cannabis sativa
tcaataaaagatgaaatttccattaaaaaaaaaaatctcaaatgaagaagaaaaaattaataatataattttcatatttagatttaatttcgatttataataatattttatgtcttttttagatttttataattatcgttattgaagaattcaatatttatatatatatgactcagatcacaatgacatatttattagctagaatatatatttttgaacaaatgatatgatataatgattaatgttaaattcaatttgagatatatttgggatatataatattattaatggtgttctctttttaaaatggatcgagcttgggatgaaaataataagatattattaagggccttttcaatgagagggatcatgtgttgattaaaagtgtttaactgagtaataatgttgaggaaaattgttggttttggtggaaggaagttgttgcaatgatttgttggtgtatttagaacgtttgtaccgactttagagataataagatcggcaaagaatttggtaattaagttgtgaaaatttagtaagcttaatgttgatgctactatattcgaagatgagattaagttaaggatcgggtgttttgcttgagatcatgagttaaggctggtgcaatgtgattgtagagtccgatagtcttgtgagtgttcaagcattatctagcacagttcatatggtctctcaatttagtttttcagttgaaaattctcgtttattattatttgaattgtctaatatttctttacgttttgttaagtactgtgctaagagtcattatatttttacatatttttttctcgtattgtattgtggtatgcagtagaaattacaaaataataatt

SEQ ID NO: 89280 - DNA, 510 bp, Cannabis sativa
taaggatgaaaacttgtgtgtaatctgattgtttaaagtagaaattgacagatgattaggttaataaaatagaaaaatattgtctgattttttatagatatgtttatcatattttttaagcaattgcatggattaattaatagatgtgagaatatggtgttaatgtagattaaaatagaatgtttggtcaaatcaattctaattttgaggatgatgttgattttgtgccatcaactgcaaatgaagtacaatctgttagtaatacaatagataaaaatcaaactacatggacacagagaaaaagaacctctcgtgcatgggatcattttacacggcaaaatattgatggcaaaattaaagcagtttgccattattacgagcgtgagctggtgggagaaagttttaaggggactaggcatttaaattctcacgtagagaggtgtccagtaagaaaggtccagcttgtcgctaatcctaatgcaacttgtcggtcgtcaagaaagatgtgat

SEQ ID NO: 89281 - DNA, 554 bp, Cannabis sativa
tactctagtgtttgagctccaaactaatactaccatgacaaattttgaagatgctatgaaaaataattcatttgtaccccagctttaatctggttagcaagaaatgccataaccaatctaatttagtatccatgtattgagtttctaaaaccatatcaataatataaagatgaccttggagagaccttgaattgcttaaggtgtatattcacaaatgtctaaattagcaggttcagttagtttcctctgcatgcctgaaagaaacaaacagagtcaatgctgctctcgtaagagaagaaactttgaagaaaattgcagccgaagaaaaagcaaatcatttggaagcggtaaaggaggttgagagggaaagagttttgcttgcaaaagaagcttatgaaagacagattgctgaagttaaggcctttgaagagtctttagagaaaagaaagcttgttgatgaactcttttctaatgataagaggtacaggagatacactaggaatgaaatagaaatagccacagatttcttttcagaggctaatgtgattggagaa

SEQ ID NO: 89282 - DNA, 670 bp, Cannabis sativa
ttgtagtagtgacaccatttgagcctattccttaaagcttctattttccatacataaacctatacacctaaaaagtttaaattttccacctattttaagtgtaaaccgaagccaagaagtaatgtggtggttataacttcgaccactgattttagtggagaaaacgttaaatctcaacgtccattaagatataaatataatttctatttattttagtaatgtacattgctttattttttattttgtaaattttttaggtgttttctatgttcttaagattatgttgttttggttgtgcatggtggctaaatttttgtcagcattggtcgtcagattgcggtaataaggtaaaaatttaaaccttaatagtatatatgtatgtattttgtgtgttgttgaatatgtattgtgtgtatatatattttgtagttgtattgtatttataaaaatattgtaattgtatttattatcccaaattttatcaacctgatgtggcatgtcaatgtaagccaagactgaggacacatggaatacaaccttgtcaatagtaggattacaagggcatggttaaaccgccaagcaacaagaaagaagagttaaacaagttgtcaagaagctgcacaaccattttaggccacccaaagggagtacatgttgggttttatgccct

SEQ ID NO: 89283 - DNA, 661 bp, Cannabis sativa
atgtgacccatctagatctcgagtcctttgacttgttctttgtgtgagttgctccttttttcgtggccgccatggccatggtggtcgacccttgacccgaacctgatcgaacatagtacatatatttttgggcatatatgtatatgtatataatgtatatatattatattatatatggtatataatatacactataaattatcatttaattatttaatataaattattaatgttgtctcagatttttcctaaaatacgtggcagcggctgcatgcgatacgtagatctcaaagaatattcactcacaaaaattagtaaagtcataggtagtgaagtgcatctcacggagtgagcttcccggaggagagcataagacacacctttactctcctagaggctggagttgtaacaaggcatctccgggagggaaagagattgttcgaacagtcacttcgtatttaatgttgcatggggggaaacatatcagaacctccataagaagatttgacagatggggtaagcctctcttacagcgattacacgataatcgacgagtctagtgacagctctgttatgaagactcacatcaatcaaggaaggataaaagattatattcacctaatctctaagatacctacggcataggtcatgtatttcctat

SEQ ID NO: 89284 - DNA, 994 bp, Cannabis sativa
aattgtggctgtaatgacactcaaaagaacctttcttttacctctagaaactttttccttctaaatccactttaggacatcatggagctcttttttctaactagaaataccagtccaaagccagatttgatgaaccaccaaaatgctatatataaatacaattaaagaagaggtgagaatggctctccactctccactaccacacaccaagcacacagaagagttggtatgattaaactgacaaagtctgtccaaggtagacaaacggctctttaaggctagccaacttatgaacatgtattttgaaatgcaaaatctatccccaaatgtcatcataacaccatctaacaacatttccacgaggcatcttggcgtacagattagttctgaaaaactgataattgctaaagtcttttttggagaagatttgttttatcctttttttagtttgaactattcttttttttactgttattaaagaaatttattggcataatgaaaaacacgctttttcaaaaataattaacatggtttcatataataaaaatattttaataataacatattatctatattaaataataatttaatttaatacaaatattattttttgtaaaatttgggtataaatattattaataaatatttaaagaaaatttaattctagtgtcatatttttaatagtaaataattctctagtatcatattgtttttcttagaattaattggatatctattgtttaattaaaattattttaattttaaaacgggttaaatttaacactaattcttaccaattttaataaataaatttttgataaaaataaaaatttaaattattgcatttaaattaattttaaatttaaaatatatttacgaaattattgttagagaatatttattataatggaagaaaattaagatattacaactctattgtaatacaatacaagaaccaacaaagaaattaaataaatgttacaacaacataata

SEQ ID NO: 89285 - DNA, 608 bp, Cannabis sativa
aaagttcttttgtaagaaggtaggatttgtagcttctcccaataagacttttgagaagatatttttaaaattaaaataatttacataattcttaatttactcacaatatatatatatatactaggcagaagttacgtgcaatgcacgtatacttagttatatgcttaatttgaaaaagttaattaaaaatacacaaagttataatagtaaattagatgcaaaatgtttataaaataagttaaaaacaattacattttgaaaattaaaaaaaaaaaacattctttctattctaaaaattaaaaagaaaatatactctaaacttttaaaaattaaaaaaaggcctgaaaacaatgtcaatactctatcattataaaactaaaaatatacgtacatttcataatttctaaaattaatgtcattgtaacaaataaatattcaaaatggtctctcttaaatataaatcttaaaaaaacttgcactataatattaatgcaaatacaaattagaaaaaaaaaaattatcattttttctttttagtagctccaccaaatctgcaagcaaatcagaaaggaaaattaaaaaatagaattgaaaccaaaataaattaa

SEQ ID NO: 89286 - DNA, 1409 bp, Cannabis sativa
aaaaaaaaaaaaaacattctatttatgtatttatttatttactgttggaggtaattttattatttaggcattccttattatttattaaatgggaaactataattttggaaaggtaatactaaccataattgtattatcaattagttgattatagacaaaaaaatttattagtgacatgttaataatatcataaatttgtaaagtaataccatttttgcatcacattagaatttacctttaaaatcgtcgcatttatttatttatttgcaataaaggtgaaaaggtgatacttaccatatttgtgaaagaattttgggctatcaaagtaaaactaggaaagtttcagtttttatgcatgtgagaatctattggttttcctcagaattaataaaatcaattttctttttagttttaaaacaattatcaaaataccattttttcatcacattaaaattcaccataaaaatcgtcccatttatttgcaatgaatgcgaaaaggtgataccatatttgtattaacaattagttgattatattgattttattagtgagatcttaataatattatagattttaaagtaatagcattttttatttatttattatttttcaataaatttaaaaaagtgatagttaccagatttgtattatcaattagttgattgtcttgagatgggatattttattagtgacatcttaataatatcataaaattttaatgtaattccatttttgcatcacaaaaatcagcgtcacatttaccttttatttatttggcaatgaatttaaaaaggatagtgaatttttgggcaaatagagattgttttttttaaaaaaaaaagaagaacagttctcgtgaaaagattttaaatcctaaattcatcaattgagaaacaaagttaagagaaaatcttatttataaaacaattcaaaatttcacaataatcttatttttttttataaagattcacacatatacactataataaatttcaaaaactctgcttctaagattaattatccaatagaaatatgtcctaagaattaatatatcagtggcgcaccattcacgcatggctggctcagttggactgggcgcatcaattatatatacaaagagtacaagtccgaattataaaaaataattagataaatgtgtttttttttcttttgataaactttgataaataagaatcacatgcaaataatatatttggaaaaagaaatcagagatattgggaaggataaaaatggtgagtttggccgtagaaatgaaaatcaacctaagattaattgatttggtggaggggctggtagcttgtaaccggacttgattcttcgaagcgttggcaaaccagaaagcatctggtgtgatatctttcagtttttttaggaaatttttggggtat

SEQ ID NO: 89287 - DNA, 917 bp, Cannabis sativa
  modified_base (165)..(169): a, c, t, g, unknown or other
gaaggagagaaagagatccagactgagatcttgataatactctatgacagaaaggaacaaaggttagtgatctgagcggaaggagtcatatttttcagttccaatcaatgtatggttttctaaactcttatctgtttaatttcattgttttagagatattcatannnnngatgttaatcaacatacttgttattaaatctagatcttggtaaaatattcccaacaacaagcccatacaagagagataatcagttatagatagtcttagggagcaatgcacctctaagacctgaaaatattcacaatacatatacacacaatatatacacacatattcaataaaattaaacaatacatatatatactatatatagaggtttaaatttttacctaataagtgcaataagacgattgattccgcaaaaaatctaggtactatgcacatacaacacaacaatgttactaatatgaaaaaaccctaaaaaaaattacaaaaatcaaaaattaaacaatgtacattataaaaatgaatagaaattgtatgtataccctaatggatgttgagattcaacgttttctcaacaaatatcggtggccagagttatacccaccactattttctaatgggttcgaatgacacttaaatagggaaaaaatcaaaactttttcagtgtatgggattaagtatcaaaaatagaagatttttttttaaaaaaatgggctcaaatggtggagaaatgggctggcggaggtggtggttggcgaaggggtaagggttttctggtggctactctggtgtgggttcgttcgtgaggaagaagaaagaagacgaaggttgggggacttatctaacacttatgtcgttggttcttatataataaccgacggcatagggtacacgtgtcaaatttcacgtg

SEQ ID NO: 89288 - DNA, 616 bp, Cannabis sativa
taaaacataataataataaataatattcaatataaattcgaaaattggggctacaattttactcataaaagtgataaataaatgagttatatatatattagctaaataaatgagttatagagatatcttgtgtttctaagatttgaattagctatagctaagaacaaagaaaactcaatatgtgttaaagttagttgggtaaatactattttggatgtgaaagttactaattgcactttttgtgttttgttaaatgacaaaatagagtctgtattttttaaaattgtataaataaaactctggactaattttttgtcaaaataaaactttataataatttgatgtagagatgttatgaccaaactgattacattttctgtataagttcgtgttaaaaattttcttaaagttagtcgcattaaaaaataaaattattgaaaattgagtttaggatcttatttttactattttgaaaaatataagatccattttgtcatttaataaaacagatggtctaattgataacttttataaaatacagggttcaaaataacatttacccaagttaattttacattgctaatatatggacttaaattaccacatataagatgaa

SEQ ID NO: 89289 - DNA, 806 bp, Cannabis sativa
acaataaaaatgtaaccattgaaaccttctccatagtatattaattatttttactcacttttacaattttaattttttttctttccttttttatatttcattttattaactttactgttaactattgttttttatttcatttttacgatttactatttcgcttactcttcatgttccttcaccaagcttccaaactaaaatcgatgtattcttctctttgacgaccatttgaatactaccttgcttcttcataggatttttttcttctccatcttttgattctcattgaagaccatcgacattatttctccttcttacggtaagggtagtgtaggaatattgtgcaattaccaaactaccctacaccaacatcaaataatcagtattaaaccaaggtcactttcgacctttaccaattccctgacttttcaaagtcagcaggtcaatacgacctcgttttgtctttgaacaaaacaaccaaagggattcgacaacgttctcattcaatccctcagccttaggtttagatcgaaaccctagcagagagtttctctctgagaaactcgaagctacccccttcaaacaacccagaaatcccaactcaaccacaaacacaagatcacatctaacacaatctgatctaaactcaaacacacacacaaaaccagaaagattagggttagaaaacaccagattttttttgaagttcaccaataaactggctacgtctccgtttgagctgctcctcagattgagagctcgattccactataaaaatgatattcagagttacaaggatgagattc

SEQ ID NO: 89290 - DNA, 505 bp, Cannabis sativa
tgttaccaaacgacacctaaattgtttgaaccaaaatatatataataataccaatatattacaatatacaatatcacaattaaatatgaacccaaaccaattaatagtatgttggacctcatctttatataattgccgattatgtaaaaaaaaaaaaattggacattttataatatattaacagaaatctacaaatttgaaaaaccgaaagccaaatatatacgacaggaatggaaacgtgaaagaaaattccatgccgagatagatgaaacaatatatcaaaacgaaacatatatacatatatatagtacagtatatataagacaaatatatatatatatttatatgaatccacttaattctgaagccacatcgacaacaaaaacgaaatattgtatataacagtaaacaatcatatacccaagattaatcatcaaccgaaattgccgtcaatataaaagaagttgtcattattatctatatattcaatttcaaaaaacaaatc

SEQ ID NO: 89291 - DNA, 999 bp, Cannabis sativa
gaatctataacttctatttggacatagaagtgaaatgatgatgttgttgaaggaatttttacaacatcaaaaaaatagataataataataataataaatccataataagtgcgagtactcgacccaaaatggtgagtattcaaatcaggaacaaaaatacttagcaaaagactggaaaaataaagaacacaagagaaatataccggttcagtcaggtctcggtctccttagtctactattgcaaagattctgtccctttttatttcacggcggatcactcctttatatataaagtaaatgtcctatcatttacacaagaattgcattcattatcaatcgctttatacatttatttacaataattaagctaaaaaacgtaaacataataaatgaagaatagtttccaatttaattcactaaatacaacaacatatgcaacttctctagtgcgagtcgattgttcatattcttgcataagctcgtaggcttaagatgcattcaagactagttgagtccaggatgtctgcgtccttataaattcgcttttacggacgtcatataacgagctgatagaaccaggacatgcgagtctatatcggtttatcgaggttgttgggtcattggtcgcagctcgcaacataaagaatcgatctctatgtttttgcaggaggatcatggggatactcgcatatatcttgatatatgcgagttaaatccgttactcggtcctacataatgcgagtcattcgaatgcgattagacttggtcatattcgcctcatctcactgactcttgtttaggcgaggtttgtattcgaggagtctctcattgacatctcagctttccttggggaaattgagtacacgtgtccttcaaacaggagtctggtctcgagtttcaagatgagaaaaatatcactataacacatgcccctagttttgcgattgacagatgcggtcatgagggaaactataattgagaggcaggcgaagagatgtc

SEQ ID NO: 89292 - DNA, 1301 bp, Cannabis sativa
cacaccagagttatcttctcaagagtgtgtggataaaaatacagcaaaagatttttaggtaaattattaattgggacttatgaacataggactcttgggagactcaacattcataaatcaaatcaaaattagtgggtgtaaggttctttggaacgaaaaccaataaagtataaaaaagggatgtgcatcaatggtgattgaagtcttggtgtcgactgagtatggttcactcaatgaaaaagacgaaggaataagtacggtgttcttgggcgccgtcaaatagctctcaagagaaggttcagaggagagttcaaaaagaagatccaaaaaagggtccttattttagcctcttacttctccttatataggtcgtagggtttgttagtgatctcccacatgtcgggatgtctcactaacaaatctcgtatatcatctatttcaatgaataaaaaattacaagaaaataaatatctactaacatatacttgtttctaggccaaaatcccacaaacattgggaaattaattattttagtttgaagattgaccaattaaaaatggggtgacaagggatgtcacctctcggctaggacttcatgatattagtgatgagtactgacaaaatatgttttgggatgtcaatattcacatacaatgccacatgggttatggcagtgtcctccaacacccctcacttaactatactactcaattatcgagtaaaatgtacatgtctatcttgtgagctaattttagacccgatactttagaatttggctatgaatatgagatacacttagatccgtcttgaaattatccatccaatgaaagttgaaccaagttatttggataaaaattgagagagttatgcgtattttactgaaggcagtttatgatgtcttgtgccagttgcgagcactgacatggccaaatggcagtggtcggccatgcatgttctcggacccctcggggtgtgttctaactttttttttcatggtgagtcatattttaagggtttcttaatcccaaaatctcatttcgatgtctgaaaccctaatcctaatgggagaccactaccaccagttggagccagaaagtggcagtggtcggccatggcttgtgggaagccataggtggtgtttcttgcttatgttagtcatatggatgttaaaaaactactttggccacattggttcttggcaaatttcttaggagagcactgccaccatttttgccaaaataagtggatgtggtcgcataaagggcttatgaagccttgggtaacttttctcacttgtattt

SEQ ID NO: 89293 - DNA, 710 bp, Cannabis sativa
accacatttcttgcaatataaagtctgcccttggaattttcacataagtatcctttgtgatgagaagaataaccaagaaatatgcattgctcgtatctgaactcaagtttgtgactattgtaaggtctcaaatgtgggaagcaagcacacccaaatggtttgagaatcttgtactccggtaggcttccaaatagactttcacaaggacttttgaagtctaaaatagcagtaggaagtctattaattgtgaagacagcacattgaaaggcataccaccaatatgacaaagaaaggccagattctgcaagtaaaaccaacccggtttcagtaatgtgcctctactttcttttagctcttccattttgttatgatcatgaggacaaggaagttgaaaatgaattccttgatcatgtagaaatcgagcaaatggtctgtattcccctccccaattagacagaacacttttaataggcaaatgaaattatttttctaccatgcttttgaattttaaaaaaatatcaaaggcttgagacttaagtgtcatggggtatatccaagtgtacctagtgtgatcatctataaaatgaatgtaatattgatatccttctttagatgagacatgagaagggccccataaatcagtatgaattaactgaaggggctgagatgcatgactattggacaatggatatggttgtttgtgactcttg

SEQ ID NO: 89294 - DNA, 677 bp, Cannabis sativa
gcattaaatgcgaggtgattgctcgaatatgtcctcctcctcccggagacgctttatcatatccctagctcccggagaagaggaacatgctttttgtacttctctgggggctcactctctgaacaacactcgttcgtctgtatacgactcagctaattctagggtgaggtgtccttttggttaggggtgtgcttgtagccgtgaccacgtattttggaaaaaatctggggcaatgggtgactacttaatggttatatttttattgtaacaatgatggttatatttttgttgacttataatagcaggttaccaacaggtaatttttttttttttagaattaaataactaataattaactattttattaaaataattaatctttaatttaaatgtttaataagacccgttttagaaattaataacaataattttattttcgtatttaagtgtcttttatattttttttaacagttaagccatttaattataatatttataataaaattctattattttataaaaattaaacttctaccccttcttgctaagtttatcaagaacattcaagatttataactaataacgattaataactttcaaattttcaataatacatattcaagatcaataactaataacaattatttatttttaaatttttttaataacacgtattc

SEQ ID NO: 89295 - DNA, 616 bp, Cannabis sativa
aaattaaatcgagtaacaaaaatattaagtaattaaatatgaccataattagaatatataaattgattattaaataattaattgtattttataaatcaaatcaaatattttatttgatgtgttacatataaaaaatattctaacatttgtctcatcggtgaaaaagttgtgcaggcggaacactagtaaagagaatcttatcaagattgtatccaataatagtgggatactcttgtgatttccatgcaagaaggtttgtacggtcgagcttgattgtgagcgaggcaatgagtgaatgagagaacggattccaagtcaccggagtagccattaaagtcgtaacagtgggagcaccgtgatttagagaatcgacatgaacaccagaggtagatgttcttttatcaattgaggccatcagagacagagatcaatgttgattgataccatgtagaagcttatcaatagtagaaaggaaaagaggaagaagaagaaacgagagaaacagctagagctttaaaaatatggccaaaaaaacttagccaactacttatcttagagatctatatttataataattactaatacaagaacagtgtacaagttgtttagcagaaag

SEQ ID NO: 89296 - DNA, 578 bp, Cannabis sativa
cacatgcaaaaatatgtcaaggtcgataaaaatcaaagggccgataacaatcaagatttactaccaccatcagtagatggacatttacaagttattattggaggtctgcacatagttggagattcaggcaaagcccgagaaaggtatgcctgaacattacagcacgagcaagaagaattggttctagcgtcgaagaaagaaagccaaaaataccccgtgtattggaacccaccataacatttaacgatgcagatgctgtcaagattaatttcccgcacaacaactcgttggccgtggaagtccaaatagccaataagatggtggcccgaaccatgatatataatggagcctctacaaatatctttttcatgacaccgtatgaaaagatggggctccaactcaaagacttgactccatatctctagctcgtgtatggtttcaccggccagagtgttgaacctctagggaaaatttgcctacaactaactgttaggcaagctccgaagagcataactataatggcacaatttttaatattagacgttccatcagcatttaatgtcatgttaggctgacca

SEQ ID NO: 89297 - DNA, 864 bp, Cannabis sativa
gcatcctggtaaatgccaactgtagtctctgggatgttggcaatatagtagtcatgatattcttcccccagtttattgttgagcaaggttctcacaccttgctcattcattcgcacattcaggatagagaaagtgttgaggaatctctcaatcgactcatactatgttctgaaatgtaaccgacactactaaaaattatacttttggtctcagttttaaactgagacttatacttttagtgtcagttgatataaccgacacctattccacaatcacaaaaagtatattctttggtctcagttttgaaccgagacttttgggcattggtcttgatttcaaactgacactaatggtattccactgtcacaaaaagtatattctttggtctcagttttgaaccgagaattttgagcattggtctcgattttaaactgacactaatgggtgtcaaatcatttttgcactatatatctcggtttataacaaaaacttacgtgtttgtatattgtttaaaaatattattttttcttgatgtttttgaatcaattttttaaatataaattgattatattaaaaaataaaaaataataaaattttgtagctataattttattaaatattattattatgcaatattatattgaagacatttcaaataataaactcagaataaatattatcattatacaataaactcaaaatgaaaaattcataacaaaaattatcattatataaaaacttcatacaaaaagtaatatacttagaacaaaaatttcataacaaaaaaataatagaactcagatccaccacgagcacgaactagtctaaactccattctcagcctcaaacacgaacccaaaacac

SEQ ID NO: 89298 - DNA, 521 bp, Cannabis sativa
gtaagatatacccatgtcactaaaacttcaaatgtgtataaataacatttcaaatgtcaataaaaggattttaaattctattaattttgttttcttaaaaggaattagtcacatttacaaagtgtcactatttatataaatagaaattagtattcaaaatattatttatttaattggggcaaaaacgttagaagcttacaaattttataatttcattattaaaatatttttataattacaaaaaaaatgtttttatatatacagaaagtaattttattatttgaagcaatactcaaatgcaaatagtatctttacatagtcatatttgatcagtacataagttgaataataaagacagcatatttctaagattataaatttcatattcctagtcttatggaagagaagcatagcactacatttggacatgctttgcctccaacgatttttttgtgccaagcgtatctgctattttatctccatcatttagtccagggtagctctccatcattatttaacta

SEQ ID NO: 89299 - DNA, 768 bp, Cannabis sativa
cagttggcagttgcattaacgttgtctataagtctctgtttcgaattttaatcttgacttacaggaatttttgccatttttaatttcaatacgtccaaatggttaggtcctgaatagacaatagtcaacaatttttttcagtattaaggataaactaaggattaaaggaaaagaaaatcatccactttgaagtcttgctttaataatatctattgtatcaaacataaatcttctttgtttcagttgtgcaaggcttaacatgataagtaagtaggttatgataataaatgtcaatattagtgagaaaaattacacacatttactgtataaaaagaaaaatgatgccaactattagcatgttaacaaatcgtgacaaaaaataatttacagggaaaaatgctgcttggcaagacaactaggcaccctttttagataaactaagaatcaaaatatttgcaaagctaaagctcaaataaaaaatattcatctcatcttggttcaacccaactttctgtgatgttgttcccagaggattgtgtgttagattcgggcttagaagaatagtattcgttagaaggggtgccttggccaatctcaggggagatggaattcagaaaagggggttgtgttggctgtggaatctcatgattttcggtaagaagattcacgacagctgacattgatggtcgaagctcagcagaggcttgtacactaagtaacccgatttggagcaaccgagatgcttcctcagcttggaagttaccttct

SEQ ID NO: 89300 - DNA, 749 bp, Cannabis sativa
atatttaatttgttattatttttttatactttaatctaataatttatgatcattaaatatatataatataaatttgagtttaaattattttatcaataatttaaaatgaaaattaaatataattatatattaattaagtttattaaatttagtaattcattttggttacaatataatgttttgttaaaaattttcttatggatttttcatttatatatgaaactgaaatgtaaatgtataagtacaagatgacatgaggtcaatcacttgagactagctcaagtggccatagaaaggtgtgtgtgttggaggtcatggattcgaatccaggttatacaatgtaatatataaacgctttaaaaaaaaaaaaaaaaaaaaaagaggacatgaaattaatttctcaattaatatgcataatcaagcaaatattttatttatacatttttcaggttcttttaaagtttaagttcctttaatgattaataattttctttgttttatgatttttatttaaacatgaactatttaaatatattttaacatttatagtttcaatttaattatgataactatttaactaaattaatctaaactaccttagttattttcaaaaagtttttcatttttttttaaatatatccataactaaaccttattaaattaacatttatataaaatagagaaatgtaagtaaatgaccctatttctaactctatagatagttaatgtctattttttaaaataataaa

SEQ ID NO: 89301 - DNA, 1734 bp, Cannabis sativa
  modified_base (1683)..(1698): a, c, t, g, unknown or other
tgcgaggaggcctttcagaatattaaaaggcatttggcaacacctcctgttttggcgaaaccagtaattggagaaacgttactcctctacctggcaatctcggaagacgcgattagttcagcaatagtgcgagaagagggaaagcaccgacaacctgtttactatgtctgtaaaaggttactgggggcagagttgaggtatcaccctcttcaaaaacttgccttatgcctcatccatgtgtctcgcaagttacaaccttactttcaggcacacccaataaaagtgttacctgatcaacccttgagacaagttttatcaaaaccagacgcttctggaagattgataaaatggtcaattgaatttgggcagtttgacataacttatcaccctcgaacatccatcaaggcccaagctttagcaaacttcttaatagaaggagtaactccagaggaaaatccgcttgttcactgagacacggacacctggaagttattcatggatggtgcatccaatgagcagggctcgggtgtaggggtaatatgaatttcactagaaggctttaagtttcattatgctttgagatttcaatttgatgcatcaaacaacaaggctaaatatgaagccttgatcgctggcttgaggatagtcgaggtgttgaaggttaagaatcttatgtgtcatagtaatttgcaatgattgtaaattaggttctcggggaataccaggctaagggcttgaaaatggctaggtacctagagaaggttctgaagaacttggaaaattttgattactttaaaatcaagcaaatcccaagagaacaaaactctaatgctgatgccttagcaaaactggcctcgcagagcaatttggatgaattaaacttggttctagtagaggtgctaaacgagccaagtatatgtgaaaaagaagatgtcaagatgatagatagcacacctacttggatgactcctataaccaactatctactcgacgaataacttccaactgacaaaaaagaggcaccaaaactcctatatgcaatatctcgctacacgataaccgaaggcaaactatccaaaagaggttattccatgcctctacttcggtgtgttcttcctatagaagcaaacgagatcatcagagaaattcatgagggcttttacggggatcatgcaggttggcagagtctatctaaaaatatcattagacaaggatattactggccaacaattaataaggacacccatgagtttctcaaaaaatatgataagtttcggagattctcacatatacctcgcgtaccaccaacagaactaaggatgatgacctctccttacccatttgctatatgggggattgatctgattggggcacttcccataggaccgaggcggagcctcttatctccataacctgtaagaaagtccttgactttgttgtcaaaaacattgtctgtaggtttggaattcccatgaaaatagtatttgataacggaactcagttcgatggtgacttgttcactgagttctgcgagaggaataaaataattaagagcttctcatcagtatccaggcctcaagcgaatggacaattggaagttgttaacaaaacctcgaaggatactatcataaagaagttagatgttgccaaaggtagatggtgttgggttttgtgctctaaatnnnnnnnnnnnnnnnntaatcagatttacttattaacaaagatcagaaataa

SEQ ID NO: 89302 - DNA, 1026 bp, Cannabis sativa
gagccagtatcactaaacgaaatacaaaacaaccaacttgattgtaagatcatcattaaccctaaggttcttgacagtaaagaaaacttgaatcaaattcttggtaatttttttattaccctttaaaaagattccactagcatattcttatcatgtttgaaatgaaaagtatcaaaactcaatgtggcactctagacattgtgactaaggcaaattcctctacactaaatgtaagaaacttcacagcaacagatacccagaattccatcttattaggttgatgaaattccctcaacaatagacatgcaagacttcgaaatgaataatatactctagaattcgaaggaattgaccaaaaacagtttgggaaaacatttttaactgggttggggtaagaatagttttaatatcgttaatgactgaataataatcatatgttattaatttagaatgataatattgtgaacgcctatatttaaatgtccagtcatggaaaaataaacatccaaatacaactcaaaaacaacaccaaaacaaccaaaaacaaaaaaaaattataaaagtccacaaacctcaacaacaatatcattagaaggctcttctaacccagcttttgtaggaaaattcagaataggggattttcccttcccctacaaaagaacaaaagaaaaaaagagagaaagaataacaactgttatagaaggtataaatgactcaaaacaacaaaacatacaaatgaaaattaaaaataaaacactaataaattattattgaaaaaatcaaaacacaataatataaaaatttaaaaataaaacacaaaaactctaaaaaaaaatacaaaaacaaacaactaaccttggcaactttagctaattgaatgaactcatcgttaagttcaaaatcagaattagactcttcctccatagatcgatgacatttagaaaccctcttagaaggagaatgaagatctaccttacgtttggaaggagcaggggaagtagaacttggaggatggtctttcaattt

SEQ ID NO: 89303 - DNA, 509 bp, Cannabis sativa
aacttctacctagtatatatactaagcatcaaaattctataagtaacaaaaaacaaaccttataaataagtcacaatactttttgtcctattcatgtccatgtatagtatattaattaggccttacaagccatacttaatgcaaatgaagaaaaaattgaccgaattgtataaataagttaggaaatttatgtgttagattcttttattgttgttttggtagatttttatttgttttgatattttaaaaaatatagtctaattttttttatgatcatatatattataaatatataaaattatttgtaaatttttaaaaaaatctgaataatttacagtgctaaaagaaagatttaaaccgttacttgtcactcgtacaaaaaaaataatcgtacgtataacaaaagataaatcttagtattcgatattgtgaactactcaaaatttttaaaaaatttacaaataattttaaataactataatgtacacgattaaaaaaaaaaaaaaaaa

SEQ ID NO: 89304 - DNA, 537 bp, Cannabis sativa
cagaaaattgtctcaccttcatgtaaaaatttgaaagcttcacaaaatctttcttcaggagtttaacaaatgggcagtggttgcagataaacataacctgcactaccaaataaggtctttagaagaagaatctcgtaattttctttatcgaaggaaaagaatggagttatatatttttgtagatagcttaatatgtcacatagtttttttactttcacatggtaacattgtcaggctataccctactaagcaaaaaaccaccctctttccagtgaagtaatattttggagatttcgattcgaggtatgcaacccataatgaataataacaagtaattattctcaaaactctcttaattatatctcaaaatataccaattacaaagtacaaaacaattgaacaagtgaccacaatcaacatttagaagagaactttgtgtacatgatttgtttcttgactgtctctcagattaggaaatacctttttataaccctaaaattcccattgttacaacaacttgagtgcatgtgcaacact

SEQ ID NO: 89305 - DNA, 1596 bp, Cannabis sativa
tccaagttctatgagtggatggtggatgcattgtgcattgaggattgaggaattaataagttagtggatttacttatgtgtgtatatatataatttgcatgatgtattatgtgatttgtacactaccaacactagtacggttgcggtacagagtgcattagtacattatatgatgtttaaagggtatgacacagtgttaccaacactagtacggtacatgtacatagtacattcggtacaacactcagtggtactcgaggtgcagtttagccctaccaacactagtatgggacgagtacttagtgtatgtggtataggggccgtacttctattaaggacgttcttgatgtatatgaagccttgtaaataggtgtatgggcacctagaaacaagtcagtattatattttatgttttatgattttcttactaagtttgtcgagtcacagttactgtttacatgtgtaggcaaagaaaaggcaaaagttgagaaccagtgagtccagagctgagggtggtcgtacatatcaggatagttagacctagagagttcgatctcgagacaacttgggcctttattttgtagtcgcggagcgacatgtttataaaatatatttcgattatgattgtaaattttaaagacgggatcttgtcatttatgtacattatatatttataaaagtttaaagtttaattagaagtctaaatttgacataatttttgagaaactctttgatatagcaaaggtatgcatagtaattaaaaaatcattttagtgtgcctaaacaagtagggtgttacaatttaaattagagtcgtcagattgtttaccaaagaccgtcaagatatgtacaatcatcatcagagacaagatcaactcactgtttagtaagcttgtacttgttagtaatttatatgattagaaaatcatgataagaagcatgttagtaatatgttaaatgaataatgtgttgcctaaaattccacatatgtgacaatttaattgtacgtgatcactgtttgacctatctgacttatgggtttgtaggctaagtcatataatatggacgtccgacaaaacgtaaggagtaagggcaatatggttgagaccggaggcggtcggggaggtcaaaatcctccaaatccccatggacgaggcaaagcccgtggtaggttccaaaaaggtggttataaaaatccagcacatgctccttaggattaggagcaaaggtttgcaaaaatacaagcccaaattaatcagcaagatgaagagatccagaggctgagacagcagggtcctcttgctattcttcctcaacaaatgccatccgctttagttccagtggtgccagcaggacaacatgtgctggtaactgtatgaagcccttatatgaacgatttcgtaaacaaatgcctccagtctttttgggagatcccgatgtcatgatggtggaataatggctgagattagttgaaaggattctgaattatattggtgtcaccgacaatgacccggtgacctgtgccacgtttcaattctaaaaggatgccctcatgtggcagattatggtgtctctcactcgagacgtcactgtaat

SEQ ID NO: 89306 - DNA, 593 bp, Cannabis sativa
ttgtttggatttaattttgtttgtgtttgaagaagaaaatagcaagtggaaaagaaataaaaagatgatgaaaatgtggcccaaaacacacttttatggcatttataagagataaaataagcccgaaaagagagtccaaatccggcccaaaagagtgcaatagcagacaagtcttccacgtgtcactctaccactggcgcgccagtccgttcgtcagcccgggccccacacgcagctgactcccatcagcttgttccacacgccccacacgcagctgactcccatcagcttgttcccatgtgagtattctccttccagtacgtgaaccaagatgccatcaaaatcaagagaaatgcatttttgtctctttttcttctacacatgccaagtattacacaaaagtcaaatttgctattttttcagccaacacaagcttgccacatggcaccgccttgcccaagtcagccaatcaaaatgtgacatgtggcactccgaaattaactgtgtatttacaaaattacccacatgcaatttgtaataagtttaattacacattagtctttttacccttctataaatagaagcttaggttt

SEQ ID NO: 89307 - DNA, 698 bp, Cannabis sativa
cgctcgatacaacaagaagcccaccattacatctcgggagatccagaccgctgtcaggctcgttcttcccggtgaattggccaagcatgcggtttcggaggggaccaaggcagtgactaaatttactagctcttgaggccgtaatctttctgtttttgggtttgggtttcagtgggttcttgagtaactgtttgaacaagttagggttagggtttttgtcttttgatgtaattattttttctttaatgatatagatggttgtagaatcttgtagttctgtaactattgatcttttgataattaattgaaggaaatgtttttgaaggcattaatatgttagtcatttatattaattggtttctttctgaattttttaggtggtgattttattttgatgggtatttcaaattggagtattgtaattagaatgtgtctctttatgctcttcttcctaatttatttttagactgttaaaatgatgtatagttgtatattgaattcatatgaataattatatgtgtaaattgaggtaattgaggtcaattgttttgtagccatgatgtacaactaggggtgttcttccgatccaatccgcacttttttagtccaacaacattcaattcgcactaagtgcggatttcatattttggatccaatccgatccgcataagagtttaaatccaattcaattcaatccg

SEQ ID NO: 89308 - DNA, 1072 bp, Cannabis sativa
  modified_base (1043)..(1047): a, c, t, g, unknown or other
atattataggtgatcaacactactaatatattttaatattcctcttataaataatgtaatattagattaaattagattaaaataatctctgatatataataaaataataaaatgtgttcaataaaattaagtttatactgcatgtagaaatttaatttaagttatggtattgtcttattttaaatgtagctatataataaaaagtgttattatttattaaaatattacaatttatatttaaattctgagcattgctattagacaccagtggtgcctagcactttctcggcatgtcgtgttgcgattgactagcgatagtccttaaaagctattatattaaattatatgggacctgatacttaattggaccaatagcgatattgacacatacatagaaaggtgctaagtaccacttgtgctctttagcattgctcttaaattccctatacatatctttcttatatatcttttatttttcttatattaaatgcgtctatataacataaattatttttttaatatattttatttaaaatttaaatttattgcacatatgtaaaaaaatctttttctgttattaattttttacccaatttacatatctaagaaaatatctttctataattatttttcttataaagaataaaatataaaaagtgtttatatttattaaagaataactgttataatgctggctactttttgcagttattgaaaaatatctttttattattaattttttttaaaaaaatagaaaaattgtataatatttctaaaaaaatgaaagcattataaaattaaaagtattactattttgttcaaaaaaaatattactattaaactaaaattataattaacaataaatttttaataatactatattttttttacaaatatcacttaaattaaatattttttaataaaaaataatgttgtttattgaataacataaaaaaaattaaccatacaattaaaaatatacaaaactaaagatacggacattgcacataatattaacctaatatatatatatatatctttannnnntaaaagtgtctatctaacggcattt

SEQ ID NO: 89309 - DNA, 791 bp, Cannabis sativa
gtcgaataaaggtggcacctatggcgtcggttaatacctaataaccgacgccatagggttatataaaaaatcctgatttttccagcccccaaccgacgacatagatatatatacattttatacctacgatttttaccaaaaaaccgcctctaaatgtcaatgcagatattttcaccccctttagcttccccttttataaattgggttgaaaaaagggaagctaaaggcttacattgtagtagtgaacatattaggggtccctaaccctacgctcaagttgattctgggaactccaaaatagttgtttggatcccgccaaattgtttcctactcaccatcttttagtattttaaaccaagtagacaagaagaatccaagtctgaggcttggaaactaaaaaaagataaaacaacaccctgaaagtcaacccaggcacctagggttttcacccagtgcccaggttgacattcccacctagggtttcagtttttgggtctaccttagtgcaaatggctcaatatttttacttagacatgaataagacatgtcacgaacatgttagaggcatcataaccagaattggtacacttcccgtgtggagcacctaggcacccggtgcctgggccacctagtgatgcagtcagcaccggttgacatattgttaacttgggatgcttccaaccacaatattgaagaaaaatcatgagcattttcttcattatcatccaaaataaggaatctagtgctttcatgaaagaaacaaatcaacctagaggctaaaactcggacct

SEQ ID NO: 89310 - DNA, 539 bp, Cannabis sativa
  modified_base (184)..(190): a, c, t, g, unknown or other
  modified_base (224)..(225): a, c, t, g, unknown or other
aatcatagtgtggaagattgtgaagaattatatcacaagttcagatattggctatactctaagacagaaaggaacaagggttagaaatctgaacgaaaaaaactattatattctactgccaccaatgtaaagttttctacaactttatatgtatttattttattgttttaggaaattcatattnnnnnnnttagattatagaatataatcaaacatacatgttnntaaatctagatcctgataaaataagtttcaatagactcttacgtcatcattgccttcaaattaccattcagggtctagaccatcaccaaaatcatcatgaaagggaattcgtgctacaatgtcagttatcgacatcatattatttaactcaagtaatacatcggtcaccaatacctccgaattcgtttatagaacgaactcccaatctcgctacgagtatccttaacagtacttagagtgggactaggatcggtacagacattcttcttcaccaaagtcacaaaaaagagaataaattcatctgacttcttcat

SEQ ID NO: 89311 - DNA, 865 bp, Cannabis sativa
aaacataatcaattgtatttttttggggggcaatatggaagaatatattgatcatatattattgcaagattttgtttttatgatcatatattcttgtaatcaaatttctttctttttgatgcttatttattaagattaaatttaggattatgggttttgttacatataagaaattatcaatttttgaatatctttgttactgtttgaaattgaattatccaaacaaacctgagtttcttgttctttttggcctgatttaggttctttattgggaattcggatacattttcggtacattttatcagtttcgggaaatggaagatgtgataatttctgaacagttgcctccagaaacctcttcattgtctcaccatgatgagatgactgataaatcagttctgaatggaaaagccgaaactgggagtgacttgtctattggagaaagtactaagttaactgagactgttcaagcttctttagatcaaaaccaacttgttccaacagataatcaagcatctatctcagcaatctcagtggatacatctgtcgaaaatcaactttcgtcagctttagcctcaccaaaaacattcgatgaatcagagactcgtgatgaggttgttatgaaaagttcagaaaatggagctgtacaacatacctctaatggtaatggggttgcagaagatacctataatgaagcttcaacatcggtggagacttctgaaacaggagcaaaacacgatgcctctgatgagccgaaatctctagaacatagtatcgagactgcccatgtgccttctgcttcatcacccgagctaacaatctctaaaagtgacgatcatggtgtaccgcctattgatctttctct

SEQ ID NO: 89312 - DNA, 567 bp, Cannabis sativa
atctacaaccaatatattgatggacccgtggctagctgatgagttgaatccatttattgaatctcgacatccagctcttgttggcaattatgtaaattcccttatgaaaaccgatgcaattgaatgggatgatgaggtgattttggatgtgctaaccgagtgtgatcaagctttagtcttcaaaatccccctctcacaacactatgtcaatgacacttggtattggatgaaggaggaccatggattattcacggtcaagagtgcttatggcctacaacaagagattaaaggtaacattgatatggctgccaactctgggttttggaagcaactttggcagctgaaactccccccgaaagtactagatttcttgtggcgagcttcaacaaactgcttacctacaaggtttcaactcatgacgaagcatgtgcccatcaacaccctctgcccgttctgcaatgcagcaccagaaacggcattgcatgtactggtgcggtgtccgtttgctcaagggtgctggagcttggttcgggttcctgccgtcgcgactgctgctatgacttgggc

SEQ ID NO: 89313 - DNA, 561 bp, Cannabis sativa
aatttcaattgtcataagtttggtagatatatgctctccaagtaattttaaagtgttctttatgattacttgaaacaaataaaaatactaaaattttattaatatatatcttaaatttacatcattttgaagaattcaacagctacacacgagctactcattggtagtagggtctcaaatgttcgttgttctaaatattttttatcagcgaaccattcaaccatgctaatttataaacccctagtgctataacaacttctattgcatatggaccttcccaatttagattgaacgcgatcactgttgaatctcgcgtaattgtgaatactcttcataatactaagtctccaactttaaagagcctttcttttacccttttgttgaagtgcctcatcatcctttggtggtacacaacatgtctcacttgagattcatctctcatttcatctaacaaatctaaggattcttttgttgggttgtctgtcctaaataaaactcattttaatataattagatttactaattaataaaagatcaaaaattattttatattgcatggtt

SEQ ID NO: 89314 - DNA, 615 bp, Cannabis sativa
gaaaccttctctcttgtgacaatgcttaaatcctttcacattcttctttccataactgccacatatgattatgagatatggcaatggacgtcaagaccatctttctaaatggtgatcttgatgaagtcctttatatggaacaactagaagggtatgtgttaacaagggaagattaaaaggtgtgtaagttgcttaaatccatttatggattgaagcaagcctctagatcttggaatatcacctttaataatattattaaagagtatggctttgaacaaaatgaagaagaagcatgtgtatacaaatacattaaaggtaatgtagtggtattcctagttcttaaggttggtgacattctacttactagaaataatgtagaaaggttatcaaatgtaaagaagtggttagttaaaaaattccaaatgaaagatttaggagaagcaagttatgtccttgggagcaaaatctatagagatagaaagaggagaacattagcactttctcaagcaacatatatcgataaggtgctggaaagattctcaatggggaattccaagaaaggacaattaccatctacacatggagttatcttatgtaaggatcaatgtccaaaga

SEQ ID NO: 89315 - DNA, 863 bp, Cannabis sativa
ttatattatattttttatcaattttttttatattatattggattaagtaaagataatccaaatcataattaattaaaaaaaaacaaaaataaaagaagaagaagaagaataaaagaaagcataataacttaataagttttgagtgagaaaaagattgaggggaaaacaaaagccaaaaaatataaaattaaaaagaaaaaaagaaagaaaagtgttgagatgccaattgagtaataatcaaaccaagtcagaaaaagatggtttgaaataagatgatgttgtttctttttaagcaaaagacaatgaaataagagaaaaaaaaaataaagttatatatttatttattgatatatttaaagggtcataataaaaaaaataaaaaatgaaggtcatgcatggactcatctctatctcattactcatttttccatatgtaaaagaaaaagaaaaaaaatctaaacattattatataataactaaacataataacattagaagaagaaaaaaataatctatagtgtaaatgctctccatttttatccagttgtcttgactagttttagaaataataataattaaatttttattatttaatttttcacaatttttgttaatttattttatattaacatataatttttttggagacctatataaaattttcattattaaaatatgtatatttaattttttttaaaggtctatatttgaaaaaattctattaattccaatgaaatcagcactatgtaagctgttggaggcaaaaagctggaacacgatactattctgaactaagtggcaccacgtgaattattggaggcttataaaaaaaaaagttattaatcgcacttgtaaacgaaaaa

SEQ ID NO: 89316 - DNA, 959 bp, Cannabis sativa
tgaatgattaaaactttatttaactatttgtaattaataaaataacatacttatattgaaccgggatcccatttcacaaaatatttacaaaagtttcaatgtgcatattacaaaagtttgttgcctagcgactatacataataagcccagctatcccaaagaccgtacgttccaggcctaaccgccctgacatgtacaatattcatatgcttgctctcacaactgctcaaccttggcctttccctaaccaacacgtgcaaaaaatatctgtgagtcgacaaactcagtaagaaaagtataaataatatgatatcaataacctggattataattaggcgcccacacatccaaccataaccctaattgagtcagaaacgttctcaacaaattatgactaattgctactccagcctatactcagtactctactcgtacaaatgtggtagcacttagttcatactatctgatagcctagcatatatctgttggcatctcagtgaagtttatgtacacatcaccgatgccctgatatgataatttgatggctatagagttgcctatcctaatgaaaactaacatgtacgctaaacatgtatacatacatgcaaccattatactgatgttaccacatttttgaattcacgtgagttggctgacctgaacaaaaagctttgtgttggatggatgccctaatcacataacataaacgggtaaaccacgtgccaaaaccctaatctgggaaacccaaacctcaaacttaaggttctactattgaaaaataatacaccaataccctaagtgtcaaggaatcaaccaaccaaggctttgaaactaacacgaatcgacaacacaaaaaatttgagaaaccagtttctgattcggttaatcagttttaaaggaccagtgaaatcggctaaccggtttacaccaggtaccctaaaataatttaaaaccttgtc

SEQ ID NO: 89317 - DNA, 914 bp, Cannabis sativa
atttagttacaaaaaattatattgtgactaaaaagttatcactaacagtagtaattttttctagtgacctttattttatttgtatttagtataataataatagtttacttgatttgttgttcatacacttattaagaatgtttattatacattttaaaaattaaatattaatattgttcatgggaagaaaatacctatagtaaaaaaagtgtcaatagataattaagggaaagaaatgagaaaagagaagagaagagagaaaatattatttaattattttttataaatgaataaatatttatttatttaatattattaaaaaaatatgataaataatgtcctgcaacccaaatattaacaattatcttacacttgtttatttattaccatttgatctattatttatggctataaaaacattcataccataggagtcattatcatagacatatcctataacttttatccaaagtaattatacaaacttttatagagttttttttggctatttaaccttctcaactatatcatttcacttgcatttaatcttcttaattcaaattttggtagtaaaatcctctaaataatgttagtaaattttggtgtataagaatatacacataaacagtctatggtggttgttaatcagacgataccttaaatttactaacagttcagtaatttaaaaagtcttatcgctaaaatttaaatttgaagaattaaacacaaagtgaaacaataatttagaggatttaactaccaaaaactcataattataataattaagtccctataaaactcatctaaaaaaaagtccctataaaacaaaaatcttctctcccaagcacctattttttttttcttttaccgtcggagaagcccttggagtaaatgtctcaattcttgatcaaatg

SEQ ID NO: 89318 - DNA, 747 bp, Cannabis sativa
gttggtttgaaaaaatgtttgaaaaaatggtgaaaaaccgtaccaaaccgtaccacccgcaccgcgaacacccctagtaactaagaataggttaaacgaaataatccacgccgaggtgaacataaattgctcacctaactgtaatttatgacaaagttgtatatggcatgtttaataaaggggaacgagaatcaattgtatgagattgattcccattcatttgtttactatattttggaatgagagaaactagtggggctcacacaaattaaggaaaaaataaagcgaaaagttttctcctcattttcataaggaatacatttccctttttttaacttaatttatattaattatatttttattaattaaaaattaaaaaaagacaaatatgcccttcaaaaatatataaataaaaaataattacatattctaacgatagtaatttagtaaaattaagtcactccgattaccttttctaattaggtaaacaaaataaaatgattctgatctctttttcggtcagtttagtaaacaacaaataaaatattgtttttgattattttatatttaacctgattcacttattttattgattattttgattccaattacagttttataaacgtgccataaattcttattttataagtaatcaattatctgtttttgcatctttaattttattaattaaaatgaaataaaaatctttttagtggccaaacgacttcctaatttttaaataaagtc

SEQ ID NO: 89319 - DNA, 723 bp, Cannabis sativa
aatcaaaagcttttcaagcgcctttatcttcgattgacagaagccaaaaaccagccgattccactcacaaagagctttagcagtaatctttaatttctgacaaagaataaagctctgaaaaccctccacaccaagcttccaagaatcttcaatcacttttctgcaagagctatctctactccaagcatccaaataacgaaaaggagtggagaagaattctctttccatacgagtatcaagaataacaggggcgtgatcagagtgacgaatagaaagatttcgaaccccagctttcttgaaatgagttaaccactccggagagacgataactcgatccaacttctccttgattatatgatcctcatcctgaccattagtccaagtaaagagagtccccattccaaccaaatcaattgcaccatggttaaacaagaaatttcttaggccctctccttccgcctgagtgaccggtcttccccccactttttcattagaagaaagcaccgagtttaaatcccccatcactatccacggatccacctgagcgtcgaaaaaattacccaattcattccagaactcaacacgatcgtctcgtcttgggggggcatacgtgaaacatctgatccagtccaaggagactctatctccactgaatctagcaacaattttactaagatccatagtcattatctgaatatgccacccatgtctccaaaacagagc

SEQ ID NO: 89320 - DNA, 647 bp, Cannabis sativa
agattagtaggatcataatcctacttattatcttattaacttataatataattataaaccctaattatttatcattaggcatatcgggatattacaggaaaaccttatattaaactcttaaaaaagttgtttcagacactctctatttatttggtttttatgagagttttttaattcattttttttataattgtttacgttataattttttagggctacttgtaattgtttagaaagattctaataatttacaatattgaaagtaaatttaaaataaatacagttgctgcataaaaaaaaacagtcacatgtacaataaaatatttaaactttatatttgatattttaaaatatatatatatttttttttaaatttacaaagtagtcataaatactaaaatatagaggatggaaaacaaagattaaaaacttctttagaattcaaacaaataaaatatatatataagaggtgtaatataaaaatttcctatatatttcataaattatttcttgtattatgtgacgaattgattaaacatgcatctcaaagattatatcatattttcatttatatacatatgtatgtttaattttggcattgtttagttctaaaaatagatcatgtattccttaaattggtgtgaatt

SEQ ID NO: 89321 - DNA, 1210 bp, Cannabis sativa
  modified_base (252)..(255): a, c, t, g, unknown or other
  modified_base (465)..(467): a, c, t, g, unknown or other
tagtccaattgtcaatagatcttataaatactttgtaacaggtaaattttataatttcttctatctatgtaaacttagaaacgtgatagggctcatccaaatcaatttgatatgtgtgagcctatatgtttgcttttgggcttagatgcatataggaagcccatttatttattacatagataaattgactaggttgctaaaataaaaaatcaccctatgattgttttatttaggcccaattagtattggacnnnntcaatgaataacaattatttaataaaaggttaaattcctctcatttgagccttgtgcgagaggtaaggggtcattagtagtgggttgacatactagacccaaccctccctctcatgaataatttcaattatgaaggcctatttgccttatttaaatgattgtattaagcttattatactagtttaatctaattaaaattgaattagcaannnaattaattttgaaataaataaattaatttttcattgaaatattctaaattaatttagaaaaacacacttactttaaagaaaagattctaaatagttattgcaagtaacaaatttatattttctaatatttaattatgtagaaatatatatttaagttgaaaattaatttgttaattaattttagaccatcttaaattaggatatttttcgtagaacttaaattagaattaataattaagttaattttatacaagatacttaattatttctttttattttaataattttaattgaataagaaaattatatttaagttagagattttttattttcagattaacttaaattagaataattttcagagtatattttattttattttataatcatttcccacataaaattttaaaatgcatttattttaaatgtagatattttgaaatttttaattttgaaaacttgattaaagttgaaaattaatttgttaattaattttagatcaactcaaatcaagtaattttcgttaatgattatttaaattaatagactaaaatatattatattttaattaaaaaattaattaattaatttatgaattatctagatagatattttttaggtagacttttggtattgttctagagatatttaattaaatcaaaaattaatatttaagttgttttattctagacacttaaatatttgatatttttcttaagatatttaatcaaatagaaaaatta

SEQ ID NO: 89322 - DNA, 1436 bp, Cannabis sativa
  modified_base (49)..(56): a, c, t, g, unknown or other
  modified_base (865)..(872): a, c, t, g, unknown or other
aacctatggcttgtggtatacctcgtaatttacttactctagtgcaagnnnnnnnntttagtaagatgctggagcatttttctaatggccaactctaaaggagttcttttggcttctagacatagagcttatttatctaaggaaaagtctcaactattccaaaaagataaaagtcatgaaaagaattccttaagcatcaacagtgagagaggtctcttgtatgctgtggtatgcattagacctgacacctaatgttgagtgagaatagtgagtaagtatcagtttaatccaagaaagaaatattagaagacaaccaaataaattttaagataaaagagaaaatatatgttagtcgataagggtggtactttaaaactcttagactataccaaatcagttttctagacttgcgtcaatgctagaaagtctacttatgagatggtgattactcttggggtggagcagtggtttttggagaagtgtaagaaccaatctggagtctctaactctagtagtgagactgaatattaaagtggcctagaaggttgctagataattattcagtctatggaaagttctatacaattttttggtgttattccagtcatagattgcctactagtgttactttttgactaacacagatatagttaccaaacagtaaagaatccagtaccctaagaggagtaaacatatagaaaggaattttacaacatcaaggattttgtgacgaaggagatgtaatggtagaaaaagtttgtattgaatacaacctgtcaaatcctattacaaagaaaatactacatcctacacttgatctggacatcaaggtgttgagattaattgaaatgcacttttagttttnnnnnnnngcaagtgggagtttgttgggattgtatgccctaaataaaactcattttaatatgatcagatttactaattaataaaggatcggaaatcattttatgttgcatgtttcacatttcatgattatatgtttaaagtataaattctattaaatcaagaacatatagttattcatgattatggtgttgtcaacagtggaatataattatgattatatatttcaaagtttaagtctcatgatttgttagtacactagatttatactgacatgataatcagggataaagtttacttacaccttggataagtgttatgtcctttctaggacattagaaaagtataatattggatgtatggagtatacatcaaactggatcgctattgacataggataagatatcataaacttaccattatatctatctaagtcaatatcacttagtttatcttaggtcaaaagatcttaatgctaagatggttaagttttgacttaaatgtattatttgtgttctttgagttgtccgttaaagctgaccaattagatcggcgcaatacttacatcttgggaa

SEQ ID NO: 89323 - DNA, 588 bp, Cannabis sativa
acttttattaatttttaatattgtgattggagtaaaaaaaattaatgttaaaattttattatttttgtgttgatttaacaccaacttgcttggtagtgaaaacatgccaacttcttctttcttttttttttttaaatatatatttatatgtatacatatataaatattagttagcttaaaggtgataatgaatccacaaagcaactccattagttatattaggttatgaaggctaactatgtatagtcacaacaaagaagttattgatgctaggtacctcacctagctagggttgctatcaattaggttaggcaatgcaggcttatctttaatgcttggtttcaaagtaaatagtagttccaaactttacaacttcaattttcatgtgtgcacttttgcttcaattttcttgttttgggagctttcgattctacctaaatgtggagaaaaatttagttcaaaatcttgtgaactaaaataaagatgagtaaattagtttaccgtagatgaatttacgttatctgatggagctaatatttagcatcattctttaaaatttttattttttaactattatatataaagcac

SEQ ID NO: 89324 - DNA, 766 bp, Cannabis sativa
tcggtcaagaaaaaccaccatagagtcaacatggccacttttcttgatatctttccatagttctttgagcacctcgatgccccccaatattgcggccagccttccctcttcacttaaccatgctactttcatagcctttgtgatgaatctgcttatgtaggctctgagaggctctcctggtctttgcttcacttcgaccaggtcttataaatgcaatgggagttggctagaagaagaggtctatgcatgaaactcctaggagaaggctttccaagaattgaaccttcccggccgtaacttgaaataccactgatgtgcggcttctgaaagtgtagcaggaaatactctgcaccgcacatctcctcgtaccccttgcaaatccatttgcatttcaaaatacttaagttgagacaagggatcttctttccctgtgtacatcttccaggtcagtattttgaacttgaggggtaggttaagggcattgatcttagagtgaaggatgatccgcgtgctcggtccaactcaagatcagtgagtttttgggtggcgaggccttggaacatattttttaattcatccaactgtgcttgcacagatgggtgaactagttcagcctcttgtccgacctgtgtcacatcaagatctcttagagttgggtcctggattcgggtactgggttgggtgaacatattgttcgtccagacccccccttctattcaaatgatctatgagatcatgagccgtccccagtctgttgaatactgaa

SEQ ID NO: 89325 - DNA, 516 bp, Cannabis sativa
gatacttttagaaaaataaatttataagttatatgtatatagtcaaaaaaataaaacaaaatttataaaaaatctctcaaaatttaatagtcaatatatgaactaacttttttgtaaggaataacaacaacaactattttattgtatttgcaacttccataaagtaaccataaatgtcaaaaaaaaaaaaagtaacaataacaatcactctaatgtgaaataatttgaactaaattataaattaatgaatatataaatgtacatccaccgaaagagacaataatatatggttccgaactcttgcaatttgatgtccaggcaaataaaaatacttttttgcggtgagtatatttcgccacaataatttcgttgcatttttgtactgataactgacattgatctctgagtagtcaattgatacttcaaaattatataattacatattatatacataccaactaacattcaattttcacatttcaaaacaaaatggataatttatatctattctatata

SEQ ID NO: 89326 - DNA, 672 bp, Cannabis sativa
ggcatttagtattgattgtgtgagtttgggcccgaaattggtgttcttaatcctaatttgggttgaaaagctcttatcaaaagaataagtattggtgttagtagttgtttttaatgtttgtagatgagcattggcttaataaaatgacccgtggagacttaacaagagtaaatactataaatgtaatgagtacacaaattagaaaaacagccacatatgtatatatgatgatcactatatgtatatatacttatggatatatgtgtatgtatgtgtttttaatttgctttgtggtgagatcacttatggggagaggttatttatagtatttggtttgttgtttaggatggaaatttggtcaaatattggatttaattattaatattaattagttttggaaacgtgtgtgtatatatatatcattatagtttaacttaatttttgtatcggtttttaacttttctcaacttgtgtgagttttaattttatatttcttacaaaattattttgtttatgctagtgtttgttacagtaaaacctttataaattaagaactttatgacctgacaacttgacaaaagtataatttgaccgaggctattaatttatcaaggctattttgtataattatttgtgttgtaatggtgttgatgatgatgattattattattt

SEQ ID NO: 89327 - DNA, 759 bp, Cannabis sativa
acaaatataccagtcaattatacggaaaaaaaaaaagacactttttgcttgatttactgtaaaggttaaaacaggaaaaaaaaaaaaccaaaaaacaaaaaaatagaacatctttcattccatgcacaagattttcatatcattattctacgacacaataaattttaggaaagaacaaatagtaacatattccagaacagccacattcttaaatagtgaatacattgcatatttgacagcactatgaggcttgattcaacacttacaatgatatgtggccgcttcgcaagattgatagactgttgcatcatgtccactcctccaacaagctacaggaaattatgtaaagataataagcaaatacagtaaataaactagacaagaaatttccattcagccacctcagcatcttatagctcagattctttaggctttatttgaataaattatttttaggggaaaaaagagagaacgttttcctaacttttcataatgtctgcttttaaagttttctacaatatcaatcttttattataatttacagccttgctaaagtttggttatagacttaaagtttgccgatgatatagatatattcaactcctttatcttcacaatccaaacaagagaaaataaaatcttaataaaatgaatgcagcttagcaaatatacttttacttcacaataattttctgaaaatttaaatctgtgaaattcaaaacaaatggtacatatgtagaatctatgtttctggaaaag

SEQ ID NO: 89328 - DNA, 1204 bp, Cannabis sativa
attgagttgatagcggtggctttttccttcggagttttgtacttttacttgtttggcggaagtacaaagtttatatgaatcatagaaaccttaacattatatcatttggaaagaatttaattagaatgcagggacgatggttagaggtgattgaagattataatagtatgatttcttatctttctgggaaaaaaattagtagtggatactttgaactaaaaaggcctagagcaagtttgtaaaacaaaaagatctcaccaaagtttgctaagaatgccaccagaacagcgattgagtttatgaagggagaacttgttcacgttacattgtagtttaaactgttgaaaagaaataaagtggcccagcaaagtgactccgaactttaaaagtacaaggaaaggtttggaatcggattaataaaggaccttttgaatttgtttaaggaaattttataatatcaaaacaaggttggtgtaacagtcatataagggtattgaatataaggttttaaatgaatttcatactacaccatactcattatacttgggagtaactaagttatttaggatcagtacagtttctttatcagagtgaaatatgtttgtggtagactggtgtgctaatctatttgtcaaggaaatggttcaaccccgtgatgctccgaaagtagttatctcagattgagaattaaagtttacattcaaatgatgaatgagcttataacaagcaagtgtattagatggaagagctatgctgatccaagtatagagatattaaattcgatgtaggggattttatcgttcttcaggtggttctgatgaaagggaaattcataaactgtttaagaaagggagttaagtcccaagataatcgatccgtttgactttctcgaaagggtaggttagcttattagctagccatactccttgttttatttggaacttacaatgtatatttcaatgttttagaagtatgaggtaaaagtgatccatatacagagttacaataatatcaaatttcaaacagacttgttatgagggtaacaatcggtacagattttgaacagaaaggagaaagtgttgtggagcaaagactatgtcgttagttatagtgttgtgaaagaacaataagattgaaagacaatttgaaggttaaagtcccagttaccggagctgtatcccgagttgttgaataaatttcgagg

SEQ ID NO: 89329 - DNA, 555 bp, Cannabis sativa
  modified_base (205)..(209): a, c, t, g, unknown or other
ggtggaatcccaaaaacacatagtaaggacgcgtacaatcccataagatatgtgtcattagtggaattggaaaatagacaactccgacaatcatttgcataatcaaattagaggaatgctgagttagaatgcgaggctatgactgcatgggctgcacgcggcaatgcacctcctaacaaaccaaacacatccactaggaaacctnnnnngagacctaaaggcttaagaaccaagagacattgggaaactcctagaggcgataaccacgcaaatcccatgatgacctaccacagaatacaagggatattctagttgacgaaggaggcccccaatgtcagggaaacacgggcaatagagaaactctacctaatgaactaggaacctcttgcggaaacacaacttgttggaatgtgcaacctgacaacccagagtcgtctcgcatgaatgcagatgccaagcaaacacgacctaaggactaggggttcactcaacatgatgtgaggggtgtgggaggatgacgcatgtcaggctgtctgccaagacactcatagagac

SEQ ID NO: 89330 - DNA, 592 bp, Cannabis sativa
tctactggtaaaaatatatatatgaacgatataattacatcatcatttagtttacatacttaactttctattcatgatgtgattaaataaaatatgcttgtcactatataaaattgatgttatccgtaaattgtgtaatctttttcctaaaaatatatctctatgctctttgtggtatagaagacttgaagttcaaaaaatctgcataacacaaataaataaaataaatgtattgcataaattagcatctactcattatacctatctcacaaaaataaaaataaaaataaaataatgagtgaggtaaaaaaaccatatatttctcaatagttactgattttgtataacaattatacagatatgaactactaaagacaaaaatatacatttattaattactttattttttaaactatatagtatatcatcatcttcaaaaattgtccaataatacgtgtttatttaaatatcaaataaaaaaataaaaaaaatattaatatacaattacataatatatataattttctagtaaaaaaatttatataatttcttctaaaagataagacacttaaaatttattttgtctaataat

SEQ ID NO: 89331 - DNA, 739 bp, Cannabis sativa
caggtatatttcttttttcttcctcaataaagaaacatcatatcatggaaaggggagaaaaatctcttccatccattaaaacatatcgtctatcctgagagcatactgagccaattcatgtgtgaagatgagaaagagatgtcccgaaaaactaaaccatagagttataatgaaagaaaatccctaactcgtcccaccaccaaacattgtaagaaattttacattgaaaagtatctgatataattgtatgatgagaaattagaacttatctatgaaatcttcgaagttgaaagttatatttgatttaagcaatgtataatttatagcatctatatgttcatgatagttctcatttgatattgttatgtaatatgtatgcattttaggttgattggattgggcagaagaatcagatagatgctggtatgaattccttcttaatttgctttcatttggctatctgtttattatggttagtaatatctgttttgaaattttcattggtgaaacagccaaggctgctggagtgaagcaaattgtgttagttgggtctatgggtggaacagaccttaatcatcccttgaacaaattaggcaatggaaatatattggtttgtattatctctttgtaagttccatcaatctttcctttcatgatttttttcttttctgtactgtcaactaattccgaaacaacattgcacaatcttgccatgttttagatttggaagaggaaagcc

SEQ ID NO: 89332 - DNA, 764 bp, Cannabis sativa
agtatatgaagtatattagagttaaagtttagtgtaatataaattctacaaatagctcatgtaatataaattccacaaatcaatcagagcacactcaagtttatttattttgatagatttaataacaacaaactaacatttattcaattatttaaactcaaactcacacaaattttttttagttagatgcattatttttactcttaccgtactaatattttctattttcaggatctaaaaaaaattatttttcaatcttttttaaaagaaggttgtatatatttatagaaaataataaacgtggtggggcaaaaatgatttaacttaaaatttcgctagtaattagcggtgaaactcctatattttaatttttatatacttaactaagggtgtttattagaccacattcaatatttttaagcatatctaaattcgatccaattatatattgaatattagattttactatccgatctgatccaattaatttcagtcttcttatcaatctaacattcattggatgctagattggatcggtttatctattggatgcatttcatatatatttattggtttaatttgggtttatccaatattttaaacctagtattttttggatcgaataggatccatctaatatcttagatccagtatatatttaattggattggatccatccaatcaaaaaaaaaaaaaagattaaattttaatgttaattttcatatgtacatatatattttatgtataacaatataaaatttaat

SEQ ID NO: 89333 - DNA, 1456 bp, Cannabis sativa
tattcttgaacaccaaagatagcacgacatgtgtgcttggaccaaactgggatggaccatatcaggtggttgaagttctagaatcacgagcatacaaactgagtaagtatgaaaaaaaatgcaactcgttctggtaccaaggtattggaacggggaacatttaagaaagtactactagtaaaagtaccaggtcgaatgaccatcttaagtataaagaacatttactcttaagtaagtggcattctgggcggactacgcccaaaggttcggatgaaatgacaaagtactcaggtcggatgaccacttctgaaagtacaagttctattttatgcaatttgttttgtttatattaagctaaagatcgaattagatcaatataatagcttctatgtaagttaatacggtaacaagtgcgtttcgaccaataaatgaataaagattcttatttaaattaaaattgtgtaaattctattagcaagttataaatttaccattaagtgcgtacaaaagtctgctcgtacccatagacccgaacagacaaaaaaaacatacttgagaaaagtaagtgaccaagagtcaaaagtctgctcggtcacttggggagcatctatacctgtacaaagcatttggtaaaaacaaataacaagcacagaaaaaacaacaacaaaatgatcacagttgcacagtgatcataacaaggagcgaaattcattaacccgggattaaaagctgcccggtcagccagttgtccaaaaaatgaaaaatatattccaagtttaaaaactacttggccggtcaccttgtctcaaaagaaggcctattggccgaacaaacatatatgaaaaagaaagataaagagaaggcaatcaaatagcaggagtcccaggctcttggtaagtatcgactaggtctgaaagagccagaggatcatcagtctggacggaaggagcgtcaatgttctggtcggtgggagcattggaaatggtcactttggggttctcattggctgcctgggccgtgcagtaataaagtacatatccttggaagcactgaggtaatcaaagttccctttaggattggccttccagaatcgtaaaaaaacctcgagactagctgtctccaaggtatccacctctgtctcaagctcctccaccatggactttttaccctcaatctccttcttgagtccttcaaattctgccttaagttccttctccctggtcttcatatttttagcatcctcctccaacctgcgaagaagagttcggagaccctccctctcatcctggaggctggtaacttcttgggacaaagaaacattgtctgcctcaagctacgcggtcgagggcatatcttgcagctccttggtaagctcggcaaccttggcctcggcagtaagaagtttattatttgcctctctaagttccttccacatgacctcgagctaggcccgcgc

SEQ ID NO: 89334 - DNA, 710 bp, Cannabis sativa
aactatctcaggttacataggtgatatactgaggacctgtggaatcgaacttgggcgagtatgccaagttaggttagtgcgagctggtgagtttagctgttaccctcttgtgcgtctcacaggtgagacctccgagggagccagtggcgagaccagtaccagtggcgagactggcataggtgcttggagtcttgaacaataactgcaggggccataattccccttcgtgaatatttcaaggactacataaaccacctcgggcttgccccatttcaactaaatcccatctcctgcagaatccttgcaagtttgaaggtcttgtataaaattttgaagtgggagatccctacgcctgtggaaatagagtatctttattctataaaggctgttccaacgaggaagaatggcacaaggggtttctaatatctcggtaatcattctagcgagcctaaaattattgtagacttgccaaacaaaatatctttcaaagataacttcttttggacaactggcctctccccaatcggcacaaccactttctgcaaaattcgtaagtgattgttttcattaggctcagtcagattaatcctcttttcattctaagttttttttactaagcttttgttttctatagccctctcgaaaagacccgtcactactcgcgagatggtcagccggcacaagttcctgctgactattccccacagcct

SEQ ID NO: 89335 - DNA, 528 bp, Cannabis sativa
  modified_base (54)..(79): a, c, t, g, unknown or other
tgtagtttttttattgtttgcgtgttatttctatgaaaaaccgtaaaaatatannnnnnnnnnnnnnnnnnnnnnnnnntaattttttttacaaaaaatagcgccttatataattatcacatacttaaaccaactattgaatttatttttgaaatttttacatagtataccaattttttaaaaaaaaattacaaaaatactttaatatggaaaaacttttatttttacgatttgaacatatttacaaaaatacattttcagtaaaaacaataaactgtttaacattcctttttggttattttatagtttatttatagttgtcctgataagtaattttttgttattttataatttatttatagttgttatgaggttaatttctcgttattttttagttgttttctaaaacttattattttttactgagaaaaacatatatttgtaattttaaaactttaaaattatattttttaaaaattaaatttataaaaatataaatataaaatttagttcataaaactgtaaata

SEQ ID NO: 89336 - DNA, 980 bp, Cannabis sativa
cttgttcttgattgtcagtttgttttattctcgataatcaatgcacattcggagggatccattctttacaaataaaactggagctccccatgtcgatacaatgggtcgggtaaaccctaaattcagcatccccttaagttgtatttttagctccttgagtttagctggagccattttgtatggtgcctttgaaataggttctgccccaggtgccagatcaattacaatatctatctctcgctgaagcggcgatcccagtaattcctcaaaaaatacataaagaaattattttataactctgacctcctcaggtccaaatatttcaggtctgctggagtcaattacaactgctaaaaatcatacacatccactgtgtagtaaatctttagcccttaaatctaaaataatcaagattcgagacccttgaacagatccatcataaacaaatagatcttcgccctccggctgaaaagctatcattttccgcttacaataattactggctgaatacttgaacagaaaatccatcccaagtatgatatcaaaccctattttctaccctaactggcatagacctaacttgccttctggagataaccaattccccactaggcagtatggttccaaaacctttctcaatgaaatcatagggcctacccaatagagtaattattcttgatgccacatatgaatgtgtagccccagggtcaaacagtacagtaaaataagagttgttgacaagaagctaacctgtcactacagaaggactggctgcagcatcagcttgagtgataacaaacacccgaccaggtacaagttttgcctcttatttctactcttctttcttgacctgagggcaatctttcttaaaattcccaaccataccacactggaagcatgtttttcgcttgcattccctgagatgatgattcttacaatgtgggcactcatggtaagaataacccttgcatccacctctg

SEQ ID NO: 89337 - DNA, 833 bp, Cannabis sativa
ttttattagaacagctcctagtttaaggtttaacagttggagttttttgtttgaggagaagaaattaaatgttaaatttgcttatcgtttaagttctaacaaagtagagaatcaaagaaatgtggatgaaggaaaaggaggaggcagtggatttaatatttgctttaggtgttcttttatgctttgcgaagtttattttaattaagttttcatttcagattttggtttgcatctattactgacctattatctttcatttatgttaatgttcttgttttatgctttatcaattttgttctgtaaaaaaaatatattaaacagagcaatttcttacagtgtaaaacaatttatatatacatttctgctgcacctacccatttctttgattatagataaatttttatatatacttatatacatttctgatattcattgttgatgatggttgttgaccaagattaataatatccaactaagctttattagataaatgaaatgggttaattaaggagaaaaacaagtattaatgtgcttacaaaataaatttgattatattttacacaaaaaaaaaaaaaaatcaattttggcggtttaaatcgaccaaactgcggtttatattggtcggttttaaggatgtttttggattggtcggtcggttttcagattgaaccaatccaaaccgaaaaccaaaatttggatttttatttgtaaaaaaatcaaccaaaccgatcgatgctcggccctaatgcatattaaagcatatatgagacctctcactattgatcctaaggaattatttgcttggcctttatcttttctggaatagttgaaac

SEQ ID NO: 89338 - DNA, 778 bp, Cannabis sativa
aaaaaaaaaacagagccaagataggcttaccttggagagatatcctagagagatagatcaaaaaccccaataggtcaaaattttaaggaaaaaaaaagtttaagaaaaagagggctgtatcgaaatctaaaaattatatatatatgtatatataggaaaagggtacagatcatgaatgctaaaataaaattaaaaaaaaaaaaaactcatagattcaagagtatgagaggcatgcatatctactttagagaaaaactttgttatagaaaacataacagaataaaaatgaaatagatgcttgaaacttacgtgtttggagaattaaggagccatcaatggtggaagaaactaagcgatgattctctaatggttctattaccctccatgacttctctttgttacagaattagtgagaaagaaaatcgtaatactgtatgtagatggtataagcgagagtgaaaggaaacaaaccccaaatgtaatttagttcttaaacagagaagaaaaccctaaaatgaagaagagtataagcgagatagtgaaaaaagaaaagttaaaaaacatggcgcccaaaattttgagaccccgctctttttgtttgtttttgttctttgtttttgtttttctttttttttttttttttgaaattcgctcatacattaaacacaaagcaggggaaaagaggcaaatgaaatcctatttgtgaaaattgagttttataaaagttaaacctttttgcttcggtggacaaccctggcaaatgtattaacctcatttt

SEQ ID NO: 89339 - DNA, 708 bp, Cannabis sativa
actttgtgactatatatttttggcagtttttttgttttttttagatacaatattgttgtaaactatgctgtattttatttgctatttgattaagattttttttttcttatttagatgacaatttctctctccccaattcattatatattatagatgcggtcaaagttttccttcttacttttttaagttttcacatgacaatgtctctctccagtatattcactttctatattatatcacatgtgcatatgtattatgttactgtttttgtagatatttctatcaatcaaatattatttatgatattaatggttatataattatatgatatctttatattttattttattttaaaatttaaatttaatatttttgtttagttgtgactagctaaataacaatatatagtatgctatagattgatagttaaaataggtttatattatgtgttttttctctgtattagcatgcatgtccgttcaaattatgacctaattacagaccatttttgtaaaacatatattatattatataaactgatatttctattgtgtgttcaattagtagaatgtcaaaaggttgttcttctcattcaataattatttttcttattgtatctactatatgattataattttttgttaaggatgggacaaaacaggacactaaatttataatgaattacttttaaaaattaatatatatata

SEQ ID NO: 89340 - DNA, 578 bp, Cannabis sativa
atgcaattctttgtctcgatcccaattctgggtcccgagtcttgttccatgttcgggtctaagtttaggtcttggttctggtcccgcatctcggttcaggtttggattcgggtttgggacccaatcccagggtgggtttttgtctgagtgtgggtcctggtccgattatggtttaaggtatggacccatgtcctggtcctgttcctaagtcctaatccgcttctggttttggttctagtttcaagtcacagggtatgggttcaggtcgagttttggttcgagtctgggttcgggtcttaatttttttccagggcgagtttcaggtctaggtttctgtcttggttatggttcgcagttgggcccggtgccgggtttaggtccgagtccaagtcccggtcatattccaagatcccagtcccgctccagttcaagttttgattttggttcccgagtgtgggcctcggtttggggtaaggtcatggctctcgatccaagttctgaggccacagttcttgtcctagtttatgggccccattcccaggtctgggtccccaatctatgttcaagtcctaggtcct

SEQ ID NO: 89341 - DNA, 705 bp, Cannabis sativa
cccaagcaatgtgggattgcacagcttacccgatattttcccttacagatcataagactactgactgtcacattaacgttcatcattgcatgtctcggatgatgagcaacatagtcattataaatcctctcaagaaatacacttccacgcgcgcatagtgccagcgattgcatttaaggcaccgcctatgtgccatgctaataatgcctacggttagtgacccattaactgacgtcaactcatggaatgtgaagcgatctcagacagcaccacatgttgagaatttgtcacgtaaaagctgatgagtactgcaagctcccacaccacgttgcatcctgagagcttgggggtaaatattatctgcaatttttgcaagacatgacacatgacatttattaaagaaggccaaattaatcctccagtacctgaagtcctttaaaattgctctatcgctaaaaggtctccctgaaccaagaatcatccagaataaaggggcacgtggaggaatattcacgcttgccttaacttcctagatgtggagggaagaaagaagcgtctttataagaccctgaagggtctaactgttgggattttatgtcctaaataaaacccatttcaatctaatctgatttgttatcaataaaagattagaagtcatttatgcttacatgtagtttttcgtgtttgtggtttaatatatacaaa

SEQ ID NO: 89342 - DNA, 2762 bp, Cannabis sativa
aaaaatcctaattagccttaatttgaatatatattaatgttaactgtgaatttagccaactaacacagagtctgattaagattgaattttgtttatgattgtcatgtggggaataataataaatgtaaaagatacaagaatttatagaggtttggcccctttgattaggtaatgacctactctccttttgttgtattcactattgagataataccatgcagactataggctaaaaccttataatttctagctatggcactcttcagtattacaataatgagatcaagtatgagaagacttgtgaagtggtgagaagatgggagaatgcaagagctctgaacacttaggatcttagtgtatcatgagtgcttgtgaaagggtcccgtttcatgtaaggttaacaccctttatatagtagtagggcattacaagttgttattcaaaatacataacaaataaaaaatatccctagaaaatagggaagttacattttggtgaagttttcatacttttgagggtggtttgaagtatttcgaagttgtaggagtcctggggatgatttggaatcttctagaatgcccacaagaaaattcaagactgttagggcgtaatatgtgcattggtcggccagccatatctgaaggctgcccggtatatgggctgtcatccttggtcggacagctagaggtccggccagagtattgtcaatacttttgtatctctgtcttcgataataaaattgtttatggtccccgtagctttgatggagattttgatactagaatgaacttattttagaaccttcaatatgtggatcttgttagtctccttgctcttcttgtttgagtccatcttccaaccctaagatattgagggttagggagctgcatgacactacactggccagttagtgctgacttgtcttccacgtgtctttcgcttttgaccacgtggacgtgtaacgtcatgtggacaaaattttggataacattttcccccaagtccctgtttgaacgcctatccggataaggactttacactcggtctggtattgtaatgccctttgtcatgcagctatgcatggtcatactttggtatcttctattgatcagccatcggttactgtgggaaatcgtgttgacggctgcacagtactatcccatttttaaacccttggctttctctctcccacgcacaccttagaatgtgcaaccccagagaacctttaacgatatagtgtctgctacaaaagtcattgaacatgtcgctgtaaaattatttcaaattgtcggatatgatcatctgaaggagtctaaaatgacatatgatgtttttgacaacgaagtcgaagactttttttaaagttacagttgccaatagttcagcttatgtccacttagtaaaataatcaaatgggactacaacatattgtactcctcctttccttttaggaagttatccgatcaagtctatcccccatatgactaagggccaaggagactacatctgagtgagctcatttggtggagttctagagatctttgagaatctttagcacttgtcatatttttttgtataatccattgaatcttcaattataataatggatcaaaaatacctttatttgggtatctttttcttaaaggctttgcccccagtgtgattaccacaaaaaccttcatacacttcaatcaatagttattcatcttatatgtgacagtgagaatctatgtctatacactgtctaagatgagatttcgggcaacttttctctatatttttcttgcttcctgtaatagcaataatacattttggtattattttatattgcttgcttgttttgatgtttagtgctatctaagcccattaaatactacctaaaatacatgtggtaatattttattaggccagataataaattatttttatttttgtttttatttcaagtaattaaacttgaaaataaaaaataaatatattacataaattaaatatatatgtgttaacttatcatggtgttgatgttgcaaggcacgttaacattgtataatttaattaactaattaattgactcccttgttatttatttatttatttatttttgaataagattcatttgttattttgaattatatatttagaacttaattatttttttaattatttaatctataatttaaaattaattgtctattgtatttacacacatagccttagcataacaatgccacatcaacgctcatagtgccaactgaatcttttactatgaagaaaggttataattcactagtaaaaatagtttaaagagaatttttaacaaataaaaagtgtggggcatgatttgagaatagtaggcgaataaatcttatttttgcttttacttttaatctttgaaaatttgaatcattaattataagtaatcgctactacaaaattaacttttagatgcgattatttttatttgctgagtaatataaaaagggtaactaaaaccttttggtctcataaaaaaacttatggagtcgattattatgaaataaccgactataaatgatacgtgtatttttgaagggcctacatacggagtgggttattacataattaccgactccatagagacttaaaatcccttcaacaaatcctaatgaatcacttcgacccctccaacattcatctcctcccaaaatacctaattgaaatcctcaccaattactgccgattcagccctaaattttcatttctccaccatcttctttcatttt

SEQ ID NO: 89343 - DNA, 1039 bp, Cannabis sativa
catatacaaccttagtctcatacgtggatcccttagaaactctatatgacatttaatggtgagtatattatagtcgaattctcaacttaagacttaacatttgtcaaagttgttacacttgaaatcgtacctcactaataccccgccttggacaatcacattatctggcaagtaccctttggtacagttgacaagagtcttatctatggcttggacactgcaaggaacactgcctttttgcttggaacctaccaagaactctaccttgccttaaagattgagcctggtatgtggtacctatgggaactttgtccaattcttgtcaagttgtacggttcttatggggccctcaccttatgcactcgaaatggttttttattcatatttagccataacgcttttatgttcttgcttttggactataggcactatatttttaaacactactattgtttagccttaaagccttttattatggacaaatgaccagcgtggctatcttcttatttccataatatgtaagtatccagatttaccttttttatgccaagctaaagtatgcctccacttgacttagaggtagtttttgtagcttatactaagttttaaaatttctccacacaatttttccatgctagttcaatgcattgtacagtatgggtacgccccaagtgagcatgcagacttacggtctgttggtcacttgtaattcaccaggtttcatagaccttgcctaggaattttcattgggtgctaccaggtgtacgcatgtggaattgaacaataataactttaagaatcttgttagcaagtggtttagacacaattggtcttatgtgtaacaaaatcttacaacttaatgtctacttctaaaatcacgttttggctacccctgcgtggattaccgtgtaaaggccatcactaaagagtgatgggaggccatatatgctaaaaaagtgatgggtactacatcttttatttttggctacctctacagggtttattgtgcaaaggtcatcactgaagagtgatgggaggc

SEQ ID NO: 89344 - DNA, 681 bp, Cannabis sativa
aaaaattattattcgtcttaaatttattttcagaattaatgaaaatgacattaggatcattgtaataatttttaatagtgatttaaaattttttttatactattatttagcttcagatcttcggagtaaatattaaaatttgaaaataatttttaataaaaaaaataaataatatgaacaaatttattatcaattgcaacactttaggtgaattaattatgtttaggtttaactaattacatagatgctgatcctgacagcatctaataatttgttatttttttttattttatgtagaataaatatataccacacaatagttggatatatatgagatatatttgaactgtagaacaaattttttattttacgaaagatattttaattaagtaacaaaaaaataagattttttgagatgagatgagagtacaggtaaaaaaagaaagcaaaacataagtaagagtattttctatatctatgtataataaaggtaagaatattaaaataaatttctttcatataaatttgtccatgaaaattattgataaaaccagccaattaattggagtatgaatttatgaaaatgatgaaatctgatagtgacatgactgagatcgatatatgaaacacaaacaagttttggtatctttatatattaaaagtgtctatctaacggcattt

SEQ ID NO: 89345 - DNA, 584 bp, Cannabis sativa
aataaatcttttaaaattatatatatgaactatattttaataaaaaataaaattaagaatataattatttagatagttcaggaaaaataattaagtaaatattaaaaataaaaattaaatgatgtaacgttgttaattttaactggaaactttaacagaaaaacaatataagaaaaaattattttttccctccaaaatacatatttttctgtatcaataaaatattatatttctaatcgggcattaatatttcacatgaaagctcacactttgtacctaacactccaatgaattatatattgtagtcaaaaataaattaaaaaatgttttactttacttatgatataatgtatggaacccctttttaagtcctattctctaatctccacttaattttgtgataatgattttgtgtttttgtcttctttgcatagcaccatgccattcaactcacgtgtaaaccctattttgttgggtaagcctacaacttgttaatgaagagaaccacacaatgatattataaaattatatgtctgtttcaaaaaaataaattaattaaattatatgtcgtgcaatagttgata

SEQ ID NO: 89346 - DNA, 589 bp, Cannabis sativa
taataataataaatgtttattatttttcacataaatgtaattttattaaaaattaatttataagaaaattatgcagataaatttataaaatatgtatgtttaataaacaatgtcaatatatgtattattttatttttttataattatatcaatatatgtttattattaaaaaatatacatccttaaaaaattaaaatataaacactttaatcttataataactttactataacatgtttattaaaattaaacacttttaaataaaaatatataaattaaactacaaaatatatgcatattataaacaatatcaatgtatgctgattatttaaaaatattatttatttcaattatgttactaaaatataaacactaaaataaaaatacataaacaattatgtttatattgtgatttattatataaataatttcaatatatatgcttattatttaaagtcattgattactatcaatttattaacaagataaatatttaaatttaattaaaaaaatattcatatcatatacttagtataagaacaaaaataaatttattttgatatgcatgataattttaggatgtataatg

SEQ ID NO: 89347 - DNA, 678 bp, Cannabis sativa
acacatgtaggcataaatcgattaaattcaattataaccgacggattcaattataactgatagtcaaatatgagatatttaattgtaatcggattagatattatttttaaatatctaattaaatagaataatatattggatgtggtgtccaaaaatttagagaaatgttagaggacaccagtagtgcctagcaccttgctatgtgtaatatcgctattggtctaattaagtatcaggtcccatatagtttaatataatgacttttagggagtatcgctagccaatcgcaacgcgacatgtcgagaaggtgctaggcaccgctggtgcccaatagcaatgctcaaaaatttaatacatataaattaatattttcatttagttttaacgagtaactagattttatattgttatacattcaataggcaaatatataaatacaaaaaaaacactaaagggtacttataatgcttcgcacttatgtgatgtttaatattattattgatacaatttaatatcaggtcctaaatattttattttaataaagattataaagaattactaactaattttaaaaggccactttataataatgccaagcatcttaattccccataacaatactcctaaatgtatacatatatctatggtgtcatatttattttaaggctaattagtaat

SEQ ID NO: 89348 - DNA, 835 bp, Cannabis sativa
aaagtacttcaggtgtactagaggatttttttccccgtgtacatcttccaagttggcatcttgaatttgggcaagggcaaggtattgatgtatgcaaagaatagtgatccccttgacttgtctagctcaagttctggaggttttggacaaggtaggcccttgagcatgcctcgtatttgatccaattgtgcttgtatagaaggatctattgttgtaggggcctattgattagccttttttgattgagttgcagcctcagattggttagagcctagccagccacaccctgggagagggtatacttaaggtcggccaaccttgagtctggtgcttgtatatggtcggccagccctaagttgggaagggcctggccgcccacacttctctatcgggctggtggagttcgtgcattgacatggagtagatcacaccgttggagtttggtagatccaactgtcttaagtgattaatttaacttctcaaattattgatttgggtgtttccaagtgctatcaatccttgtcggttgaaaattgttcttcgagtgactcgctccccacgcggagggagtgctcctctctggccgaccatgaggacttctggagatgtctcaccggccatggggacttctttagggggtttctcagccatggggactcctgctagtggttggcctgccacatgatggatagtgagggttattgctgaccttgagatccctgaccggccccccatgctgttggttgccgagatctagttgttcttgctattagacctttgagggaaaggtctgtcctccctctggtaaggaaagatctatcctggtccctgaggg

SEQ ID NO: 89349 - DNA, 800 bp, Cannabis sativa
tacaaagtgtttgatcttacaccaggaagatcgattacaaaggagtcaagctcctgaccctcccaaacactcagtctctcttttctctctaatctggtgtcttactcagaattctactcacttgagaaacaaacagggttgatatatatatatatatgagttctggacagaaaacatttccccccaaaaccaactaacaaaattgtcatttaaaaatgaccaaccaaataatgccacatggcacttatattagacttatgttaaaaacaccacaattatccacctttttgacataagtctttagaaaaatatgcatgatgtttcactgtacctccgaggaggtctatcactgcagagttgagatgttgagcaagtttagacaatgtctaaactttgctaaagtcacacacttggtcatcacatctgcagggttgtcatctgttttgattttcttcacttgcacttcaccacttgcaatgatctccctgatgtagtgaagtttgatgtcaatatgtttacttctttcatggaacattggattcttcatcaaatgaagagcactctgattatcacaatagatagtctttagaaaaatatgcatgatgtttccctgtacctcctgggcaaatcccttcaaccatactgcttcctttattgcttctgtggctgccatgtactcggcttcaattgtagataatgcaactaccttttgtaagttagatttccaacacacacatccacctaaggcttgttaggctatttttagcctaagttttgggtcacattttatagttattttt

SEQ ID NO: 89350 - DNA, 543 bp, Cannabis sativa
taaaaatgtaattttttttttatataaaaaatggcatcttatgtaattattcctaaaataattgggcaagatttttattgggcctataatttataattttggaagaatttacaaaaatatagtgaaaaaaagttagtttttatttttaagggcatacaatatattcttacaaaatatggtaataacttttacagaaaagaaaatttaaaaaaaaatgagaaccccaacaaaataccataaataaagttaacagaatctctaagaacaaatgtcgctgaaaaagtcggcagagtagtcatcgccatcataaaaatcaccaaaatttatcatcgtcctcggaaaaatcatcaaaatttctcataaacgttggaaagtcactagaattgtcatcatcgtcggaaagtcattgggttttaaactcaggattcttaatttcagagcaaatgcagggtattcccccatcaggaaaaattaattagtgcaatttcctcttgctagacgaatcttgaatctccctgtcaaaacaattaccaaacagaacat

SEQ ID NO: 89351 - DNA, 775 bp, Cannabis sativa
ttttcttcaaaaataatttaatatatatttattttctagataaataaataaaatcatatatattaaaatgaattatattagaaaaataattatcaataaaaacataactttatcttataaataaatataaaagagaaactaaatgaaatgctacatgtatatttttttaaaaaaaaattaaaaatatgaaaatctactttaactttttctatgtgcagaatatatgcgcattcttcttttgagccttataaattaataatgagaagaatcttatggttcttcaacaaaatttagtcaaatcatttgacaaattattgcatatgattgatcatgtcaaaataactcaattcataaacttcaagttcactataatttgtatttcaatttcatagggtaatgtaaaatccctacaatatataagtaatcattacaagtttcatttttatatacacgaataaaataattatattattctccaaaatatatacactctttaggagtcactattatgtttatcaaactttatatttcttcatcatcaattcaatgatgtgtacattcaaaaggtacagatataatcatcatatatcatttatatttcttcatgtttttttaacaagtggtctaatttattaatagactattcaacagtctaattatcaagacttgtcactttcatgactagataaaaattatacatgtaggtacatacaaagatattttactactccaagaagaaattgtgtgtaagacttcttcaggaaacttttcaaat

SEQ ID NO: 89352 - DNA, 553 bp, Cannabis sativa
tcacccgtacatcaaacgtcaaacgtcaatcgttgtcagtttttaaaaaattaattaattaaaattaacaaaaaacaaaccggttaccattttcccccccctaaatatccctactttaacccaagtcattagatcatgccccaattcaatccaacagctacagtacaatcagggattgtattccctattttggcataacgggaccaaatccgatccctataaaaataatagtttttataattattacaaaattacttttaattttgtgtacaaataaattaaattttgacaatatttacacaaaaatgggtggtaatgcgaaaaaaaaagaagaaataaaaattatcaaattttatttgtcatttattattaataaatattattaaaatgatgaaaaatttgatataatattacctcaaattttaaaagtattaaccagttaaattttaaataaaaaaaaatagaatttttaccatgaactttgtgttagacatttatatgtataaactgaaatatatgtatgtatatataaaatgcggaataaacaaatata

SEQ ID NO: 89353 - DNA, 808 bp, Cannabis sativa
gaagaagaagaagatttgtccaagtcccccagcatgtagacttggttatttatttatctcctcttttcttttttttttagaaaatggccctttggacgagacaatagtttgcccttggtggcactttttgtaaagacagatttggaaggttggatggccaactttgttgttttaatgcctttaagtttaaactttaatgtgcgaatgtttgcttgcgtttcattcacaatttaaacaattacatgcataaagtttattaggggtttccattactcctattttcctttgatgctaagtaattaatttcctactttacacgcgagcagcttatctgcccgtccctcaatctgcgagccatcattgatttcaccccgcgatcatcagaaataatcttactttaagcaaattcaaatatatttttaatgaacttgtcattttgtatatatttttattgcttacatgagtagttggctcttctacccacgtgttaggtataagtattttttcaagacactttaaggtctcgtttaatacttttctttagcacgagccattagtattcagcattatgcgctaatcataactttttattttcctttctcatcatataggttttaaaccaaaaattacagttgtttgatccctttcccgtcagaacggtttgatcaagggattataacaattcgacccctcttccgtcaaaaatgtttagtcaagtagttataacagttcgacccctctttcgtcaaaaaggtttggtcaaggagtttttaaaaagttttcaatttttttttttattttttgaaat

SEQ ID NO: 89354 - DNA, 893 bp, Cannabis sativa
  modified_base (841)..(842): a, c, t, g, unknown or other
acctcttgaaacaatgtttaagataaacaagtttgaagtaaagagccttcatccttgtacatctcaaaggtttgttccaacttttcataacacattcttgaattcaggataataagccccaaaattgaagtatctaaacggtttaactacaattttttcattcaccttaaccgaaaccacacaagcatagtggtctgatatagtttcctagctatagtgagctttagtatttggaaagctatcattccaatcctcattaacaaatatatggtcgatgttggaataaatccttttatgcccctgttgattatttgtccaagtgaaattggagccagtcttgagcaaaggttcaagatggctctgagcattaaaatatcactaagagttactgcattgcctccttctctatcctccaaatcaaaaagagcattaaaatttcctacaataagccatgattttattgggaattttaactttaggagattactccaaagttgtctcctctcctcattagtgttgtacccatatacaaatgtgatgcaacaagcattactttggccaacaattttgatgtaacagtgagtatattgagcattctcctctataacaatgacccgaacaaagttctttctccacacaataagaatgtgacctttactgtagaactagtataataatcccaattaacaaatttcttttccatgaatttcctgactttattctcttcctcaatttagtttccaaccaagcaccaacccctatcttatttttagaacaaaactcataaacaatttcctgctttattattaatacctctcacatgttgggttttatgccctanntaaaactcaatttcaatgtaatctattttatttaacatcaataaagaaaca

SEQ ID NO: 89355 - DNA, 589 bp, Cannabis sativa
gacttaactgattttgtgtataagcataataaacatattaaacaataagcatgtaaaattcatgcaatgttgagaatactctcctcaagacaagatctcaaacttcaaatgtatgactcttaactttagcattaaagtgcctgaaaatcttgacttggtcattttaagctaaaattatggctgttctgggagttcttcaatcaaatctaatgattcttgaagtagagagtgattctgggttgggtcgtaagtgtctcgtctgtgagaagggattgtcgtctctaccgggatgatcgcttcaaactaaaaatccattgaatacagtatgtgccccactgaagttctcttttttgtttgataggaccaaatgactcgcgcaagttccacttgtccattagcatgtggtttagccacagctgagaagctcttcatgattttatgttaaacacagaattcgatgaagtgttcatgatcaaactgcttcccgttattagatacaattttttggggaagtttgaagtgggatacaatgttcctaatgaaaaaacccatggccttcttagaggtgactgtattcatgggctctgcg

SEQ ID NO: 89356 - DNA, 566 bp, Cannabis sativa
caatctcaaattttggtagaaaaagccgcaaacctctacttcttttagcaaattaaaaatgtcatctataaccgtagttatgtgacagtataaattatcccacaagtaaataaatatacaagtatcgcgttcgtatttgcctatataattatttgaatttgaaaagtggttaaaaatatttcaaagttgttaagatattctctcaagtaattgagagatttcctcataaatatcagtaaccgaattcatttatagatatttatttatttaaataattaagtataattttgtttatcgaaatttttgaaaactaaatattttagaactaaagaaatagtgaaatgcagaaatgaagagactgagattttttatgtggttcgggtgttaattaacattagtccacgagttagtctattagcctcttaaggagtttttgatatgtttacaatatttttttgtaagaaaccctaactttatactctaagtttcttgttgtgctaaaattagatatacgcaagtgcacgtagtcataaacaagtaatacaatgataagtaacgagtatcgt

SEQ ID NO: 89357 - DNA, 1314 bp, Cannabis sativa
atggcagtaatgttgttgttgaaccaaccaagtcttcgctgacattattagtgttggatatgtactctaaacatatcaacctctcaaggtacaaacccttgagacacttgaattgattcaatggaacgacatgctcacattttgcacaatctttcaaagttaacttcacaagcttagtaagtgatgagagccagctggagagtttaacacccccataatttattagccttagattctgaatattttggtgaggctggagaccttctaatgacatctcataaccaacaatagcctcggtttcatccattttagcttcagaatcccactccaatctcaatgaagatattgtttatcctttaatttggctttctcatactccgctgccacatttttctcacaactcaaatttgtaagttccaatttgcctctcaagttgttcaatctcatcaattcctttagctcaccaccatgccttggggtacacttttcgctcttcatcaacacataatttgataatatttggagattagttagcttgcccagtccacttggcatatactccaatttatcagagattttaagatgcctaaggttgatgagtttcccaatatctctaggaagctctttgagttttgagcaatgattgagtttcagtgtttgcaaattcaacaaatcattcattgaatctggaagtaataatagattttgattccaagaaagatccaagtatctcaattgtgtcaactgacctattccacctggcaaagaattcaatttacaccaagaaagttcaagatgcctaaggttaatgagtttcacaaaacctctaggtagttctctgagatttgagcaataattaaccttcaacgtttgcaaattcaccaaattcgtaattgaattggtaagtgaattgagataagaattcgatgaaaggtctaaatatctcaagtgtttcaacttgccaatagaatttgatactatcttcccacttgaacggttcaaatccaaacaacgtataaacttacagtttaatgttatggcatcgcaaaataactccttcttagggtttgaaatactaagaaatgttcgaatattttttgcatgagccaatgaagctgaaagttcacttcctaagtaagcatcgcctacaaaagacacatgaagagtagtttccttgatatttctttggccatttgaaattgcaaaagtagtacattcttctccagctacttgaacagcaagatcatgcatcaaatcatgcattttgcatttctttataattccacatttatctacttcaacatcttgaaagaa

SEQ ID NO: 89358 - DNA, 578 bp, Cannabis sativa
agatttttggcaagtatcaagcctgatggttgaacatgataccatacttaagcaaagataaagatctattaacccaatttaagcactactccatctaacaagtaccgcgtgaataaaatgcaaatgtagactcactagctaagctggctagtgcaacaaatcctgacactctcagtgtagttcccatcaaatacctagccaaacaaagcatcaacaaagacttagatcctatcctcatgatcgacaacagtccatcttagatgaccccaatttcataatacttataacaaggtattcttctaactgactggaacgaagcaaagagattgatgagaaaagtagctcgcttcatcatcatcgatgaagtaatgtacagaagaggctattcaatgctacttttgatgtgtgtcatgaaataagaagccaaactcctcataatcgaggtacatgagggcttttgtggcaaccatgctaggggaaaacctctcaaaggagatattaagacaagggcacttttgaccaacaatgacaacaaactcgatggactatgttagaaagtgcgacaagtgccagagatt

SEQ ID NO: 89359 - DNA, 1010 bp, Cannabis sativa
tttgggtctaagtctagttcccagtacgtgttaaggtttgagtttaggcccaggtccggtctgagtccaagtccctgttccggtcagggtgggggtcccgatctatgtcccagtaaaggcctaggtgccagaaaacgttttggtctgggtttgggtctgggttcaggtcctaagtttgtttctaggttcatgactagatctgggtctgggtctgggtcttgggttttgatctcggtatgggtatttagggttttagggttttgggtttagtgtttagggatttagggtttagggtttagcacttagggtttagggataagtgtaaagattttaggatttagggtttaaggtttagggtttaagggtacgatttaaggttcgggtgtgggtctgggtctgggtctgagtcttggtctgggtctaggtctgtgtttgggttcaggtccgagtcttggtcccaactccgaagaccaaccacatgtcgagtctagtttgagttctggttctggtccgggtctgggtccgggttaaggatcaattcccagatttagacaccgactatgggtcgggtcctagcctcgagccttaggtcctgtctagagtccaaatctagatcctagtctagttgtagctcatgtcttgggtcctggttcgggtctcaggtccaggtttgggtctaggttagggtcttggatcctgagtcatgggtttggatccccaattcaggtcagggtgctaggtctcggtctgggtttgagtcccacccaagtgcaggtcccagtccttgttcggtactggtccttctatcgagtcatggcctggtctgggtttgggtcacggtttacttcttaggtcccaagtccaagtatctggtcctcgtcccgttcccagttcccaatcgcggtcccagtcctaatcttggttcgggtctgagtcccagctttaagtcctaattctattatgagtccgggtttgggtctgttggaatttattttatcaggatcttagat

SEQ ID NO: 89360 - DNA, 517 bp, Cannabis sativa
cggtctcgggacattaggggttatattttttagtcgctgtgcgacctggataatatgtattttttaatattatgtttaaaaagtttgaaaatcccagaacttgtaaatactttactatagtataaagttttattaattaatacaaaagctttaatttgacacatatttcaagaaaattctttcattagcaaagacaacactgtagttgaaaaggcactgtagcgtaccttagcaatggggcgttacacatttatttatcgttacaagacattatacctatattatttaaataatcgaaaagggccgacccataggctttgcaatacaagcagatgcccagggccaaaaaggtaagagggcccaatttatttgtttgtttcttttttcatgatgcataggctcaatatgttattggggacttttcataaatgtgtaaattgagggtatagtttacttttttatggcataaataaataacactatagggttatggattttttttacatttatatgggtt

SEQ ID NO: 89361 - DNA, 732 bp, Cannabis sativa
cccacccacccgacaaatccaccctggccaaaacccgtaaaatccaagaagaaactggtttcaaattcagaggattgggttggggtttaatatttttgaaaacccaaaactcggttgtagttttatatttttttatttttttaaccttacaatacaacctaactaaccttatcatgtcagatccttcccccaaataaaaaaaaatgtaaaaaaagggaaaaaaattattttgtttgtacattttctcataaaaaaaatttgatttttaatgttcaacaaaatttacaaaccgcccaacccgaataaactgaccaaaccaaaccgaataaattgacaaaaaatacaacccgaaataatacaatgaaaattcaaaccgcccaatgaatacattggggggtttacaaattattttaaactgcccaattaacccgaataaaccgaactaaaccgattaatatattttttaataaaagtgtacataatatattacataaattatatttattagttaaactattttgtacttaaagtttggaaattattaagtctactgtgtatttgttatctactgttacattagttaggcctactgtcagttggttagactttgtttattttacaattgttactgttattacagttgttatttttatggtcttagtcggttaagtaagtcttgtatatatagcacttcgggtcctctgtatttcttaatctgtatcaattcaactt

SEQ ID NO: 89362 - DNA, 611 bp, Cannabis sativa
ttggttagccagattagaaaatgtaaaaaacttgtagtgcttagctagccatgatgaatggatcattcttgcttcctttcttacttaaatcaaccaaagtaaaaccaagcttgtcagtttgtactccaatattgttgtcaacccaagaacatttaaaaagtagaattcaaaatgcaaaataattgagctcccatatctcttcaataaccccataatatatcatggtacctaaaataagatttttatattttgcacttgccatatgcatggttttgtgatgatacttatgccactattttgaacctctcgagtatcatctcttgactttgtatgaaaatgtttaccccttacaatatgcgatttatgctttgccacagcgaaatttggtctaagagcaatataactcaactcttcaaatactctatgattcggttcgttcaactttgcaagaataatattccttaaccacccaatgaaagtttaacaatgctcgtctgcaacccaattttgtttatttttatgatgccttggaaccattgattgtaataactccatatggtcactgcaaaacatgtaatattaatcacgttattgtttgtagtaattaatta

SEQ ID NO: 89363 - DNA, 682 bp, Cannabis sativa
tttatttatttttataaaaatatttttttaacaaagcaatttaaaatactacatataataaatttaaaatttcataataaataattctaaataataattaataaaattgtgttttttgttgttgataaataaattattaatgataatataaaataaaataatatatttatgattgagatttttttatttttacacttcaaaatagttttattttgcatttttacagaattttacatagaaactcctattgtaacttgcgctgcaatttaaatcgcaacaaaaaaatcgtatagcaacccacataaaaattaccggagaaaccactttaaaaactcaaaccgtaaatttaaaaaaaaaataagttaaaaaataatatatgaggtaattcttctttacaatgaattatatttttaaataactattatttataatacttaaaaaaaattaaattagttgtccgaagcgcctatattgcctaattgttattaatatattaaatgaagcaaattgcgtatgatattagaagcaaagaaccagctggagttgtcgtttatccaaatgacactgctgtctcaatcctcacaccactctacagtactacactacacgtcactttattctttttctcttacggatcatttcgacccgacccgataataccgtaccaattaagtaccaaccc

SEQ ID NO: 89364 - DNA, 818 bp, Cannabis sativa
aacctcctggtacaatgcgacataattagcctcctactccttgagtctggcatgcacacgctccaactcagtgttcaacgaggaataatccagtttgagcttgtcatatgatgatttggtagtctctccttccagtttcaagttctccacttccttgctaagtctagactgctccttgttcaaagcctgttcttatgattaagagaaattgttgtagaggactgcttgaatagcctacaaaagaaaagtcgaattatcatgagtaacacgcaaaaataactacatatgtgtaaatacaaattctttccaaacttacttggtaaatcgtagaaacaccataattcactcgccccgcaactctgatgcccctcaaacgctcttcatctctcgaatggagaagagccttaacatgacctttgatagaagcagggtcagagtaagctgaaatattagaagagatggacaggttgatcatactctcctcaatagacaacacgttgtcacccctcagtggagaagccgcaaccacaccatcagttagcaacagagagccaccagcttcatgttccttagcaggaactcgagattttgcaacatgacttgtggtcttcttagacctctttccaagtaaattagtcttacccctagcaacagcatcatctgctccacaaacctcgaaagtcatcctcttatagtaacggtctacaagaaaacgttattcttccgttaaatgacgaatcaaagagaatagaccactaaccttctctaaagctcgggtcaacaaaaggatggggcgcgcttgacaacgttgagtgaaa

SEQ ID NO: 89365 - DNA, 761 bp, Cannabis sativa
atatatatatgtataaatataacgatagcaaaataaaggcatgcatggattgcgaaagcaaatttgatggttaggggtttcctagtaagagaaagagagagagagagcacatattctttgtcatccacctcactaaaaaacacttaagattataaattaagttaatattttatgtaaattttactcttattgggattgcataccggcttcgaaagcgtcctatatttgtcttaaaccagctaagactagaatcttaaggtccttttttagtcaatacgtacataatattagtgtgcatgtttaatcgatctccatattagctaagcatgaaagcaacctttcatcataatatatttttatttgtaaaaccctaacgacaaaaagaattggtacgtatctatatttgaagattttattttttaggaaaaaaaaaataaataagaaagaaatcgaacatttggaattagtttgtaatagcattatttcaaaaaaaaaaagaattagcgtgtaaaatatttttacgaaataataaaaagtaactggattatttgtcaatctgaaaatatgacacgatctcactaattttatgtaatttttatttgagaacacaaatatataatatatgctgcgcatcataaattattaattaaaattcactgaagaaccaatagattataataccgaaaattttaaaaaaattaaattatccaacgtacataaattaataactatacaagtaaactacaaatttttatggggca

SEQ ID NO: 89366 - DNA, 535 bp, Cannabis sativa
gccctaggggaaaaatggtcattttgacccttattttatatttaataaaagaggtaattttggcaaaaagggattcaatttctggtttcttctccctgggacttgaactctgtctctctctctctcaaaccctcctttggtttcaaaattttatttgaagaattggtgtgatttggagcttaatttttggagcttggttgtgggaacttattcttgcaaagtattgaggtagtctctaaaatttttaattgggtttcttgctgattttctttgattgaaaagcatgattaagtgttgatccttaagcttgcatgttttgagaattggggttgatgttggtagttttatgtgtgattttgctaattgatgttataaataatattgttatgaattagaggagttctcaaagtattttcctagttgaaaatacatgtttattggtgttcttgttgctgaatatttggggttttgatgttcatggttatggacttgatttctaggttgaattttgctcatgtgaggagcttgatgttgg

SEQ ID NO: 89367 - DNA, 840 bp, Cannabis sativa
aaggacactgatgggaggtggtggtggtccgacgtatgcgacgaagatgagagggagacaaacgggaggaggggtgggtggagatcgatggacgagagagacgagaagaaaaggggattgagagatggtggacaacagtgagagaggagggtgatggtgcggattcgtgggtggggttttggagggttaagattttcgttttagggtgtgggaaatggagaagaaataggtgagaagaaataggtgtgtatgtgagaattagaaaagaagtaggtaggcacgtgggaaatgtggcgagaagtaggtaacgattttttattggacccttataggtgacggtttaaaccgtcgcctataagggcctaataacatttacgaattccaattaaaatcatcgcctattcctgtaattactgctgtaaaccgtcgggaatactaattttttccgacgattttaaatagttacttaattttttttagctaattctgacttttgtagtagtgacacggggtggtccccaggtatagggtgttggagagtggttgcggcgtacccttggtcgggtcttcaggccttgcaggtccgttttcaccgttacttgtacctccttgccctttgtcttcagaaggcgtggtggtatgctcttcccttgcatgccttgtccttggagctctcatccaacgtcatccttgtctacatgccttcgcttctttccttaaacgcacatccctccaaaatacacccacgaaacctcacctttgacttccttctcccaaacacccaaattcccctacttgcacacctggctcccccacatgcacatacggctcgcatgcgag

SEQ ID NO: 89368 - DNA, 502 bp, Cannabis sativa
ttttaataatgaaaatactcaaaaacgttatatttttaacctcctatatgtttcaaatgttatatttgagaaggtatgttaaatactataacgttagaacttagaagtagttataaattgagatttggtaaaatttttattgggcgtgagaatactactaaaaattaaaatttatttagagtaatttgcaacataaatatttaaatttagttttcggttatagataaatatttaagtttaatttttgacgataataatatctaaattatatttttagaatttttgtatgtacttagtcgttaggtgtcaagtaatcattcacgtgacagtttctgattaatctaggtcattaaatttttaattaaaattaatttaaatgtactaataagaaaataacacgtgaataataatttgacacgtaacaactaggtacttacggaaattctaaaaatataatttaagtatttatgggaagccaaaaaaattaaatttaaatatacac

SEQ ID NO: 89369 - DNA, 863 bp, Cannabis sativa
tgtcatagttaaattttgagaaaattactaaaagttatcttagagtatctaacattccacattttatcaagtgaatattagttttccatcttatttattaaattaaatatattaaatgaatattaaagtgtacaaataacaatatgttatttcttgtggtgactaatactattgttatttctggtgactaatacgttaaggtgttttttaatatttttcataaatttaatttgaatcaggtagaattcgttatatgtaatttcacctgtaatatattacgtcactaaactattatattgagaatatctccaatgctctatatttagatgtacttttccaattaaaatttatgctaaaaacctcaaatataactaaggaaactgaatataattaatagctaaatgaaactgagcttttcctcattgctataataatttttgaccttttcttttatttcttgtaatcatacacattaacatataataaactaaattaaatatatattttaaaaaaataatatttaaattatgtaaaaaaaaaaaaaacagaaaaatctgtgtaatataaaatgtataaagtacattaaaaaaaattaaatgttagtgaaatattacaaaatgtaaagtagttgatagaaactcttccagtataatttatatataataatagttaaaacctaatatttatcataacaggatttagttcctgacttcatgtagaagaaacaagaatactaatttaatttttgagtttaagtagactaccaaatgtatttaaagttatagcttcctaaaataaaataaattatatctttaaacattcaaattattaaaattaattgaacactcgaagtattttttttt

SEQ ID NO: 89370 - DNA, 663 bp, Cannabis sativa
cccatgttaattaaaatagctcgtaaatacttccaatcaactcagtcataagctttactcatatcaagtttcaaagcaatatagcctttcttaccaacatgcttcctttttaagtaatgcataacctctaagaaaatcataatattaatagagatcaagcgcctgaaaaaggcgctttgattttcagaaataacaagagaaagaacttccttcaaacagctagccaagactttaaaacatactttataaaggacattactttgagcaatagacctcaaaacacccatagtagcaggtcttcttctttggaataagaacaatgttagtgtgattcaaaccagaaggaagagttccaaaaaggaaaaaagaacgaactttccttactacatcggctcccacaatatgccaacacttttgttaaaaacccggagtcatcccatcaggacctggagacttatcaggatgcatttgaaataaagtgaattttacctcttcaaccgtaacaggccgaagcaaagcttcattttgggtaccagtaattgaacttgggattccatcaatgtattagaaggagcaaataaatccttaaaatagctcaacataacatctgacaaccccatattctagtcagcccaactcctattgggacgttaaggcttctaa

SEQ ID NO: 89371 - DNA, 599 bp, Cannabis sativa
aagtagagtatcattccctcgaagattgtagtcaagtactaataaattaaatttctaattttatttggtaataaaaattaaaggaagaatattataatctagtgaaaataaaaacaactaacttagaatgaaaattaacaatgattagagttttaaggttattaatttcaattgaatctatcttatatggcttaatataacttaattcttaaatactaatttctatgcaatagcgggcttacctcaataacttatattcaggctaggatatataaatgtcaacttatatgcaaatattctactctcgtgataaatttaaacatataagagacattaagtaaagaaaccctaaatgctatccaagccacataggtactctcattctatgtcaaaatttgtccctatttcactatagcctaatcaatactcacttttcagattttgtatcgaaatcataataagatgtcaaacaatcttcattaatatcctaaacaaaagtctagctactcttatttattgtaaacgattgacacaaattaaataagaacataagaagagaaggaatcttcgaaaaaacgttgttggaaagtcttctaggt

SEQ ID NO: 89372 - DNA, 912 bp, Cannabis sativa
attcaaaacggagtctgtactgataaaactggagaaaaattacagttttataaacattggatacttatgccgctatttaccctattaactaatacaaataagaactatttctctttctgacacaaacacacactcaatcccactcattatctataaaatattacctaatacagttgacaacatatgactcaatctctcttctccaaccattgtttgtgaagtttgttcatctattgacatggaaaaagttcaagaatttcaacttcagctcagcattagaggtaactcttccttgtttgctataaatatatatatatatatatatatgtgtgtgtaatacaacttaactaagtgatctcttcatagatgtaaaacattcatattaaagaagtacttactgatatatatgatggtgtgtatctgtcatgttaaccagatgaggaagctaatgaaggagattctcatggctatgcaaatgaatccaaccaaccaaatactcctcaaaccagaaaacttggactttggattcgaatcgggttttattcattccttgttctctctggccagactgcagcaaccttattagggagattatattatgagaaaggtggaaagagtaaatggatgggatcatttgttcaactagctggctttccaatccttcttccttactatctcttccgaaaaatgaagtgtaaaaccaaaaacaatcacaacatgaatactaattacactcttcctcttcaatcaaaaaagccatctatgttagttgttgcctcagtttacttgattcttggcctaattgcagcagcgatttgttatctatactcggttggtctgatgtaccttccagtgtcaacttactcaatcatattagcatcccaattagccttcaatgctttcttctcattc

SEQ ID NO: 89373 - DNA, 764 bp, Cannabis sativa
  modified_base (719)..(739): a, c, t, g, unknown or other
atgctgatgtggcacatcggtatttgtgctaataattttcttaaaggtacttttataaataaaatcaattttaggtataatattgaaaatctctcaaaaaaaaaattaggtaattatctaaactaccaacaacaacttaattgaagaccatgcaaaactctaattttcaaaatcttcaaattaatccaccacaattgaacacctaaactaaattaacaattaaacatgatttaaatcaaaataattaaaccaaataaactaatttcatacaataacactaatcctactagaggaaagacaaaagaatacttattgagtattttagccattaatgataagactatttacaaaaataataaatagatcaataaattaaccttatttaaataccactaagtaactagttacttaattacttgaactttcaaaagcaacataaaatatttagttactattttacatgtaatactatctaaattaacaaaagaaaatatataataaccacttagtattacaacttgtttaaaaaattaagactttgagtggtttatcttcattcattattgttcttttcataactttgtgcaagttcattaactaaataatgatactggttattgataaaattttatggaaaaaatataacataatatctactatacttgatattaactataattagaataggaataattacataaggcaccattttttgtaannnnnnnnnnnnnnnnnnnnnaaagaatgtttttttacatttttac

SEQ ID NO: 89374 - DNA, 936 bp, Cannabis sativa
taattataaatatttttaaaaaatattaaaaaatatatattttttaaaatatttttatttggacacctaagatgaatagattctaggcgtaatcttaacctgccttagcttagagctgaccttagtaaaactagggcttgtgccatagcacaccatctgggtgggtgacattttcctatttttattttaaattaaacttatgtgatctgtagttgaattatacaacatttttttttaaaataataataataatagtaataataataattaattaataatacctaagttatatttttagaaattttgtaagtacttgaccgttaagtgtcaaagtcaatgatcaagtggcaatctctgattagtttaggtcattaaatttttattttttattaaaaaattaatttaaatatataataagaaaatgaattaatgacttacatttaatggccagtcttatgatagttttaaaataataattttaagtactattaccgtaaaaaattaaatttaagtattatctatttacaaccgaaaattaaatgtaaatatttacgttgtaaattattttataatttaatataataacttttaaagaatatcactaactaattgtaaagcgttacttctaaaagtattagatactattaatactgctctatttttatcttaaaaaataagaagaagaggaataaagaaatctgattaactgccaaaaaaaacttgtaataagtgctcaaaacttgagagccttttaaggagcacaattcaattgatgtaatgtatttttttttttttgaaaaatgtggtcaatattttcgaaaagacttcaacaatcgacaggcgctaagacttcttcaaaccagtataatttattgtctagcttaaaagtatatttagctaaattataaaccgcaatgttatttttgcgggacaatt

SEQ ID NO: 89375 - DNA, 1124 bp, Cannabis sativa
caagtcgatattatattatttgttatatgtttttcttactgagtttgtagactcacagttgctacttccatgtgtaggtaaaggaaaggaaaaagttgaataggagtgaactccgagctaggatggtgtttatacacgtcgaggcgacgcaacctggagtgttcggtctcgtgacatctggggttgtattttgtagtcgctgtgcgaccagattttaatatattttgagaatgtaaattttaaatacgggatcccgatttttgtaaataattatttaaaaggttataaagtttagtaatttaatcaaatgttttgattaggcacaatttttaaggaaaaccctttaattagcaaaggtggcacatcaattagaaaatcactgtaccgcgtccaagttttacggcgttacactaaccttccaataaggataattataatcattgaaaagcagtggacgagaaatgaaactcccttctgcaaaaaatgacatattgtacagaaaatacaagaaaacgttaaaggatcacactaagactttagtgtccccctttgataccaaatgattttgcttttcaaattctaatataactattaaattccagtaattaaaaacacaactattacgatctgcagtaacaaaatggaaaattcatgctacataacacaggtttgcagtagcagaacagaaataaaaaatgcagaatataaaaacttgacataagagaattatacccagtatcaatattctttcaaacactcctagtccaggggatcatgcctagagaatgaaatcaattagtaaagtctcatataactacaaatacaattgacttaaacaattttagatttcctctaaagttttggcaatcctttgtaatttactttgcaaatttgatttatgaacaccacgaaatagtgaaatcccttcttattttgttgtgttgagtgtttttcatcccaaagtaagacttgataagtcttctcctgaagacctttctcttgttcaatggagttctccaacctattctaagaacattatgagaacaataaacaaagaccaaaacctactagaacactcaagcttttcccaaaataaactctctcttcacaaagatgaaaatatg

SEQ ID NO: 89376 - DNA, 569 bp, Cannabis sativa
ttgcttcaccaacagggagggagagagagagaacggaatgctcgtttaatccctccccaatccacgagcattccagctgatgatgctcatggctctaggcgggtactcagcgacgcctcttcaacagtctcgtcctcaagggacttagctagattgcgtgtgcgtttgagcattcttctaaattcagcagcgttcaggcaatcgggacgctgaggcttgaacttccgaacccttgaggaacttggagctgggttggtagaagagcccacagcgaagcgaagtggttgagatgggttcaggtccgctaatatggtagaaaaagcttggcagacgggcaccacatgttgaggggccccagtggtggccactagagccttggcagaagtggaaatgggcctaggaagtggtgttgcaagttgttcagcagtggtgatgggaggaaatgtccgtaggtgagatggagcagtgatagttggtgatacagcaggggaatttgcttgtgaagcaatggttgcagcagcagcaacagtttggtgggccgaccaaaaagtggtagtggggggggggag

SEQ ID NO: 89377 - DNA, 1216 bp, Cannabis sativa
aattatggtaaaaagaatcctgaggaagcataaaaaaagtattataagaatgacatgaaacacacttacacagtgatatttgtacaaataaaaacctactcgattttacctcaagcataaaatgaagtgaagataagaaaatttgtgaaacaaacaaacagcagaaatatggatttccatctagttaaacataatctcataaaccagaaaatccataatttcccaaaacatgccaaaaaatcaactttcagaatcaacacaaaaatattattaccctcaatgctatgagttttaccatgttcagctgaaaaatatataattaaatttcttacaagcaaataatttaataagtatatttcaattctattcaagtaagaaaactagaagcctagaatgtcatagcaatgtagttttccaatcaaacttttcctatgacaaaaggttgcataacaatgttatcagcaacagaagttgttgcttgctccacacctgaatgtctttcgtgcagaccattcatgtgaaatccaacaaaataaatatctgaggaagcttatattaaatccgcaaccgatttagatttctatgcccaaagagacctatccaataacagaaacaagattatgcaaagaagaaaatgaacaaacataaatcattctccacaagacaaatgaaaaacacatcaagtttagcactgtgattcttaattcataagtataattcttttgtaccacaaacaaaccaaagtgtgcccacctaaaacagaataaaaagcacgtataatttcaattaaaaaaccattttttagtgaataacatgtataaatatacatattactcgataattaagtaggaaaaaagaataaagaaatccgttaactaaacaatagcaaaatgcaaaaaaaaaaaaaaaaattaaaggagctaagatcttccaagtcacatataacaagtaaccgaatgtaccaacttgatcaatgtgttttcgttaccttccatagcccaaaaaaacaagtacgactctagcttatcggcaaaatttaatctgttacaaaagttctttctttactttttggctactgctgcatatatgagggtttgtgtgagcttatatttagctagaactgataagtgatataactactaaaaaaatataaaagaaatccttaacagaaaatgggtcaaaatattttcagaacaaaatcatcaagaacaaaatg

SEQ ID NO: 89378 - DNA, 527 bp, Cannabis sativa
cgggcacataaatgtgagaaaggtttgtgacaggtaaactagccgaggacttgggcacaatgtgtgttttcttatgatcatcagggaataatttttgtttacctttaaagtcatggttcggatgcttaggctgattcatagggaggctagtaaccgaaagaggagggtgtgatgataaaaggctgctgttggaaattaatggaggagagtgcatgttgcagagagcatttggggatggatgtgtaaaagcttgtaccgttggtgaggacacagtttgagcatttggggatggatgtgtaaaggttgcagtcgggttgggagagttggaagcagaactggcagggataccaaaggggaaaccagcagtgacaggcgtgtgagaggcaagcagtggcataggggtagacacaagattgttggctaaaactcttgggtttggatcagcagtagcagattcaccttggtagagagtagacggttggggctgcgattttgaaaccaagtgaggaatggatgaaacaagagct

SEQ ID NO: 89379 - DNA, 2219 bp, Cannabis sativa
tgtacgctggtaaaactttgacttttttgccagcgcagtttatgaaatgtgctggtaaaagttacttttatcagcgcagtagcgaactgtgctggtaaaagtgacatttcttgtaggatcggctgtggttgtagagaccttaattactattttcgccattttgattattcttaattaagttaattaagctatgttttaaggcttttgtcactgtccaaatacaacttgttaactttgaaaactatacttgtgttttagctctcatttggatgttcatgaggtggcgtgtcacaatttttttttttaggtatctgttgcttttttggtcaaagtgtcaatttgatacaaatttggaatgaactatctagttgaacatccaaattattattatcaagaggttgataagtgttgcttaaggctgttttttttttatagtctatccatatttattcaagaatcttttcaagctttgaaagacattcatataaagtgtgagattttagtggagaaaggtagtgaatctaaaaagaaaatgcactatatatatgtgttatataaatactacgaaagattgattttgagaatcttaattttaattttctaatcaagcctttttagccaaacatgaaatttacctccttgtcaatctagattattaagttatttagagttaataactgtaagaataaattatcttattaagctcaagcattacattaaaaaaaaaagttacgattgcccaaaagctcaagtttacatcagaaggaaaaacaaaaactctaacaacttaacagaatcagctacaactgcaacttagcccaatttgtactcgcgtccttacaaacaaattctactacttctatttaaaccagatcaagtccaaagattcattaccagagctagaaaattcaaatccagaaagagagatgattgagagtctttgagctacattggtgtttgtttgaagagaagaacaaaagagtgtttgagaaatctttgtaaaagaaataaaagtaacaaaaatagattcaaagcttcaaactttgattatcagtcgacttttatgacttgaaatccaaaagaagaagatgtaaacatacttgatttgatagtaaaacattgagtatctcagtggcgagctcgataaggacgtagcccatatttttggagtaaaccttgagaaaaagcgttgtgtttctcttatgtgtggattgtgtgtgaatttctaaccctaccatgtacaaagtgtctcaaaggttctcgaagttgtttgaaccctagggactgagctttgactgatagtgttagggttgtattgaatcaagggtttgggctttgttatttgggttgggttttattctatcttggactcatggacacatgagtaacagggtttagaataatacaaagttttcatatatgaattagcctaaatattacaaattgtgttttcttgattcagggttgaaagatagctaactttcagcaatggtatcagagcatatcaagttcaaattcaacacaattaagaaatagaaatcaacaactctggaggaagaagatcctcaagagcaagaggtgcaagatcttcaagaacaagtctttaacttgaaggacttgtggatgttcctatgaacgattctactaaaaatcaatctgagattcctaaccctaactctagcatttctatttcaaattcatgtattgattaaaataaaatgagtaacattaaaactaatatagagaagtttgatggtgtaggtgattacaagatttggagaaggaagattagatcactgttggcacatcagaagtttctaagggttattgaagaaccaattgaatgggggtactttgaagatatagtaagaagagtaccttgaaatcacaataaggatcttaatctttaatctatctgatgcaataattagattggtagacaaggaagagaccccaacaaggatctaaaagaagttgaaagagcaattccaaccgaactcttttactaacaagatttttctaaaagaaaggaattttaggtacaagatgagccactccaggactctagatcacaatcattttgagctggctaattctggagagaatgaagcactaagtgatgagaaccaagctataataatctcaaattctctgccagaatcatttagagaagtgaagactgctataaaatatgtgttgacctcatttttagtcaacga

SEQ ID NO: 89380 - DNA, 668 bp, Cannabis sativa
aattaaaaatataacaattattaaaaaatataatttatataattgtaagcatgatattttgtataacaatgtaatttaataatatatctaaatttactattcttaaaaatataatatacaaacttaaaataaatttattctaacaaatttcattaaaagaatattaacaaaattcaattcgttttgataaataaaacaaattatacattacatattaactattctaagacaattacttctcaaaacttaaaatcatcaaatcttcatatacattcaaatcaaagaaaaaaaaattatattgcatttgtgcagttgttccatctttgcattagccctttgaaaacttttcatattcgggaagctcccatctgccaaagaaaataaaacaatttaaaaagttattgataagcaatatatctaattcataatcttatttttcttagcctaaaatgaaatagcagaaaaatccatatgaaagtctaaacttaaaacaagaatcaaaacaacaaataatagatttgaaaaaaaaatctcagtacctctgtgaacaaataaagaaaccctttgaagaactaaagagagcaaatgggtagttataagattaagagataggaaaaataagaaacagattttacttttttttttttgatttaagtgtttatatatta

SEQ ID NO: 89381 - DNA, 679 bp, Cannabis sativa
ctctctctctctctctagatctatatatatattactcatgcatcagtctctcttgagggtgattcaatcatagtgtctcatgagttgagtatacaactgtgatgagaaagttatattcataaattgaatctagtagctcattctattcctggagtgttgagactgacttagaagaccctggtgtgaactctgcaacaagtcttactggattggatgattgtttcataaatacgaaaagatagggaagtaaccctgataggcaacaagtggtaaaaatctctaaattaatagttatgtttatgttatgtataattgtgttgagattcgaggtttattgttcacattggattcaataattttttattgaattctattctaaatactttcactgcgactctgatatgaaccctaaaaacaaacagtaggtggcttagttctaccgaaccttgtaaaaattgagggtttgcaatttcaactctttacatttaaatttttttatttgtttatactagtgattacctttgttactgtattaaactttaatatttgcatgactgttagacatttatatgtacaaactgaaataaatatgtatatataacatgcggaataaacaaatatatacactatataacttaaagatcgaaatacctcaagccattgattcttgagcttcagt

SEQ ID NO: 89382 - DNA, 693 bp, Cannabis sativa
aagaaaattaaataaaataaaaaataatcaatagtttctattttcttttgaatttaatgtcaaacaacatagtttccctcctttcttcccttgtaaaatatgtctctctaattcttttaaataataacaattcttttttaaactaaagaaattattgaaagtttaccagttcttctgttgtattatgttcatttgtcaacatgccattggcatagttattgtagaaaagtctatttaactaactaaagtttattgacattagtttcaagaatgcatataaatattattaaaacttgtaattagattaaattttgtttgtactcttaaattggcttatattaacgctacattagtgttacatcaatatattgttaaaaaaaaaggcatttttttctcaggcaaaattatataagaatgaatgaataacaaataaaagaaattaaaaaataaaatggtgaaaatattatttttgtacttgtaacaataattatgtcattatgtgtcaatattgttattggatcaattaaatatcgaattccatataatttaatataataacttttagggagtattgctagccaataacaaggggacacgtctactagacactactaatgtctaatagcaatactcttataaatgggtcaggtcgtttttttatattggtcaaactcgaattttacatttttacta

SEQ ID NO: 89383 - DNA, 1023 bp, Cannabis sativa
tttgctatgcgtagaagaaagaagcattgtagagaatggtatttttttttagaaagcgcaaacaatggagattaaaatcgtaaggtgggttttgggtgaattgcaatggttaacagaagagttagtctctccgttaaaactaacagaattaaaaaaaaaaaaaaagattccgttaaaccaaaaaatagccacttttaatatgttacattttttttatataattgattgttatatttattataagatataattgaatattaattataattgttgttattgttaggataataacaaagttgaaaaaattaagaataggtgagaaaacttatatagagtgccacctaaatttgttgatacttttctttatattaaaaaaaaaaaacaaaacaaaatataaagcactaaaaaaaagagtaaaaataaattaaaaaaaatacacataacatgcatacatatgatttcgaattaaatatgacaaaaaaaatatttagttttgtaaaagatgtggtgttttacctaaaattatattatttgttagagaaatgtattttaaagaaaaaatacttccaatttataatgcaactattttttatatatatatatatatattgatatttataatatttataatagattagtagtaagatgtggttataagttactcaattattaattattagtaattagtaaataaattagtagtaagatgtggttataagttactcaattattaattattagtaattagtaattagtaataataatggagaatagatgtgttataaatgtagatgtattatatatagatttttaacttaagaaataattaaaaaaaataaaaaaaaatgacaaatttgagaaaattaagaatacgtgagaaaactcatataaagtgccacctgacctcttcaaaagcttcctttatatatatatatatatactagcataaagttacgtataatgtacgtatatatctagttatacactcagtttttcttttaggttgagtttagaattttgaat

SEQ ID NO: 89384 - DNA, 1473 bp, Cannabis sativa
atatccctgtagtctgatccccaagttatagggattttgttgatgactcatgatgcgaaagctaaattcgctaagtgttgattgctctgcgcggattgccgaaagctttgctctgggcatgccagcgagacatcctgctcgaactatgctttcggagcagatgccccaagcggattccacgtgtcaccatttatgcgatgccatgccatagtgcaaaaattgggataacatttgccccccaagtgtgtacgggacttccaaagttgcgtgtggacttcatccgagctgcttctgccttcagatggggacacgtgtcaagcgcgaccgtcagagactcgatgtgaggctgactgggtgtccctttagttttcggctaataaatgctctgacaattaatatttcaatcttcaattttctctttccacggctgacggctgcacttggttatttttatttcccatattcgcttttaaggagggaaactgaggcgtctaaggttcctttgagatgattacctctttccgtgacttgcctataaatatcaactagcattggcacataaactcatttttaccacccttatttgctaagtaagttcagagcgaaaagagaggttcttggcttcgaagttgctgaagtgccttcatcaaagttgcttgttggattgacgttgctcgaacccaaatatctgactcttgagtaagttttcaattccctttaagcttatttttgcatgtttatatttcgaatacaccttcgactttgttgtaaaaaatatccaggaaaccctaggttcagaaacttctgtgattcttctttgtcatggcttcatgcgattttacagcccataatgcttgttttttgaactgcgtaatgtctgtctttcatcttgcttattctaagcttcataaaattttttgccctaacttgagaagattttaaacttcttgagttttgacttctctttgaacattcttgttgttgaatctgttgagtactcttggtcgacatatttgcttgtttatcgttcgatattctgaccaaacactaatattgtgtgttgtcttttgtagatgaactcaggtgagttttgggagaacggacatcggatcggccaggacctgcttcaacatttgcacgaggatcatcctcgtctttgttctagccctccttcctctagtgaaggacattctccaaaccttatacccagccatagaatgatggctcgtacaaagaaaacaacgcgtctggcttacacaaatgatcctcaagtggctcgacacgccactttgcccagcgccgaacaagatctagtcgtccagatggagtgggatcatgaaggggacgctgaggtccagcagattgaggagcaggacgatgtatgtccttgcagttccttcgaggcgaaggaagaggcagaggttaaacccccgaactacggcgagtacaacgaggctggggagccagtcgatg

SEQ ID NO: 89385 - DNA, 505 bp, Cannabis sativa
atatatatatacactcacaattaatgtagattagtgaggatcaccataatttgaacaaattattatacacatttgtccaacaacttatttcccacaatctctaagtactgagagaactctcatgaaaatagctttgtcaattatcaagccttatagttttctagtagtgtgttttttttatagaaaatttctcaattcaaatgagcacattaaactcttttatatagtgtttaagtgatcacacttagaattcaaacacaccatctcatttctctcatataaatgagtattaatatgtttcataacatttgaatcctatcgtcaattttgtgtaacatcttttttcttatacaaaatgtgatcaaccaaaagaaattacaaaagccattaatcttgtaacttctcttcatgttacaaagtgtaggttacaattttagattaaataaatcatatattacaaaatttatttactaaacacttaatatatatattattcacataataa

SEQ ID NO: 89386 - DNA, 1473 bp, Cannabis sativa
aactgactgtcatagtaatctttatgagacaagctatatccaaggaagacacattaaataagcatgtattggagcttgactctgttgtagggcctcaatttaggatagcataggtagccaaacaccttgagataggtgtaatatggttatgtgttgaataggacttcaagaggagtgttatattgtagcttgaagttggcattttattgatgagaaatacttcagttctgtaagcctcatcccaatacttgagtggtaaggataattgagctagcaaagtgaatctggattcaataatcctgtgttggtgcttaactactccatttggctcatatgtgtgtgcacaaaaaactttgttaatgaggccatgttcctgaagtagctttgtgaaagttagatttaatcttccacgtttgattgaatagtttttattttgtgtcccaactgcagctcatcttgagccttgaaacttgttaaggtaagaagagcctcacgctttgtgatctgaggatgtaaattcatgtgtgcctggaataggcatccacaaagctgatatagtacctgcgacttttagacagaacatatattagttatttaactacaaataaattttactattatttatttgtagaaaaaactaatgtttacctacaaataattatctgtagacaaaatatttgtaagtaaaagtcatattttttgtagtgatcttttattgtatattttgtaatcaatattatttattcacttgtagcactataactagtgagtcattataactgcttaggggactgaattctagacttttaaagagctattacatgtaattcttacaaaagtatatcaagaaactcattagatcacgttcttatgattttgatatatctaagagaaatgccaagtaagggaagtaagcaattaccaaatcacctgtggccaaacctttatcaattttttgtatcgtttattgatttttcttactcttaattattaaatatttttattattgtttaattaactccgcgtcattaactaaaatcgaggtatgtataaatttctcaagaatttctaaatataggttctttttaatatattaaaattggggtgggttgactctaatctggataatttttagcgggcaggtcaaattcaatccaaataaatttctagcaaagtgggtcagattcgatcaaatctgaaaatttagataattttttcatgcttacattaaagtgtctgatactaccaaaaataatgtgttaaaatggttaattattttttttatactatttattaaataaatgatttggaaccttgaattatctcaatcaaaaataatataataataatatttaattattgtctagtttttttgaacatgatcttcgtcttttgtcttagtagatgccaccgtatttgcggttggttgatgacattagtgttgtcgatgccacaacaaaaactatgcatgat

SEQ ID NO: 89387 - DNA, 699 bp, Cannabis sativa
gtatatacatattttaattgtataattttgttagcatgatatatttttgagtattaatttgatattgttataattttttatggtatgtaatttcattactacggtcaggggcggacccacatagaggcgagatgagacagtcgccccccttgacaaaaaatatcgaaaaaaaaatatatatgcattttagctagttacaacatatatttataaataaaagtaatatttatgaacataatacaagctttggtataatggtaaagctatttcatgcacacatgtttactttagtatttgaatttatatttttttaacctctaccaataagacttgtatttagtgttttaattattgtacccaatatttctattattatttttttattttattttatactacacttaatactaaaatacaaatttgcatcactttttaatatgttatacaatatagaaaaaaaagatgccccctccacttacaaaaatttttttgcattccctcaacttaaatctcgggtctgtcactgcatacagtatattaatttttagtcataccgtatatcaaatattgttgtatatatttaatgattttttgttgtgaaatttacaaaaatactggaatttgagttaacttttacaaaaatactcacacggaaatatttttaaaaatactgtgttttataaaacaccagtagaacac

SEQ ID NO: 89388 - DNA, 747 bp, Cannabis sativa
ctaattttagtaaggaaagtctattatggatgaaagtttagaagacatgatttggtacatatcaaaatttaagggataaaaattttaattagccactataaaaatttgagtatttttaagtaaatatttaaattttaataatttaataattttttatatgactgtctcttaaatactattaaaaaattattaaatataattgaaactataatttgagtttgcattgaaaacgggttgactttttaagaaaaacagatcgacacgagcaaagcacgatacgaaaatactgagcttatttttgaaaatatttgtatgacacatcacgactcacattttaaaaagcacgaaaaaatataaaacgaatcagtacgacttgcacgaaatttttagtacattttgtaaaagtaatattttaaataaaatatcatagatgtaaacttattttatttttatttatgtattatagatgtagactttgttgattaattaatttgttttgtttattattatttatttatttatttttgtgaactttgttgattcactaatttattttatttatgtttttttatttttccagttattttatgccgaatatctacttataccgcttgtgagatgaagatggaaatatgggcttttttctatttttctattttttttttcttttagaaagaaataattttcttggtggatataaattggctgatctatataatgatgtaagaaagatcctgtgtagtgata

SEQ ID NO: 89389 - DNA, 1051 bp, Cannabis sativa
attatatgggaaaataatattaaatatatttttatgtataattttttaaaatatatatacttaaagtagtggtagtatttttttaaatgtgctaaaaaatcttcaaatcatccaaaaaaatataatattttattatacctctcttccactttgttattcgcattttcataatcatgacacgtggattttacttaagaaaggctaagaagtcattagccgaccaactttctcaactaatgctccgggagaacaaaggccccaactcatggaaagggcctccgtgactaggagtccctcgactaccaataatgcaagaggcatccgtgagctgaagtcttcccagtcccgggaaccgaagtcgcctgctcccgtaaagagtatgggatttacccagaaggatcaaggcatctcgaagatgcgccaaaacaggctacgtagtaaccgggcttttgcaggtacaacgtcaaaggttgtctcccacgacatgctatcgtacagagcatacgtgtctcattgtacctgactaaataatccaacggctagggataagggaaattcaaataggaaaagccatgggacgacacgcgtaggaggtccagctcgtaccatctgacacccttaaatgccatatgggaaaaatgacacctactaatccaacggtcggatttcgccctaacgatgatcaatctaaggcatcacatatagagaagttggtccataaatgcccctaaaaacacaagagaagagcggagtttttaaaataaaaacaaagagaagactcattcttcaccacccttagcaaacacatttgtattaagccagacgataatattcctatgaagcttcctcttcttcaagaggaacatgagggaaatgagttccagtctattgtatttctatttgtataaacagttaccgactgttgtgcctaataaaatggactcgtggactaaggatagttatcttgctatttattctgttgttcttttcttaagctctaaaaatatttagttgccgaaaaactcggtaaacattttagtgctttcattga

SEQ ID NO: 89390 - DNA, 1688 bp, Cannabis sativa
tatatatatatatatatacaactgagacttctttaaattgtatcttttacactgtaaattattcaaatttttttaaaaacaagtataagatgttagttataggttataattatatatatatctacactatacatctttatataaaggaattgagatataggtgttagaaaatagaaaatatctcttctgcaagtgcataactgagatatgcctgaaacttatatatatataaatatatatatatatatacatatcttataaatgctaaaacaatttcttatagaaactaaactaaagggagatagaatcaactgtactagccttttaattaatattgatctgatccacaattcaaaatatcatttaatgagtaaatgacatgattcatatctgtataataaaggttattttggcacaaagataatgataactcaatttaattattttatatatatacatatataaataagaaatatataatgatgaccacaaggtgtcataataaccacaattagaaattctaattaagaaagataacattttagatcacttgaatatacttttttacttataataatttattattgtaaatatatgtaaattgctgcaactacattttactcaataaattttgaatcaagaccaatgttgtgactaaaagcttttatattgtagagtagtgttcaatatttctatatttcaaattgccttatttaaatgataaaattcatcatgtcaccaacatatactaacaatatatataatttacctcagacaatattcagaggacaaatccaaacattatggccattgttagctactatatataatatataaggtttaattaattcactttaatgagttgtggtgactttttattctgtttgttttggattatagtttaaaccaagctatatatgtgctaaatagttaataataagcaatatataatcgtctaaagaaacccacacactcatttatatatcaattaatatgaacaaatacgaaataattttagaggacattttatatatcaattttttttgctgtgtgacctcacattttagaggactacatcacaagccaaaccaaacatgaatattggtttttgaaaaattcaacacacataactccacttttgcctatatattctttctggattgatgtgctagcttaattaacatgcctgagttattatatctctattgttgaaaataaggagagtgagtctttttctttttctcttctacaagtaataggttgatctcaataattaatatattttacttagttttatttaggttgcatgaggaatttgcttaattacattgttttaatttttatgttttactaattatagtacatgtgatcaattgtcatcaataacagaatattatttagctatgtatatacactctaaattcgatatgtcaacaaaaaaatcatgacaatgaaagcctaaatcatgtaaactaacataattatttcatactctaatttatattatcatttaatatagtaacttgcaaattaagttgctataaacttaatatgtttaagcaacactaaataaaccctaaactatatataaaatacaaggagacagccacactacaaaatcatttcttgataagaaagcacattatgggccaatatactactttttatatgcataatatgtaggtgca

SEQ ID NO: 89391 - DNA, 780 bp, Cannabis sativa
gcttttaacttttcattatttaagaaattctcatgtatggaataattttaaagatgatgttatgagaatagcagaataaaggttacctgctccataatgtgtatatatatcaagcaacaaggatcaatcaaatgaataaaaaaaataaaaaagcaatattggtactctaatcacttttatatttttctaaaatatgtaatcttaaataatgaacatcagttatttttaatttttttagatcatgtctatgagatattttccttataaataatgcaaacattcaccaaatttgcatacatttgtggttagaaatagttttaacactacttatgaaaattgtatacaagtctaaatgaatatatgtatgtgccgcgagatttcaaaataacaaaattacaccaaaagaataatgaataaaacaactaactattatagaagcatatatctcgtaatcttattagagttttaccttttctattacaacttaccaaatgaattcgttaaccgagcaatcaatatctatgctaaaatatcagtacgtacctaacctaatagctaccccaaactctcgagtgtaaatataatcaaagcttcccaaatgaatttaattattagtcatacaatcaatacctatgccaataatctcatatgtaatactcagtgagagaaagaaattgtatcataatgaaattaaaataaaacatacctgttagtatttgctcaactacaatattgatcatcaattttctctgtaattgaatgtaagtgggtagtgaaagt

SEQ ID NO: 89392 - DNA, 741 bp, Cannabis sativa
aacgtgttaagcataaaaaacttagaacttttcaccacttatactttagatttctaaatttcatgataattcattatattcatctcattttaaaatatttcttttcattttcaattcaaattatgatttttactatttaaacctgaaacaaatagaaaataaacgtaattttgcacaaaataaatataaggcacatttagcacaatttttggaaaagctaaaagctgctttctgaaaaagctgtaataaaaatgtgtttggtaagcaatcaaaaaataactttttgaagaatttttagaaaaaactacaactaaaagctaaagctgctccaatctaactattaaaaaaaattattttaattaaaagactacaataatttttttgtactaaaatcatatttacttatttattatatattaaaaaaataaaaatatttaaaataaactaataataataaaataaataattattaaatttcttattttttttaaaaagaaaataattatattatatttaatagtaacaaacgcatcaaccgtaatgccgatggcaatcaaagtcgttcttcaaagtcaacagtcgtggattttgtccaaagtcgttttgctaatgttataatagaagagaatgatggagttttcttcaatgaaaaaaaatatgataatttaccaaaaaaaaaaaatacataataaaatacaaagttataaatgtagatattattttgtaaggacggtatgtgat

SEQ ID NO: 89393 - DNA, 829 bp, Cannabis sativa
taaatagttaatatgaaaatctcatgaatgaaatatcgaatcctacatataaagatatatataggaatcgatgatgcattgatatatcctgcatgatttttccggttgtgagtttgctaatatccttaccattaacaatgaaaacctaccactaatacaattttgttttcatcatatatgtatgataaatcgaacatatatgtcaataaaaaaataattttagaagcaataagagagtcaattacattgaaaaatgaagaaaataaaagaacaaagtaatacacacttacgtgtaaatctgcctggtatcatccattgtagagtaacaaagtaacaattaggaattatatattttaagtataattaggtatatatatatatattttactataatagatttttttcttcatataaatgcacgaaaacaaaatggatagcaagatggtgttatgcattttaaatataattaggtttatgtatattcaattataataaatatctataataaatcactcataaatatatatatatatctcaaaaattattttatttttaataataaatcattttatttttaatataaataaaaactcatccataaatttttcataaaccaagaattcggttatataggtacactttatatagaatagatatatacttttcacatattattatccagattgcagtgttactatttttaaactgaaataatcaatggtatgataaaaaaaatatttttaaaataatagaaagaagagagaaagaaaaaaaaaataattaaaaagaaacaaaagaccacaactacaagaaaaaaaaaaaaaaaaaa

SEQ ID NO: 89394 - DNA, 618 bp, Cannabis sativa
tataatgctaagccagctctgttactttggatcaaggaaacatggtctaagtactagcatgaacccaaccttgtcttcccataaggaaccttgcctggattcagtttcacacttggaccccttccctcattaatctaaatgacacaaatttgctacagtattccacctaaggtagttaatcgggaaacacgtagataagagttaaacttcgtgattcctatagcgatcagggaataagtttacaatcccatcgtgttaaattaatttgccaaagtctgcgaaatgccacaacaaagacattgacaaggattaatatctaaagaatttgtagtttgcatacttcaaagattcaacaagtagtctaaagtcaaaaagcctaatggtgctatgtttttgccgttggaaccaaaaactttgaaaaatcctaaggcgatctatcaagtggcctagtaaacaaacaatgacagaaaaggaaagcaaacacaagcatgaaaataaaagcatttatattaagattaaaacaatattctataaagctattacataaagcgtcactgttaaggcatgattacattgtctccgcaaaaataaagttaaagcaataaacaaaaaaaggtt

SEQ ID NO: 89395 - DNA, 583 bp, Cannabis sativa
  modified_base (513)..(518): a, c, t, g, unknown or other
tctttttctttctttaatctttaaaggttgaaaatgaaaatagagtatgcccgacccgcatcagcttatttttttgttttacgcctcgtaattcttcctcaaccaggcgggggcagaatagcagagcaagtacaagtattagcagcatagcaaaaatgcgttcctcgttattaatatgtttgctcggcgtaattgtggcctctcgggggaatcaatgactgtatctttgatgcacttgctagtactagtacatctgagaattcttaattggatagttgtaaatagccccagaccgtggaacaaagaattatcctggacctacgccgagggattgacgacgattctcaaatatctcagaatagaatgtgatacgatgagatagaatgcaatagaaacaaagacacagggaacgggttacttactttcttaacggtcaaagtgaatcctttcattctgaattaaagaattcagaatgaattaaatctccccaagtaggattcgaacctacgaccnnnnnnttaacagccgaccgctctaccactgagctactgaggaactataggaggttagatctcataaagtt

SEQ ID NO: 89396 - DNA, 1051 bp, Cannabis sativa
aatttcaagctgatcttcaagatccgcacactgataatgttacagaatatcataattcaatcttaggtgattatcttgtctctaatggcattgtccatcagagttcctatgttagcactcccgacaaaatgtgattgctgaaagaaaaaattgacatttgttagaagttgctagggctcttatgtttactacttctgttcataagattttttggggaaaagctgttttgatagcaacttctttaatcaatggaatgccttgtgttttacaatatcaaactccaatatcttctcttctcaagatttatccttgtactcacatactcttcgatattccactaaaaaacgtttggttgcacaacctatgttcatgggccttggagaaaaattcactctggaaaatagttactcagctgaaagacaaccatgtggtaggatgcaagtgagtatttacagtgaaatacaaagctgatggtacttagaaagatacaagacaagactggttgcaaagggctcatttgcagtagtggcaaaacttaacacaataggaattctcttatcaatagttgctaatcttgattggccattgaaacaatttgatattaagaatgtctttctaaacctaaatttagaagaaaaggtctatatgaagattcctcctggcctcgaaggaaaatatgaaaaagagacaagatgtacttaaataaatctttctatggcttgaaatcacgagcatgattttgaggagtttaatcaagtgattaagaagcatgggtacaaataaagtcagtcaaatcataattcttgaaacattcacaagatagtaagattgtgtttcttattatctttgttaatgatatgattctaactagaaatgaccttaagaaggagcttaaaagactgctagaccaagaatttgatgtgaaagatctttgtcagataagagataagatactttctggtcatggagattgtaagaaccaagtagggaatattagtggttgtttggcttcataagtttaaagttgttttcagtttttaaaaatagaaaa

SEQ ID NO: 89397 - DNA, 699 bp, Cannabis sativa
aaacctccaaatgttaaaaactttataccaaagtatgaactatgaactatgaagatcaaaaactaatttagaccgcaaaaactttaggaaaaagagaccatgagatagttttcgtttattaaggttagaaatatataaatatgataccaatcatgttgaaaaccagcaattgaatcaaacacaagtacttaaaatgaatactgtattgagaactaacaaagcactacagtacagtcaaacacatagaaaagcagaagttatatccaaaatacagattagataatcaaagctaaaagcctaaaaaagaattcatatccacaatacaagttaagttattcacaaagaccataaaagtcatagaaaatgtcaggccaatatggaagaaaattgacaccattgttaagaaaaagataagtgagaaatagtcgtatatatatatgtaatgagatggcatatgaaatcatgtgtcctctttatatgggatggattctttaagtcttaacctttagccttaagctctgcaaggcgcctggagagattgtcttcgtggaccttctcagtctctttgctaggcacaacgtgtgcccctggctacggctgagccaccgagacctcgaggccgtaatcgtcggctacctattgcataaggctgttgacctctccttcgagagtggacaacgaagtggacccagccatggc

SEQ ID NO: 89398 - DNA, 803 bp, Cannabis sativa
ttatctttggctccttgatagacaaatatgggaagtagtattttttttttttttttgggattgttggttacaactctgaacccttgttttacaggaagtttctttgtttgtaaatttttgaacttttctattgagaaagttattatgttttttgtgttagtatgctttcatgcagggggagtattttctatactttattgtttttatttctaacacttgatgtaggttttcctcttataaaatgttttgtcaatcaaagtgtcaaaagagaagattgttaattccatttttagcattattaatttgacaaaaatattttataatttaattcttaaattttggttgaggtatttatttgattttcatattttttattgattgaaatatatatatatatatatatatggaacaaaatatgtgtagcttttctatttatggaaaataaggtgtaaagagtaagtttgatgactcatcattttttatctttccagctgtgaatatctgattctttgtgagtttttgaatatgtttgattagatttcttgtgaagaaaattgaagtaagattttcattttctataaaaaggaaagtcgcacttattgctcacaattttgtaggtacagaaataaaaattcttgggatgattgaagatttattttacagaattgtctagtgagttgtggtcttctttagaccgtgtatgaactgtcaataaggtgtatatttattataaatacaccttataccagctaggtcgtgcatctctttggtacaccttgaattgtattcctatctttaaaaaa

SEQ ID NO: 89399 - DNA, 2515 bp, Cannabis sativa
  modified_base (1376)..(1377): a, c, t, g, unknown or other
gagtccaggtcccaagggatctgagtcttgaattaagttttcttaaaaataaattgaaatcgggtcgagtcagctccgatccaaaaaaaaattaggcggggcggagcggatctgatccaaaatccaataagtatccgaatgtttcggatcagaggtgatccgtcgggtcgaagctccaacccgctccaactaaatggatctttttgacatgccttgttaatgatgctaattgtttagttaaacttgctttgattaaaggtaatcatatgttaaggcgcttggaatattaattactatcaacttctttcctttttgagtgtttttctttccaattttccttttaaagttttattgaagaaggtttttcataaaaagaaattcaaattcagcttaattacgagaaaaaaaaaatgaagtcccacaaggattttggaatacttttttcagtgcttatatttctttaagtgggaagttatgcattttaactgtttaagaaattaataatcttttaagatatatctatattattttactatatattattaataataaaaaggtagataatggtatttgattttcgtttcttatctttttaaccatgataatttcaaaacttattgatggggtaatatttcacataatttctttctactcattgtacacaagggttggaaacttaattgatatttattctttacaattattttttgtagacattctagtttttcaggagtatctttttctcatgttagtcgtaactttaatgttgagactcatagatttgctaagcatgcgcttaagatagacaataaattttcttgaatggaagaaatccctgcctactgtgtaacttttgttacatttgttatttacttttatcggttaccaaaaaaaaaaaattagtttgtaatgtttgtatggttagtttggttttgtaaagttaatgtggttataagattaattagtattgtgttaacatatcttgtttttatatttgcttccaaattatatattttattaacacttcgtttgaaaaattatttatatttttgcccctttaaaataataagaaaagaaaattgtattaaaaaatgtgacagataattaagaagcattttgtcccttaaactaattgtttgttagaacatttctaataaagtgctaaaaagatagtatattgttatattttaacacacttatgaaaaaaaaaaactacttgtgctaaatttggcataagatattatattgtattataaatttggcccacaataaattcttcttttttatttactgtatagtgccactaattattatagtttattgacttttacataacttcaatttctttatttaccatattattattatttaaatannaaaaaaataaaaaaaaaattatatttttaataaaataatataaataatgatcaataataattatttttttgtatttattttatatcttgtgtattgaaatataattataaatagttaatcaaatatagtacactattttttatactaaatttaacacaaattttatattttacattggagataatcatagttagttaaaattaatgttcacactgtgttataatttacaagttaaaatagaacaaagaaaaaaatggtagacaaattaataaagtcaaaactagatagatttgtcttttgagatccttttgtgttttctagccaatttaatttgccattaaaaaacatgcatcttgttagacacaaaagccatattattagactaaagtgtccataaaagtaaaactctatctacaacacataattaagctaaaacaaatccttcccaagcatataatcttacataaaaataatcaattttcatggatatatatacacgtaatataggcatcatttggatacatcttatctagattcaaaatatatatatgattagagagtatatatcacttatactaataataataacccaatgatggaggaacaaaaatattcacttagataagggaatcaataactaatccaaaaagccataacaataatagtaacaatgttcacaaagttggcaataatataatgtattatactcttagcctttccttttctactcatcaatcaaaaaaatcattatactctttttgcttttgatgagtacaagcatataacttagcttccttttcattttactcttgactttctttttacttttttcacaccaaaattatgcatctaatctcaaaacttcatctataaaagcaagatagttttccccaattctaaacaccaatatagaaacaaatttgagcctagttcttctcaaatcctaataaccttttctacttaactttcgagaagaacctttttcgagagagaagatattctagccaagtagttgtgatggattcaagtagagaagtttttaacgcggttgtgatgaacaagggaagtacaagaaaggaagtacttagcagaagacaaatcggtcgagaagaggaggatgttgataatctagcggaag

SEQ ID NO: 89400 - DNA, 639 bp, Cannabis sativa
tctctctctgtgtgtgtgtgtaggccttaaaagaaaccagggaaaaaccagtctcttttcatcaatttgctgagtaatctattgggattcaaggttttttggtgaatcaaagtctaaggtaagccctagtctctttttatgcagtttatggagattttttctttggttttaagcttgcaatagttgggatttagctctgtcagaaccctagaagttatgggatgttttatgtggttattttaagttgttttaggttgaattgagctggttttggagggtacataagtggttcaacaagtttgagtttaagaactcaaacatgtctcaacaatgaaagttttcattttgtgtatgtttgctgctgttactgcttggaaattgttcattgatgttatcataggtattctagaaagtttggctaagtttggggaaattttgagcaagattcaaagttctttgggttttctacaaaaaaatagttaatagtttttttgagaaacagttaaccattttcctaggcaggaccccaaaaatggtttaccattttggaattttggtttgccagttttagcatttttgggaaccatagttttggtgtttccttgatatttatgacatttccatgctatctatcgatag

SEQ ID NO: 89401 - DNA, 908 bp, Cannabis sativa
ttagacaattttcattttaatgaataattaaaaagagtgtgtagtgtgtttttttttataatcatttatgtatatgtgtgtaatattaattatatcaataaataataattattattattatttgtctcctaacaatctcattaattattgctatttttttttttaattagtaatatgatccatgtgtagtttttttatttttaataaaaacaacactttattaagaaatatcatccaaaactaaggattgaacataataaagtgtattcaaagagtattcaaacaaaaacttagaataattaagagttcatgatgggtattatccactttgtgtaatcttcttatgaaactcttttaaagaagaataagaattaatgtggtcatcactactgtttagtagtatgatttgcttatatatttatattaaatcaagtttttattatttcttttataaattgttttatatgtaatcaaagtttgtaaaatctaaggattagtatatatgttttgaattaaccatgtaattactcattagtataattattaagaaaattaataatgaatattgttaaaaaattaatcatagtcaatgaaaaataaattttaagagtgacaaaatattgtccctaaattttttaaaaagcacccctattaactattattttcaatcaattttttttataactattttaaataaaatatttattgtccaacctttaagattgaatatttaccaaatttataaattgaaataaatatttaggacaattattagagacaacttaactactttttttttaataattaagtatattcttttaaaagtcaatcgactatatagctagctagctagctaatttggctggtttcatctcatcatggaacattaatattcatatgaaaaataa

SEQ ID NO: 89402 - DNA, 904 bp, Cannabis sativa
attaaagaaataattaataatgtattcgtaaaaaacaaagtaaatcttttcaaaaaaaaaaaataaaaaaaaaaaagagcacattaaaatttttggatgccttcatacaaacaaagaaaaatgaaatgaatactttattatatatctctatcggttttggaaattgaaggtcttgatagcaaatgcaaagctgattgcgaagatcaatgtaaaggcgacattgacgactgcaacaacttccaagaaatcatgtctatatccaaaaaatcgtctcagaaactgcggtaaagtctcgcctgtctcaataatgatgtattcgtgtaaatctccatattgtgatgtcaccaatccgtatagagtccatgcaactggacaagcccaatagtaccacctccaccatattggtatcctctgtgttttaattacatatgaaaacattacattaataacttttttgttacaatattagcatgcatgaaaatgtctatgattattggtttcattgtgtttcagtcaatacttgaataattaactttagttttttgtatttgacagtgtcagtattgttatagaagctgtctatgcttgtgtatatgtatatgtattagaatatatatgtgttatagattcttacggttcgagggacgataaagccagcgaagatgttccataatccatagaaggcagaagaaacgatggaagcaatgtgatggttaggagtgactcccacacacatcatgccataaaaagtgaagtagagcatagcaaagaaggtgtaaaacagataccaaaagaactttgctgcagtccattcgtatccgatcattgcgtatactattaggcaatatactgcagcttgaaagaaaatgtatggaatctccactaccacctgcatcatatacat

SEQ ID NO: 89403 - DNA, 888 bp, Cannabis sativa
  modified_base (295)..(298): a, c, t, g, unknown or other
ttcggccaatgtgtgccaatttctcagtttccagtgttggggtctttgacctgtttcaaaatccacaaatttcccgacgtgtacacccacaaattccctgatatttggccttgtgtgattctttcaaatgtcacgttcggtcttgtggtctcttaaaggtcgttcgttatacccacactttccaggtccaaacgtgaggagggtgtattaagagttagtcacacattgctaatgtgtagaaataaattgtgatatataagatgaatgggttactcctctcattgccaattggttnnnngatggaaccccatgattcttaacaaaataaaagaagaaatttaaaatctatctatatatctatataatctttttgttaagtaggatgatgtggcgctctaacatttcttctttttacattattatttttttttcatttcttaatttttaattacttttgttcttcatttttgcttttttaatttaataatatagtgaaaaacggttcaattaatagtttcaatggtgcatttttatttttatttagttacaaaacaaataatttatattgataaataatctatgtaactgcactccaataaataatggtaactttcatgcattatacaattgtaactttcaacattacaaaacttaattgctatagtttaattaaaagaggaaagttaagttcattaaaaaaaaaagtattgctattaggcaccagtggcagtagtgcttagcaccttctcgatatgctgcgatgcgattggctagcgatcttccctaaaagctattatattaaattatatgggactcgatacttaattagactaatagcgatattgacacataggagggtactaggcaccactggtaccctttagcatt

SEQ ID NO: 89404 - DNA, 752 bp, Cannabis sativa
ccagacccaaaaaaatcccctaacctaaattttaattcagaccatgacatggacacgaacctagacttggacccgaataccgacccagacccagatccagaccgggatcgaaacacgggacctggaccctgtcccagccgcagatcctgacccaaacctaagacccagaccagaacctgggacccagacccaggacccgaacctggacccatatcgggattcaaaaaacccatacccatactcagactaagactcggaccccaaccgcaacctggacccagacccagacccaaaaccaaaccaaaacccgaaattagaactggaattgtgactaggatccatacctgagaccaaaaccgaaccgaaaccataacccaaactcatacaagaaccttggccgagaccttgactacgactaggacttgagacttgggacacgaacctagactagcaaccgtaccgtgaccttgacctgacatggtcctaaaccctcactaagaccttagacccgcgacccagaccaggatccagaccctgacaaggacccaaacctgaacccgaaccaagactaggactgagacctagaacggaacccagactgggatctggactaaaactaagactcaataaccgaactcgaacctaggcccagactaggacctacgaacccgacttggatgagggacctagactagggaactaggccctagaacccagacccagatctaaatccgggactcgaaccataacca

SEQ ID NO: 89405 - DNA, 742 bp, Cannabis sativa
  modified_base (674)..(674): a, c, t, g, unknown or other
attaaaaacagtacatcgatcgttgttgttacatgggaaagctggtgagataaataaaatatccctttattaacgatttttattcatgcctgtataagaacttaacttagatagccacaaaacccaaagcttccacacgcatatttgttgtactattagctgtgaggtttggcttctgttattacagtttccccagcgtaagaacaacaccttacacactcatctcttctgtagttccacctgcagcaactgtggtagcaacgactacgacctcctctgctaccgccacctgaaaagccaccgttacggccacccccgcctctattaccgggatatccaccgttattcccaccatattttgcatcgtctacctcattaggagtggcatccactataatattgataagtcatgtgtgatttaatattaataagcaaaagttttagtagttagtactagttattttaatcacttctttagcaaattaagtatgaatctaaggcacaattgcacaactattcctcatgacattaagaaattatatagtactgctaaaaataattttatttgaaattaaagtgttgcaaattcatagtaagtaggcatatatatttatatggaaaacttatgattggttatactaaaaaaaatttaaatataaatattaattttaaanatattaaactattaaattttgatttgtttgtgaataataaaagggaaatttaaactttatatttaatt

SEQ ID NO: 89406 - DNA, 1485 bp, Cannabis sativa
atagtctctatgcctctttccttccatggcccacatgatactaactcaagttctttacacaactctatataggcaagaagctctaatatattggagcttgaaaacaatgttgatcctaaaatttcgggcccttagactatgtgggcgtgggccctaagcacaagcttaacctgtttatgtttagagtcaagcatgcttagatgctagctagggcattttttcaatgaataattatgttgatgttattaatcgcaaaaatagtttaaaggttgatcattgataaatgagtcccaattaattgacttttcaacaaagagaatagcttaatataagcaatgttggtttttaattatttttatttatcttattttttattaaatataatatttaaaattttaaggcaacattaaaagtggtcttgtattggagatgccttaaagtatttgtggacccaattgaagtctagaagggtttgcccgttctactttttatttcatattttattttattttaaagtttaatacaaatattttcaatttagttgttaattgatgtatatttgacatttatattctagtgatttgttactttttatttaaattaattttgatttgtattccctctaaatttttttttattctagttaggaccgaaaatttaggtcttaggaaaaaataaaaattggggctcaataaaaaaatgaggttagaatttaaattctaaacctcttagttgttaaactaattaatcctaatgtgaagtcctaaattttcaaaagttattattattatatttaaacctcactctactcttaccacaaaaaccgacctaagttatatattgaccacaagtcatttggtgttcaatctcaagttagggataatatcttcccatgattagcttattatgttttttaatacctaattaggcataattaaaggtattttgatcatggtttatttatatatattaaaaaaaattgaaaattatcaaatgaaaaaaaaaatgtcatgaatctagatagattcaagccataatttacgaaatggatcgaccctaatcttctcaattccactcttcaaacttcaaagggataaaattcgacaataatttaagcgataattaattattaattcgcgtaaataaaaactcataaggtaatattttagagatctaattataatttataatttaagggaacttaaattatatcaataagtaaaagaatagagatggaattgtattatatatcaagtgatttaaaatagtgttatagtgattaattttctgaaaagtaatgtgcggtgtaaatatttaagtttaactttcagttacaggtaaatatttaagtctaattttttatagtaataatacttaaattatatttttgtaacttccataagtactaggggtgttcacaaagtatccgatccaatccaatctgcacgatccaatccaatccaatccgcaaaatgcggatatccg

SEQ ID NO: 89407 - DNA, 2084 bp, Cannabis sativa
gatgaatggttttcaattcctgtcatgtggaggtcaatgtttgctatttagattttcataaaattaaaaaatttgcagggcctggtgcaagtatagggggaatgtgtgccacacgttgctctggttcattagctgtcaggtagttttgcctcttctaaacaattaataaaaaaaaaaaattaaaatctttgaactttcctgctttgtttcttttggtagtaatatttgagggtatctattctcttttaactgaatcatatcgttcatatggttaaggatttagaccattatatgagtatatcaactctagtcttagtcctgtgctttcaacaaagtgtgagctatttcttgaatgtttaatatgcccaacgttggtacataaagtgaaaaaaaaactcacttgcgtacaaagattcccaagagacaaaacttatttttttataatttttctttaacaaaacctatgttagttttgtatcttcactacacatttcaatagccttaaaaatttgaatatttgatcatgtaaaatattatgattccttattcacgtaaaacatatatatattttaccaagcattatgaacaagaggcccaagcacagttttgatgctactaaatagtgattttaatgaattttttttaagcttgtaggtatggaacaatgcgcgacaatgtcattaatcttaaggtggtttgactttatttttatttattaattttttatttttttaaaattttaaggttgttagctttttccttgtgatacccaaatttttaagctgtgccattttgttccaggtagttcttgccaatggagatgttgtcaagacagcttctcgtgcacgtaagagtgccgcagggtaagtttaattccaggtaatacaccctgagaactattacattataaatagggataccctctcttggtgtagcgacagtattttcagtaatcttatcggcaaaggaaaaacaaacaaacaaacgttttcctttttgtgataaattattgtagcttacaaatttattcttcactttctgatatggattttggtgttcttggctgtttcgaaaaatattaacacagttacatattggatttttttttttacataaaaagtagtacaacattccttcatttaaaaggttctcgagaaatgctacctaaggcttatggtaagtaaattaagatgccaaaattatagtaattaatccgggtgattttattgttcataaatattacatatatttatctaatcttctctatccttgcatatactcactattaaccagagaaaatttgtcacccgtattcaaaccttagattgtattttcctaagaaatgagccttagatactttggccaaatcagtggataatacgaatggatttctgaattgtcatttaaatggaaccattttgatttaaaggcttttgtaccttgtgtattggtgttaacttatgaattttcaatttcgttaacctcaaatttgtataaataggtatgacttgactcgcctgttaattggaagcgaaggaactctaggtgtaataacagaagtcactcttaggcttcagaaaattccacaacactcagtggttgctacccttgtccttatttaccaaaggcttaattggacaaattagaataattttatgtggttgttgacaatgaatcttgcttgtttttgtaatttcctgtcaatgttgcattcatgacaagacatacatgttaattctttctcattttacttttatattcgctcaacttgagatttcctatattcaaaccatatggaatctgtagaacttgcttaaaatgtaggtttaaaaaattgttggatgcatcttaaaacacattatttctattagttttttgaagagtaaatacatggacccttgttttgttaaatgataatttaaaaaccttaaattttgcaaaatagaatataataatacctcgagcccaagttttgtgttagaccttaagataaataaaaagggtacataggttattgtaacaagattattgggagagtatatatatgagtgtattagaaggttgtttggggaaaatgaaattgt

SEQ ID NO: 89408 - DNA, 610 bp, Cannabis sativa
tattagactttcatatattttggtttttttgccttttgacagttaatccctttaactgtttttctgttagttagtatctacttttctatcagttagtcattccctagctctgttagtttattccttaggtcggttagtcttgtatatatacatcagtatcttgtatttcatttattcattcacttgtaatctctctttcaattcaataaaagttttctttgttctctgttttctgttaataagatcattatcattatatataatgtatgcattagttaatataattattgcatatatttaatgtgtgtatatatttaccgtatatatgacttggagtgaattgaaaaaatgagcatcccacaatgtgggtttgtagttgcctgatcggcggacgattgctgctggttgatctttgaatattgtagtactactactggagattactcctgtaatgaataatgatagatatgatgatatgagatatataatcagggccttaaaaaatatattatttcctttcaaaaatatttatattttttttttcttaataatttttaaaactaatacatatctgttagactatatatatagtgtatgtaatatagcatat

SEQ ID NO: 89409 - DNA, 621 bp, Cannabis sativa
ttcttcttttgctgaatttattaataaattttctcttatccccctcccttttgttggtaataaatttacctggcataattctaatgttaaagaaagattagactgggtggttgtctcggaatcttggtgtgatcttttccctaataattctttgcatcaccttggtttttttggctcggatcatagagctcttaagttagttttagataataattcatatattgtacctaactttgtcaataaaaggtttagatttgaaaatatttggctggaggatcctgaattttactctactgttaaagatgtttggtctgaccagatggctcctctgtttacctctgggatgcaatctttttttgacaaacagcaacactgtgctagtcagcttaagtcttggggtaaaaagcataattctctctttaagactagaatttcccaactaagtctagaaattgaccaactccagaataagatggttctgagttctgaggagtcccgtaggcttagttttttgaagtcggccttagactctctgctgtataaagaagagatctattggagacaacgggctaggactagatggttgaaagctggggataggaacaccaaattttttcataa

SEQ ID NO: 89410 - DNA, 714 bp, Cannabis sativa
tctctttcttaatcaattaaaagtctcaatcaattaaagcaatgtactaacttatttatgagccaatataaaaaattaaataataataaaaaaataacttaaaactcttcttttccgtctctttctctttttatgagaataaaatataaaatattaaataaatataaatataatatagtaataaagttgtcatttagaaaacccaaaaaaaaaaatttctctctcagactttctctcttctcgtttcttctttgccgtctgaagctcggaactgaagcaggcttcaacgtggaggacgacagaggagctctaccagccgacgatgaagtcaccaccagccgacgatgaagtagctctaccaatagacgacagaggagctcctccagtggaggacgcacccttcggaacctcgagccaagcttttccctcaccggacaatggaactttgcaagagactttctggtttctccgccgcacaaacagaccactaagagcttaatcgtctctctcatttgtctctcggtggttagccatttaaatctgaccttctacattaatttttttcgattctctgtttctctttcacttttcgttgtgcatgtgtgcagcggcggtttggggttcgtgaggcaaggtggtggtatggggtttgtggccgacgatggtggcctgaaagttattgtaatatcccgatgagtctaatggtagataatt

SEQ ID NO: 89411 - DNA, 785 bp, Cannabis sativa
atgacacgtggataatgatttaatctttaatggttaggtatttacagagttctaaaaatataacttaggtattaccgccaaaaattaaacttaagtatttatttgcaactaggagttaaacttaggtatttatgccgcaaattactcataaataaataattacacattcttttatgaggagtgcttccgtcaacttcctgttacaacctcttagtcaacctccacgcccgaaaacacatgtggtatattttttttcaatttttttttcacgggtgtttgttatgcgtacaacatcatccttgtaaatttttgaaaattttcgaacacacgtggtgaattaaaatatcaagaattctgttttcggtaccgtaaactattcagaatttttcaaaaatttacagggatgatactgtaactataacgaataccgctataaaaaaaaatttaaaaaaaaaatatttcggcatgtaattttggacgtgaaagttgactaagagattgtaataggaggttgtaattagtatttctcttcttttatttatcctatctatattgttgactttttttattaaaaaaaaaacttttagagcgtatttgaaaaggcactatgtaattggagtttagtgaatttagagtaattacaaagtcattacacaaaataattcaatccaattatatttttttttttgaatgaaagagatgctttattaatgaagaaagtcattcattacaatttccaccaactcggatggtaaattactagcatcaagagtgcgatctgacat

SEQ ID NO: 89412 - DNA, 877 bp, Cannabis sativa
  modified_base (536)..(536): a, c, t, g, unknown or other
gttcttttctgattatctcatgttgttaattatgataatatatatcatatatataatttcatataaacaaagctttttcaattaatactttaaattaaaagaatatatataatttgatttaaattcataattataattcaaatataaatatgattaatagaaataagttaaatctttttattttattattatatttttaattaaataaattatctaataatatatttaattcaataattaaaaagataattaattaatttaattaaattattttaaaataatcaaacaaaattaacatgagcttttatatgtcaccctacctacacgtgttgaccatatattaaggtccaaaattaatttctcaattttaccgcaaataagatctattatttattctgcctatatattaattattgattaattctcactaatatcttatttcacaagaattaaaataattattattttcactataataatatatttctttatttaatattatttaagcatatattatatttaactaattaatacanttttatctaataaaactaaatagttaaatacaattaattatacaattcataattgtaataattactttataaattactattttgcccttaagaatttatttctcataaaaattaaatctcattcaaatttactcatcaaataaaacattttcttgtactatattgtatagaagcgaggggacatgaatttcaaagctccaataaatacttaattattattgatctcatcaatagaataattcagtttattaattttattatttctccactataaatatgaaattacactctttaataatatagaattatatttatataattcttacttgtagtccattgat

SEQ ID NO: 89413 - DNA, 633 bp, Cannabis sativa
ctatgaagttcattgtgggaaacacagcagtaagttttcaaggagaccccaactttacataaggaccctttgtgtctttaaaagctatgatgcaaacaattaaacgagaggggcatggattaattatttagcttggggctgcctccattgagaacgggaatgatgaaatacctgctgaaattaaagaagtattaagtgaggccaaagaaatctttgaaatgccaataagacttccaccatttcaaggccacgagcattcgatcgtcttacgagaaggtacatcgccaataagtgttcgtccatactagtatccataagcctagaaggatgtcattgaacaattagtggaggagatgttagctacagacattcctcaaccgagcgtcaacccattctctagtctggtgttgttagttcgcaaaaaggatgggagttggcggttttgtgtggactactgtgccttgaaccgtgagatagtacccaaccagtttccgattcttgttatttttgagatattagatgaactccatggagccactatcttctcgaagctcaatttgaaatcaggatatcaccaaatcgagtgaagccttctgatgtgcataagatggcttttcgaactcatgatggaca

SEQ ID NO: 89414 - DNA, 648 bp, Cannabis sativa
taaattctaaaactacttgttgggagcttgattatatataggcccatggtccccacactacttgagataatattgtcttgtagactcaattaattgattttattagtcaattagaattactatgtctaatatatgagtttcactaagcaaatgcaattttgagaataaaaaaaaatagagtttgtttattaattaagagactatgaaaagtctaattaataaataagttaaatggcaatattatttaataattaattataattattagatagataaaattgacatttataaagttataatgaaaaatagtaattttaaaaagaaatatagttttataaattggcatttttaaaacctatgggcccacatagtatttcggccatatggtttaaattaagccaattttatcttttttttttatcctttttaaattctaaacctaaccctaaagttatcatataaatagaatatgatagctcttatttttaaacaattttaactcactttgtcagacaaaatagaatataacaaagctctcatatttttcaaaaatctcttcttcttcttgttaatttcgaaccttgagtgattgagtgattgcccacacattccaaggcaatacttaagatagtatggaagactagtatt

SEQ ID NO: 89415 - DNA, 579 bp, Cannabis sativa
atatatataagataagttttaattttaatttgttattgcaagaatatatatattttttaattttttttttcaataagagtattcattatagttacagtattatttttataaatttttaaatttttttgaatagtttacattgctgaaaatagagctcttaatattttaatttaccacgctcgtttaaaaaaatttcaacatatttttggcatgataaactattcgaaaatttttaaaaatttaccgtgataagattgtaagtacaacaaacaaaacactactataaaaaaaaattaaaaaaaataatattgtgacatatgtttttaaacacgaaaattgattaaaaaattataagaaaatgttgataagaacataaatacaattgtcaatgacaaaagaaaataatcctcttgtagattaatctttgccaatagatagaccatcttattcccctctcgatgaataatgggacaataactaactttgacaaacaccatagaattttagatgtcaccaataataataatgtcttcactactatcacaccttccctcgatagcattaatagcattttttttt

SEQ ID NO: 89416 - DNA, 612 bp, Cannabis sativa
aatgttggcacgacacgacacgatccagattattctgtatcacttttttgaaaagtaaagataaacaagggccaaattattagtagagtttgaaaagataaaaattaaccaaatctaaactcacttgttagtagatgaatcaaaattaaaattgagtaatgattacacggtacgctttttcttgatttgttaattgcaaatttgtatatgttttaggagtttttataccacatactgaaatttttaacttttttatttttcaactgtggggcggagtttttttcaaaaatattgtgtaagttttatactgtgttaagttttcatggttgctccacggttgtttgttagttgttccgttgttgttttaattgttctgttttgttgttttacagttgttttataaaaagacagtatttttgtaagaaatttcgtgtgactgtaaaattgtaaatttttatctaaaatctaatatttttttttttgtaaaaacctccaatttttttttttatgtgattagagttttgttcatttaatcaagtgtgctatataatatagattgttttgtttgaccctcaaatttcttttttttttttttgacaagaaaattttgtt

SEQ ID NO: 89417 - DNA, 563 bp, Cannabis sativa
ccaacttgtgattcttggaaattttttctcttatccctatttcttttctagtggtttggggcaagagcacaaacaaaaagcaatagattttgaagtatcccttttggaaaaaaaaaatctatggattttgggggtgtatatcttgttattttttgtttatccactggaatgggttgtttccgggtgttcgataggggcaagacaaggtattttgggaaaaaatcatagcaccatctgatggcaaggcagtggctctctttcaacttgttctgtacaccaagagagcaaatatcagctggtttttttatcgaggtagactcgttgagcaatagcgtctttctcatgactcgaacaccttgcatttgttggcttggttctttgacaaggggcgattacgggttgcacctactgatgttacaagttgaactccatcaccttgagaggacaagctaatttttcggcaactggtattgataggcattgggatattaaataaaaagggcataagtgtaattgtaataggggtattgttattatatataggactcaatagtgaaggaaaa

SEQ ID NO: 89418 - DNA, 625 bp, Cannabis sativa
taatgttatgttcatcattcataatcagaattctgatgctctgcatagaaattattaaaagtatttttcttaaatgctgaaatcatcttatctgatctcttcatttcactttttgattatgaatgaataatatcaggggataaaaacacacatggtgggacaatgcgtgttgggtcaagagaacatattttcaagttatggactgcaaatcagctaactgtaagtgtttctttctataattccaaagcaatagcaaatgaggtagttgtgtcttcataatgaataattaatggctttgtggtccttattattagatataggaataaaagctatattgacgagagacacctgcacagatatgagatatgcaccaaattaagaaacagtagtaagtaagtaattaaagttttatggctatattgaattgttttgttttattttgtaggttaatcctgaaatggttgggcgtcttgagaagggtggctactggcttgtgctttacaggaaaatatatatataacaggtcgaataatggaggtaactaacaacttagtttcatctcatcatgtatataactataatgaatagagtttcaattaactatatatatgtgtgtgtttgtgtt

SEQ ID NO: 89419 - DNA, 843 bp, Cannabis sativa
ccactagtactgaaatgagttcctgaaagatggaatataagggtaaagcttataaagtcaagtagaaaaataactaataaggaccagtagtttaacaaaaccactgcatggttagcttttcaaaataaaacatgtcattgtcattatcatgtataagtaaaatatagagaacacaaacaattataagagacaagctactcgtgcatatcacattgttgattaggcccttaactctcagcaccaatcatagaaaattatatcttaaacttggtagttgtgcctaataactaccataatatcgggtctcagatttaattcacttcttgtaataattctagatcttttacctataggtgagtgcacaccttatctaccaaatatgacatagagactagctcatgaaataaaaatatgcataaatcatgatcatatgattgtcattagtaatcaatatgaacgaaagtaggcaaacaagaataacaaaagaacatattccttttttattttagaaaatccaacagcataacaattgtaatttcaataaacctaaaaatcttaacttgcataaaaaattatacaaaaatatatttggcactcagtgccccagaatagtacagaaaaaaaattcaggttaaattttcaattttttaaatattttataaatcataaagattaaaatatgtctaataaaattaaacacatataaaaataagtctatatattaagttgagtctctaactcattaggattgtcaaactttctccaaaagagacgctcctaaacccctagttcttaagttacaaatagtttattcacacaaaagtaaatttgtcttatagtatc

SEQ ID NO: 89420 - DNA, 550 bp, Cannabis sativa
ttaacatgatgtgttgcatcctaccattatggtgagaaggctctcagtcataaaaaaaaataaccatgatacaagtaattgatcctgagcaccccaatctgagtatgcaagattcatgattcgagttgtatgatcttcatcagttaagaattatagaagaactgatgattcttgaatgaatgaccgtaaacgatagccatggatggctgaaaggacctactatctcttaaggagataattgtgatcattcaattgaattaaaagatcatgattgatgaagactggtgcgacatggtcaacatctctatttcttgcattttttagaggaacaccctatgggttttgattgcaaatgtttcctagattagtctgaaaaccattgttggagtttgtaataacattggtcatcaatagaagaaaattgagattcgataccatattaagtttctatgacatgtttagatgatgagaaactaagatagataaatatggaaagaaatagacagattgagagagaaagattggtaaagagaatgaaaaattctatatt

SEQ ID NO: 89421 - DNA, 1572 bp, Cannabis sativa
aaaaaaaaaaaattatattgatagactcctcattgtttagaatatttcataaaatatatattaatgtggtgctaccaatactatatagaataccctagtatgttttaattaaacatggttttgtgcgtcatgcacaattttgctttggttacacgttaatgggtttcactagctaatcaataaattattttcaatgcaataaagaaactaaactcacacagccaagttagacttttaatttgtgcgtcaattattttaaaatagggatcatcgattttgttggttggcacgttctcatttatcaacccttcaaccaccatgttcattgagtgtctaaatggtatttatattatttttattaaaatttaacaagattatctacttgtagtaccaaactacctcgtttgtccacgtaaaccaattctaagccattttgttcttttaatagaatcttctctcaaaaagtaatacttttattgtcgcgtgttacacattttttgtttctctataatttcaactataaccaaaatgtctttttatattgaaaatataccatttctttttgaaatgtccaaattatataatccacttgttcaagaaagaaaaaattatgcccccaatagtcggtcattgaaaagataatatatatggcaagaaccacaattattattttgaaaataattttatttaaattatttgctaatatatattatttattaatttagtttttataaaaatctttttttaaaggatttttttatatatatatataaaaagctaatgctcattgatttgaattttgaatttctgaggtcataacataaagaggttatttatcaaaagttcatgtctagccaaacatgagcaacaagtgctgagaaagaattgaattaaccacaatcattctcaccaatactttttgctgtgaaaagaataaaactaatgtaaactaagaaaagaaactacataattactatctaacaaggtgtatcatacattaaaaaaatatcacttgattgtgtaacaatgtagaattttacttttctaatgcttagcacacatctatatcgtacaagacagtatttgaacgtgcaaggttacgtgagttgagattgaagtgtgccccttcaaaaattgattggcaaaatgctcaatagttatgtgataataagttagaagggtttcatgaagtgacagagttattttctggaacaaaagtaccctaccgccaatatttttttccctaaaatttgtgaaattaagacaaacattgacttgtggatgtcatcagatgtgccttttattaaggacatgacaattcaaatgatgtttaaatttcaaaaatattgaggagagattcacgggcttatgtgtgtggcggttgttttagactcgagggataagtttatgttgctcgaatactatttccctgtaatctatggagatgagcaatatgtaactgaaatcacaaatatttgtgagctttgttgcgagttactggaggagtacgggtctaagtttcctcatttaagagagagaagggtttaggtagataatgtatcatcttcttcg

SEQ ID NO: 89422 - DNA, 7467 bp, Cannabis sativa
  modified_base (120)..(121): a, c, t, g, unknown or other
  modified_base (6979)..(6982): a, c, t, g, unknown or other
  modified_base (7035)..(7037): a, c, t, g, unknown or other
atcattttaactcagaaaatttcgttttatattgggaagtgaaaaataaaggataatctctttaatttgtggagagaacttgattcctcttgaagaactttaaatatatatatatatatnnatatatatatatataatgttttaaaattctgtagattaattaagatataaattttaataacattttcttaatggagtttatattggaggatagagtctataatattatttattttaaaatagtggtgagaagaaaacaaatacgcgtaatgtcaaaaaattaatagttatataaaatagtggttatattaatattaattagagaccagttaatgaagcaattaacatgttaatctactcttttcccgaaaataaaagtacaattatatgtttattggaaaagtatccaaggaagaaggctcattaattcataataattatcactacttaagcatacatttcaatacaattgtcgtccaaatttttaaattaaaaaaacgtcagcttcattacttcccaaattataaactttcacatctatcaaattacattttttttaattgttttcccaattaaaaattttcctaaactattatgattgttatatttaaaattttttatttaatttcattcaattttactaatataatgattgttcatgtactaaattatgcttctctttaatatttattaaatcatactcgtcaaattttaacatgtaccaaataatatctcatgaattttgattaatgttagacttaataaaattagatatcaatctttaaattcaacaattttaataatttaaaaataattaataatcttaaaaattttaaaaaataatttaatacatattaaaatttgagaattaaaaattttaattaattatttttcaaaaataaataataataatagaaccatatgaaaccttcttacaaacctttttccttgtatcttcatcctcttgaatttatttatttattagcattagtcattactattattaatgtattgaaatatttatttcaattatttcaagaaaagaaaggaataaataaataattaaaattaataatttttcatcaataatgtattgataataataattccaagctgttttcccattgtcgatgtcggctatcactcttcacgtaacttcacgagccataccatgatccctgctcctgccacgtgtcaccttaacacaaactcactcgaagccatgtacgaagccgccattccctaaccccttgcttagatctctccacgtgcaaacacgccacgtgtcctctatttacaaagtcaaagccactacagtcccttttaaccttaaacttcaactccattcatattcttacacgtgtacatacccaatccaaacgttatatataatccaaattctcaaaccgaaagttaataattcaaagcacaagaaaacaagttcatacttttatcgaaatctctttgatttgaaacttttgttcaatgattcaaactcaaaatgtctctactcgccggattctgactttcccggcgattcatccatgtgaggagattcgtccctctacactcctcaactcgttaatttctcttgctcgtcaaatatgtaattaccgatccaattttttcgcttccaacaagcgaaatgcccacgaatcaattcgccaaattggggtgattctcacttttcttgaagaaattcgagaatgggattcggatcttccgggttccgtcgttctgggtttctcggagctccatttggttttccagaaagttcggttcttgttagaggattgtaacagagaaggttctcgggtatggatgttaatgaattcggagcgggtagctaaccaattccggttcttttcccgggcgatcgctacggctcttgatgttcttccgattaccgtgatcgacgtaccggtcgatattaaagaccatgttgatttggtaacgaggcaagcgcggaaaacgaggttcgaacccgaatccgacgataaacgggtcgggtcagctgttcgatccgttctgagcgggttcgaacgtggggttgtccctgatatgggcgatctcaaatgggtacttgttaatcttggaatcagaaactggagctcgtgtaataaggaagcgatgttcttggattcggagattgagctcgagagctcaaacgacgaaaaggaagagttgggtttgctaagcagtctaatgggtttcgtttgctattgtcgttgcgttgtttttggtgtcgttgattgtgatcccaatagaaaacaatcaaacggagattgtagaagtcaagtgctgaatggtattaattcagatgatcttcggtgtccaatatcgttggagatgatgattgatcctgtaacggtagcttctggtcaaacgtatgatcgttcttcaattaccaaatggttcagagctggaaattcaacttgtcccaaaacaggtgaaaagctcaagaacatggaaatggtacctaactctgctcttaagggtttgattaagctttattgttctgaaaagggcatttcttttgttgattcatgtcatagaaatcgtcacgctaagaaggcggtttcggctgatagtttggcttttgaaaaggccatgaatatggttgcagattttgtatctgttacacttgtagttggaacaggaatagagcaaaacaaggctgcttatgaagcaaggcttctatccaaaacaagcgtttttaataggtcttgtttggtagaagccggtgtgatcccgccactgttgaatcttttactttcaacagattcattgtctcaagagaattcttctgctgcccttttgaacctttccaagaattccaaaggaagagccacaatagtccaagaaggaggtcttgaaatactcataagtgttcttaagaagggagttagctcagaagcaagacaatatgcagctgggacaatcttttatcttgcttcagttgaagagtacagagttttgattgggaatattactgaagcaattccagctttaaccgagctcataagaaatggagcaagtagaggcaagaaaaacgccttagttgccatatatgggctccttgcacaccctggaaatcataagggtgtgttggaagctgggacagttcatgtccttgctaatcttttgaaatcttctgatacagaagatgatcttgtcacagattcacttgcaattctagcaactcttgctgaaaaatcagatgggacagctgctgttttgcaccatggtggtttgaattcgatcatcgagattttaagctccattagttctaggacagggaaggagtactgcgtgtctttgctgctagctctttgtagaaatggaggaaaagaagtggttgctctattagccaatagtccatctctaatgggatctttgtattctctgctcagtgaaggtacatctcgagctagcaagaaagccggtgctctcatcagggtcctccatgaattttatgaaagaaggtcttctggtttgatggcttctcctgctctttcacaagaacgatctgttcacgtttggtaacccaaattttatagggtaaaacctttcgtgttgtgtagatatataatcaagtcatgagtatattagctcggtttttgtaagagttaatagctaaagtgtatcagcttctggttttattgatgaagcttttgtataaatctatgtacacactattacaccatattgtaattcttttctatttgaataagcaaatatgaacaatattctttgatgaattatgagtcaagtaactgaatcaaattgtgttgagatattaaatgccttttctagtgttgagaccacttgtttcatggatggccttagctgtttatgtcctgtgcatgacaaagctagcttgaatacaagttcaaaggcttccaatgagtattccctcttgagtttggggtcagcaaaatcgtctttactacttttagctgtgagagatttagcctgaaaatcaaccaaacaaacacatcaaaacagttgccaaaacatgaaaaaacaaagagttgttaagcttgttttctcaccattttgaggagcagcattggtgtggccaagttgaaatcgattactcgttgccctgataagagttgtaatagtactattccgaaactgtaaacatctcctgaagggttcacatggtgatttctttgatactcaggatctacatagcctaatgtccctctcacttctgacaccacatgtgattggtctatttccataaccttagacaatccaaagtcagagagtttggcttgaaatttagaatctatgaggatatttgttggctgccaaaaagtcatgtcaagaacaaatcactggaaagaaagagtaaatagcagtaaaaatctatacagaccaagaacaaccttgatatcgcgatgaacaatgcatccatctggataagtatgcagaaaccatagacctttggcgctgtcaatcgcaatctttagtctttcgatccacgagagaacaacatcttcacctgttttgtgtcacagtttttggattagatttccattgtttgaaaatggacaagaagattcatttaagaagaagactttattaccaaacaaccattctgaaaggttcccattgtggcaaagctcataaaccaggaaacatgcatctgcagcctcacaatatccgagtaaaggcacaaggtttggatgtttgacatgagaaaggcttctcacttctctaatgaatgtgtctacatgaccatctttgattatgtgcttcactgcaacatgtttcccatttgaaagtgttcctttatatactttccctgaaaaaaaaaatacttaaaatgttatcaaaatccattcttaagaacaacaatttattcttcactaattctaagggtctcacctgctacaccttggccaatgaagttagaagaattgagattgtctgttgcaaaataaacttccttaattgatatcttaatgcagcctttttcttcatttgtagactccatatccatgctatgatcagattctgttatgtgaattgagaatgttaataataatatcaagtgaggtctcaaagtttatagattgaaaaaaaagatcatatttttaccctctttttctgataaaagatggtctttaactctcttcctatacaagaaccatgttataccagttactagtattgtcattcccactagagcaccagctagaatccataaacctgtcataaccaagaaacttattcaaatttgcacaaccccattatttcaaatcgactaattgggattttttttctcctgaacattgacatgtattaaatcgtgtttctcaaacttttcaagtcgttgaaaattctctcaaaattattaaaactgttgaattcaagaacttttctctaattctgttcaattttactaacagttgcctaacgtggtaccaaattgtaccacccgaacttgtgtccacgtcaagcactaacagtaaaactggatagaaattcataaatctaattatctcaatagttcgggtgaaatttttaacaacctaaaaacctttcaaatttcatatataatacatagctattttagctgtaggcaatttacctgtcctcaactttttatgtttactacttttgtcttccttttctgcagttaaacaaaggttgcatattttagctgtttttactaacattaaagagaatagacaaaagcaaacactcattgctcaaacaactattagtactttacctcttgaaatgtcttgatccccaaggcatctataaagggtgtgaatccaattctcatctttaactcttccactacttaaactaatcaaaacagcaaaaccacataccatagtttcagtttcttcttttttagtctcattcccatcctttgcaacaatctcttcccaccttttttgacaggaagaacaagctattgagccaagaaatttacagtcttcttcaagctcattgagtttgtttcctagattattaacaacatcaattgaagaaaagtcagaacaaccaccaactccacttgttagcttttcaaaaccacagccagaaatatcattattatcaatgcaactattttgttcagttgaattcaagaaaagcttctgatgattattactctggttggccctttgtgccaatccatataagtaatcatcaaaagcttccccacaactacaattacttataaatccaccccaatttccttctttacaatttgagtcataattccatgatgaagatttatgaatatcaaggacacattgagaggctgaagtttgagaaagcaagaaactcagagtggtgacagagattaaagcataaaaacaagagaattgtagttgtttacatttatttggattggaaaaatggaaatttaagatgaatttagccatggaagcttatgttatgtttagtaattatgtgtatgatatgtatatttggactgaaatcatagctaataagaatgagtttgttacagaatgaaaaagggtattttagtaaatttaatttaatagttggatttatgtgaagttgatacatataagtgacaaatggttattaatatgattttgcaggctgatatgaacgaagtcagtccagttcataatccaaatttagttttaattaattaattaatgaaaaatattgctcaagaaaacagatggcaattttgccggaaggtgataattaccactttattattataatattgttgagaatcctcctatcttaaaaccaactgctaatgaatgaagtggtacatgttcttatatatatatatagtttatttaggataaaattaaggaaatttacattgtatactaacttttgtcattttttttacaaaaatactgtcagacgatatttttaacttgtttactgtgtttttttataagtttcatactacagtatactgtattaagttttcactggtgttctactggtgttttttagnnnntctactgttgttttgagttgttcagttctgtgttctactagtgttttataaannnacagtatttttgaaaacttttccgtatggcaatatttttgtaaaaagtaacccaaattccagtatttttgtaagttttcctaaaattatctaatattcctcctcaagatgatgcctatttttcctcactaatcttgaattatctttccataagtagtgtcatttgctcacttatatttgttcgcagttaagagttttgtttgctcgcttattcttgttcgtggttggggtactattttgctcgcttgttattgactaactaattgataggtgtggatcgaaagcccatcaaaaatatggctcggatattatgttgagagtaaaataaaggctaattacgatttttgccccctgaactttgacatgtacaaaatcatgccccctgaacttttaagatcgttgaaaatgccccctgaactatttagattgtt

SEQ ID NO: 89423 - DNA, 984 bp, Cannabis sativa
gcttacaaacaaaataaaatggaacgaaacctaatagatggactaaatttctgtatgtgtaaaagttttaagagaaattcttaacaaaccgtatattttaaggaccaaaatcaatattataaaatgtttaaagagcaaaattgctaattatttttttattttaatttcatttacatattcaaatttagcaagatttttctacaccataaatagaactatctcaacatctttcagcccacaccctctaccaaaaagaaaagagaaaaagaaaacgtttcaaagacaatatggaagcctcaaaactattgccaacactcttcctcactcttatcttcttctccacctttttcaagccttcattctcagctgagcgctgccgcccaaaagacaaaaaagtcctccttcaaatcaagaaagcattcaaaaaccctgacacctacagtgattgggactcaaaatccgactgctgcgactggaacgatgtgttttgcgatgtgaaaactcaccaaatctattccctttctgcatccaacggcaacttatctggccccatcccaccccaagtcggcgaccttccatacctccaaaagattgactttcacaaactgcctaacatcacaggtccaatcccatttgctatttccaagctcaaaaacttaaggaccctcatgatcaccaacactgggctcacgggtccggtcccggatttcctaggccaaatgaagaacctggagtatatttctctagcgttcaactccctcacggggaccatcccgagttccattgcccagctccccaaacttgtcatgctccgtctggaccgtaacaagctcacgggaccgatcccggatacgtttggagacttcaaaggtatttatttcaatctctacctttctcataaccagctctctggtaaaataccagcttcattggggagaaaggatttcacgtctatacacctatcgaggaacaggcttgaaggtg

SEQ ID NO: 89424 - DNA, 931 bp, Cannabis sativa
attcgaactcgaagcggtggtcatgattctgaagacatgtcctacatatctcaagtcccatttgttatagtagacttgagaaacatgcattcaatcaacatagatgttcatagccaaatcgcaagggttgaagccggagctacccttggagaagtttattattgggttaatgagaaaaatgagaatcttagtttggctgctgggtattgccctactgttagcgcagctggacactttggtggaggaggatatggaccattgatgcaaaattatggcctcgcggctgataatatcgttgatgcacacttagtcaacgttgatgcaaaagtgctagatcgaaaatctatgggggaagatctcttttgggctatacgtggtggtggaggagaaagcttcggaatcattgtagcatggaaaattagactggttgctgtcccaacaaagtctactatgtttagtgttaaaaagatcatggagatacatgagcttgtcaagttagttaacaaatggcaaaatattgcttacaagtatgacaaagatttattactcatgactcacttcataactaggaatattacaaataatcatgggaagaataagacaacaatacacacttacttctcttcagttttccttggtggagtggatagtctagtcgacttgatgaataagagttttcctgagttgggtattaaaaaaacagattgcaaacaattgagctagattgatattatcatcttttatagcggtgttgtaaattacggcactgataattttaataaggaaattttgcttgatagatcagctgggcagaacggttctttaaagattaagttagactacgttaagaaaccaattccagaatctgcgtttgtcaaaattttggaaaaattatatgaagaagatgaaggagttgggatgtatgcgttgt

SEQ ID NO: 89425 - DNA, 1617 bp, Cannabis sativa
tagaatttgttgttacaacttaatctttttttttttattttttattttttatttttttgagttagtgatagttaaaatgataatttattttttaaaagttaaatgaatagctaataataaaaagaataaaatcttgttcttatgtatataatataataggtaatatataattaatatgtcaatatctagtactgcacatcgtgttaattaaaaaatcttatcattgtattttaaaaaaatatgttaaaaaaacctaaatatatgtatctacatctacaaaacaatacacatccaacaaaaaaacattaccaagaataaactaactaaaaatatacaccataaaaaatacacatgaattaaaaaaaaaactaaaaataattgttcaaaaaaaaaatatggaaaccacttaaaaataactaaaaaacaacatacaaatatcaaaacaaaatacacatacatacaacaaaagctttgtctgaaataaactgaaaacatacaaaataaaaaatgcacataaattaaacaacaactgtacaaaaaaaaaatacataaaaataacagaaaaataactattaaacaaatataaaatacctaaacaacaacataaaaataacaaaaaaagacagttataataaatcaacaaaaaaataacaagacatcaatcttgttaaaatatgaaaatcattgataaatcaactttgaataaactacaaaacatccataaaaaatatactacttttttattaattatgtaaaaaataaaaaaatatagaaggagcgatcttaatttttttcgtaagagagagagtgttaaaaaaatatgataaaaatgatgaaattaaaagaatcatattttagtaaaattagataaatagtagtaaatgaccatttttccctttttactaaagtttaatgtccctttttaaaaataatatagcaaatgacctttattatcttttttagtacctaaaatacccttagttatataaagatattattaacattatattcattctccaaattgaaacagaagctatgctctaaaatctaaatgacaaagcctccctctccttattttttccggttagtttggatttcttcaattttttttggtaaattatcgtgatttctctcaaaaggtgatgaaatatttttctctcatccatttattcgattcattcgttggatccaatcatttttccttaattcctcacaatcgaaagcgacgaagctctgcttattttcttcttcttctagttttctcactccaaattacaatgattaccccaaacaatgaccaaagtctcagtcaaatttttctgtcggtggtatatacattttgtattatggtatatatattttctatactatggtataccattcaaaaaataaaattaaaaaacttggattgtatattaattttgttgtatagcatacatatatttttaatcaaaaaaaacaaatctttagttttttttttctttatttcattcgtcatattaaatatgcatttatccaaaaaaactactattttttaagttttttctttatttttcttgtttgatatacattaacacataaaaatgatatatttgtagattaaatggatatcccata

SEQ ID NO: 89426 - DNA, 616 bp, Cannabis sativa
attattgtattaagttatttaggaccgaatatttgattgaactaataacaatattagcacgtaaaaatgtattagacattaacatttctctctatatacatgtatgtatgtgtgtatttgattgacttttttattgttgttgttgttgtgaagtgacactaatggaagaaatatatgtattgaaagtccaaatatataataatttcaagaaagtatccgttggatctatccaaagattattttcaaataatttcttttcaaaatattaacattatatatatatttatatattttgaaacagaattgattcataagcaaatattacattagataagacaagtttaactggacaatccgacttacgtaaggagagtgttaaataaatctgaaattaagttatatacaaaatagaaaatacatgcccttcggactaaataaaaaggactatgaatacaaagactcaaaatagaaattagttaaaactttttactcgaataacagattacatcaagaagaaagatgatcggcaacaaacactctaactacctaatctattcttatatcctatgaaatttcaaatcagagctggaatttcatacctgaagccatttttctt

SEQ ID NO: 89427 - DNA, 1016 bp, Cannabis sativa
ttaaaaagaaggtatatactgctgttgtcattgctttgatctacttgatttggtgcacctgaaacaatattttgtggaatggagagataggaaattgtgataaagttgtgtgcaaagttaaagatgtgattaagaatagaatgacttgtatttggcctaaaaatgtaactagaagtgaaaaggcttggttcaattcattgtaaagtttatagttttcttttgaggcctttttgaaggtgctcctaggttgtataaattgtttgttgatctaatacacttgttgatttatcaaaaaaaaaaaaataataaaaaaaatattaaattttgtatcaagttttagaattgtgcattagagcacaataataaaaactgatataaatatatcacaaaattattttttatgtcaaatatagaacaatttttacgtcttctattgtcaattggtctaacataaagataatcaaatatgtaatatgtaattattaaaaatacatatatttgtaataaaatttgtatgtatacaattggacaaactcaataaataatatataaatatgtcaatttaatttaaaccatattttctacggaatcacgattatttgtaaagactctagaatagttaacaaggtataaatgatgcacacgaaaacgacacataggacatgttctcttgactcgggtccagtcagtgatacaagacaagtgaaacacatgtttacattttttcaactcaacaactgcttggtttatcgtcgactcatcatcgatttcgaataaactttctagacaaataacacatttttcatttttaagttcctctcttataataatttggttctcgatatcgtaatgatgtttcttaaaaaaacaatttttcaataattgaataatacgagaatgtttcgcattgttaaccactactacaggaagtacaacttcttcatcatcataatcgtcgttgtcatcgtcgtcatcatccgtgcagaagtacgcccaacaaatacaaaaggttggta

SEQ ID NO: 89428 - DNA, 1036 bp, Cannabis sativa
  modified_base (534)..(534): a, c, t, g, unknown or other
aaaattatttatttaattaaatatgttataataattaaaaattataatatatgatttgaaaaaaataactaaaatataactaagtatacgtgcatagcacgtaacttccacctagttagtatattaagtgtgtgatacattattattattattattattattgtaattattataatagtgcacgtgtgtgtgaagaataagataggatatatatatatattaaatagtaatatagataaatagtgaggaatcaaattagttattttaaaatttaaattatattaacataatttttatctgattagttaaatttttatttgaaaatttaaatctattatacgatatctcatatatacatatatacaataactttagaaccctagtagccacatattatcgtattctcatcatcattcaaaattattattctctttatttcacaaaatcaatagttctaaccttaagagcttcagggtcagcaatcaaccactcttatctgatcatcgttctgtgtcttcgaaatcttcaggtaanattcgtagttgtgtttttattttcgttttcagagtaacaagctttcataaaactaccatatctctctctataggcccgttttcagtgatctaggtaccgtttacaagataatttaatgttctacattttttatgaagaaactctttcccgattctgattattttgatgtcaaaaaatttatgttttcatgctggctgtcgaattaaaatttctttccaatattgcctcagtaaaagtccgatatctctctcgatagcttcactcggttaggatatctcgttttaagttttgtttcagaaaaagtatctttagtaaaattcaatgtctctctcaattttgatccattttaaaagatctttatctcgttttaaagcttaagaaaatagctacattttttatgaaggaactgttgtgtggatcggggtgtaactatttttaaaactttaatttttgggctgaattcagaaatcgacatgatccaggattttaaagaaactgtttt

SEQ ID NO: 89429 - DNA, 818 bp, Cannabis sativa
tattgcagcggctaagtgaggaagctagtggtccgtggctcattggaggtgatttcaacgaggttcttcatgctaagaaaaaatagggtgggcgagaaaaagatgttagagaaatggataatttttggaaggtgattaatagttttgatttagtggatcttacaactaaagttgatacatttacttagtgcaatgggcagaaagagaactttatgcttcaaaaccttgataggtgtttagctaatgtggagtgggtgaatttgtttcccaaccgtaaagccttctacctagagtggtggtgtttagaccacaaggccctagtactgaacacatattatgatagtaatatggaggattgctatacaaaacagagatccaggtttcacttcgaggaagtttgggcagaagagtaggaatgtggagatattattgagaaggaatggacctcgagagattgttgttcctcgaattgggattttaaaagcaaaaccccaaagtgtggtaacaagctccaaagttggaatgcaatgaagcagaaggagctttatgtaaggtcaaggaaagtaaaaagaaggtcgaggaccttactaagaacatgcatgctaaaacttggggagctttaaaattagaggaaaggaatcttaatgtaattatggggaagcatgagagatatttataccaacgtagtagagcggtgtggatgaagagtggagacaaaaactcaaaaaaatttcatcacaaggcttcctctaggaagaagaaaaacaagatcacagagattttgagcagccacggagtctggaagaagaaacaatccg

SEQ ID NO: 89430 - DNA, 1190 bp, Cannabis sativa
gtgttttcaaatgtcataaattaatattagtgattttgtattaattttatgtattaagttttaccaaaaatatattctatgaaatggattggctgttttggacaaaatccacttatattaatttttggagctccaataattagtgatactacaaatttaatggttttttttttttcattccattcttaatctatatacacaaatctaaatctaaagctatttggatttcgatatattatacattatagtctacacatttgtattaaatgctttctttttgggaacgtaaaggaaaaattattctaaaaaatgtatttaatttaaaaagtagatatataagttatttgtaaaatatttctttaagtagtttattggagatacatgagatttgttcctttactatgtggtattattttatacttattatttttctaaaagtaaaaatgagtacatttaaaaatatatttatcaaagaacacattttattaatcaaaccaccaaatacaaacaccaatggctaccacaaccagcctaaacacaaaccaacagaaacaattaactaatcaagtgagcaattatccttagcttggtatgactcaatttttccttttgtatagagtaatttgtggtataaatatttaagtttaactctcagttgtaaataaataccttagtttattttttggcggtaataaaaaaaaaattagtttaaatatactaataagaaaataacatgtggataataaattaacatttaatgatcaagtacctacaaagttctaaaagtataacttaggtattattaccactaaaaagtaaacttaagtacttatttacaactagaaattaaacttaggtatatatgccgcaacatatttagtaacatataactgactaatcaagtgagcaattgtccttggtatgacctaatttttccttttgtaagaaaaattatcatgtacacatctaattctattccttcaaatattatatacagtggctgaaaaaaaaccaagcataatttttttgaactggttcgattttttttagcaatctaggacatccatccctcagtaacagtcagccaagctgtaaatcccagtcattcaaaaacagcattaactaatctcttcgaaaaatcacaagcaaaaaacaattgctcatgactttcgttttctatgtaataaata

SEQ ID NO: 89431 - DNA, 917 bp, Cannabis sativa
  modified_base (240)..(253): a, c, t, g, unknown or other
tgattatattgaaatgggtttgatttagggcacaaaacccaacaaatagttcgtacatccttgtctcgcttacgaatttacaatcagcgagttataaatatactctaccagttcattatttaatgagttattctattttaacatctacaaatataattaatattatattcgctggttcgtattctcccaagttgacatgtgtccttctctagagtgccagctgaatttcgggtataacannnnnnnnnnnnnnagttctttttaataaaaagtgctttttaaatgattacagagggtaaatttgtcataatcccttttgaaaatagcatgttctctaattttggaagttttgtggtttcgaggtacatcaacatttaatgaccatcttttccactcctctttcgaattctacccataggattaatcatctttctgatctaacggagattgacccaagagtagataaagggaaaaagaaaaacctttgcattactttcgccatttaaaaacttctggaaattttttgagtttttctacaaaaaatcgtatccagattattttgaaaccttgcatggcatttttcctacgagtttcattcgatttaattttcgacttcaagcattcggagagatcttcaagacgttcagaggttgcagattgcagagccattcatcgtcccaaaccccaactttaaacagtaagtggcttttctccttattatctcacatgctcattatgttgtacttctgggttcaattactatcttcttggtcagtatcgttattatctcatttgtttttagcaatttttagggccaaactgtatctggtaaatattaggttttagacagtacgtaggttttctagaatctccaatttaccaacttctggtttgataaatttcttccaagaattggg

SEQ ID NO: 89432 - DNA, 738 bp, Cannabis sativa
ttgcttcaaccacacaataaaaaaagtagcacatgttttttgtttattgtttgttaaataattgtactagtcgaatttttatattgtaattactaaaggaaaaatactttaactaaaaaagcaatataatattacatataattattaattaccatttgtttaaaaggcagccccccaatgtattaattcttaacacgtataaactaacttcaatatatgtttccaaccattattgactatgacaagttgtagtccaaaacaatgatgttttggttggtgggggcttatatattcaactatatatgtgtatatatatatatgacaatgcattcaataaatctagtactatatatatatctaggttaagttcaccgaaatcaccaagctaatttaaaaaacacacgcttctaaagcggtatactactatatataaggtattagtttctcaagtaataaatcactactctttgctcattcaaagttaaatcaccaaaaagtttcatattacagtacccttaaactctccctattattcttagccattttttctttcaatatttcaatatagttatattgatatacgacaatatggctcctcatcttaacaccactgaattttcggttgtgaaggaggaagttgagcttgtgaagccctctgaagccacaccttcagatgttttgtctttgtccactcttgacaatgaggccaacctcgaatgcttctccaaagccatctac

SEQ ID NO: 89433 - DNA, 705 bp, Cannabis sativa
  modified_base (153)..(155): a, c, t, g, unknown or other
gttgaaaaaaactaagattaccaacaatgataaagttttaccacatcaaaataaaaaatagagtgagagataaatattttactcaatttttttatgcttttaaagatatttttctatttgaaatttttttcctggaatctacatatgaagtgnnnaaaactttaaattccataggattgaaatgtgaaaagatccatgaatgttcgaatgattgtattttatatcgtaaggaatatgcagacatggataatttccctacttggagtttgtcccgccataaaataaataagggagaatagaaaacttatcaaccaaaaactattgtggtacatgcctttgacttcacggcttaaaatattatatcgtagtgcagagcattctaaaaatttgattcggtacgagactaagagagtgaaagacgaaaaactcagacatcctacatatttataagcttggaaaaaagtaaattacataaattcagaattcaaatctaaactaagacatctttgtctcggtctatctacagatggagtaaatccacatagatctctaagtagttgtcatagttcgtgtcctatcttcctctaagtgatgaaaaagaaatttaatatactttctttatgatatcagacccacaacaacctagatataacatcgatgtatatttggaactattaattgacgatgtgatagaattgtatgaga

SEQ ID NO: 89434 - DNA, 723 bp, Cannabis sativa
gaaaacacggtacgtaagcacgaatagattagcttaaaagcatgacacattaaaaagcctaataatttaataataataacaatgataaatagttattcatcaattgtaatatttattataattataataattataattatttttatatgattgtgtgtaactattattgaaaaaagatgcaaaagtaattaaaactataaaatacatatatatttagtacttagctcattaattgtaataaaaatataaaaagatggagcacgaatttgagtctgtatattaaaacaggttagtctatttaagaaaaataggttttttttgaagcctcacatggatccgaatacggcaggaaattatcgaacttgcaggccatgtcaggcctaccatataaaattgatgcacgtcagggcatgacctatatttttctatggcacagcacgacatgacccatatttttttatggcccgatatgatccataatttttatggtccggaacaatacgacccatattataacgccctaacatttaggcacgctacccaagacgattaagaaatcctaatcccctaaacgggatccctaataaaataagcgtggaaattaaactttaaacgaaaagagaatgaaaataaatttgtaataattttaaccttacaaacaaaagttacatgtttcgggatcccaaaaattgttttacaaaatattacaagtcttttccctta

SEQ ID NO: 89435 - DNA, 521 bp, Cannabis sativa
atctcgaacggttaggcctgtgattttctctcacaaggtctgagattcgagtccctcatgagtaaagatacatgataattattaatattctttagcattacacaatacctttagaaggtttcatcttagagagacatctcgaacggttaggcctgtgatattctctcacaaggtttgaggttcgagtccctcttgagtgaagacacataacaattattaatattatttagcattacacaatacctttagaaggtttcatcttagagggacgtcttgaacggttaggcctgtgatttactttcacaaggtctgaggttcgagtccctcctgagtaaagatacagaacaattataaatgatctttattcatcatatattatagagttaggcgaggaaccaaatttcataaaagtatcttctataaaccctatagattcctttttcttcggtcttactagatcggatcttgatttcatatttcaagatccttcattcgatataaactacaatattggttagttt

SEQ ID NO: 89436 - DNA, 1081 bp, Cannabis sativa
aatttaaatgcaagatatatattaaatgccacattggccaggtttgtattgaacaaagagaaaatatatagataataaatagaaagaaatttaaaattgaagtattaatcagtataaattgctaaccggtcaatgctgttccttgccttctctggttgatccaagttattcgttttctcagatcgatcaacgctttttcttgatctttccctcttatcagtgttgacacttgacttctcaccgcggtctgtactacatctaggcttttctctctggtcaacactcggtctagaattctctctccgatctgtgcttgatctagatttttctctaaaatctgtgctctttcgagcactttctgattgttctgtaaattttccggatccatttctcaaatgtggagatttttcaatgatcgctacgaatctcttgagatgctttatgtactccgggtaaagttctaaatcacagtgattccctcctttcacccacaatggctcatatttctccttacaaagttccgccagtcgcttgccgtgggagcaatccactacatcatcagcagttccctgtccaatggcaaagacaattaaaaagttgcatggaaattttttttcctaaaagttcctcaattattacatgaaccattaataaaagttgacatgacattcaatttttaaaggaatgccctttaccaattactacatgccaatgccaactgcattacagatatgactatttgtaccagaatcattctgttacctctagaatgtatatataacagaaattccaaaaaagcaaaaacagaaattaactttctgaacaatcaccaattgcaatagaggtcaagcaatgttgttcttaatgatcattatgtgcaaagtcaatcgagttcagggcccacatccacttaagattcttaaataaaaatatcatctttaaatcttgtgctacttggacattgcaaatctggcaagcacttcaataccatccacaaatgtccagtcaaatatcaaacataagtgagttaaatttggtgcattcaagaaaggaaatgtaagacagataaacaaatttaagc

SEQ ID NO: 89437 - DNA, 2566 bp, Cannabis sativa
catttttcactttataggaaattctttaagagttggaaagatcttcgttcatcctgattcaattgatttcataacattctatgctaaagctgtctcactattttttcaaagagacgtgtcttaataataatgagccacgaaccaaaatcagaatgaaggagatttcttttcttgtaaccaaaataatacgttaaaggaaagtttcacactttaatggtcggtggtggcgttcattaaactctttaccgaaacacgttggaccaatgataataagaccaagaaagaagaatccaatctagcgccgtgcccacctggccgctttctgagtttatacaaacgacacgtcgttttgctttgttttgagtttaattaaaagccaagtctttcaaatttgaagcactggctggcacagggagaggaagaaaataaagagctttcccattgcattccttccctctctccctaggcctagccaaccttcccaacagaacaatatcatatttatttatttatttattttattatattataaattttaaataaaataaaattacatacaaagtattttttttcaatgtacacattcttctcctccgtgttttgggtttttgtttccaaagttggattttaaatcgtatatttttcgaatcaaatgttggcaggaagaacgatgaccaaaaaaaccccgccattggccacgcgccacgtaatatggctaagctggaagcttctgattttcttctccgtcgcgctctgcctcttggctctcctccgactccattctcaacctgaccctttctcttcttctcaaacttctattactcttgcgagatctcgtatttctcgcgataacgtcttctccggtccccctaaaatcgccttccttttcctcgcgcgccgtaatcttccgcttgattttctctggggcagtttctttgaggttttccttcttctaactgttaactttcgttctctttctccagaaagtaatctaaataatctattgtttgtttgctttgttctttcagaatgctgatacggctaacttttcaatttatattcattcggctccgggatatgtgtttgatgagtcaacgacgaagtcgcctttttttctcggtcgacaattgcagaatagtattcaggtgacttttttgcattcgcttctgtttggtttctgagaaaacgaaagaaaactatattagcttctctctcttaacttgtactgtatttagaagtttgtagagatcgatcatcaatgatcaatacaagaatgccttagttatgaagctatttctgaattttgggtttaatatatatatatatatatgtatatataggtaggttggggagagtcgagtatgatccaagcagaaagattgctatttgcagaagctcttgaagatccggcaaatcagagattcgttcttctatctgacaggtttgttccaatccaaaatacctgcatgcatgtgactagcattatttaaattattatattcaatttcaatgaattattaacttcttttaattgattttttttttgtttttgttaatgacagtattgaatgtgattatctttaaggttgttttttcttgtatgtttgcagctgtgttcctctgtacaactttagctatgtatacaattatttgatgacttctcctaggagtttcgtggacaggtaagtgggtctgtctttgattcttgatgtactaactactgtttctctttaggatgattgaatagcttgaaatattgtcacttttcaatttaatttagcatttctttttggaataaattgctagctatttatgcacttttttattattgtagctttcttgatactaaagagggccgatataatccgaagatgtcaccaaaaataccaatgaaaaaatggcgaaaaggatcacaggtgatcaatccgtttatacagcccatttttctttttaaaaaaattatcttagtttctggattcattttcgaggtttttcttttcactggtgagtagctttgggctccactcttactggatttctgtggataatttcagtggatcaccgtgataagaagacatgcagaagtcattatagatgatgaagttatttttcgagtctttcaaaaatattgtaaggtatgattggggaattttttgttttgagttttagataatagctgacattcaggttacatttacttagtttattttatttgtattcatactcattcaatcctgctgtttgtccaaaacgaagacaaaaatataactaaaaaagttctttcactttgcagcgacgcccacctctagataccagaaagggaaagttgaatcttgtaagtgctagtttcacctgattgaagtatagaaattaagaacttagctttccaaatacttacttcactcatgtataccttatgtagtactagttggttgatcttttaaagtaagttaacagtattgttattgtaataattttaaatttttatataattgcaatctatctgacacccatatatttgttctgaaaatctcttgcttgatttctatatgtgaagaggattgtt

SEQ ID NO: 89438 - DNA, 2004 bp, Cannabis sativa
ttcttcttcaaacacaaacaagataaaatccaaacaaaatattttcaacataaaatatatcacaataattttaataaaaatatttatttaaaatctaaagaatctgtatttcttttaataaaaacaatgcattttcttttagctttttattatttttctccattatgccataaatactaatatctaactgttataaaagtgtagtaatgaggtgatagttgtgaagacatttttgctctttgtaaaattaggtatttataattttgccctttgttaatgtatgtgaaagtgcaacgtgtaagctcttttaattaggtgtttttgttgactgacatttttaatatacttttactattaaattaaagcttttgtaattaggtgtttttgttgactgacattttttatataattttactattatattaaataataagcttttcaaagtccaacgtgtttgtatttcccatttccacccattttcactttttaaataaatgtattattatattaaagtgtatttattaccattaaaactctaatttttctttctttaagaaaattaacagagactttttagcttttcttttccctgtttacagtctctcactctctctctctctctgttctttcagtttcacatataatgaatgtattgtatatttgtattttattttttttttttctaatttcaaatatcgttacgagtttattaaatttattatgaatatttttgttgattttttatagtatttgaatatatatgaatgtattattgcgattatattattgtattggttattaaaattaatattttttcaaattcctttacttcgtagtattttttgttttataacttttgttgtcttgatcttgtgtgtgatgagtaaaaattttgctaattttgttactaatttttatatttatgtcaaaaaaataagttgctactgatttttttggctgtttattgctactaattttttagtttagttatgtcaaaaaataaatttattgctgctgaattttttggctatatattgctacttttatatatatatattgctactgatatttttttttaattgtagataataaatctatgatcaaggatccccaccaaaagagaagacaatagacattgttgattaatttactttatagaaatttttaattttattttaagtttgttatgacaaatttaaatgactttgaagacttatatttgaattttgaaatttggatgagtttaatgttgtaacttttgggtgattttgcttatgaaatgtatgtatttgattatattgacacctatttttttttatgtgaaataagggttttaacccaacccaacccgtaatatttgggttgggttgggttggtttgtataataaaaataatgtgaataggttaaaattttataggccgatctagttgggttgggttgctaaaatagcctcaacttgtccaacccaatccatgtgcaaccccaaggggagctctccttgtatagggaagtagatcctattaaattacaataaaataatagaaaatgtgcacaaaactcgcgaggaaattcctgcaattcgtggttgagagtgtgagggcattttggtgtccaaaagctcaaaattgtggcaagggtgtgagacacacttagatgcatcttgaaaagagctttcatatgccacttgaactgcatcgtttggataaactttgattaagttatggtcatattactgagggatgtgcattgttgaaaatttggcaaactatcttgtcggcgaccagattgctgcaaatgtcaacttggcacccaaaacttgccctttttgggttttgcttttttgcatattttgagatgttaaatgatgtgatagctattcttacatcattatttgactctggtgaagatctcttggcaattttactcgatgtgcacgggtgatacccattgaatcactagtgacgactaggtgacgaccgaggtgatctctagtgcacaagatt

SEQ ID NO: 89439 - DNA, 608 bp, Cannabis sativa
atatatgattttcttttttaaaaaaaaaaaattgttaaaaaaacatataaaaaagtaaaataaaaacaaaaaagaatagaagagttggttatttcgcacatagaaattatgaggcaagaagaatataatatgaagacttaacttaattattatcatataaacactaataatttatatatgtttattatgttagaaaaaggggaaaaaattaataagataatagatttcatgctatatgtagattaagttggtaatatttaatcgaattagatttatatttatgggttttttttttcaaaaataaaattaaaaattaaaaattgcttcaactagctaattcatttagaggccatatatatatatatatgttggaagtttgaccatgcatgtgacaatacaccaaaaaatatttttttttaaaaaaaaaaaggtaaggcgaattatactaaaattgttttcctaaaaattatatgtaaaatgtgtcattaattttaatttactatatatataccttgtcatttaaatcatattgtgacattactacgagtaatgtatttgtgatattcaaaggaattcaaatgtttaatgtggatgaacaataaccatgt

SEQ ID NO: 89440 - DNA, 852 bp, Cannabis sativa
taaacataaatgacctctaatcttttattgataacaaatcagattagattgaaatgggttttatttagggcattaaatcccaacagattcatcaatccccattcccctaagagcatgtaaaaacaatatgttagcagaacttccattgtctattaatatacgtttagctaaacaatttgaaataagcaaagaaatgactaaagcatcgtgatggggattgagcaaatctgaggcttcatcatccacgaagcttatggtttgtccagtgtaactcattgctggcttttgtggccttctgtccgtttctacaacttttattgcatgcctcttagctgctgaatacgtcaccccgctaacttcggaccatccagatattacactataagttctagtgtgttgtggaggttatggtggtgtaacagtcttgatgtcccttccagctatgatactcttctccttgttagttaagaattctttaagatgtccccgtcaaaggagcgcaacaacttcaaaacgcagagctatgcattctgtcgttgtgtgactatgatcgtcgtggaattcacaccatttagttttgtctctccgatccgctggctttttggtcttttcgggccacttgaccttgttccccattcctttcatgatagccacgatctctgctggttctacaattaggttgtattctaggatgggtgccttttcttattctcttggtcttggtgaaggaaacctacgtatgtgcccttttcctttcctattgttcctggaagttgggtatggctcatgatgcatattctacttgcgttccactctcttgtgctcctattttctcttgagtatgagtaggat

SEQ ID NO: 89441 - DNA, 1174 bp, Cannabis sativa
ggatcgagactagggtgcggctctatgtctcggtcctagttttgtttcccgagtctggttccatgtttaagattgagtttttgtccgggttatggtcctgagtccaggtcttggttgggatccgggtcagggtcggttaggtctgggttcgagtcttggtccttgtccgattacggttcctgatctaggtccaggtccggttatggttccaggtccaagtcctagttccagtcccgttgttgggtcccagtctacttccggtttcgattccaatttcgggtcacagggtacatgttcgggtccaagattgggtttgggtctaggattgggttcaggtctgggtctaggttcggatcctggtttgggttttcgtccgggctgggtcccagatctatacaccgactacgggttcgatccaagcgccaggtctagatccggttctggtcttgttccatttcgagtgtcgggtcatgagttgggtcctaggttcaagttcgtgtttggggtccggtcttgggtcctagtcctagttttgttgcccaggtctcggtttaggtccctattttgttttgggtttgagtcccgctctatgttcgggtttgagtcctattagcgtttcgagtttgggtcttggtctgggtttttatttgggtttgtgtgtcggtccttgtcttgttcctagtcctagtcttgttccaattatagttgcgatttcgagtttgagtttgggttcgagtacgggtcgaggttcaagttcaggtcggggttcgagaccttgtctgagtttgggttcgggtccagatctcggtctaggtccagatcgggctctaggtgtgggttagggtcctgggcctatgtccaagttcgtgtttgagtcccaggtttcgatctcgatctgagtccgggtttagttccaagtctcagtccttggtttcgatcctagtctgggttcaagttcaggtccgagtgcaggtctaagtttgggtctgattctgggtctaggtttgagttcgggtcctgagtttgggttcaggtccgggtttgggtttggtcctagtatcggttcgtgtccaggttcctatccagttagggtccaggaaaggttttgggtccggatatgggtttgaattcagattctggagtctaggaaaggtcctggttcgggttcgagtcc

SEQ ID NO: 89442 - DNA, 622 bp, Cannabis sativa
  modified_base (318)..(321): a, c, t, g, unknown or other
taaattacttttaaaatttatttagactttttttaattataggctgtatcttattacatcaacattaactttattttttgctttactttctctcgcctcatttaaataagaaaaagaaaaaaattagcaaacatttttaattccaaaactttaaaaaaaaaaatcatataatttttaatttaatttttttgtcataatatttaaaacataatttatttttgtttgatgagtatattttttaaaaatatgaaaaatatgaattggaagaaacaaattaaaaaaaaaacttagtagaattaaaaatataaattttatatnnnntaaaaattattaaaataaaatattgtttaaaattgtttaaatgtaaataaaatttctcaaaaattaaaatatcttcaaccattaattatcccacgatctttaaatttacaatagaaaacaaaacttagttttgttggggttttttcttacaaattacaataacaaaaaaccgaaaacaaaacttagtgaaattattttcctaaaaaaaagtaaaagtgatgtaagttttttttttcattttttttttaaaactagctagatcgcacctttgtatgaatatgaaagagtagactaagtcacc

SEQ ID NO: 89443 - DNA, 531 bp, Cannabis sativa
aaaataattaacattcattgatagaagagttacatcaacaacatctttccataacaacatgattccaccctttaaaccagtcctagggacctctaaaccattactaaaatttaaagaatgtttaaaacgagaaagagaattaaccgaaactttagtttccataagaaacaatacatgaggagcttgctctttaaccagcaagcgaagacgacggaatgcacttggattccccaaaccacgtgcattccaactgattattttcatggcgaaccgcgggattgctgagcaatcaccgctggcttgtcttgaacatcagcagaatctgaagtggtggaaacggactgatgcagagtgatttcatctgacaaagaagaagtcacttcagtttggtgagcacgacaccttttaagtgtttgcctcatggagttagtatcaaattgcctcttgaaagtacgattcggatgagaattctcttggccttgagatgttgttctcatagtatgcaaagcagcaggagcagtagtagacact

SEQ ID NO: 89444 - DNA, 684 bp, Cannabis sativa
  modified_base (89)..(89): a, c, t, g, unknown or other
gtgggacacgaggatagggttatggttgggtgtatggttgggtctaaggctgagcagccgtgagagcgagcagatggagattgtacatntcggggcggttaggcctagagcgtgcgatctttaggacatcagagcttattttgaatagtcgcttggagacaaacttttgtattattcacagtgaaacttttataaatattttgtaaaacgggatcctgatttattataagtataatattttaatatctattgttaattagataaaattttaattattcacggttgtcaataaacttgttgattagcaacgagctgcacagttaagtttaaaatcacgttaacatgcctaagatagttagggtgttacaattttgtatcagagctgctaggttgtcttccaaagatcatcacgacgtatacaatcatcatcaatgattagcttgtctcacggttcagtaagcttttattactttagtagtttatcttaatagtatgatttaagaaaagcctgataggaagcatgttagtagcctaatagctgaataggcgcatgttttaaatttccaaaataagcggcaattagtaagttttatttgatcacaatttgactagactagctcttggttacgcaggttgttctagtagtatggatgccaagtgaacaccaagagtcagggtaactcg

SEQ ID NO: 89445 - DNA, 769 bp, Cannabis sativa
  modified_base (725)..(726): a, c, t, g, unknown or other
tattttgatcacgctaggcctttgagatgaaggatcattgagagataagcccaaagcgccggctcgaattgtattttactgttgttttataaaaacacaggattttaaaaaaaaaaaaattcgtgtgacaatatttttataaaaattaatctaattttcaatatttttataagttttccaaattaaaaggtataaataacacgacgaaattataaaaattcatttttttatggcataaataattaattctttgggagtattggctttttgggtttttacattagagcttttttatactatatttttgtaaagaaataaaataaaaatctatattttaagcttttcctttactaatttaaaaaaaaaaaaaaattgtagaaatacatctcattctctttctctctctttctcgttatctctctcagttctactttgtaaatcccaagtttttgtctaacatatctatttggattgattttatcttgatttatgcttgaatataaaaaatgaaatcaaagattcaacaccagaaatttacaattttcacctaccccaaaaactcattttaagcaactagtgcttgggttccccgaactagggtaataactttcactatattcaaagatgtatcttacaaataccaaccgtaaataatattgtaaacaatacatgtactttttttacaaaatacagtactgaatctatacccaaaccaaccaagaccnntgattggagacacaagatccccttgtgtgaatgatgagctctc

SEQ ID NO: 89446 - DNA, 660 bp, Cannabis sativa
tttacaaacttgagtactagagtacactcaagttaaaacacaacctagatgtcatgcatattgagaagaatgtgtgtggcagcctcctcgacaccatcttggataatgaaaattctaaagatactgataatgctagatatgatctcaagaagatgggtattagggagtgctgtggatttatgaagatgagaataaaagattaatgaagtcgcatgctcctacgtgctgggtgctgaagaaaagcaacaattttattaatttataaaagaagcaaaactcccagttgacttttgttctaacttgaagaagaaggtaagcgagaatgacaacaatatatatgggttgaagtcccatgactgtcatacaataaacaattactttcacttggtgtttgcagattaataccaaaaaatataggagatttcataacggagctatgccatttctttagagaattatgttcaaggataataaatgtaaaagatacggaaaaagcgaaaaaaaactcatctcaatattgtaaacgatagaattaattttttccccagcttttttcgacattatgatttatttggtgttacatttgccatgtgagtctataatgggtggactggtatttatgaggtggatgtaccctttctagaggtacatgacaaaatt

SEQ ID NO: 89447 - DNA, 672 bp, Cannabis sativa
ctcttcgaattgtcctgaatgtcacattttttatcatgaaagaaaaaggaataagcagcagtatctgttagtgtggaaacagacaacaaattatgttgaaatgcaggaacataaaggacattatgcagaggcaaattaggaaaaatgttaacatcaccaataccttcaactttgatactaccaccatgggataacctgacatgagtaatagaattatcaacatgaaggttatgaaacaattttctgtcacaacagacatggtgcgtagcaccggtatcaataatccatctagttttagaaaggaaagaattctcaccagagaaatgagagacgagtggagtttcctgctttggtgctgaatggagctctgaagttctttgagacagtaaggccattagcttttgacactgcataacactcaagcttgacaccagatcttgatctccttgcatagcatctccactgttactttcatttcctccagaattaccttcaacattggcagcagatggcttaacattgcaatttccagtcgattcagcattccgatttggaaactttccatacaatttgtggccagggggatacccgtgcaatctataacccttcgacatgacgtgaccagcaacaccacaatggtgacacactgttttaggcttgaaaggctgaaca

SEQ ID NO: 89448 - DNA, 687 bp, Cannabis sativa
tgaaaattgtaaaattttacatatcacatatatattacatctagaattcaaatatatctccgtaattgtgaaattattttcttaaggtctatttctaccaataagctctaatttctataaagaagcatttaatcataatattaattaaatccttaattattttctaatttccatgatttaactatacggtcattacaattatcccctagttaaaagaatttcgtcctcaaaatcacatctagaatacaccggacactgactccccatggtgttttttgaccttactaattctctaggtaccttgatcaatataatgatttggcatgtctctcttatcaataatttcaacttatttatactcataatatacgtctgacttaagttctagggtttcatgaaattttaggatatgtgttaagtttcttaacatacaacatggaaactttatgtgtactgaaaatgctattcccatggctggatatgaaattattaatctaatttttcgtgagaagctctaaaagtcataggaacctagggcataccttacccttgtcaccaaagtttttcataccttaatacatagaaagacaagtttccctgacttgggatttgggtgtttctgagcttcaaatctacatatcttttactgtttgttttgagaagcaagcacccttgacataatcttct

SEQ ID NO: 89449 - DNA, 1031 bp, Cannabis sativa
tctttttcttgatttgttgatttaactcaaaagttcttaaagaacccatgagttcttcaaccttcattttgccaaaatcttttgcatcctccatagcaagtaatttcatgtcaaatttgtcaagaagcacaagaataattttctaaactaacatagatttatctaatttttttctcaaggcaaaaatctcattagagatatcaaataatctttcacaaaattcagataaagtttcaatttttgacattctcaattcatcaaatctagtttgtaacatggtaaaacatgatctttttacatcagcggtaccctcaaactgagtttgaagaatttcccacgtgtccattgtagattcacaagatgaaattaatttaataaagccttcaccaacactattaaaaatagcatgtaaagccttattgttataactagataattttttatcttcagtagtctaattaagttcatgttttaccttagtataccttcatcgtcattttcagtaagtcgtgaccaacctataagtatagctctctaagccttctcatcttgtgacttaatgaatgctctcattctgaccttctaatatggataatttgaatcattcaacagaggtggtcgagtaatggaggttccttctacgaacaatgacatctcacacaaaacaaattatacagaataaaataatctcaagatctcactaagagtttggcgacttgctctgatactaattgatattttgtatttaatattacaagtttattatttaattaaattctcaattaaatgcagaataataaaactagtacagaaatagttttgttttttgtagctacagaagttaatcctataattccataataaactagaaaaacaaatagtgcataaaagtaaaaacacacaaggtttttgtacgtggtttcaataatccttccagattgttactaatccacggggccacgctcagagataaaatttattagatatatcttaaacatacaaagtaattgacttatgcataaatagactcc

SEQ ID NO: 89450 - DNA, 1331 bp, Cannabis sativa
gagctaaaagaccaattggctagatgcggagcagcccttaacaattggaataagtcacgcaagaaggaaatgactatgaggataaaggaatttgaagataagattgccaccttatctaaacaagcagataataagggttggagtcaattgaaggatttggagcggacttacaatgtgtacttggacaaagaggagaaattttggaaacaaagaagtcgagctttatggttaaaggaaggggactgaaatacaaagtttttccacaggaaagcaaattcaaggaagaagaagaattcgattacgggattgctagatcaaaatgctcgttgggtatccgaaaatagaatggtgggacgggtggcttgcaaatacttccaacaattgttcactgcccaacctgcttctgaagctgaattaaaggagtttcaaaaagcattgtgccgaacaaaatctcccgggaaaccaatgagtaccttactgctccttttacaaaggacgaggtattacaagctatgagagctattcatcctcacaaagccccaggcaatgatggcatgccgggtctattttatagaaagttttggccgatcattggagaagaggtcaatacagcatgtttgggaattcttaatgaggggaagagtgttgaagatattaatgacaccctcatatgtcttatcccgaaactcccaaagcctacccagatgtcagaatttcgacccattagtttatgcaatgtggtctataagatagtggcgaagtgtttagcgggtcgtatgaaacatagtcttcatcaagccatctccgaggttcaaagcgcgtttgtaggtggaaggctaatccaagacaatgctatcatcgggtatgaaagcctccattgtatgaagacgagaagatttggtaatgggaagaaaatggctttaaagttagacatgtccaaagcatatgatcgggttgagtggagctttcttatgactatgatgcgagggttgggatatgatgatgtttggattgagaaaatcatgaggtgtgtaactagtgtctccttttcggttttgatcaatgggaaagatttggaaacttccatccatcccggggtcttcgccaaggtgattctttatccccatacctcttccttatttgctcggagggcctttcatgcctaatacaagaggccgagagggctggagaaataactggggttcggtttggtaagaataatgttaaagtgtctcatcttttctttgcggacaatagttttgtattctttgaagggaaggggaaagaatgtgtgactatgacacaaatattccagcagtatacaaggttat

SEQ ID NO: 89451 - DNA, 1093 bp, Cannabis sativa
ttttttgtagcagtgagtactacattaaatttttaattattagtatatttatttggttttactgtttttttttacttttgttaataatttttaatcatagggttttctaagtagtgaatcaaaactaataataaaatttaattaaaattagttgagagcgtggcattgaactatgttttacttattatatttattcatatatgtatggacaatatataaatattagttttttttcctaaatatattaatgttagtttgatatattattttaaatataataaaaatataatatgttcacatttttattaaaatataattgtcgtttctcttctgcgtcagtgaatccttcgaggcggcgtcttctccgttgtggttactcgttggtcggcgttgatttcttgggtgtatgtcttgtctgttgtgacatggtgtgtgtgtctttttttttgtgtttgatgttgtgttttgggttgaattttgtgtctaattttttgcaagtatctggttgttcttgtgttgttgttctcttagggttgcttggcgtttgaatcttgtttgcttgggtgtgtgagttttctttgggttgttcctggtgcattttcttggtgtttatatctggtttctagtgcgttttcttgggggtagaagctggttgcttgggtgtgtgagtttgattcgtgtttgctcggggtgcgtctgcgtttctgagttgttggtgggtctgtggtgttgggttggggtgtggctgggtgtttcttgtgttcttggggtctgtggtgttgggttggggtgcggctgggtgtttcttgtgttcctggggtctgtggtgttgggttggggtgtgattgggttttttattgtgttcatggggtccggttgaagtcaggtgggtaagggctctatttggtgtggtccaagctgggttgtggaaggaagatatattgggtggggctttatttttattggtgtgggtattagagtgtcggggcaggcacatataaagtgtcatggcttctagtagtacattgtatcaggaggtggaagaacaatatgcgaatatttcacttgagggagaggatgatggggagttggg

SEQ ID NO: 89452 - DNA, 868 bp, Cannabis sativa
cacctgttttgcattccagaattgctcattctgagctctccataagcaataaaccagagcagccataccagctgctagaacttgctttttgaagcttgaacagcttgcttttcaaacttatttcagcaaaccagtgagggcaacagttgttgtgtgccaccccaaccaatccttcacctgcttaagacattctgcagcaaaatagcagtcaaagaagagatgttttgttgattctgcaacataattgcaaaaaatacattcatcaccatcaatgtgaccatgtttgagaagcctatccctggttttgagtctgtttagcataactaaccataataggaagctatgctttggaatattcaatcttgaccaaacttcattggaccaagaaaccttctcccaattcaaattaaaccagactaacccctctgctattttatatttagtggcagagaaggtgttatgctgcacacagtctttaattctttctttgagatccaccatttttctccaataccaacttccactcataggagccttgtattcccaccaagcttgttgttttatgtacacactgtgtacccatttcacccacaaattatccttctttttttcaattgcccatacatgtttaaccatagccgcaacattccaattagggatactcaccagccctaaacctcctgatttttttggacagcataacttctcccatgcaactaccccagccccattcatgattctcttacctgtccacaaaaagcttctacaaactgcttcaatcttaatagtctgtttaggaatgaacatgatttgacaccagtaaatattaccaggaacttagatctacttacaagtatgttgatttaac

SEQ ID NO: 89453 - DNA, 872 bp, Cannabis sativa
tacactgtgtaattaccaccctagtaattatcctacctagtaattacacagttacttccaaacacacccttatacttgtaaagttttagcatcaataaaagtttacttaccaaacaaaaagagttacaaatttgttactctttctataaatatattacatttgatcatattaaactacacattataatttaatggtcacattttaatttaaaataaatattattttaagtcttattctattaattagattttatattttgttaaatgataaatcattcactttttgaaaatagtacaaacagtattttaagttcattaattttcgtcaattttttttaacataattaatttgaatctaatacaaacatatgcaaaatatgtgactaatttggccacaatcaatcacggtacatgttattttacataatttgaaaaatatactgtttaaattattatttaacaaaacaaagaatataattaaaaattttcgaaaagaaaacaaaaacagaagtagtaatggcgatttctagaactctcaagaggtatgtttctcttcctccgtctggtacccacgttgggtttctagtccaccctccacggtggtgtggtggcaatcgggttcggattcctctttctttccttcatcatttctctgctcagagcattaattgtgaaattaatgtctctgatgtttattatctctcaaagatcccttctgctgaaactgtccaatgcaataaatgcaaacttctcttcccccaagaccttaagcctcttttgtcaaccccttatttatcactaatcctcatttatttacaccatcaaatcaattatctacctgaagatatgttttctctaatagaagaggcggc

SEQ ID NO: 89454 - DNA, 512 bp, Cannabis sativa
gttcagggagaatttttaacggacaaaaaagttcaggagcacgatttagtacatgttaaagttctggggaaaaattactaattagcctatattttaagcacaatacttgttctaattaaaattaagacaacttgcatttaaatattatttgttataactaaaatttacatttagttaaaaaaaattatgttgtgattaaaatattatcactaataacttaagtttttaaggtatattttgattttaagtcaatcaaatttccccaaattgcggagcatagaactgattggttttttttttttttttttaaaaaaaaaagaaattaaaaggtgcaaaacgacaaatgcctatttctttatattttaatatttaaattagattcgaatatatatgaggtaatgcaattaatattaaattggactagtgacatgctcattaatacatagtagatatgtatatattataattaatttgagcctaccaaccaaattctaaaaaagttaaaaaaaaaa

SEQ ID NO: 89455 - DNA, 703 bp, Cannabis sativa
tattaataagtaaatctaattattttgaaatgggtattatttagggcacaaaacccaacactctcttgtcacggtttccccgtattgggggaggctttctgaagaccacgttcttttcttcgattgcgtagatatggtctcgtgggactactaattctgtgtagtttacaaaacgtggacccccttcctcttaggagatgactctttctttggaggggacttggaaaactttggacttcgctgtctttgggaactgcgtcttctagggcttctccctctgggactgcgggatcgtgatcgcggtactggagactcacgtttatcctttcctttctctagctcggccagagaattttcaatccttttatgcggttctgccatagcgaaaaactcgaccaacaattcgggcctttgagcctgcagctccttccaaaagtcggttctttgcaggacacctattattaacatgcaaaccaacgaagactcggggttcttctctacttttgctacttcagcattaaaaagtttaaagtaatcttgtagagactcaccgacctcttgtttaatattagccagagtggtatagggtggcctatacgtcattgttgtctggaagtgtgtgggaaaaaggtcgacaaaggtctcccatgtcgatattgatacttcaggcaattggctgaaccaatcatgagcattatcctcc

SEQ ID NO: 89456 - DNA, 513 bp, Cannabis sativa
ttagaaaatacatggttcattttgatatttaacaaaatagagggtccaatctgtaacttttacaaaatacaaggtccaaaataatatttatccttaaagaattaaactaatattttccaatttagaaggcatctccctcaatcataagatgtcttaagttgactaacttctccatgttctaaagtaatcttgtcaaaagattaagatatctcaaattgtttcaattcacacaacttcttcttcaacataaaacttattcactaaaacacaaacccattaaattgatgatacgacaacttcaaccgaaggtagtaatgtcaaggtataggggttatggaggttccatctccataacccgtataccttgacaagatttacatcgttaactacttcataacttatctttacaaacaaaattgtccaaaataggagacataaccacccagcaaatggaaatataatgcacaaaagcaaaattgctgctacacttccaaacaacaccctcatttttct

SEQ ID NO: 89457 - DNA, 670 bp, Cannabis sativa
ttttgatacttctaaggcttctgaacttaaggataaggtctccaaccccattttgaccatttcagattcaatggtcgcatcggatttggcagctcatgaaggcaacatccaaggttaattgtcaacctaagcattgggcccagccctaggtcaacttgggcgatgggccctatttttagggactcaggtttgttattttcttctcgagtagtttacttgaatctaattcattatttctgatgacgaaaaaaattcccataacactttttatttataataatattattatttaattttttaattttttataatatttttaaaatcaatatttcctggaccactaaaaatttgccacgtgtacaagtatgtacacgtggataatccaccgtgacacttaactgtgatttttggacgaagggatatagagcaaaacataatgggagtttaggtagttttgcccctaaaaaatcaatttttgtggttaagtgttaaaaaatttaaagttcaggtagtttagtcgccaatatcccttaatttaattagtaaagatctattaacaagttaattgtggttaatttggacccttgggtccattaacaagttaaccataattaatttaaattttaccaattaattaatcaattgatacaaaacaaatatgtaacaacct

SEQ ID NO: 89458 - DNA, 544 bp, Cannabis sativa
caatttagtctctttatttgactagtggtcctatatgagtataattactaaaaaaaaattgagtagcatttcattttaaacattaactatactgtggaagctcgagtcctaattgtatgattaagcttgatattaggaagaatgggattctattgaagaggttctccaagcttttgactttttatggaaatttatatagctagtgatgatgtacataaagaccccgaggtacaacctaatgattaatggtaaactctatggtttttttgaagtaaaaaggggacttcgccaggaaaatccaatgtctccacttatctttattcttggtatggaatacttatcgaggatcatggataaagtgggaaggaaaaagaaatttaagtttcatggaagatgcaagggactcaagctcaaccacttatgctttgcagatgatgtactgcttttttgttatggagatttcaagtcaatttatttaatgcttcaagggctaaaactattttcgcggaaacctcaggtctgaaacctagtgttgagaaatctt

SEQ ID NO: 89459 - DNA, 613 bp, Cannabis sativa
ttcttgggaatgaaaaggagagagtatgaaggttttacctatatgttggatgttgaggcccgaaccatcacccatatgtatttgttggtcaccagtgtagtcagtggagaatgtcaaattttgagcattgggggtaatgtgatgagtggctcccgagtcaggaaaccagttattatcttgaacaacttctagtgtggcatacaagtgagaacactcagcaagattggcactgccaggaaagccttgaaatgtttctggaccaagaaacgatttatcaaatcggtagaaacatttgtggatagtatggccaagtttgtggcataattggcattgaagcttttgaccccaagccgaatattgtcctcgaccttgagtagaacctcctctttatgatgatgtttgaccacggccagtgtaggaacctctagactgagacacgtgagaaccaaaaccaggaggaggatttgtagcatagtaatgacctctggacactgcagcatgaggagtagaagtattagtaggataatagggtgaggaaaaggtacatttatttcctgaaaagggctttgtgtgggacaagtttgcttcaactttagctatgtcaagctctgtg

SEQ ID NO: 89460 - DNA, 1210 bp, Cannabis sativa
aatgggagaaaatacagattttttgcttatagtatagggcacggtttaaaaccgtcgcctataccctgttataggtgatggttttaaactgccgggaagtccacattagcgacggtttttaaccgtcgcctatttcacccgttttgcgacggttgtataggcgacggtgatagacactgacgggaatactttaaacgactgtttaaaaacgttgagaaaaactatttttgtagtagtgctttactgtcccgaagatcgaacatccagatttaactgtctcgttatatacaaccttcatctagtccgggttcactgttgtttagccttcatctagttggtaatgtttttagattataattttatacattgtgttttttttttaattatattgttgatgaaattattttttttctgctgcttttaatgaaataattaatttcttttaatgttgatgaaactaggttttaaactttgtatgatttttagattatatttttttgcattgtatttttttcattacgttattgaggaaactgagtttgtttttgcctcttataatgaacatttagtgtcttttaatgtagttgaaactagtttttaaagttgatattatttttagattataatttattgcattgtattttttttttttcattatgttgctgatgaaacttgttttattttttgttcaatttatattatttaagagtctagaaactgattttcttaacttgactaattatgtttgttgttatggttattatattatttgaggtttatttttgattttgtatttattattttttactgattccaattagcaatcaattagctaaagcttggtaagaaatccaaactaaaagatttatgtaatttaatatagacagtaacaaacaactcaaatagaaaaacccgaaagtaattatgaaaaaaaaaattagatgtcatccatctcaaccaactaaactataaatataaagcctaataatttttcttttatttttttattttgggcacttgggcctagcccacctatgcctagagccagtcctgtataaatacattaacgtataaaatctaaaataaaactagttctatataatatatggaagaggttttaatgggtacatttttattgtaaccattatggttaaatttttttaagccattggattactattaaatggttgtaattaatttagaaattaaa

SEQ ID NO: 89461 - DNA, 834 bp, Cannabis sativa
aggtgtggttctggacaccacattaccacaatttcttgaaggtatctagggggcacacacgggtgacaggagcacctttacttggccacaagtagtttagattactacgtcggttttccagagtgattcttaccatattggaaggaccaaggttacatatactctgccttgaacgtaacctctaaaaagcattgggtggctatggaggtagacattaagttgtggcagattcgggtttatgataatgacatctcttgttgggacaataaggacttagagacattatgacacctggaagcagctttttacacatctcttgtattcaactggttatttctcgctcaacaatgatattctcaatcacacacttggggatagtatccaattgaatttaatgcatgtgaaacgcatgccaagtgaggttgttcctcaaagtaagaataggtaactaccatataactatcttaatttaccatactaatgtattgtcgtagcctattttgctaaaattgttctttatgtttttgtagtggtgattgtggaatgtacaccgttgaatacatcaaacacttgatgatgaaccaatcattagagcaacttaaggatgaccaaatgtcggtgtagagagaacagtggggtgtggacctgttttaccaaaacctcacttggtgattaaagtacaaaagtaggggcttatcattaagtttttttatattttattggtttttctataagtatttacatacatatctccaattgtcgaaaacaatgttgctatatatatttgtatgttggtaaatatttaatttgtacttaactttaaagaaatgtgtt

SEQ ID NO: 89462 - DNA, 1360 bp, Cannabis sativa
  modified_base (1044)..(1070): a, c, t, g, unknown or other
  modified_base (1099)..(1099): a, c, t, g, unknown or other
aaagagagagaattaaaggagagaactaataaatgctatttagagtgattttagattgtcacgtcaccgtctcatttctctcctttatatatatgctagttaacaatttacacttcactgcggatgttttaagaaaattaacattactgattttcatataattttttttgtataatatgagaagttaggtgtacaaacaggtcaacttgacatgtattacaaaatctctttcttataatggaagcctgatatggtttatataacactcttccgtatatctcgatcattcaaaattgttctcatcattgtatatcacctgttgtcatcactgtatctcactaactcgctatcattttggcttaccaaaaaaaagttaaaaaagtggtaatagatttggacttattattttttaaaacaataaaattaaaaaatgaaaaattaaggaaaaaataaatagaggtatatattttaggaaagttatcccatatacccatataccatttttccattttttttttttttttcaaatttatgattttggttgcttcgatagtttttccagtgggttgctatgtgtattttggttgcgatttaagttattccgttagttgctatgagagtttctatatggaattatgtagtgtaaaaaataaaaaataaaaagttcctagattttatatgaattaatatttataaagcgaataaaaaattaaaaaaataaaagaattaaggagagaacaaataatactaattaaaaagattttagagtgtcatgtcaacgtcttatatttttcctttatatatatatatatagatagataagtgtattggtttaaatatttataaatataattaaaaattaaaaaaattgagagaataaaggagagaagagagaaataattttgctacgattttagagcgttatgtcaccgcctcatatagatatatagatatattgatgattgataataataataatgcacgattttagagcgtcatgtcatcgcctcatacaaatatattgattaataataataataatannnnnnnnnnnnnnnnnnnnnnnnnnnataataataataataataacgtgtgatantacattaaatatgtagttttttttaaaaaaaaaaatagtttatggtagatattttggtagaaaatttattaagataatagtaaaatatcatttgtagatttatattttaataaaatattaaaaatgagagaattaaggaaaaaaaaataaaatatagctttggagagaatggaagagaaagaagagagagagagagagttggagggagggacttttcaaatgggaggggtaattttgagtttaggaaaattgttagaattt

SEQ ID NO: 89463 - DNA, 754 bp, Cannabis sativa
taccttgaacctattgtctgtaataattttgtttctccacgccgttttcgatttgaaaacacatggttgaaagagcctctctgtatggaaattgtgagagattgctgggaaagtaatgaggtgaattgttttgctgaaaaattgtccctttgtgccgagaagcttagtagttggggaaaagaaataacagggactctaaatcatcgtataaagagttacaaagctcagttaaaatctctgcataataaaagagatagtgcctcagttcagcagtataaggaagtgaaagatcaactctttagagccatcgatcagagagagtgttactggaagcagagatctaaacaattctggcttcgggagggggatcagaacagtagttactttcacaaagcggctaccataaggaaacagaacaacagaattagtgctttgaaggatgctaatggacattgggtaacatgggaaacgggtttggctcaagtggtggataattattttcatggtttatttacttcggctaacacttcttgtaatgagataattgattgtgtttcgaacattgttccggattggatgaatatggaatttggccaaccgatacaagaggaagaagtgaaaaaagctctatttcagatgcacccagacaagagtcccggtcctgatgggatgacccctgctttctatcaaagatgctggccgattgtcaaggaagatgtggttcagtatgttcgtcaattttttgaaaatggtg

SEQ ID NO: 89464 - DNA, 923 bp, Cannabis sativa
  modified_base (29)..(30): a, c, t, g, unknown or other
gtcataccttctgagatgatctcatgtgnnattttctgaagctcgtgagattgggctttcacagatttgtcgtccaccatttgatacttgaggtagtgactaacatcatactttttattttcagctttttcagtatcatatttcttttacagagcatcccatatttcgtttgccaatttatctaaattataatagtcatacagatcgttagataaaccgttaagaataaaattcttacagagaaaataattttcgacccaggagtccaaatattttttttgcttctcgcattcagcctctttgtccttgtcggtagaagctttagagacgacatgctttagagcagaaagaacgaaagcaactttcttcatcatcaagtagaacaacatcttttgtttccatcgcttaaagtgtaatccctcaaaacggaaaggcttggtaatatcgttagaagcagaataaaaaaaattcatcggtagcaaccatagtagaactaaatgtattaaaattgttataccaaatttaaaataataaaactggaacaaattaccgatagaaaattttggttgagtcacggacaatgtcgctttctgtaagacattttgcggttctgcccgaagtgtgcacgacagtctagtaaccacggcgtcctcaggataaaacaacctctgtatacgatatgctctgcaccaaactatatcgctcaattacaccctaatttttttgctctgagaaaaatcataaggaagaaagaaaaaaaaattatgttgaaaaagatatgttcttccgttgttctgatacgacttatatagggaagtcgatccaagaataaacggtaagaaaatagtaatattatcgtggatgagttggaataggactgaacatcaggcgggttgaccgagttttaggtttgtgggtttcgg

SEQ ID NO: 89465 - DNA, 668 bp, Cannabis sativa
tgccgtgtggcagtaaaattgaaaagtattaccccaaatccagtatttttgtaaaatgccctaatattttggtaaaaacctttttagctgaatttttgtaagaataaattcttcctttttatcataaagggtgtaagaaaacctatgatattattaaaagtgtattaattaaaattgtggtcaaatcctttttttaaaaaaaaaaatcaactctttatatcccttttcattcaaacccttcaacttatttttgtaagaaaacctttgataattttttcttttttgaaagggagaaaacctttgataattgatatttgtaatcatattaattcaaattatgggcaaatgtccatttcaaatgtccaatatgtttacaaactaatgaaactactttgcatgtcttgtggttgtggctttgtccttctcttaagtcaattcgatataagtggtgccttcggggttggatagattgaaatcggcttctaatttttatgaacttttggttggggaaatggatatttttttcaaaaaaaaaaagttgaagaatttcttgttctttgttaaagaatctatatataaatataaaggaatgcacaaagcattctaggtggcatcttatatgaagtttttttctaattctttgctatctccatttttcacttttattt

SEQ ID NO: 89466 - DNA, 808 bp, Cannabis sativa
caacagccacagccacaaaatcatcaagcatgcaaaaatatacatttcttaaacttcaagaaaacaaagaggaggttgttcaaagattacctcaactggaattacactaagaattgttcaaaacttgctgaattgaagagcaaaatcaaaccctagcagcccctaggattttcgagagagagaaagagatcttgagagaggaaaaatgtgatttttctcaacttttctaatttttgaataaaatgaaataaaaatgagttcccttattttgtttcagccaaaccaagttagaaaaaatcaaattactaacataattaaaaatcgaaaagagacaaattacaaatgggcaaaatgacctttttgccctctcacactaaggtgacataaaaagggtaataagggtattttgggcaattctaaattctcgattaatcccgacattcccaatgtctaaccaaactgccccgctatatcaaaatataaaaatgtgattctactgtctcatcccagtggatgggagatctacactttctaccatacaacagttcatagggagccatccttatcgtactctgataactgttattgtatgaaaattccattcacggtagatacttactccaagatccttcaaaatctataacacaggctcgtaacatatcttttagtatctaaattgtccttttagactgcccatttgtctgacgagggaatgttgtactaaattttagtttcgtactgatggctcatcgcaagctctgccaaaatttggaggtgaacttcgaatctctatccgaaactatagact

SEQ ID NO: 89467 - DNA, 529 bp, Cannabis sativa
ttttggttattttaggaactttaagaataaaatgcatatgtactggagtggaagaggatggtagagagtgattacctatgtgagatatttggagtcttttgccatcacctacagcaagtgtgtcatgaccatgatagggaatttcatagtctagattttccattccagtggcaacatgcttgttggctcctgtgtcagcataccactcagcatcatgggcaaaatcctgaaccatgggagagctatagggagccacatcttcttcctcaatttctgtaagataagcatgagaatcaccagacttgggaggaatgaatgtcttgtcaaacctatagtggcaaacggcagcagtatgcccaatcttgaagcagacttgacataggagtcgagagggggccattcctcgaccaaagtatctgccagaagggcgattagagtgagaaaagccatgtacacggtttggatttgttgcagatcgagaattaggcaaaccagaagcaaattctggggagctggtggtgagatttgc

SEQ ID NO: 89468 - DNA, 510 bp, Cannabis sativa
ctcttcaggcggggatcacaactaacctatccacagctggaggtgagttatgggatgacctacagggtcgcctagtgaggaacattaatgaatttaatgaaagagcgcaagtttttgtgcccaaataagaagtcagaaacgagatgaagttattgaagactggctcaggaaataaacctagcacaagtactgcaacagcaagtacaatctcaactaaggaggataatcctagtagttcaaataccaaaagaaaatatgtttcgagagaatcatctaaaaataaaaagaaacagaaaaagcatgacaagattgtctcaatttattcaatatagaccgagttgaatgaaactcgtgaaaatatatttcttgtaaatgaaataggattgcattttgcaagtctgagcccatgcgacatgcgacacataagtgagactcaacaaaatattgctcatttcacaaagacatagggcatactactaaagaatgtcgacaactaaaagacgagataga

SEQ ID NO: 89469 - DNA, 971 bp, Cannabis sativa
aaaatgacaaaacaaccaaccataactattacaatcataattaacaaacaaccacaccataataatatggggccaataaaaatttgaaaatcccccaaatttgaacatggacaaagatagtttgttagtgattttaattattataatgtaagataaattaaaatatattataactcaattgtaaaataatacaaggactaaaaagaagcgcgaagtatgttagatctccaatccaaataaacatgtgacaaattacacccatcaatgactattagctaaatattttccaataaaaattgagaaataatagtcctattatttattttaaaataaaaagaaatagcaaaacgaccaagaataatcctaattaacaaataatcataccataaattatggggccaataaaaatttaacaattatcgagatttgtacatggacaagaatagtttgttagaaattttattactataaaaataaattaagatatattacaacttaattgtagaataatacaaggattaaaaagatatgtatatataagatccggatgtatatgtatttgatctaacaattcaagacagttgaattaagtattaatagataaaagaataatttaataaaccaaataaaaattgaggggcatttaacaagatgtgtaatcggttggacatttattattccttaaataatattagctttttattggatttcgcacgctgaagtgactttgaactgaactagggaggaggttattgcgctgaagatggatcaaaacatttagagttctagaaagagaaaaaaagaagaagctctcttatcgctaaaactttctctcattgtcatagctaataactctgaacgtcgtgaaaatttagttcaggtatggcagctcctatctcgcaccattaaaacaaaactttaaaaaatattgttatttttaaatttttttggagatatataattaaaattta

SEQ ID NO: 89470 - DNA, 825 bp, Cannabis sativa
  modified_base (393)..(402): a, c, t, g, unknown or other
ggtcgcgtctcttgaagcgagaagtgtcgacattttttcctatataaggggtcacccatggcctaggaaagggatctgcaattttgagcacttggagaaaaaaaaaacacttttttattttttgcattcaagagcttgtttttgacttttgcaactctgattaataaaacacaagtggagtaggctattaccgacatctggggccgaagctctttaaattttaatgtccttctttatatttattccaaattccaatgtcattaattacatttattgttacgattttggtttaaatctcatttattacgactcctcgtcggttgactaataattcagacaacagtgtgcattatagaatcaccctaaaatatattttaaatattatggcaaaannnnnnnnnnaaaaaattatatgaaattttatttgaaaaaaaaattaaaaaattataaatggttttttaaaattgtgaaaataaaataaaactaactattgatattaaataaaaataatgtgaaaaaaaattcaaaaaaatattaaaagtattttttaaaaattaatttaagttaattattttataatattgaggtgcacttataactttataaggtgcaaataaaatttccttatttattttcttaacttcttaaagtttgaaatgttattatgacatgcatccatttttttaagtacagaaaagtaatttgattaatatacattaattaaataattttctaggatttacatgcaaatgaaaacactgagatatatataagtgctagataataatatgataactattcttatgattgttttgctcatactga

SEQ ID NO: 89471 - DNA, 560 bp, Cannabis sativa
attttactaacattaagtacttatactgctaaaaaaattattatatatatatcgtttataaactcaaaattttaaatactcatgatgcaaatattcattatttatatatcattcttggaacccattaatcaaaatgcctaatttagatgcaatatgatagcaactcgtgttaaattattactatgtgtttactgagaattttagaaattgattaagtgagagcttaagaaattaaataagtaaataagtaatggacattaagatttttacgtggttcaagtattaattaaacctagtccacgagtctatgtatttggccaaaaggctttgatgtattacaatgaggtcttacaagttaaagaaccctagattcttgttatagtgctccctcttaggttttccttagagaagaagaaattctaaagagagtatgaatcctttgtccccttttgcataagatgcttaccttttcagattttataagatgttttagaagtatctggacgaataaacactcagattattgtatagaaagctgtgtttatagcctctgcccacaa

SEQ ID NO: 89472 - DNA, 1881 bp, Cannabis sativa
acaccatccctagtgaatccacataaattcaccaggcaaggttttaacatcgcattttgcaatcccatcttcttcagtgtatccttgtaaaggatattcactgaacttcaccgacaccctttttattctcttgttagcgggctagattgtaatcacgagtgggtcgacgtgtgggtatctcacgtgctctgtttcttcttccaaaaacacaattggaggttcttcaattttggctttctttgatggttcttgagcgaaagctgacttctcgttcttgattttcttgacatacctcttttgggcattgctactttctccagcgagatgtggccctcccaagataaccaaaattttctctccttcaattggaagaggttgtaatatttggttgcttgggttattgggcagattaggctagttttgtccattaccttgtcgctttacatactgttgaaagtaaccacgcgagataaggctctctatctcgtctttcaattgacaaaattcattcgttgtacgccctatgtccctgtgaaatctacaaaattttgttacatctcgtttatgcctcgcttgtacctcatgggctcaggcttgcgaaatgcaaccctgtgctcatgtgcgaagatcatattttctcgagtttcattaagcttggtataaatagtgtaaattggcacatacttatcgtgcttcttctgttttttcttatctttggttgattccttagggtcatgttttctcttagtgctaaagcctcctgaattgttagccttcgtcgagacagtgcttgttgagacagtgctgggtttatttcccgagccagtctttatcaattttatctacttccttgcttcctcttttcgtacaaacacttgagctctttcattaaactcactgatgttttttactggcaaccttgtaagttatcccacagctcacctccagccgttgagaggtcaatcgtaatcctcgcttgaagagctgtaagctgtataatatcgtaagtttctaaccctagcagcagctgtactaaaacgacttaagtaggccttaagtgtctcgcccagttgctgctttatgttagtaaggaaagacgctttagttcgcctgtcttttgccgcttgatgggtgaatttattgaaccagctgctcgctgccccaaaggtggagaataaaatacaacgtaagttatttgggacattgctggcttgcataatggtattaaaattgttaaggtgagtgatcggatctgtagtcccatagtatgacaagacgtgagggtttttaaatccttggggaaatttagcactcataatgactggatggaaaggttcaagatcctcatctgattcgtaatcaggcagtttcccatcttaatatttcttgaatttgttttctcactcactgatttgcaattggattggatcctcttgcttttggttgaaattgcgttgtttgcgtaaatcaggcttcctccgattcaattattcacgaagatctggccgtcttcgatcatagttatttgttgaccttgtatctgagtaactctcagattgatggctcctagttgtgctcatacttgatcattactgcggtgagtcctatcccctcccctcgcttagattgactgtgatcttaagatcttgtatgtcccgagctagaacttgtctcgtcacgcacaggtcttcttctttgggaaaggttagatacatgcccccgctggggtgtgtatatgcctctcccttatcagtgtgagaagaacgctgactgtgcctcggttgtaacctacttgtcctaggttgagtcccaggatttctctcgttaccacaagggatttcctataccctagttctgggttgtcttctgttctcgtttcta

SEQ ID NO: 89473 - DNA, 883 bp, Cannabis sativa
tgtacatacatatatatatataggtacacatatatatacatacacacacatataaatacatttacatatattttagcacacatatatatatatatatattaatacactttactaataggtattttaagtaaattcacaacttggtatacttacaaataaattgtagaacaattttattcaatagtgtatgaacaagtaaaccaaagttatagattggttgaagaatatagaattattaatttttttttttattaacatattataaaaacacactaatctttaaatataacgaggagtgaattttttcaagcaacaagtaaagaaacaccataaacctatttaccaaaaaaaaaatatatatataaaaaataataattataattttacactattatacgtatatttatacaaacttgtttataaaaaaaatcaaatataaaaataataattataattctacactaatatacgtatatatacatttatatatatacatacacataaatatacacatacatatacatatatacatacaatatatatacatacacatatattaaatacatatatatatatatcaatacacttatatatattttagtacacatatatatacacataaatataaatatacatacatacacatatatatacaaacatacatatttatatacatacacttatacatattgttgcccctgattttgtccaatatacgtggaccaaccagacaaggacacgtggatcaagcaacttataattcaaaatatttgctatctttatgctattaggcagcgtccgggacgtagctcccggagaaggcatatggaacctcatatgctcccggaagctcgagtaacgctaaagcatctccgcggggtgt

SEQ ID NO: 89474 - DNA, 658 bp, Cannabis sativa
ctttaccaacaaagtagaaaccttgctgagactgcagtcaaggaaaaacataatgatgttgtcaagtaatgtatctcaaatatacacaattgaattatatggcaaacaaatatagaagcagttaatatcactaccgaagtcaatttccgatagtctacagacgaaccaatttgatggacaatgcatctttcctgcaacaaaatagttttccaaattattgaatgaataataaaagcatggaaaagatgcatacacaagtacgggagtagaagagtatcgctaaaaattgctgctaacaatttgacacgaatgtaaaacaactaacacatttctcttttctaacctaagctgcaccaaaagttaaaggctgattaaacatatacacagctcaccaatctacagtcacttacacaccttcagagtggaaataaatggtaggaaaagatctcgttgtaatccaccttcgtacaggttgtctggagcacgatttgatgtggcaacaagaatctaaaattccacaaacatacagaaaactaaataaataaacatttatgatgaaaaataattttcattaataaagaaaattggaattcatttttccttacttatccagataaaaaatgtgctcaaaacggcttaaagattcctgccatctaat

SEQ ID NO: 89475 - DNA, 1097 bp, Cannabis sativa
cgaggctacggcggggggaaaatttgggcagttttgaattttttatcttttttttttttaaaaggagatatctttttttagtgagatattttctaacactataaataggacataataggctacgaatttgagaacccaaaaagctacttgagattgaaacttagagagagagcaaagaagagacgaaggtcgtgggtttgaagtgttcttcatcatagttgttttcttcttcttaaactcttaccatttattatgattttcattataatgtctagtttggagtagtttctttttagttaagggttatttcaaaacccgacacatgaaattttaatctcattattgaatgttttttttttgaaactattattgaaagttaatttctagtttctattatattaaattgtttctattcttctatgttcaacgttaggatatttttagcctaagtttgaggtcgattttagagttgttttctttgttaatgttatcttttggaatggttttacgcttgatttctcttgttttagatcccgaggtattagagttcaaattctatcaattggtgaaaagacgggataaactgggggaaagtctattgaagctgacaattttgtttcagtagtcgtgactaccaaaatccatagtcgcaatgaattatgaggtggcaactatggtcacgactatgaagctaggcagaatgctcaatttttgaggtttgcctatggtcgcgactatgggctaaacacgattcggagatattagtcctaatttctatataaggtctcatgttttagaaacaaaatactgaaaaataaaaccctaaaactaaagaaggcggcaaaggaagtaattgtggcgacccggagcaagatcaccaactaattttttcttttcccttatttatttctttatgtcaatttctatttcaattattatcatggatttaattatgaactaaatttccaatttaggcatatatgaatgttagatgacatttcctcaatttagttaatgtaattattgatttttttctttcctatattgtgtgattttttttttttgacaaagtgattaaaatcactcatgaatttacg

SEQ ID NO: 89476 - DNA, 635 bp, Cannabis sativa
atttaatacaaaagtataaatgttagacacattatcgggcccccatcatcttttatcgaacataaaaattctattaaaaaactaaaatatgcaataacaatcggacccatcatcgggctaaccatcatcttaagtcggaccgagatacattttataaaaaaaatataaatacataaataatcgaactcactgttaacccttacatcgtcctctatcgaacctaggcatatgtggtttagcatcggccctatgtcagacctacatcgtcctttatcggacctttatctttaaactctattattttctcaaaaacacttgcatcagatctatatcgggtctatattagacatgcatcgggcctaagctaaaactcaaatttcttgcagtaacacagataagacccaaaacaaaccctaaatctaatcacctcacacatatcacagatcaggtattacaaaacaaaaacatatcctaaattaatgaacaattaaatcctaaaacaaacatatgtataaattttaaataagagtttcaaaacttacgttagacatctctatgtgtgattgtagtcggggttttcatagtgacagtggttctggctgcgagattgagttgagacagtggtcctggccgca

SEQ ID NO: 89477 - DNA, 664 bp, Cannabis sativa
tggtctatgttatttatactctacatattaatatactttgtattgtatgcatgcaatgcaaatgttacacattattttttattattatagttaaaactttggtgcaggcatatatatgatacgttaagtacatttttttaatcttaattaaaagaaggggttactaatttgtcaacaaattaacataaagtatactacgccggcagccggctccgctgggcgtacgagtaatgagataattaagatccacattaattcttaataaaaaatgtcttatgacctcgtctatatataataaataattgtatcatgacaactcaaataattaatatatataattaccaaatgcttttcctaaagtgacattaataatattttttctaccaaacctcctttatattttcatttttaattaaaattcatcatggctggttaacatcaaagctggatctatattatctataatgtcgtcctaattacatgtagatatattattaagtggtctcaatcctatgacattatataaacatgagaaattaattaatcaagtggcacccgtacccaaatattacaacagatgtatataattattggtgtacgaattccacacgttttgatttgataaataataggagaaactgctaatcactcacaaagccacata

SEQ ID NO: 89478 - DNA, 566 bp, Cannabis sativa
aatataattgatcatctgataggcctaaaaacattgaatgtgttttaatgaacacccctagatttcgctaagttaattcttaaaaaatcgcgtattcggtattttaaatacaatcaatcgaaagggttaatccaatccaaacaataaaaaaaggaaggatttcttttaagaaagggattaaagaaaacgaaattcaaagtagaagtaaaagaaaagaaattttatcatctatttgtagcattttaatttattcaaaacctttttctttatcttattttcattgcaaaatgttgtatttctcagcctacctttttttatttctagaatctccaaaaagggtattgttaataatctcgcaggtactgaaaccattagaagaacacccaataatttatttggtactttacgaagtatttgaaatataggttaaaaatactattcaggcaatatccccaaaggagttgcaaattcgcttcaccgtcgagaaacgaaagaagacttccatatccaagtttaactcagacgtagctcacttctttttaggtgtgaagcagtgtcaaaccaaa

SEQ ID NO: 89479 - DNA, 501 bp, Cannabis sativa
ctcgggccattactcggtaaaatctggttatcatgttacaaaagcctccacttacactacccagccctccccttctagttctgacactcttagatcttggtgaaaatccctctggggccttcatactccccataagataaaacatttcatctagcgtttgtctcaacaccattcctactgctcagattctttataatagaaaatgtctccactctcccatttgttctcgttgtcacatacactctgagtctgtccagcatgctttgtttgattgtaaggatatgaaaaaggtgtgctcaggtacgccctttaaacacgctctgaatagtttatgaggaatacatgaattagatatacttttatatattcagacaaacttttcacctgaatcttttaacctttatacttgcatgctttggaagtgttggagtagcataaatgcttttatttttaggaatcagtttggaaacccaaacaggattcaacaggaggcagaagaat

SEQ ID NO: 89480 - DNA, 522 bp, Cannabis sativa
cgatgagctatcccggttcgaggaggttccagcgccggtggcggacgtgggcgtcgtaaattcatgagtgattctaatcactttgtcaaaaaaaaaaaagactgggaaaaagatataaataaagggttatttacaaaaaaaaaaaaaaataaggtttaagaagaaagtttgatatatatatatagtatccaatttaattaattgcagtagtatttaaaaaaaatattcaaaataggagatatattattatataaataagaaaaaaaaatactattatcaaatcaaggttctcctatatatagaatagattgttagaaaatgaaattcactcatcctcactgtgccttatcctagtctgcctacacctgatcttgcacgatactgtgtgtggtcccacagtaacaaactctgattttgccgttagaatattcccttgtaatcattgtaatgattgtaaattatttggcaatgatttgatgagctgtaatagtctagaatattctttgtaaccctacttgtgaa

SEQ ID NO: 89481 - DNA, 522 bp, Cannabis sativa
ttgaaagacgaaaacaactcattgaataggttggaagagattgggacactactttgagaagaacttatttacctccaattgaaaataacttttcctgcgaggctataagaagattccataacttttcttaattttcccaaggagaattttttttgtctctaccaaaataggatggaagacccagatatcgttcatgacaaggctttatcgacatctacaagatttgttggacatttttttttgattgctggtagtgtgtttggagaaaaggataaaaccaatttatctacatttaacctttgacctgatgcacgacaataatagataacagatcgtttaattgcatttatggaccttgtattagcagtactcaagacaagactatcatctacgaagaataaatgagacactgatggagcttcacgagcaactcttagaccttgaagattaccacaattttcttcaaattgaaaaagccttaaaaacccttctgcacaaatgataaacagataaggcgaaagg

SEQ ID NO: 89482 - DNA, 1059 bp, Cannabis sativa
aactagtttttcagtttgagaaacatgtttctagatctccaactacgatgaaatgtgtttgatcctttagggttttagtggtgaaaatctcatattcagggttcatttgagtcgtcggttgctggatgtgtgggtcgccagtcgtcgaatatatcgttggtgagcaaaggtcgataggtggactattgatggatgaggtagatagggtacttgaatgaaagaaaagaaataactttaaattttatttttttgaaataatttatctaaatattaaatatgaactttaaaatataaatttatacatatatggtataaaaaaatactataaaataatttaaaaattaaaatatgtcaataatcaaatataaaagtatcatattttggaagcacgacttggacactcaccttcacttacctggcaaggaatacattggggacgtgatctactggttgagggtttgcgatacaagattgggaatggtcataatgtactggctggagttgataagtggctgccagatcacaacaacttcaaaccagtgagctacacaggtcctccaaatgttgcagtttcatgcttcatcacagaggagcgggaatggaatttacccctcctaaatgaacattttcaaccaattgatgtggatcgaattgtctccatccctctcagtttttttccctccaatgaccgctacatctggcatcacacaactacaggacaatatactgttaactcgggctttcacttggctgaaaacatagcagaaggaagagactcaagtggttcaaacactcgtagaaattggtggaaaacattctggagtctaaatctcccatcaaaaataaaaatttttgcctggagagtgatgcaaaatgcacttcctgtggctacagcactttgcagaagaaaagtaatcaattctgccacttgttctttatgtaacaatgcatgggaatcaatcggccatgctatgtttaattgcacaactgctaggaaggtttggagagaaactaagttcaccattgaccatacaaatgcacaaaatatgtacaatggtg

SEQ ID NO: 89483 - DNA, 1721 bp, Cannabis sativa
taacaatccaaattacaataagtatgctattaatagaatctcatacttatttctcacaaatacttttttagttttaacttaaaaactcaagaataaaataaagaataattaatatttttatcgctgaacttttaacattacctaattctacctctaaaatatatagtttgttaaaaaaaattctaaaatataacaattgtctcttttattagaatttgtttaaaaattaatatgtttacccctttaactttaatcaatataaaattttaccatttttattttttttaaaaaaataatttgaaaaattataccgttctattaattcttaaaaaattagaaaaattattaaaaaaacccaagaaagtattaaattattaaaaaaatatatatattaaatttacttaaaaaatctaaactattccaaaaaaaaaaaaaaatatatgtatattttcaaatttaattttattgatgaatacatatcttaaaaaataaagaaaaataattagatattcaataaaaatgtaaaattatttttaaaaaaagttaagaaactaaattaaaaaatggttatctttacttaaacaaatttagattttttgagaaaaaattaaggatgtttataaaactacccgcaccacatcccataaaaaatacaatttaaaacaccttgcagtgtggttgtagcttgtatttttcgccaaacaaccgtgcagtttggtgtaatttacagttttaaatttaattattgcagttcaaatcacatcataccaacttttgtaaaattatacaataactcatattaatctaagtaaattttgatttaagtttcaaaatataatgatcttatttcttgaataaataataattattgaatttatttatataattatagagtaagattttagtattatttttttaattttgtatgttctaaaatatttatgtttttttttatttaaatccctaaaaaaatttatgtatattatataataattgacgtatttggtgagtttaaaacattaaatattatatttcattttttttttttcatgtggtaaaagattgtatatattttagtttgaattttgttgtattttaaattggtgtgttattaaaattttaacatgtgtatttttattgtgttggttaaattttaatatattgtttatttatttatttgatgatagtatagatcacccgcaccgcactatatttttgcgattttgagattttgcactgcagttgcaatataagaaattgtaaaactgcatgtgctgctcacactcctaaaaaatagacttaaacttgttcttgtaaaatatagttttttttctctttacaaaaattgaatgtttaatatacttttttatatctaaatgtatcttttaataaaaataataatttttttaaaattacttaattagttttaaaattttaatttcgtttttaatttttttaatcattgaaaataatttttttaaagatctaataaattaatttttaaaatttactacaaaaaatattgtatctttttatttttattttgaggagtacgatttgatagttgttaaaatttatgggcaaaattattaatttactaagatacttcaacatttaaactgaataataggacgaaacctaacagaaggactaaatttctataaatataaaagtttagagagaatttttaataacttgtatattttaggggcaaaattaat

SEQ ID NO: 89484 - DNA, 687 bp, Cannabis sativa
ggttctggtttgatggtttttatcggggttgagatcaaagtcacgaatggctttgatttcctttcaaaatcatctcattttcattaatttccttcgtcttgagtgtgtatgtgtcactagatatttcaaggactcttaatttttttttgaaattattattatttttttctatctttatttgatgtaattaaagttttggttgttacaattgatagagagggactttaatattttaattttataattgtgcttgtcttcttatctactagtctttttctttcatataaatataaaaatactaataaaaaatattaactaactcatttttttttaactaatgagacaaaggacaataaagaaaaagagtattaatctcaattaatatttaaaaatagttatgatatgatattataaattttattaatattaaataaatcaggggcgacattattgttcctaaaaattaaaattgtgatctgataaatatatttagatgcagtctctaatagttattagaaggaattttcaatactattagatgggatgggaccattattacccttatagcctaaatttgttgtagtgacaaaacacaatttaaaatatcaacaatggcaagcaatcaactacaaaagatcactctataaactgtagagacaagataatgaattatcctaatttaaatca

SEQ ID NO: 89485 - DNA, 633 bp, Cannabis sativa
tcttagatttcagtcactttcactctttcaatccaaaatggatatcttcaaatcttctctttgtaatctgtattaattaataaagaattttacaatgttaatttatatacaataattgactaaaaaattatttacaaaaaaaatcatatataatatttttttaatttatttcatttacacacagtacactaacacaatcaatttttggtaattattatatatatacaattatttttggtagtttttgatagagaagccattgaagtttaatgtgaatatatgttcatatatttttcttttcaaaccataaacaaactcccttttaaggaaaaaaaattaataaattaacatttttttttttcagaaagggaacatgcttttgtttttatagagacaataatttgacataaaaaaattaacaactaataatgatcacttcaagacaggttttgatcaacatggagatccttctttattatattatatatatgtatcttattaatatagtaggaatatatatttatatatatatatatatacacatatgactcgatcggtctgttattagacatatataaatttgaaaaaaaaataaatattttattaggtggtaaacttttatgaaatactagt

SEQ ID NO: 89486 - DNA, 1374 bp, Cannabis sativa
  modified_base (948)..(951): a, c, t, g, unknown or other
aaacactcaaaaaatcacgagagaagaacaaagagagagagaaaggaccttggcaagggtgagtttagggtcctcaccgagcatgcgaccgaacttgagctccattaggtccgaagggtcgagtctaggctcatcttgagaagcacaaactacaaacttattgtggtatttggacaaagaaaggccttttattagtcttctcgtcgtaataaagggaaaagagtaaatgggtgtccgagaaattgagaaagaagaagaagaagtggaagccatgggagaggtaacagtgagagcaagaccgtccattatctcagagatgtaacaagctttaagctcatcaaacagctctaaaagagcattggattggtgggttgtaatcttcttctcaacttgctttagtataaacgagtttctgtgtaggattgaggcaccagttcatgtgtgaattttcgagatagaagaacaaacagagtgagtgaaaaagttttggagagtggagaatctctaaactcaattctattatccaccacagactccggtgacgtggcacctctgttcttgtcttccttaacacaataaaattgattattagatttataaatttattttctaattttagtaagaaaaatttaacatagataaaaatttaaggagcttaatttagtacatgtcaaaatttaaaagatatgatttggtagatattaaaatttaaagagtatgatttagtaggggtgtacatcggtcgttttagttgggttatagtgtatttttataaacccaatataaatgtcgagttacaaatatttaattataaaaaataaaaaaaaaagtgtaacctgcccagtgatttttgtcggtttggtcaggttaacccgtttaaaccgatctttattttttatttttttcattgttgttagttttttgtgttcaaataattgatttgaaaannnnaaatgtataatatatgcctttcaaaatttaaatagttataatttaaattaatgttaaaaaataaatatgaattgaataaacattaaagtattaaacaatatttagaaaaaaaaaattgaataaaaaaatatatactcatatgtaaataatattcaaatataatcaaaattatcaactataaattctaaatttcaaaataaacactataaaatacaaactttaaataaacagtttaactattaaacgtaatttatatattatgtgttataaatattaataattatgtagatgtccaaatcttttatttattactattaattgtaatcaacattccattttttttagtttcctatttttcttagtttcttaatatttgactcttgtatttgtataaataagggttcaccccattggaataaacaa

SEQ ID NO: 89487 - DNA, 1539 bp, Cannabis sativa
  modified_base (1483)..(1491): a, c, t, g, unknown or other
ataatttttttagggaccgtcgttaaaaaaattgagtaactgtttaaaattgtcggaaaaaattagtattcctgacagtttatagcaatgcctaaaatattaggcgacgtttttcattaaaaacacacacacaaaaaataaaattacgggattatacccgacggtttaaaatcgtcgggtataccccatttaaattaattttttttttatatatactacaaaaaggggaatagccgacggttctaaaccgtcgggtataaaccttcacttacttctcaccatatttgctacgtgtccacctactttttttctatttcccacatgcccacctattttttctctatttcccacaccctaaaacggaaatattaactctccaaaaccccacccacgcgcaccattgccctcctctctcgtcgtcctcctccctttcttctcgtccatcgatctccacccacccctcttcccgtcggtctccctctcctcttcgtcgcatacgtcgaaccaccaccacctcccgtcggtgtccctatcatctccgtctcatacgtcggaccaccaccacctcccatccgtctccctctctcttcgagctcggtataaatatatttattatttatatattttttatttattatatatttattttgttattgtacaaatttaatgtgttttaaagttaattgttattgtaatataattaattagttattttattgtaataaaattaattagttttttttttttacattagcgataatttaaaaccatcgcttattttgtccattttgcaacggtcgtataaacgacggttatagaaacagacgagaatactttaaaatttaaatgactgtttaaaaacgtccggaaaaaccatttttatagtagtgtttcacgtttgtctcactcaccttagaagctaatactcctgtaatattaaattattaccatctaagtattaaaaaaaaggagaattttatttgtactattaccaaaaatcccgcttggagattttggcgcctcttgcctggaatgcactatcagagttcttgtgtggagttatggttagttctatttgtagtgatgtttttaatttgtttgtcgtggttggtggtggcttttgttatgctatttgtgcaactcatgtatggcactagccaaattttttacatcctctttaggagagttaatttgtgttaagccacgttcttccctcttctcaaaaggcctcatattaatagagtaggtaaaacacttatatccaagacaactcttacctattcttcccatgtgggacttgggttaatacttcaattgttagggtatcaacgcacgtcccacattatgagactatttggaaaaggcctaaaaataaaaaaaaaaattcaatacatccaacatctttaattagtatttttatttagttttaatgagtaattagattttcacatgttatacgtaaaagaggaaattacactctatnnnnnnnnnatattgtcctcttttatttttaccatcttttttaaaatctatcatttt

SEQ ID NO: 89488 - DNA, 701 bp, Cannabis sativa
tttttattatatattttaactattatcttataagggtttttcttagaggaaaaacaaaaggaagaaaaagaaaaaacactttctaattaattagtaaaggataccttgttatagtcattgccaaattgagattgtgtttgagggaaatacgtcagcagtgactaaacttgagcaaaagttgtaataataaaatataattaagaagaaaaatacatgtttgctatgcactttttcttatttgaatagtggaaaataatctatataaataaaagagaagtgtgaggcggtgacatgatattactattttttttttctgcttacttctctcaattttaatattttattaaaacataaatttacaaattgatgttttactattattttaataatctatctgattctaaaaattaaataataaattttaaattttcaaataatctgtaatgccctaatgctaagacacactacagtgcttttataattacagtattatatttgctaatcaaaattttttctcgaaaaacatgtcaaacaccgggatcccgattctaaacttttatacaaaatatgccaaaatacaatatccaggtcgcacaacgactacaaaataaaatttccagatatcccgagacagaacactccaggtcacgctgccacgacatgtacaatctcatcctagctcaagctcactcctgctcagc

SEQ ID NO: 89489 - DNA, 721 bp, Cannabis sativa
tggactttttttgacgtaatggtggccagtggcttggcctccatccatttggtaaaatagtcaactgcaaccattgcgtactgtaccccgcctttccctttaggtaattgtccgatcaggtcaattccccaaatggcgtaaggacaaggacattgcatttgaattagtttgttgggcgttgtgcgaggtatctttcaaaatctttgacacttatcacatttcttaacgtaggccttggagtcttcaatcatggcttcccagaaatacccttgccttagaattttcttagataaactctaccctgctgcgtggttgccacagaatccatcatgtacttctgacaaaagtcatgtagcttcttcttttgaacacacctgagtagcggcatggagaatcctcttcattacataactccctctacaatgatgtaacgtgcatcctttctcctcattttctgggtttcatttctgttatctgtgagttccgtagagttgaggtaggctgctattggcatcatccaatttggagatgtatcaatcatttccatatcctctgtgccgatgatactgggttttttaagaaattggatggggatcagatttgctttatcatttatgttacagctcgcaagtcgggctagtgcgtcagcagttgtgttttcttcccttagaatttgcttgagagcatagcttttgaattgtgcaagcaggtcgtgtatttt

SEQ ID NO: 89490 - DNA, 577 bp, Cannabis sativa
catggtttgatcagcactaaccttaataactatttgcacaacatatatattatagcacattttttagcaattctatcatgttttgcacaacttttaataactatttggactcgatcgcagttggggcattcggggcatcccaacacggcgtcttggtttcctgctccgcttgaaactcaggtcccaacccttccactgccaacaacatcgctccttggatactgaccgtcggtgcttccaccatcgacagagagttcccaggcaatgttgttttgggtgacggtagaatattaatcggcgtctctctgtacgcaagagagcctttggctgcctttgggtaacgcaagagtggaaattattttttaatgagccttgcttagatattctgcagatatatgtaaattttttttttttaaaaaaaaagaatgtatacataatataaatttagtatacgtggtcgtgcttagatttagtgctgttaagctcgcaggtggtcttgctttggtgttagctaatacagatgacagtggcgaagagctcatagctgattcttatcttataccaccgacctgttggg

SEQ ID NO: 89491 - DNA, 1084 bp, Cannabis sativa
tgttgaaaccacgtacaaaaaccttgtgtgtttctacttttatgcactgtttgtttttctgggttcttctggagttacagagttgtatctgtaattacggaaaaaatattttcaataccagtttcattattccacatttaattaatcacttaattaaataattaaaccgggaatattaaaatacgaaatttcattatacttcaagaattttaaagatcgttaaaaattttctcgaaactattgagattatttgatataaagacagttagaatttgaagatgtaggaatttattcctaatataaccttacacatagaaaaccattaatcagtataccaaggtcaaatctgacctttattatccagtcaaatcctcttttgactctcagcttataaaccacacgacaacccttttatttaagagctacaagtcgtttttaatcacacaagaaaccctaaagttgaatcagacatatatatattgcttctttatcattcaaacaacaacatgcctccaagagctaaccctagcagagcagccttatcttcttcgttgttcttctctgaagaacacgaagaacaccaccaacccagaattaaaacaacccagagaaccagagaacaaaaccttaaaccgagccttctctttcgtgattcttcactgaagaacacgaaggcagctacagaatcgcacaacaattttaacacaggaaatacaacctaacccgatgaacaaaacccataaaatagaataaacacagcagtaaattcagaaaagaaaatggagaagaaaacaccagattttatagaggtttcccaaaatattttgctgggtaagtcctcttcgagctcgcctcgttccactatgtatcttcaaagatcagagattacaagaattggatttcaatacacacaggtacgaattggtaattcctaatatttacagtgtttgatactctctttttctctctgtttctctctaatttcagtactaactgttgtttttttttcttctttgatgcacaatcctctggcttttgggatatccaaaccctaactttgggttccaaggcttagtccactgta

SEQ ID NO: 89492 - DNA, 2317 bp, Cannabis sativa
agttttatttagagtattaaaatccaaaatattacactaatataaaactaaaagtacattttaattaatcttatctccttgatgtctagatcatgtgtagtatgtagtattatctttgtaatatgatctgtcaggttgtagttagtagcaaccttttccactattacatcttcttagtcacaaaattattgatgttgtgaaattcctatttacatgtctactcctttagggtattagattctttactatttggcaactatatatatgtaattaggaagtaacactagtatttaatccatgactggaataatgccaaagactgtatataactttctataggttgaataattatctagtagccttctgggccactttaatattcaatctcactggcagagttagagacttcggatagatttttacacttctcgtaaagatcactgttccacccccagagtaatcaccatctcagatttaaactttttaacattaatgcaaatctagaaatctgagtcagtgtagtgtaaagggtttcgaaaaatcacccttatagactaacatataggtcctcctttaatcttaagatttatttaattatcttccaatattcctttcctgatttatactgatacctactcataactcccactcaatagcaggtgtttggtctaatgccattttagcttcatggtctaggaccaatttctttaaacgaataacctatggttcttcggatgaaatgtaataatcttcctcctatttgtaaccatcttcgtgtccgtcctcatagtacctattggggttgttgtctctgttgagattttcttcgtcgtatcctttggctggttatcattttggagggggtcactacccaccaccgatgcttcttactcctccacatggcgactgccttagcatccactggaggaggagggttcaaagcatcaataacaggatttaagtgacattttgacccatttctcgcgaccactatttttgtagacctttctagaatctaggggataagttgccacattctttgggattgtgttaaaggcgtgtcgtgtaagcaatatctgggaggttagaccatttcagataaccccttcagcttctattcctggatgacctctgggggtatccgtcttgggtacccaacactacttatgtccttggtttttgattagagttgaactatacttccaggaacatggtagatcctgatcatttccagacatgtttgtctgaattcgaatccacatccatttgaagatagatggatcattcccctaaagttttgtcttgtttggttctatggtagaattttttgtttggtaattcatagagcagaaaaaaaaaacactgaattaaacagttttaactaacaactgttaagttagtcaaatgttgcagcattagttcaattatgttaattgaaatattgcagcattctgtttagttagttaagtgcacataatagttgttacgtcttatttttgcctatttaaaggctttattcaatcttgtaatgtaagaagtaatagagaaagagttgggaaaactagaccaaaatcagtggctaaaactcgagctgagttttagggattctttctataagttctctagggtgtactcaacaactcaagcttaaaattcattacactaatggagaagaaagataataataggaagcaagtcgttagtttagctgaacttgtataaaaattcttgtgtctcattcatttatgtttcttgcttttaatctctgttttattttttggctcaattgttaattgattgtttatgattagattgaatttaacttgttgtatgttgtgtatatgttcttgattgagttctgtggaatattaaaacatatctagatagagtgattataaaactattaatttggattattatcatttagtgctgtgggtgtttttggtggaccattcgagtttgtctatgtgctttccattagtgaaacatgcatgatgataatttgtggttacttgttagaacttatatctacagtattctaattttttttaatgcctatagtattataattaaagaaaaaaaaagtcatgtgtatgctattgtttgatacatacactttttatcgttattgtttcagtgtgtgacactcacaaaccaaacaaacacacacacaatcttatctttcgcatcatattttcgtcatttaatttgtttgatttcatgtagtggagtgtcacatattcaaacatttatttttttttccatttgtatcattatcacttttttttagtaggggtatttacaatctattaatagc

SEQ ID NO: 89493 - DNA, 1014 bp, Cannabis sativa
tactttatatatactttacctatagaaagtaatttaaaaaattaccattaaacaatttttctatgtatataaatatacaaaaggaaaactcaataaataaaatgtatatcaaaatataaaaccacattaaaaccaaataatcaaaacaaaatgaggattagaatttcattaaatatagactacacaaaattaggaaagttaaaaaataaataattaaaaatatcctgaataactcccaaatttataaaaggaatgtataggaagattagttgaaaaaaagtaaaggactgataattaaaataaataggtgttaattatatatggcaaattaaaatcaatatcaatatatcaatatcaatcatcaatcaatcaatcaatcaatatatcaatatcaatatatatatataaaggaaagcattcaagagtttacgtggcatattccccttctttctttctaatttatctattttgtagatattttcgattttcatttcatatttgaacttttataatttattaataatatcaatccattattaccattaatatgattacaaaaccgaaaaagttaatagcactaatttaatgtataatataatttattgtataactattatactatgcacaaaacctatcatcttctccaataaaattattattcatgcatgtaacattaattttttaatttacaataattaatatctattacaccattaaaaactattcattttccaccacaccacctctctctccctttttatgtaaaataactataaatagatatcatatttctcaatctcacatatgatatttttgtttattaaattgatgatgtgaagtagatcattcatatgcatgaataggaatgattcctatgaaaggagtctacattttttaatcttattcatgaggttatttatatatatattgaaatattttaatttttatccattatgcattatcaattcataatgtataaatagatatcacatttcttattctcatatatgatat

SEQ ID NO: 89494 - DNA, 896 bp, Cannabis sativa
tccttaaatagaaatttatttctttatatagaaatagatttccttaaataaaaaatattcttacatacataacattaaatttattaataatgccacaaatataatttttattaaccaaacaaattaaatatgtggttatataaataaaaaatgccataaaaattcttaaaaaactgaatcaatttttcaaacaactctctctcatgctatgagaattcacttgaaaataatattgaatttaatttcagattttgtgtatctatcaactaatttgtactgttatttgtcggattttgatatttttaaattctaatgaagatattttttttgttatatctattctatataaagtgtagtgatgtaacatatttttttttgtttaataatattttttgggttttacgttaactttaacagaatattctattacttagagcaagtacaaggaggctgatatgtctatatatgcagtgattcattctccatgagactctttttagtgcaccattttaagatattttctacagtgtacgtcatatatatttaattaatatttatatatatttataaaattaaaaatttatttttaaaaaaatttacaatatacatttttaaaagtaatgtaccaatatacttttatttattttggcactcgatacatttttttagtttatttttttttttatttagtcgtgtatattatagttatttaagacatcccgtaaatttgagaaatttagaaaaatttaacacaccaaaaataatacacttctttaaaagtggcgcactgatatactcctacctgtttcagcattcgagaaacttgagaaacttgtttagtctttttttttttcatgttcgtgtacattataattatttaagacattttttaaaat

SEQ ID NO: 89495 - DNA, 758 bp, Cannabis sativa
gaagaataagtggttgaaataaagtggcaaaatagttttggcatttttgtagtagtgaacaacaacttagggattttttatttttatttttgggacaatctcgatttgtgtgtcaataattttctatagagtctatgttaatacagttgagagtttaatactcggtgaaaaaactagtctcgactccatgcattaaacaccagctccgttttcttcttcctttgatctggttcgacggtgagaatgctgaaatattaaacttaatttaatatagttgatttctaaaattttcttgttgctactaaagtttctagactattcttacaattactaaagtgtctagagctttcttgtttgtttgagtacccttgaattttctagaattatctttcacttgtattagtagagagaactatgtagaacaatgtagaagctagccatttaataatgtttccagattagtccatagagtcctataaatagagatgtaatcccatcattttgtacgaagtcacaaattacacaagttgagatataaaatatagcttcttccaatcaagtattctctccaaagttcttcttatttttcaacaaagtggcatcagagccaagtttgtgaaaaaaatggcaagtggaggaatgatccccttccaagttccaatgctcaccaagagcaactatgacaattggaatattaagatgaagacgctactaggagctcaagatgtatgggatattgttgagaaaggtcataagga

SEQ ID NO: 89496 - DNA, 650 bp, Cannabis sativa
agccaaagttttgtagttggtttctttttcaataatacttattactgaaattatcaaaaataatatgtaaataagaatttgcatttattatgtactgtaattatatgtttttttttttatcaagtgttattgtcaatcttttaatcaatctccgtgtttgaaaattcatgctggaatattatttttaatttttttgaaatttttttttatggcggtattcgttatgcttactgtaagtttttgaaaattttcaaatagcttacagtactaaaaatacatttgaagtattttgaatacatgtagtaaactgaaatatcaagaattctattttaggcattgtaaattattcgatttattaaaaaatttacagaaatgatactgtatgtaactataacgaatactgctatgaaaaaaatttgaaaaaaaaaatattcggacatatgatttcaagcgtggaggttgactaaaaggttgtaatagaaaattataataggcaatcttcttaaactaaacgtatattgagtttttggatttggcgatgaacttgaaaggtcacttgcaggtgctttacatccaatcatcctgaataatgtttgtatcgtctgtattattgctgctgctagtatagagttagcagacccttattcccc

SEQ ID NO: 89497 - DNA, 1035 bp, Cannabis sativa
gggtctcagttcgtgtttggggtccgggtcccagttcgtgtctggggtttgggtcggtggtctgggtcctggtccgatctgactccataactgggtttaggtccgagtccagagtatgggttcgtgttccgtgttttggggtccaagctcgggtctggtgtctagggctggggccagtttcggggttcggtattcaggatttggggtctaggatctggggtctgaggtctaggtccaggttccatggtctggatccaggatccgggtatgtgagcaaagatgtatgttaaacaaaaaaaaatgaaaattaaaagctattttttgttttctagttttttaaaattcggtttttgaaaaatttggccaaacgacctttattagtttttaaaagttattttctgtttttaaaaattgaaaagagttttcaagttatgtagccaaatagctctctaatcacttcacttcattcaccaattcaaaagagtttttcaacgaggtggattttggttttgggaagccatctaaggtagagccaatcttaggaaagatcatgagtaaccaatgtggaaatagagtgatattgttggatgctgatcgatggggtaaaggatctatggaagcctttatttattatattagaacacaaacaagtgtcattatctgaaagagatgaaaatttttagcgttaaagctcctaactaatttaatatcttctagtaataaatgttacctctctatatataaatatatatcttacctaatatataaaatgcctatctaacagattttgttatgtacttaacagaatataccaaaaaaacaggttaattttaacagatacctattcatttcacaagtaagccaattttatttacaaaaaaattatacagaccaagacaacctttggtcatttgtacaaacaccaattcatttacacaactcataaatcataaataaaataaattgtgactcttcaaaaagtggcaagaaaatacattaactaataatataaataatgtttcataattataattc

SEQ ID NO: 89498 - DNA, 4492 bp, Cannabis sativa
gatgttatcaacattattttctcatgtctttcttgttgtaggaatgatgttagtactgaagttacctaagctattttgcctctagtgtgttgatgaatgaaactccttttgccacttaacttttggggacgtttgctattaacatcatttgttttgtttgttgatagataaaagggtataataggaagagtaattacctttagtaagaaccttttaagtgaaatatttatttacgaatgggacacaacacatatcagaagcgcgtaagagtctctctctaaatctctcatttcatcattaagtctttcacacaactatctcatctcatcactcctctcttacaaacaaccatcctatctcatcacttctaatttatacccaattatcttgcttttaatagtctctttaattaatcacaccttaccatttaatagtctgcttattttacaagcttctatagaaactagactgctcagttaataagcttctataaaaatctaagttgcctattttataacctctacgaatttttttttttttttgaaaataaaccatcaatttattaattgcaatcatgtaagaatcataagaaacatcatgacttctgatgacacgatcagcaacataataagatgctctagataagaaatgagcaacactatttgcagaccgtttaacaaaaagaaccgaaacaccaactaactcctctaaaagagttctacaataaaaaataacattcccaaagtaaggcaccattgcaagagggcttcgaattgcttgcacaacaatgagtctgtcagtttcaacaattactctgccaagatttcttctttatccaacttaaagcctatctaaccccatcaccttagccatttttggtgcaactaacccaggccgacagcaagtaacaacctccaccacaaaaattaagctgcttatttcataactttttatgaaaactaagctgcctatttcataacctcttataaaaatcaaattgctcacatcaccttcaaacaattaattatcctggttgtaggaagtcgaccttgcaaatcataaattagtgattttctaatcaatgtgtcaaaaaaatattaatcaaaattgaaacagatgtgatccttaatgctaatattgtaatcgataagttaactttattttatttcgtatcatacatgccattaaaattcagcccatgtagtaaaatgtgggcagtgtttattacaaagtaaataccccaacccaagatccaattttaatccaacttctagtacaacctttcgaacgcccaactataacacagaaaaaaaaaacaatgaaactaactcaataacctatgaatgtggtacaattacaagccgctggtaacattaataacagaagaatattattgtataacattataggcatggcccttgtgttaacggtaatttttatttgaaaaaatcatgtcaaataaatgggtgtaattatccattccaaactgaatctagttgccttgatagagagagagagagagagagggagagattatagtcagtacttgcagaactattgtttcaccataaatgagcttttacaactgcagccgcctactgcactcggatttgtagagacctgccggtgaaaaccattaaattttatccaaggttctaacttccaagcccattgcaaatgaatcataaacataaaccacaacaataagcaatgatatgtaacctttgggagggagaatcctctaacaatattccaatcaaaatactctataatggtttttgtaatattgttccattttaataacaaactattgaaataattggttattcaaggtttatggattatctgcacaggactcatccagaatattaaggggcaagaaaaatagaaatctaaaggcaattgtttaatcgagaggaacatgtcataggggattttttagacaaaccaaaactttaggagatgaatatgagtttttgcacctactttatcactttcttcgaactaaagcaatcaagtacatggacaaaattataaaactatttacacacaatttcacctatggccatttctcgcaatgtctattctatcaggtactgcctagtcttagtttggccattgagtaaaaattttaggcagtggtgtcgagttgggcatgatatgcctaaagttttgatgagattgaatgatcttaaaatgttaaagcagtggttagttagcactagcaggagatacttttaactgagcaagtagttaaccgaacaggttacaaaacacatctatgttcaagcatcagaaaccagaactagagctcatacagaaagcaaagtaaagtgacttaccacaaaagcagaacgaataagctcctcaacgtaatcaacggttgctccttttacaaaatcatatgaaatactgtccacgatcaatttgactccttccttctcaaagacccttaaacaacagttaaagaacaggaaaagcaaagtcagaatgaatatgcaaattgaatgcctttactagggaaaaaaaattccttaaagaaaaaaacctgtcatctgggttggttttctcatcgagatcaaaaacgtattggaagccagaacaacctccattttctacactcaagcgaagcattttctctcccgatgatggttcactagaatacagttctttcattcgctgcaacagaaaaacaaaaggttattgtcacaaccaaaaaacatttttccattttaggaaatctattttaattaagagaattacgaccattattttttttgctaattaataacgaacaatttaatgccgccatctaacacaaatgctttgtattggagttaaaaatagcatagaaagaacccacttttctcatcacaatcaaactaatagactatagttaattgatttcaatagtaaaaattctccttaattcatttgtagtagccaaagtcaatgaactacacgatctcaatagacactgatgcttcactaatctccaagtgaaacttaaaaaagcattcaaaatttcaaagtgatgaatccatatctccccagatattttttaatatagggataaaaagtccaatatatatctcaaattggtaaaacaagaaagcagttaaaaatttaaaaaaaaaaagtaaattaggggagaaagtacttgaacacaattttcagtcatgtgaacggcatctggagacgaagacgtggatgtagatggagatgatgaagaaggggctacgtgaagggcagaagaagaagcagagctgagaagtctatggttccttcggatttgagctgagaaataagacttaagtgatgaagaatcaatgatctcggcgccattttggtcggggttacagcaactcaatgtaaaattatttggttgtaaactttatacactgcaaattctgggtttaccaaaatttccacaatgaggaataagctcaagtctccagtcttcaacctgtcaaaatatttttcctgcaaccaaaacaattttctcagtaagtataactagaagactagtttggggagctcattttcagttgaatatgaatttatataattcaatcatattaatatttgttgctcaacaaaaattaatcataataaaacagagacaaagatcaagaccatactgagaccgagatcaagatagcatcataactctctctcagttgtaaaaaaaaaactaaaacagcaccacatgaaaaaactaaaacatacgtttagcaaaaaaaaaacacatacaataccaaagtttgacaacaatgttcgggtttcaaattactgcataaacttggctatgtatatcttacatattatataaatgtctatctaacttattttgttgtggcttttaacagattcttgttttaacaggatatacccagttaaaagttaattttgacagaaatttatattactaaacagttgcatacattacagaataggcacccatttacagttgcatacatttacaaaataggcacacattcttcacagttaagtctgttatcaaaaccaacacaacgtatctagtaaaaaatacacaatttgcaagtgtcctctttcattaaatcaaacaaattaatggcaccgaattctttttttctttactaccaagttcaaagatggtctgagacaaatattgggatttacaatatggctaccatggtttgaatagttatccttgttatccaaaaatggaactaaaaagaggatgaatggatctggttggatatatttctaagcattgacaatctgttttgtagagataagttttcatattctctctgacgcataactatagaaaaaaatatcggagataaaccagaaaattatcaaaacggaggaaaaaatctctggataaatagatgaaaaataaaattatatattcaaaaacaaaaacaattagaaaccaaaaaaagattacaagtcagaggcctactatgttccgcattagcaagagacccactgagtgtcaatt

SEQ ID NO: 89499 - DNA, 797 bp, Cannabis sativa
  modified_base (31)..(37): a, c, t, g, unknown or other
aaaaatttgctacgtgtacaagtgtgtacannnnnnnagtccaccgtggcacttaactgtagtttttggacagaggtgtacagagcaaaatgaaactggggtttgtagttatgccgccaaaattttaatttttgtagttaactattacaaaccgtaaagttcaggtggtttagctgccaatattccttaattttaattagtttgatttaataaatttttaattatgtattatttaatttctataggtgtttatttgtggagataccgtttgaaaaaatttgagatgctatattagcattggtaatctatttaaacttttttattaaatatttaaaaatattagaaaaatgttaatttcaattatgtgtaggtattacactacaaaaaaagactgcttttagtgacaaccttttagtcacaacaaaaaaaatttatgacaaaatgtgacttttagtcacaacaaaaaagtttcttgtggctaaaaacacaacaagtattgtgactaaaaacacatttagtcacaacaaagtaatttttgtgactaatacttttagccacggactttttagtcacaatgtagcaataaaaatttataattagtcacaacttttttacatttagtcacaagttttgctgtgactaaaagtaagattttttgtagtgttagtgtgatgttgatcgagtaagcttttaagttaatattttaaatattttataagaatcgagttttttgtgttgattaaagagtgcataattgtagctatctttattggagaaattgttggaatatattttac

SEQ ID NO: 89500 - DNA, 616 bp, Cannabis sativa
tctgaggctgatagaataattgacatgtttggattttccagaagtatttcatttttagtatttaggcatgaaaacctgttcttaaaagctatccaataccaactgtgaatgcttgattagaaaaatgatttctagaattagaacttagagctctagaaatctttcttatgcaggaagaattgtgcttattaactcaatccttttaatgatcaattcttattgatttgaatttatagttcttcctaaaagaattgttacaagaatagctcagatttgtagttctttcctttggaaaggaaaagaggagtctattcgacctagaaaaattccttgggtaaatttttgtaagccaaaaaataaaggttgtttaggcttcaaaaatattgccttatagaacattagtacaatgggaaaatatgtttaggctgtctctttaattaaggataacttgtaggttaaatgagttaacttggtttatataaaggataaggacttgtgggagtatgaggctcccacaaacgcaagttggtattggaagaaagttgtccatgccaataactttatttcggttaggttttgtatcccaaagcactgtgttattatgtggttggctttg

SEQ ID NO: 89501 - DNA, 643 bp, Cannabis sativa
  modified_base (587)..(590): a, c, t, g, unknown or other
tgttggaaattaatggaagaggaagaagacattaaggtagtgtttggttggaggtaatgaaatgaaatggaaagaaaataattttcattcaattcttttgtttggttgcatattaaagtattggaatgcgattccaatgaaacgaccttttcactattttgatggaatgattattctattttgaaatggaaggaaagatcattccaatgtattatgagaaaaaaattaataatttttttatgtattttaaattttattctatactattcctattcctattcttattttgatatttttatttctctaacgaaacgccacctaaaatctttaagctcgtcaataggaatataaatcctcgagaaattaaaaaaatataagagagaaaatggcatgaaaatcgagaaattcttagtgatgtaattcaaaaatttccaaattttaaaaacttcctttctaattacatatgtttattttattttattttattttattttaaaaaaaagcctatttatgtaaagttttataaagaattcaagatttatggaagggaaattttatttacacctcaaaaatttctaaagacaccnnnntttaataatttttattttatttaaaattaatatttttaattatactaaatttt

SEQ ID NO: 89502 - DNA, 1494 bp, Cannabis sativa
tattcattattgcgccggcaaaacatagtaataccggcgcattattgcgccggcaaaagtaaagcataaatgcaaatgggatttcagtttttgcttaatgtcgacagcttttaccggcgcatttgacgaactgcgccgataaaaaggccttttcttgtagtgtgtttaactactaatacaatggtgattacgaaatgtacgtcatagagcatatcgagcataagatattggaacgcaaaaacccaatctcggttataaacccaatctttacctcaggctcccaaataccattataaatccaatctctacccttaagatctgaaacaccattatacatagcaatagcaaaaatagttgaacctatcatacacagacatttaaatagaattaaattatacagcaaaaatttaatagaaaagtggtaaaaaaatcctcaaaaatccataaatcagtcaagcatcaaacacaaataggttttagttagtcattgtcatattctttataactcattcactttgaacaatcaaggaggtttttttggcgaatgtcaatgatgtattgtaacatttgcatcctactatttggttaccaaggagacggtctgctatcaaaaacttgacaaataggtggtagataagtgagatggctcggaggtcgctgggtattgaccttccaatgagacttggtgccgatcactatgaaggtagtcataatgatgtttaccactggacaatttcgattgcgagtggtaatttgattttactagggagagatgttgaccacatggagcgatgttaactctcctggaaccatacatgagctgcttgcatgtctctgggtcttttagggagtgacccagtccttttggggcttgttatgattaaaatattttgtgatgcttgattattaaccatcacttttgtcaccatgatgtttgaaatttcattgacactgtctgagcttgactgctcttgcccccagagttgatctcttagacttcttagtgactgggggtgaaaaactttgaagtttcatctgttgaagctatttgttgtgagagatatagaccattgttagtcagttattgcttgtgttcttggtgctcaagcataagtttactttatgatcataagtgatatgaatcacggtcgaagagtagtgtagaaaaacccgccatatcatctttatacggtgaaatcacaggttgttgaagaaaccagtttgataatttcaactcatagacccctgttaaaggtttaagaagaaaactccaagggagaaaaaagaaaaaagacattcgactaaacccattctaagtacaacgttctatactcaggaggagtttagccactgaaagaataccccaattgggaaaacttcccactctcaaaggattttcttcaaccaattagaatatctcttctagatgcaacgtcttgcttccagagagctttttgtaattgatgatgtttttcttttctttttgatttttgt

SEQ ID NO: 89503 - DNA, 710 bp, Cannabis sativa
tattagttaatcttggtgcagaccttcctgatttgaccagctgaaccggtgagaactccaacccttcccatgttgaccatggaaacaccaaagtccttgaagaaactggctgttccagatgctgtggcgtgattcacaacgtaagccttagtctcactgtcgtcaagaagcgcagcatctgatgtgaagagacctcttctcttggcaacgaggtcgaagtatttgacatcaaaggtcttgaaacttcctgggtccatctccaccaatgttatagggtcagcaggcttgcacttcatcttaagtctgtcaacgtactcagaatccaaggttgggtctgaatcgttctttccagagaagttgtaaagacggttgttgaaagaagagcagtgtgaagttccaatggtgtgtccacctgagagcactgctaaatcttttacgcttaaacctctgcttgtgaagtcttttttgagagtagtaatgtttgaaaaaggtgcaggtaggccaaacagggcctcggtcatattcgaaactacaccgtctcttctaccagtttcaactgcccaagttggtccatgcaactgaaatatatacaccattttattattataattttctcatatatgatgtatattacagtgtatgttacgtatttgttgcttgtatacatatatattatacacaaatggatccttaccgcagccaccgaatcc

SEQ ID NO: 89504 - DNA, 529 bp, Cannabis sativa
gcgaactaataacaatattattatctacatgaattaaacagataagtgaaattgttagtaataacaagcaaagaagattatatatatatatatatatcatttattttttcaagcaaaaatgacctataaatatgtatcatttctgttcttcttatatatatatttttcaagaacggtctggatcccttaaacacaaaaaagagaggaaactatacaacaaatatttagctagtctgtaattagaatggaatattaatttgcaatcctagctataatcttaagttaatagttttattattatacaaattaattatttacgatcataactaatataaacacaaaaagcttttctattacagcataattttgatgtatcaattcaatacattaaaaattttccactttaaaaataagtctatatataagaaaatcttggtctgtgatatatatatatatacatatctgtgtgtgtttatatatatatatatatatatatatacatatctgtgtgtgtttatatatatatata

SEQ ID NO: 89505 - DNA, 674 bp, Cannabis sativa
  modified_base (464)..(485): a, c, t, g, unknown or other
  modified_base (593)..(595): a, c, t, g, unknown or other
ttttcatcagattattttaaaattaatttagaataaatacacttagtttaatgaaatattctagatagtgatttctagtaattaatttatatttttttatatttaattcagtagaaaatatatttaagttgaaaattaatttgttaattaattttagaccaacttaaattaggatatttttcttaaaacttaaatagaattaataattaagttgattatattcaagatacttaattatttatttctattttattaaatttaattaaattagaaaatatatttaagttaaattaatttgctaattaattttggactaacttaaattagaatattttcttagatattaaattaaaattaataattaagttgattttatttaagatacttaattatttctattttaatgaatttaatcaaattagaaaattatatttaacctggaaatttttcaatttcagatcaannnnnnnnnnnnnnnnnnnnnnaatatattttattttattttaatagtcattttttttagaatttcgaattacatttttttaaatgttgatatttcgaaaatatttattttgaaaattagattaaagttnnnaattaattttaattaattttagatcaacttaaatcaagtaactttcattaatgactttattaaaataaatagactaaaa

SEQ ID NO: 89506 - DNA, 573 bp, Cannabis sativa
gttagggatttcttctaaattgttcctctaactttttccagattttagcaggggtttcttcattgccaacctgtctaataattgcatcagatagattgaaaatgatgattctagttgttgtctcaagcaactcttcttgcttaactttagtagttcaatcaggccattcaatgggatcatttagcactttaagcagtgttctagtaatgacctgatcttccttctccaaatcctatagtctcctaatccattaaacctgtcaatgtcaactttgatattgctcacattagtaaatttagaaaagaaaataactttctgttaagggaaagaatcacagtttgaacattcaaactccttcttgatcaagattctccttccaggaccaacttcatttaatcatgatcaccttcttctcccttcttgtgagttgctgttgaaaccagctctgataccacagtaataaatttacagatttaacctacacaactcacacaaacacacacaagttatttcacaaggtcaattttgacctttcttgcactgaatttagttcacacacaattgacacgtatt

SEQ ID NO: 89507 - DNA, 783 bp, Cannabis sativa
aaataaataaaaaaaaaaagaattacaaatagtaaagaccataaaagagaaaataatttttcaaaaaattgacaaatactaaaagtagagacaaaatgagtgattttctaaaaaaaaataattgaaaatggcttacttaggaaagagaatgaaaaaagttgaaactaaatagctttccattaggcataagtagggctgagcatttagcccgttgggccgaccaaaccggctgacccaatccgattttgggccgaaatagcccctttaaatttgggccgaatagccattggtttgaaaaatgtcaaccggttcagttttgggtcggaaatgggttgggcagtttatgggccaatgaacccaacccgaatttttgaaaaaaaaaaatcagtattaattttatgggctttaagacaatttgaattgggcttttacttttctcacatatatatttatatataggggaattttcagtaatatacataatattaaaactaattatgaaaataacaatgacaattttaatatgcacgcatacatatgcttctaccgaaaataagaaaataattatttgtctactcttatctttgctagcttatcattctatttttatcttttctttttgttaataatgctatccactaaactttgaacaaaacaatataagccaacagtatatacatattattttattaatttttcttctctacctctttctcactcaattttattattttcaaaaacttttagatcacattaattaattttacttaagaactgtatcat

SEQ ID NO: 89508 - DNA, 1339 bp, Cannabis sativa
tccttgaatttaccataacttttcaaagaagaaaatggatcgctaaatctagtatcattggtccctctagcatcactaggaccactagcatcattggtctctctagcatcactaggacctgtaccatcagtagtccctctagcttaactggttcttctagcatcacaaggacctctagcattactggttttcgtctagacgactactactagcactagtgtttggtgattttctctacggggcattcttttccgtgtcggtggcttgggtggtatttggtacgatagtggagtcaagttcaaagctacaacatcagggacctctatatcttggtcgtctcttacgccatcattaccctcaacatagcattcagggtctgaaccatcacaaaaaccatcaataaagggcatttgttctacattgtcagcactcggcatcatagtgtttaattcaggtaacatattagtaactaatacctctggatttgtttctggaacaaaactcccaaccttgctacgagtgtccttaataatacttagtgtgggactaggatcgatacaaacattcttctttaacaaagtcacaaataagagagtaaattcatctgccttctttgcaagcatagacaaaaagaaccttacacgcttatcatttccaataactttagggcgatacattaagcctttcatgtacttgtaatttacttccaattttaagtcatattgcactttgtcaacatcgattttttcgtacaaaacatcaaccaaacgcgagtagcctacgttcgtatcaatctcaaatgtcaaatttttggcgcggttataaacccaatatctaccctcaagctcccaaacaccattatacataacgaacgcaataatagttgaacctgtcacatacattaaaaaaactcaattacaaattcagaacaaaaatctaatagaaaagtgataaaagaaagtcttaaaacccataaatctgtaaaccatcggacccaatcgtactccatcgggcctaacatcgtactcatcagtcccaatttagatccaagaggacaatcagacatgcatcaggcctatatcggatacaccatcgaactgatgatgcccttaagtcaaagttgaccatcgggcccctatcgggcctaatcaggccatcctattagatcttagtctctaagaactatcagactaccatcgggcaccccctgaccttagatctaataatctcatcgagctagtatcgggactctatcgggccccatcagactagacaaaaagaatgcaaaaaaaccagaacaaaccagacaacaaccatttaaacacaaaacaatagaaaa

SEQ ID NO: 89509 - DNA, 897 bp, Cannabis sativa
tgtcgttgtaagttgacaaatttttctctttcttctctttctttctgtcgttgtaagttgacaaatttttctctttcttctctttctctctgtctttgtaagttaacaattttttctctttcttttctttcgttctgttgttgtaagttgaattttttttctctttcttctctttctttctgtcgttgtaagttgacaattttgtctctttcttctctttttttctgtcgttgtaagttgacagttttttctctttcttctctttcattctgtcgttgtaagttgatagttttttctctttcttctctttctttttcaattctcgtcttttcaaatatttcacgttgtctctttttcaatccattctcggctttatactttgtgcaagctgcgtaacttgaattagcgcacacggatttcgcagcaagaagagctttcttcaaatcacattctaatcaaatcaaaaaacaaattgattagtaattattaatgtattaaattaaaaatatatacatatatatcttaaataaactactaattacctttcttagataaagaaggaattacagcctcagtcaaaaacatagattgatcatgattattgactctttcattctataacatacaataaataaaagtaagtattaattaacacaacacaatagtaaaaaaaaacacatgtaataattaattaaacacaagttttaaccttttgtaccgaacgatttagcttttgatgatgacgatgatccaatggagctcgagtttcaaatttttgcgatgattttgaaattgattttctttcgttagtaattaatcttctcgtttcagatttgtgcaatggtatttcctcattagcaattttagcttccgattgtttttctacctatatatata

SEQ ID NO: 89510 - DNA, 754 bp, Cannabis sativa
ccgatgcatttttgttgttttccatatttccaatgatgaatttattcatattaaatcacgaatagaatagtaaattcacatgtagatagagtcacgtaagtagaaatgttgttcttattttttatatttcataagagctgcataaatattttgctaactctctaaaacaggacatatcaattattacaaaatgataacaatacaatgaattttatcatatttgcaagtatttcatattgtcaatacaatacaaagctctttaaagaaacttttataacatgtttagttttattaatatactaaattagttgatgtaaagttggtttacggaggtctaacagttgtttctctacatattactattaaggtacaattaattattgatcagtggcaaaaaatactgataaatagtttcttatagatacacattcacatttaacatttttagttgcaattaagttgcaggttagttgaataatgattttgctaatacaatatcatagtattataaaagtagggctcgaaattgttaaatacgcgacttgaacagataaaacacgattgttgtaatatttatttgtgttaaatatatggaattaatagttgttttgtagttttatgttagttggcttgcaacagatataactgttgcattacagtttcatcacagttgtcttgaagttgacttcttctttctcttctaggagttagagttgtaatctttttcaagcaaagacaccttcaacttcttctt

SEQ ID NO: 89511 - DNA, 786 bp, Cannabis sativa
gtttggtgtgtgtgaatatataaaatataaatagaataaaagatggatttccagacccttgttccttccaaaaatgggttaatttaatgacatttacagctttggttgattttttatttacttgattatgggaataaatattagaatattttatattgagtatgttactgtatttttcgaaaactgatttaagaataaatggttgggacgtaaatacttacggtgtataatttgttttaagattctaacacttgaatttggatatctaaataataagatattatatctaaatttgaatattgaaatatttggactgcttactgagattttttgaaactcaatagtatatataaaattagaactatgaaaacaaattaaatagaggaaaatggagattgaaatttttaattacgtggttcgagtgttattgaaccctaattattgggctgaatagctttgaagtattacattaataatgttcttgacaagcttcagaaccataattttttgctatagtatttacactatataaattttcaaccatttgcatgagggtataatgcattatttataggctaagatccgggtacgagataaactcgtgacccactagggtttgcatgtaaactttgtgcactaataggataaatacatagaatgcactaactttgagcccacgaactgaagtctagtctgtggggctgttatgctccgtacagtaggggaccacttgaggtcaataggtgtcgttcgtgcgccaccttactgtaatattagaatagtggt

SEQ ID NO: 89512 - DNA, 522 bp, Cannabis sativa
attttgtttattttacttatgatttaactagtataaacagaatgtttatcgcatgcggttatttataataattttaaattttatatataaatttaattgaataataaaattattttaaataattttaaatttatttttatataatttttcaataaatctctaaagaaatttaaaaaaaaaaatcatcatagaagaaagtacatacaaaaatatatttaaacatacgttatagtgataaaaaattacaagttgagcaattctcacacaaattagacatctataacaaaaatatgagaataaatttatagaatactcaccatataattttaaaacaactgttatcaccgtgaaatctctggtattttatgtaccgatttttgaattcaaagttttaatatggggattagatgaaagtcatttgataggattactctatacttttatgtgtgaagctagtataatgttcacgtagaaaacaactgaatacttgaatatatttgtttcatttctaaattgattaac

SEQ ID NO: 89513 - DNA, 882 bp, Cannabis sativa
  modified_base (710)..(710): a, c, t, g, unknown or other
ttattattttttttaataaataatgaaattttattaatagtaattatttaaaataatagtttgtaatttaattgaaatatttttgttatttgagatacaatcgtgattagaattaaaaaaaaatgaactaaataatcaatcgcccaattacaaaaaaaaaaaaataattaaaacaaaatcagatgaaaaagattgcagtattacagtttactttaagaatacttatattttgtttcatccaccgctaaaaagtataattgtagaatcggatatccaatcataattggattggatcggatgcaaattttaaaaatccaattagattggatcggatgttggatgagacatctgatccaatggataactgaaccgatccaatccaatatcattcaatgtccatccaatcatatttaattattttgttttttaaaaaaaatatattttaactttattttataatcttttcaatggaatatactaattttgtttttgttttgttttgttgtgtttttttgtagaaatttttaatggagatggtgatcttaaaattaaataagcatcctcttttgtgagattggaccatcaaagattaaactcaagagagtgattaattttttgttttgttttgttttgttgtgttttttttgtagaaattcttaatggagttggtgatcttaaaattgaataaacatcctcttttgtgagattgnaccatcaaagattaaactcaagagagtgattgatttaatattttatataatatttgtatttgatgtttggacttgtttattaagagttttgcttattaaattagatttgtgttatatttttattatagcatcatgaaaattaggttgaatttggattaaactattgtttatt

SEQ ID NO: 89514 - DNA, 807 bp, Cannabis sativa
tgatggatatggccacatccaggctgagtgtgcaaacacactcaaaaagaagaaggcccttgcagcagcttagagtgatagtgaagaagaaaagaactccactgccagtgaaggctcggaagaggataagcaagtactggcgttcatggcccaaagttgtcaccaagttgagcctgaagatgatgcagtctccacttcattagaagctgatagcgtaggtcgacaaaatgcatatgaggaaatgttttcacaatgggagtacatgactaaacagatcagaagtctaaaaagctctctagagcaagtggagactaaaaaaggaaacttagaggacacggtcaaaaacctcaacaaacttgatgaaaggagaatgagatctataaactcactgctgatctgattagaaccaagcaagctctgcaattcattccccgagacacaacagctatcaatcaaaacctacagctccagaagccttatggtgatcgaacctccttaggctataagatgttgtataaacaaggtaatgacttgtcagttgagaattcactaccctcaaatgtcgatccaacaaagaaggaagataagttaccagacatcccaaccaccattaacaaatcagactcatctgagaagagacgagtaccaactggaccaactaaactcaagttcgaaggaagaaggattgatgtaggaaatctgcaacaaaatgaaaatttcattccaacatgtcatttctacaatgattatattgaaatgggttttatttagggcacaaacccaacaaactcccacttccactaatat

SEQ ID NO: 89515 - DNA, 522 bp, Cannabis sativa
agaaacccaaaccgtaaattttttaaaaaaaaaaaagttgaaaaaatagtatatgtggtaattttctaaatttttattagaatgactattctgttgtaattatatataaaaaaaaaaaaatagttaaaaaatgggaaatttgatcttatatgcatgcattagactaaaaaaaatacaattaactcatgttgaacaccatatgtattttaggctaacttttttattttgctcccaaaatactactcccaaaagttaatatcattttctctttcgtttctcttttctctcttttctcatgtcactatcccactcattttctctgtttctcttaaccaaatcacattgtacatcttactaaaagtgaagacttaattccaagctcatatcggaggtggccggattggaggtaggataattttttttcagcaaccacgggaatcattgttttgagtaatgggtaaatgattttttttatattttttttattattggttgttatttttttttttttttagaatattg

SEQ ID NO: 89516 - DNA, 1087 bp, Cannabis sativa
  modified_base (203)..(212): a, c, t, g, unknown or other
  modified_base (1044)..(1047): a, c, t, g, unknown or other
agggcataaaacccaacatgcacttctatagatttagaattgcactcttaattacatagaacactctacatgtaccaagatatataaactctacgaattgtacatcgatctaatccaaatagtcaaagatcctctatagatgatctacatcgtatagggataaatttatcattctactcttcaatgtactttatccttaaaannnnnnnnnncctataaatgatatttcagtaagataatataattactgaaatgaggcgtcaatcatttatctctattaattcaagttcaaaggagatcatcatttcacttctaaatacttatagaagctatggattccttatctatgattagccctcccactcaattatactatcatgttcccaagatgtaagtattttcccaaattattggttggctttcacgaacatgtctaagaagataaataatacaattaagatcgaacctaactatctcaggattaagatctattgacctaagatcgactagtgatattgacgtagaaagatataatggtaagtttatgatatcttatccaagtttaatatcggtccaatttgatatatactccatatatctgatactagcttacttcaccaatgcactggaaaagacgtaacacttatccaaagtgtaagtatactttatcgctgattatcatgtcactgtaaattcagtgtactaacaaatcatgggaattaaacttttgaacatataatcatgattgtattccactgtgctgacaacactatagtcatgaataactttatgttctggacttaatagaatttatacattaaacatatgtaatcatgaaataaatcatgttaatcatgcaacataaaatgaattttatattttattaattagtaaatctaattatattgaaattggttttatttagggcataaaacccgaacaaactcccacatgtactaatataaaactaaaagtatatttcaaataacaagtatgttgaattaacattctaaataagaatatctctaaaataatgaaattaannnnataagagtttagaaaatcttacattgattgcaacagaata

SEQ ID NO: 89517 - DNA, 622 bp, Cannabis sativa
ggcacacattgaaaccgccgcttgttccgatatcctttctggacattagagattgagatttctccacctagttatcaactcattagaattttcactggttcgttggttcattttcatcacgtcatggagacttatggtcttctttgagctcaggaattatgccggaaaaactttttgcatgtcatcccaagtatttattgttcctaggggtaactaagtataccaggtgaatgctgcctcttttagcgattgcacgaattgtctactcaattgtgcatctaattgggcagattccccacatgcagaggtgaaataggccaaatgatcatggggagaaccgttaattccatcaaacgttttgaaatttttctgacatagtttggtgggaatgggatttggtcatagcaagctaggtatgtcttatgatatctcaggatcggcattgttgcagcctgatattcccgaatactctccatgataaaagccttcaggtcatgctgaggttggacaccaactagtggtggttgcataccaagtggtagcggttgtgtattgcatacgtgtggtgctgaagacgaggaatgttgcccaacctcgctctccttttgtaacaccctaacta

SEQ ID NO: 89518 - DNA, 968 bp, Cannabis sativa
atcctggaatcataaatggttttctagggcgagtaaggaaatacttattaaggttgtcctttaagctatcccctcatatgccatggcctgttttcgtattcccactaagatttgtaagaaaattgaatccctaatctctaaattctggtgggaatcctctggtgaatctcgtaaagtccattggaaaaactggcaaattaagtgtcagtcaatctaagtttgtgggaagtttgggctttcgatcattaactcattttaattaggccatgcttgctaagcaagcttggagagttctaaaataccctaattctttgctgagtctcaccctcaaggctcggtattttccttattcctccattcttgaggttatttttggccataggccctctttctcttggaggagtattctttggggtcgtgacttactcaaacaggggttaatttggaaagtggagaatggtaaggatattaatcatgtagatgatcattggctccctagctttcatttcaaaacgttttcctcgtcttcccctcctaatcccagcttatcttttttcatttccccttctggcgattgggatttaggtaagcttatttcgatcactcatccaggaaatcttttgtgttccaatttctggtcataattgtactgataatttgatttggggctcaaatcctactgggaattttaatgtcaaaactgcttaccatttagctcttaaatctagggatatgccttcttcttccttgtttgatgattgtaagcatttctagtctaagatttatggtcatctggtgccccacctaaggtcaaacacttgatgtggcggactctctcccattctatacctgttgcctcttctctattcttttgtcatatcattccctccccgatttgtcccatttgccaactgagaacggagactgtagaacacgctatccttgaatctcgttatgctaaaatagct

SEQ ID NO: 89519 - DNA, 556 bp, Cannabis sativa
atatatagtttctcgctaatacactaagcaccagtttgtatattgattcctcgcctaataccttacagtcaacgttttacaaatatactctgatacttatgtaattaatgagttattccataaaaagcgattgcatcgatccatattccctttatcttgatatgtgtcctccactgagatggcagccgaattttggttataacatgtttcagtgttttaggaagtgatttcccctttattttttaattgtaatcggtttgaattattgtatgttacttgtttgtattcattatgttatataaccggttttgagttatttcatgttattggtttttattcattataacactgttatagaatcagttctattttagttaaaactggtttaagttattttgtgttatttatttttattcattatgctgtagaatcggttatattttaaatataacttgtttgtgttattttgggttatttttttatttattatgtcatagaaccggttctatttttattatatccgagacatttgatctctacttttttttaaaaaaaa

SEQ ID NO: 89520 - DNA, 655 bp, Cannabis sativa
ttatctctattcactattagtagaaataaataaaatacttattctcacacaaattgtataacaaataaaatttaaaatatatgtatatctttaccgggtattacatggctagtgcagtctcagaagtgtcttggcttcaatcacttcttcgagagttaaacaatatctcaccaacagttccttcggtttggtgtgataatcaaagtactgttctattggctgcaaatccagttctacatgctaggacaaagcatataaaaatcgatttgtatttcgttcgtgacaaggttttacagagacacatacaggtgaagcatgttcctgctcaagctcaaattgcagattgtctgaccaaacctatctccagctctcgattttctgatgttccaaccaaactgtgtgtcgattcaaaatccacactcagtttgaggggggccgtcaaggatgatgtcacttaagttgttagatagtcaactaccttaactgtttttctgttagttgttagtagttggagtattctgttttagtttgttactgctgtatataaagaactctgtaattcctttccttcaatcaatgaattctctctttctgcaattctcttattctctctcaaatatcaaacactaacaagttttatttgttgaatttatca

SEQ ID NO: 89521 - DNA, 506 bp, Cannabis sativa
aagtatacttattagtaaatataaattttataaaagcacacacgtggcgtccatattggacagggcgttacaacatggtatcagagcgccaaggtgtttaggtcatgaagacttgtttgatatctacattggttgcaaagactcgttcgactcatggttcagtaaactttaattactagataattgttaattatccgatagtttgtttatttgaattatgttagtatcgaatacgtgtgggaagagttatgatttatggagatacttattagtattgtcattgcttgaaatgtgaccgtaggtgtatagattatgcacccgaggtggactggtaggggtaaccgcgagctagttgggctcggggttgctggtgagggtgagaaccctctaccaccacctaactgggaagaattattttcttccatgcaagaaactatccggcagtagggtgaagcgagctcagcctgttccaaatcttgatcctagttctccggcaccattggtag

SEQ ID NO: 89522 - DNA, 1122 bp, Cannabis sativa
atctaagctatatcctattttgattgttacaataagagcaaataaaaaaaatatatgttactttgtaccacttgtacacaaagtttttatctttaaggacgcactaaattccgaaaaataataataaaaaaaaaacttaaaaagagtaatgagaatagaaataaaagtaaaaatgaaatagaataaaacttaaaatgtatgaaaaaaatttaatataaaattattagtttttttttttcataatgtcttggaatagaatttattttcatttcaaaatgaaataatcaatttaccaaaatattagaaaggtcattttattggaatgacatttcaatactttaatatgtaatcaaataagataatggaatgaaaattatctctttttattctattccatttcatacttccactcaaattataaagtatatatagaagatacatcacaagtttctaatttatccttgtcttttttttgcatacggaattaaattataaaaaagttttattactacaaaaaagtttatttatgccggttttaaattaacccaaaatcggatattatttgccctaatttccaattgatgcttttcagacactagctcaaatatgcaaaatctaatttctttaacttgttgcatggtttgcattgaaaaaataaatcaatatataaagattaatatatcaatcaattatatacataaaagagagatatgagacagtgacatgacactttagaatctctgcaaatagcactatttgttttcttcttaattctcttattttttttttaatcttttattaaatttataaaaatttatttattttctcatatttttctctattttttaaacttttatctatctaaaatatctcaaacctatctatttatttttgtattttttttaaaaaagtaagaaaatctatatactactctaaatcgtaaaacacttctaaagcaaacaaaaaatacaaataaatatctttatatattaaaagtgtttatctaatggcatttctcaacatgtgtttttttaaattgagtaggttttttaaatggagagtttagttgtatgtagatccaaaacgaacgatgagttgaaagtacaatcaattcaccattca

SEQ ID NO: 89523 - DNA, 691 bp, Cannabis sativa
taagtctcctttcaaaataaaaaaaaaaaaaatcttggttcacactttatgtaacttgtctatttttttcacaacatctggtaagtatgatttgtatttgagacaataaattcttatcatctttaaaagcataacatggttatttttcctttttataaaagttagaaagatgcatgcattagaataacttgatttttgtataaaatattttagtctattatttttttcgaaaaaaaaataatattttaaaaaaaaaaaggtgtcatgtgacttgacttttgggctaagaaaaattggtcatttgtctttcttttggtaagtatcaacatgtgctttatttagtaaatttttgatgagattcctcttaaaatttgatctcttattctttatattttgtttaattgttgatcatgattgcttttcaaatcttaatttttggaaaatcttggtttctatttgtctttggcccttatagattaacaaaaaggggaagtatttgggattttaattttatactcaactgtccagggggatttgaagtttgtgtttgtattcgtctttagtcaaagttagctttttattttggtttaatgttgtgcttctcaggggaagtttttatatatgtttgtttcgctaactttattttgtaggcgtttgttaattaataatattttgattatctaaagtgcca

SEQ ID NO: 89524 - DNA, 851 bp, Cannabis sativa
  modified_base (732)..(740): a, c, t, g, unknown or other
gtatcacatttcatctacacatgacatggtttgtaccataagtcttcccagcatgaagactacatactgctaatcattaagcactacacgaggagcaaaagagataggcctcaggggtaccacctcgaggtgagtacctaccccgtgaccaagtaggtcaaatggtaacgttgtatcttaaggagtaccctcactgtgaccaacacatcaaatactctcccatcattaaaatctcgcataagcttaaaggtggttaaaaccccacgaaaatagcgggatattcccgtaagagtcagacctccaccaacttcgaaaatcaaggagaatgttaagatatttttgcaacaaggacgtgtctccaaaagagagacgcaccaatgcttcccttacataaggggtcatacatgacctggggaagaaatctgattttttttactcaaagagcagaaactcttccatttttacttcttgcattcaagagcctattcttgattttgcaacttcgatcaataaaatacaaggggagtaggctattaccaacacttggggtcaaacctctttaaatcttagtgttctttattagcatttattatgattttagtttaatttctcatttattacgaatatgcatcgattggctaaaaatccagtcaacacattttctaagttccgtattaagaaagtatacttgtaatgtaatgactacctaagtaatttggattagtaaaggcnnnnnnnnntaatttctgttatttttataattatttatgaatttaattatttgtggaccccattattagaaatgagcattagagttataatttctcattttcggagattttattaaactc

SEQ ID NO: 89525 - DNA, 845 bp, Cannabis sativa
catttgtgacgttaaagtgggcagttgttccatgtgcgtggtgactttagctagggatcacacatggatcgttatgtggatgattaccaacatgcttaatttctctaacccacttgttggagaagttgcggcatgtcagttagctttagagaccgcgattatgatgaaatacctttttgttatgattgagagtgactcaaaaatagttatcaatgccctgaaaggaaattgttccaattgagtattgataattatatccaacaatgtaaaagactctctaatcttttatttagatgtaattttttgtttatttccagactgtataattttgcagcccataatttagctaggtgggctttcgttaaaaatattactggtatggttgagatatcttctatatcaggaaatatcttatgtaatgaccgtgagatctaacttttttatttacctataaacgatattttttctaaaaaaagaagagattttttttaaagatataactaaaactaagaaatggataatctagtccttttatattaggttatatatatgtaaatatagttccccttattaaggttataaattacctctgtctcccatttttatgataaattacattaaatataattgtataaattatttttgtggagcaaaattttgattagagaagaatgaagaatattatgaagtgataggagtaaaattagtagaatgattaaaaaaaaaaggtaaatataaaaaattttaaaagaggaggtaaaaattaaagacattaatttaaagggattatttcataaatacacaaaaacaacaaaaaaattacaaaaatacgatttcacgaaatt

SEQ ID NO: 89526 - DNA, 1015 bp, Cannabis sativa
gtaaaaaaaaaaaaaaatgtaaatggcatacatccaaaatcgaacctacgatgatgaggtggcacaaaaaggggtgagagagttttgaattggtagcggaggagctgtatacgtttttctttcccacgtactatctcctttgacagaatttatgaaagaaaaatgtgatattattcatataaaaaattaaaaattgtaagcagctaaataaaaaagcgatttacaggctcacaaaaagaaagaaaagagaagaacagaaactgaagaagtagaagagcttttattggaacccaattgcttgcgacctcgacaatcggtggcggaacaaattgagccctaagaaccttattcggttaacgttttcgatgatcctgaacccgaattgacccgaaattcagttattagataagttgattggtggggaattcatcatcattggtgagaattcggaagaattctagggttattcattggtgaaaatgaaggccatggagactatacaggatctgatcgacgaggccaagcttcgaacgatttggtggggtctctgtattttcgccgtttcgtattttctgtctcgtaagcatccgtctctctggaaacttcttcaaattgtgcactacgctctcttttaatatgattctttgtgtagttgatttcaataactattttttttccttctaaattatttatggaacttgatgggggcaatgagaagagttgtttctttattagttgtagtcagtagagtttatcttttatgtttgagaactatgacctgatataaattgatttgagtggttgaaagctttttcttccttgtttaattcaggtcttaacggtaagttggtgataattgtacaaattctaagtttcttccatcaagtagatatgttggccagagatttattgaaatttcgtaatcaatattgtattataaaaatgtcatatatttagaatttataatagcttagctgtacaatcatgaagtttttcattcttactcttatattag

SEQ ID NO: 89527 - DNA, 1644 bp, Cannabis sativa
ctccctactccacttacctctccctcctctcttcttctctctatctctcctcacgctcttttgctcccttcgtaacgtcttaacctctaaggacgccacatgtgtgcttttataaattagtttataataataaactaacgatttaattaaaatttgtgatttaaataaactttactaagataaattttaaaatagacaaggttatcccatgttacaaaagttttacaaaaagtttagtataaggtttatattcaaaatactatacagccaaaatatcccctaacaactcgactctgtaggttggatagatcgatatgtacattaccgaaaaacactgctgactcatggttgccctaatttacccttgtccttatctgcaccacaaagcacccgtgagtcacaaagactcaacaagaaaagtaaaagcaataaacacatgccaacatataaataataattccagtcaatcacgtacaagcagtacaaataatcacatatgtataacaattcaaaactacacaattatctatctaataagacaagctaaaatagttactttataaagtaaccctatccattgttgtctaatgaaacaaccttaataagcctaaccaaacatccaatgtaactaccgttacttaatgaggtaaccgataagtaagaaacctaacaacggtctcaatttagagtaatgaatctttcttacaaaatagtgattaccgtatcttataaattataatcgataataatcgaatcataaacaataataaccgtaacttgtcttcacatgctaagtggtacgaatatacttttcttatctcaaatccttattgagatgtgccgagcatcaaccattcaaaggtaatcaagaaaagaacttggcaagagtacgtgatccccccaaaaagggccaagccttttataagtaattgggccatggcaagagacccaaagagttgggaaagccaaatggactttgagaaccaaagatgggccagcaccagataaatgtgatttaaaatgatcacttaattcaacttttgccatagagtgaactttgatgttgcctactttactactataggcactaagtaatcgacttcaattatgttaccaagtcttacttttttacaatctttttcatagctaaaattattgtttattggtctttgtaaatcatacagaagagtcaaaacgagatgaactagtttatgaataagactattatcttttgatttccttgcctctactaatcttctcataaaagacacttttatacaataatcaatttttttttttaagaaaaaacattacaaacatactttttcagtaaaaataataaataatttatttattttacattcatttgtaattgtattataattgtcatgagtttatttttttagttattttttattgttttatagtttatttatgtttatataataattgtcgtagttaatttcttgttgtttttatatatttttttttgtacttttttgctgaaaaaagtatatttttataattttaaaattttacgaacatatttttttaaataaaaaatttcaagctgtaaaattataaataaaatataaaaaaatatatttttgaaaattctccaaaaaaaaaaataacacttatgca

SEQ ID NO: 89528 - DNA, 3244 bp, Cannabis sativa
tttaacatagtattatataaaaatatgatatataatctaattcaatataatacaatacaatacaatacggcctaatacggcgttccaaacgagccctactagtatacaactatacaagtctacaacaaatcttatatctgtattaaatttataattgtagagaacttaaaagtgcattaaagtaacactaaataaaatgatgtatgactacctagctgactggaggtggtccccattgacaaacacaataccaatttctctctcaagagacactaaagttccctcaaatattttgtaaagaataaaaataaatctctttcaaaaataaaataaaataaaataatcataattataataaatcggggtttttttttttttttgataattttataataaatcggttggtagtacttttagggtagttttatagtataccctgaattggtagttttgaaacaattttaatctgttttggttattaagagaattttttaatttaattttttttcgtattcattgtcgttatttaggagcacttttaaatttttaaaatcgtttgaataatttattgtgcgaaataaagtttaaatattttgttgcacagatgattgctttttctttgtgacagtctgtagtctcatgatccataagaggaaataccgggtaaattgtacatttctacattacttaaggaaggtcaagtgtgatgattctaagactgtatacgtatgggactacacaattaaaaaaaactgaaatagattgatgggtactacctatatcaacaaagtgcatcttattttatggtagtccatcacttaagaactccaaagttaagcatctccttgacttggagtaattttaagatcactgaacttttggaaagtgtgcaaataaggacaaaatactctacaaatacttgtgttggtttgcagaatcagtcttcaattcaggaagcagctaaaatataatgtattcgtgtatatgaactataaatctattaggggaagcctaaaagaggcttgaagccgtcacattcttatacatgtggtaaataaatgtttaaactttatttttagtattataaactattcataagtttttataaaatttataaattatcttaaataactataacatatatgattaaaataaaaatacactaaaatttttcctcaataacgaaaagataaaaaaatgtactaaatgactttttaagagatggtgtactaaatatttttcggacttttatacatgaaaaaaagaaattatttgtgttagttcactacaatggaatgataatagtaataagagtagttatgtatagtaataagaatagtaatagtaattaatatgaatattaacgggaattgtgatataaaagtaataataatattatgatgaagtgttataaatatgggccagacattttgatacgacatgaaatcaacataagtctcgaaggtacgagcacgattaggtacgaaaaagtatgagcttgagcatgacaaaatacgggcttgggcacaatacgatacgatactacaaattgacacaacacggtacaaaaaatatatctttaagcacgatatgacacgaaaagtacaaaagataagatacgtaagcacgaatagactagtccgaaaagtacgataaacgacaaactcaaaaaacatgacacgacatattaaaattcttatagtttaataataataataagatatgagtttatcaattataaataaatttaaataataataaaatttaaatataatacttgatattataaattttattattaaaactattaaaacataaaaaattaaaattatatattaattaatttatagagtgtgatataaaaattttgatatttataaataaatatttaaattttaataattacaattactaaattatatatatttcaaagttttaattatatttataaaactttttttaaataaacatttataaaatttttgaacaatattttacaaataattatattaaaaagtattaacataaaaaataaaaattatctaaaaagtaaaacacaaatttaagattgaatatgaaaataagttggatctgtttagaaaatacgggccgacacaagcaaagtactgcacgaatctgagcacgacacgaaaatactaagtctacgagccgtgtcaggcctatcctttaaaaatattgacacaacactacacgattcatatttttcttttttgagacagcatgagacgatttgttttttaaaaagtataaataaataccaactgagttagcatgacatgtacaaacttatagcactactactctactaagatgttggataatgagtagtgtattaaaaatatatatatatatatatcattaaattaaattcttttaataatggaagagtataagagtaatttttttagtaaataattggtgtaatagtaatttccttttcattaagccaaatcaaacatagtataatattaagttaaatatataaaaaagaaaagaaaagaaaaaaagaatgtgcatttggcttatttttgacttaaagcttttattcttctatatagctagctattcaagtattacctcctacctccatccagctattgcaatattgattcctgtctcttctctctctttttttttttttcataatttttaaaatttcaacaaaaataaaagcgtgtccattaaaccttttcaaatctattattcccatttaaaaagggtatggaaaccaatacaaactcctctctctcagagactctctctctcaaaggtctcaattcaacatataataaataaataaataaataaataaatgaattctcatttaggattagctatgtccaaaccattacttctactccttattccttttctcttcctctcaccttcactactcgaatcggcaaccaccgccgccgtcgaaaatgtggccggacaactgttcagagaagcaccccagttctacaactcaccggactgccccgccgtcgagggaaatgcagaagcggacggtgaagtggacccagacgaaaacgacaaccccatctgttctgaccacgccgtccacgtggcaatgaccctcgacaccgcctacatccgtggttccatggccgcaatcctctccgtactccaacactcctcttgcccacagaacgtactcttccatttcgtcgcttccgcttcagccaacgcgtcccacctacgcgccacgatctctgactcc

SEQ ID NO: 89529 - DNA, 650 bp, Cannabis sativa
  modified_base (179)..(183): a, c, t, g, unknown or other
aaaaatgtagacataggcgtgtagaggtatttaggtaataaattgtgcaaaatggatttttcatgtaaaaatttctagtatctatatatatatactagcaaaaaattataagaggcacgtatactaaatttgatgttagttttttttatatattatttaaaagtgatacaattaaaaannnnngaaaaaatattattagttattaaatgagattattattatgtgtatctaaatactataatttataatttttaatgttacttgcgaagcctgcatgtactttattaattttcttgtctaataccaacttaacaaaaatcaaattatgtccaaaaaaaaaattggcaaactgtcttatcatctgcaatagcataataaagaaaagaaaaagaatagtcaaaatatgactgtcagtgtatttgaaattaaattttatttttttattccttgaaagaaatcattttcctattgtgaagaaactataaatgatttttgagaatgatttatagcatgtagataaatagtctcatgcatataaataaaatgtatgaagcgttagcgacccactacttttaagttgtgtctactccacctcataagaatgtatatgtcattttttttgttcagtctacaactgactactgatgtgt

SEQ ID NO: 89530 - DNA, 860 bp, Cannabis sativa
  modified_base (830)..(833): a, c, t, g, unknown or other
cactaatgccttttagcatttctcgtgatgagcattgctattggacaccagtggtgcctaggacccttaagacgtgttgtcttgcggtttgctaacgatactctttaaaaactattatattaaattatatgggacctgatactaaattagaccaatagcgatattgagtgttttgcatcatataccttttagtatttctcgtgatgagatatatgtggacaaatgaggatatatataataataatttaattaaatgatgtcatcagacaaacaggagcaagtactactcacacacaaaaagtaagtaaaatccattccgtatttacttgtatggtcctgtcaataaataatatgtgcaccagtttaagggatattcataatcgcaatcacgtactctccaaaatccaaattggaatgttgcaagatcttcctatcttctcaacttatacgtacaacccaaacaaatgactgtctctctactacataaacctatgctaccaccgacttaaaagttaaaacccaattcatttggtatcttctcaactccacttacattttcttgttcttgttaccattacataccggtgtttgcagtgtgggtagtgcagtttttgaccattttttcaaactaacccgcacatgcagttttccaatttcccaaactgcacccgcactgcgagactaaaaaaccgcaaaaaccacaccgtaaaacatggtgaggtgcggtgtaatttttgcggtttctgcggttttgactatcaccaaataattaaactatcacagataaaataaagtttgagcaacacttatcaaaaataccataaggcttnnnnataaatatgaaaaaaaaaaataagttt

SEQ ID NO: 89531 - DNA, 842 bp, Cannabis sativa
aaaacaatattgaccaaaagtgaattgatttttaaaacagaaaacaacattttgttgttttcaaaattattattttttgtaactttgtgattctgaaaactgttttcaaaaaacaagtcaaattgttttcaaaaaataattttctatttttgaaaacaaaaaaatagttttttagttatcatgtcaaacatgcacatagttttcgctcactccttaaagggggcagcgagaaaactctcaacacatcaatgcttgaaaaatcagtaaatcttttattgatatcctcatgcaacatccttagatctttacctacctccatgtagaatggaatttctctggttctacaagacatcaaaatttactgttgaacacataaggaaacgtgctaacttgtcccctttcaactctacacaaagagtcaggatgactaaagaagcatcctgctcatcaaaacactctgtttttagaggaaacagagcacaaaactagagcctcctagcaaacgaacatttgaaaaacaaatgactcggggtttcgacgatcgtgaacacattctctctccccgttacttgcaaacttatttctagtcaaagagtttcacaaaaaattttccaaagcatcagactcaatctctggtggatatttttggaccaaatgaacttccaatgcaatagagaaagatcaaatcgatgctcatgatccaatcaataggctgctttaacattgaattttccattatcaaaccctttccacaccatcgtatcccttttcaactctttgacaatattgatcaagacaattctctcctcaagctcctctccaaataagtgtcaaacatatct

SEQ ID NO: 89532 - DNA, 760 bp, Cannabis sativa
aataactaactaataacaaactattttaaaaggttcaatataaataaatatcataattgaaaaaaaaaaaacatagtaaaaagacctaagctatttactttattttttttaaaaaaaagacagatatgaaatattaaaaataatgggatccctttttaatgttttagcaaaaatgtatgcatcattcgccataaagccattacaacaccaaaattcacaaaatatcttagtagaacaaaatgtattatgatctgatcccatgaagccatttacctcaaccacttttaaaattttcttaacacgtgtaaatttttacacattggttcaactcttattgaaaggaggttcataaacctgaaataattagactataattataattacgaaaagtaatattaatgagattatttaaatgaaaattaaaagttaagcaaagtacaattcgttagaatttttgtcaggtttgatatcaattgtaagagtttttagatgatgattaagcacaaaaatgacgccgaaaagttcattatcatgcatagaaacaaaagtagtttaatgtaaattcttctcttctgctatggaatgtaggaaaataaaacatgattttcgatctattttttacctttctgcttttcaaaacctttaattgtcttaacaaagagaagctcctgctagcatatttatggaggcaggtgattcgtgttttgcattatagaaccggctgtgcacctaatatataccacacaaaaaacgttatcag

SEQ ID NO: 89533 - DNA, 583 bp, Cannabis sativa
catatgtacctgaatatgatcacactcctctacaaaaaagcgaagcctgtcaccaatttcttctcctcttaaaccctcggtaaaagcatctcttccagccccataattatcgaattcttgtgcatccattcctaatccagttaattcatacaaactctggtgatgatagtgaacttttgagaagtctgtccaaaattgtacattgttttgtaaactttcaactacatcattatcatgaatctctttcggaagactactattcccatcatttacgagagttgaatttccatgttcttcattgtacaaacgttgtaaaaacaaattcttcttatgaggttcaaaggcatgggtagaaatattaccatccctgcaaaatggtacatagatgatgaattcgattaaagatccttgcaacacaacgcaacaagatggccataagcttgataaatacaattatccgaacgtacgtatatgaaaacgaatcaccaagaacatcatacgaagctacagacacctaattgaaagactaaccatgttaaaacatttgattcggcatgtaaattttcaccgtacaatgttccac

SEQ ID NO: 89534 - DNA, 597 bp, Cannabis sativa
gactatatgaaaagttacaagccacgtaatcaaatggttattgagaaaatcataaatgagatttccaaaccagctatttcaacaccattagttaaacgacagacaacgattaccatagttcttgaaaaagaaacctcaatacatcgtcatagtgggaggattgtgagacaacttgtccactatgaacatgaagcacatgttcttatctctgacacatacaaggatgatctattaaattacaacgaaataatgtatgaccctgagttagacaagtggaataatgccatagattcagaaatggattccacgcgcaccaacaaagtttgggagtatgaaactccacctgaagatattacgcctataagatgtaattggattctcaagaagaagaaaaatgttgaaggaaaggtagagacccttaaagctaggcttgtggccaaaggctacatataatgagaagacgtcgactatgatgaaaccttctctcttgtgacaatgcttaaatccattcacattcttctttccataactgccacatatgactatgagatatggcaatggacgtcaagaacgtctttctaaatggtgatcttgatg

SEQ ID NO: 89535 - DNA, 548 bp, Cannabis sativa
aagtgggtgtattttagggttttgttttgttcctcaattacaatcttttggctaatttgctttgattaatgaaagttgatttttaaaagagaaaagcattttttttaatttgccattattttttaaatatatatttaacttattgattatcattaataataattactttttatgttaatttgaatcttaatttgatattatgtattgaagcacaattgcaaagaaaaaaatgtgctaaatatagtatttacttatattttgtgtcaaattttgtacatattttactcagatgtctcatattattattagtgtaatttaatatatatttttgaaaattaaatttaaaattaaaataatgttaaatttcacatattataatttaacctcgtttttacattttaatatataactattatcttatttcactcattataaattaattttgagaaggaactcgataaattttatcacacacttcactttaggatactttctcaattacacttccacgttctaaccataagcataggtgagtctactaaaccaat

SEQ ID NO: 89536 - DNA, 511 bp, Cannabis sativa
agaggatgagagtaattaaataaaaatattctttgtaaacggtaagaaaaataattacagttatatatattttaatatataataattctgtaaaaaaattaaaaattaattaggcacgtaaagatataataaaaaaaatctccaccactttcaacaaaccaaccaaccagtcattagtaactcctgcatgagtaaccacccctggccattttttgaataaaaatcataagatttattaattaataaattcgttcaaaacaatagaacgcactttagaggaacagtcctctaactgaagcacacgacctgtagagaaataagagtctcttgccaagcaatgagccaacttatttgcagattgttttataaaacacaaatcaataaaagataaagccaaaaacgaatttcgaacttcttgaacaataagaccaaactttgaaggcataaaaataccgctctaaaatgcttggacacacaccaagctatttgtttccaacatgattctatccca

SEQ ID NO: 89537 - DNA, 1249 bp, Cannabis sativa
gtaatcctcattatatagcttttctaatgtatggggatttccttgtataatataattatgattacaatgtaatcccattacatcatttttaaaataaagcaaacattgtaatggataatttgattctattacgattcccattacaacaaactaaacatgctacaagtttattaatgtaacttaaacattttgttatttttatattttatattaaatatgactatataatagaaagtgttgttctattttcaaaatattataatttaaatttaaatttaccattcatatctctctcatgttttattttatactaaactagtcaacacagctgcctttcgtttagttattataggtattaaattattattgtatatggcgtgtgaaaccctcgcttcctctcatggcgaagaagaagcggacgattttgaagccgattaagagtacggcggtagttgagtcggagaccggtgacctcccttcaatccaacctgaaggcgatgaccaacctgcgactgaggtgttcctagacacgtgcgagaatttggaaggagagccaatcgaagagggttcgattgagatgaaggggccgactgtgttacctgcttcccccaaacaagtgcgttcgcctgatgatgtcgagagggaggatttcagtgctcaagctaaggacgtcaggagcaggttcaagaccaatcaggtttgtactccatccacacgtcttgaattcactgaacatatgaaaataggggaccaatctgttgctaaattggacttatatgaggttgaatgtgaagcttcattctggaaaaactctgttgtctgtattgttcttggagcaaatctacttttcagggtctttgaggggtttatcaaaagagtttgggggaacttgggtattgaaaggattgcaagaatgaactcaggatttgcgttagtggaatacgagtggcttccttcaaagtgtggagcttgtgacttacttggacatacaatagcaaactgtaacaaagagaagggtgttgtttggaagaagaagggaattgcagagcagagaagtaaggctctggttgctgaaaaaactgatactgtgaaggtaggatctgaattaggaggtgagtcagtgggagaaggaggctgtcaagcagagaagactcacggcaagggagaaaatgaacagccgattagtgttgacactagttccaaagaggtttggcttactccttgcaagagaggatcaaaacaggttgct

SEQ ID NO: 89538 - DNA, 1374 bp, Cannabis sativa
  modified_base (503)..(506): a, c, t, g, unknown or other
agatttggtccgatggtagtccgatgggtggtccgatgggtggtccgatgggtggcccgatggggtagtctgatgggtagtccgatggtgtaaatggggtgatgtagatgagggtattttagggatatcataaaaattgtcatatcttacaaatattagttattatttgtttagaaaaaaaatttcaaccaaatgtaagcataaaaaatcaaatttccctatcactattctttttgttaatgtatatatgaagttttattatctccttttagatttgatatcattctaacacatgtcaccatctaattaccacataattaatcaaagttaatagatggatagctatagaattatcgttttagttaagggaaatttgattttctatacttaaaaaactaaaatattttatttttaaaccaatacatttaaaactaacaaaaatatgacacttttttcaaaaccccaaaaatacccctcaaactctcacagcatctctctttctnnnnctatctcggcatcccacaaccccaagttcgatggtcggaccgtggggtccgatgggtccgattggtcggactccatcggacccatggtccgaccatcggacctggggctttttttttcattcggtgtgagagagacgaagagagagggagggtccgatggtgctgagttgtgttattataattaaatgtatactagtgatgatgatgatgatgatgatgatgatgatatatatatatataaagagagaagaaaaagagaaccaacttttaatttaatgtacttactgtcactactgttttgttttgttattaatataatcaaaattttgtacaaactagctgttggtgacagtgtatatgattatgtgtgaggatcttttacttgattttttcttttatgggtgagaggaagtgagcttaaatgggaaaaaaaggtgtgtatgccgtaggtaactaaaaaagctggacagggttaattagagaagaggagaaatagaggtttgtactgttatagtactgtaggtttagtttggtggagaagaaagaggggacaggtggaaggatgagaaggagtgatggagggaaatatctaatcagagggatgtgtttgatctttcttttgggcaaaaaaaaatattgcacgggtccgaccatcggaccactgtgcaattttttttttcggtttgagggaaacgaagagagagacgaagagagagaggcacagtggtccgatggtcggacccatggtccgatgggtccgattggtcggaccccatcgaaccactgtgcctttttttttttgctcggtccgagagagagagacgaagtagatagagggggggatttttggagttttgaaaaaagtgtc

SEQ ID NO: 89539 - DNA, 752 bp, Cannabis sativa
tttgggtaaatttattacttaattaatttattttgtgatttttgagaattatggggttctctctcatattaattagtgttgagtgtagtagcccatgtttttatatatggtttaatatttttacatttaatacacgtgagacaatgttcttctcaatatccccctcgagagatggtggttatttttgttatcttgtatcacaagccatgctatttgctcgcttatttttgttctgatctcaagtgtctttacaccatttggatctcgtgcggttggctaactatctgaataggtgtagatcgaaagcctactagagatatgactctgatactacgttgaaaatcataggattctatctcaaaaccaattggtgatgagtgtaatttttgaatttatttttttcgacaaattaaattaataaatgaatctccgtgcaaattacttgcccacacagggatttctcatcctgccctcgatagggaatatgagaggatgggagcaggtcgggaactaaaataattaataaggataggggatgaggggacactcctcgcttattaccatttctattatacatgttgccaatagcctttcattggtaaaagagtgtttcttttttagaattttaaaaaattattatctataagttgagttttatttaagtattttgtatataaatatatttttatttaattattatctattaagagtgcacccatttttaatatagtttaaaaatagatatttttttt

SEQ ID NO: 89540 - DNA, 1311 bp, Cannabis sativa
ttacattagaacacaccacagaccctgtccagacgcatcacagtaaacgacaaattttttccaatctgatggtaatgctaataccaaaactatgatcaatcgttgcttcaactcatggaaactggtttcacatctatttgtaaaaaacgttgatttttcttagttaattttgttaaaggcattgagatcttggaaaacccctcaacaaaacattgatagtatccaactaaaataaaaaaaacttctgacttcagtgactgtctttgatcttggccaatcgaagctctcttaatggttcaatccatgagaatcgataataatgccaagaatcttgatgtcagcaaaggtgagataaatctttctcatacgaagccaattgggtataacaatttttccaaacctatttttaatggatctcagaatccttttaccagtcacagaggtggcccctctcattttgatggatctggtaacatgtatggtggtccctcatctcaaaccatgtcacgaggtggtcccccttatgttagaggtggttctactggccttggtggtccccctggaaatagctgtggcaccaacaactcttctggccagagaattcaatgccaattatgccacatggttggccatactgttaaataatatttttattgtttggacaagtcttttacaggtcttgaatctttcacaaactttcctgctaatgccaacattgctgagatgcaagtcatgtatgccacctctgaatctgtatgtggtgatagctggtatctagagatctggtgaaactcatcacctcacaccagacaactccaatcttggcacaagcacaccctatacagataatgaacagatctatgttggtaatggcactggtctaagcatcgagcatattggtaaatcctttcttctctctcctttctcttctcaatccctcagtattaataatctcttacatgttccatctattatcaagagtctcctgtttgcacaagataataatgtattctttaaatttcaccaattttcttattgtgtcaaggattcagtcactcagaagatattattagttgggaagcttgagaaagggctatacaaatttgactctcctcaactcaatcatgctacacctctgtcttctatttattttttcaattcctcaatgtaatactcagtaatactcatcaaatggctattcaaaatcctttttttttcctttatggcacagtaggcttggccaccatatgcttgttgctataattttaaacactacgcaagtatacgcaatcaagtagtaaatctcacaca

SEQ ID NO: 89541 - DNA, 559 bp, Cannabis sativa
tttacacttacaccttatttttaagtaaaattacatgaattataggaaaatttaaggatttacttttttaaggcaaaattaaataatgctaatggtgtgtgaactttttgttttggaaataagttgaggaatacctcttttttgtatttattaatcaaaaacaccctcatattatattttattaaaatgtacctacttttgtgagtgcgttgctcaatatactatcactctccacttaagtctagcacataatttacataaatagaaattatctttaattcttgataaaaaaaataataaaatatttcaaataaaaatattgatacataattttataaaaatattaaagtaaattaattaaaagataattatagtaaaactatgtatgtaaataaattgatagtgaaagtacttaagtaatcaattttgttataattaattattaaaattattttttaaaaaataaatatttatataaagtattttaaattagcttttaaaaaataataataatttaaattaaaaatgaataatatttttaatttattaatattaattt

SEQ ID NO: 89542 - DNA, 577 bp, Cannabis sativa
tttgtttcaacatttaagaaagtattttagttgatatcacaatcaatcacctatgttatacttaattaaaattatttgtaaattttcaaaattcttttaaataatttataatatcaaaaataaaatttaaataattatttattgcacgtaaaataaccacacgtagtttcgacattgaaaaagtattcagaattttataaaaatttaaaagtgttctcaaataattataatgtagacaattatatatagagtaatttgtggtataaatacctaagtttaatttccagttgtaaatacatattcaagtttaatttttggcgttaataatacctaaattataattctagaacttctagaggtacctagctgttaagttgttacgtaaattgtcaggtgacaatctctgattggtccaagttattaaatttttattttttaaaaaataatttaaatatactaataaaaaaataacacgtagataatgacttaagtaaacttaggtatttatttaaaatcgaaagttaaacttaaatatttatactataaattaatcttaggctaattagtaattttttcc

SEQ ID NO: 89543 - DNA, 663 bp, Cannabis sativa
gtttaagtattcgcatcttggtgtctcgtttaatattttcttacaaaatgcgagtcgttagtattcatcttcgtatgtagcttaatgttgtttttatgagttatatcttgtctacaactgctacctttgaatttcctttctcgcaagaaaggttctttaataaaaaaactttaaaatttaaaaaatttaaagtgtagtgggtttgcaatgtatcatgtatttccagattcttgttattcatacacacacatacatatgcccctcaagtaattttaaagattgaaactttgtaattacttgaaaaatcactcaattttgttaatagctaaagttcaaaatattacatcaaaaatagaagttacaacatcagtttactggtagtaggatcgcaaatgctctacgttccagtagttctttattagtgagctgttaagacgagctaactagtaaaccccagttccaactattgcctcgatcacataaggaccctcccagtataggttaaatactcctgcagatgcgtctctcgtatttgtaaatacacgccttagcaccaagtctgcaacgttgaagagcctcttcttcacttttttgttgaagtatcttgtcactcggtgttggtatgctacattagtgatttgtgactcagtacgtttttcatca

SEQ ID NO: 89544 - DNA, 695 bp, Cannabis sativa
tggtaaaataatttccaatacctttacctcatatgccaatcattttcgatccggtattaccagcagaccagaatatggctggtaatcaagtggaaccatttcatgggggaaatcggatgcaagagtcaccagctcttcagggagatttagatgtgaaggatgccctttggactgggagcccttaaaaatttattctaaaacctcatgaggacatgacagaaggttgggtcaccactccccttattttcaattatggggaaacttgtaagggttccttagttgagaaaaagagggaacctgcatcgacattaaggggttcaagacgaaataagcagatctgaaggaagtatggtagaggtgaacgtcagggttattcttatctagagtgctcacgttgtaagaaacatcatcttggagaatgcaaccagaaaacatgcttctattgtgtcatgattgggcattttaagaaaaaatgtcctcagggaaagaaagataagcagaagctagaagcaaagcttgtacctgctcagatgtttgctgtcattcaaatcgatgttgtagccaatccttctgttgtaacaggttagcttattgtcaataaatcctattttactattgttgaccaaggttttcggcaaccaataaaataataaaagattaaagagctgtaagaaattaagagaaggatttttacg

SEQ ID NO: 89545 - DNA, 623 bp, Cannabis sativa
tttggtacatgtcaaagttcagtagacaaaaatcttaattagcctattataaataactgagaaattgacaaaatgtaacataatattaatttttgataactgtctaaaatttaaaaatatatttaacacacatataaataaggcataatttttagtggtaaggtttaggggtaattttttttattctaattataatttagaaaaatgcttaggtagagtcacgaaaaatatctctacatacagacatttttttttcattaagtatcactctattatttaatattaataattaattaattcattttatattatttttatttcttttttttttaaaaataatttagtgaccccttataaataaaattagttaatatttaatattgtggatccttaagcctcttactaaaaaatctttaaataaagtatcttacatgcaattttttttttatttaaatacttctgtagtatttttgttttgatatatagtgaaacttagagattaaatattatgaatatattggacatataaaattaagattttaaatatatttgattgtacaattaattaatcaaagggtaaataccattttggaccctgtattttgcaaaagttaccgattgga

SEQ ID NO: 89546 - DNA, 964 bp, Cannabis sativa
cctgttatccacgtttccagaatgagacaggtggattccatgtcaatattccacacccatcaatgagacaatcattaatggtaaagtgggccaatcccacccagaattgttcttctgaacaaaaggaatcatactatttctactacaaccaatataaaatttcttaaactaatacatgttgaattattattttaggattttcatattttgaatgttagattataatatttataatcaacatatatgattagtgctgacttgaaatttagccaactgacaatgaaggcttataattggtgatgatcaccacgtgtaaacaagaataataaatagtaaaaataacaaacgaatttatagaggctccccttgatgaaaatgacctactccccttttagttgaattcactcttgagagaataccacgcagatcacaggttaaaaccttgtaatttctagttatggctctcttatgtattacaattgtgagaacaatatgttacagatccaaaatttgtgagatcttgtgaagaacttaagtaaaaaattgacttagtgtctaggaagcataaatggcgtatggaacttagagaaagagagaactataggcgtgtggaagggggtctagatctataccctatatatagtgtaggacttacaagatatttttattcaaaaaggaagatatattcctttaaaatatggatattaacatctttttatattttatttaaaatacacaaaaaagtataattaaatccctaaaatataagaacaatatcttgagagaatatccctatcttcatgggctgttgggtctctcccgtaaatgtaggtcagcttgagaatcttttagaaggttgttgtggaccctacaatttgttcagcctacttgacgctgtctgcccgtgttggttggccacccttattcttagggcctagccgacgtgtgatgtttcattggctgg

SEQ ID NO: 89547 - DNA, 1193 bp, Cannabis sativa
ctccttctgacagctcaataatccctgaagaaagtgagtccacgtatcattcttatgggagcctgacctcgagtttttaagtgaaaatttcacactataacatattctttctataccaagatcatctcatcataaaagtatttttattgattatacgaatgagcaacttttttcttatgaaagttaaatttgcgaagttttgtttgaacattgccaaggcctttgtttttttgggtttttgaataatttacaccaagacaattactaaaaataaccttataagttaaccatctcttttgatggaaaatgtctatgcatgatgatatttttatttagtgcattacttgaggaaaagttgtttgttttctttctccaagctctacacattagtatatttaagtcttccttatattatattgttagctaacaatttcagattctttttcactgtgaatctataacatgagtgtaaatttgtactaagactaggtgaggaatatgacaagcaatgttgtgagttgagttgagttgagactaaatttgtatcctttgggtttatgtaataagaatgtcattcttttgaattgctatactatatttgaaacaatttgtacttcattttgtatatcatataaagtttttacgtttttttcattgcctactaaattactatactaatttttttctctttccggtggtaggatcttaaatttaggtggtatttaattgaaaataatgaattagaaaggaataatttttattactcttttgtttagttgtattttaaaatattagtagttgatttaaacatcattatacttgactattatgaatattgtatttgtaattgtactaacatcaactactagttattcaaaaaaaaaaaaaaaacatcaactactagttgtagctccaatgctctattctataatctattggttgaggcctttatttattgcactagactcttttgatatctactttgttataaaatattatttaatagcaattaaatatcaatgttcttttgagagtaactgcatgcatatggtgtttctcttgattattttttgtttcatacatctatattaataagagtatataggtcccgtttggtacgcaggattggactggattagactgaaaaagattggactggactggacaagattggattatactgaaagtaatcc

SEQ ID NO: 89548 - DNA, 627 bp, Cannabis sativa
atgtgtatgcattttgttttgctgtgaaaaagggaatgtggactttttgatactgttgtatttttgggttctcgattcatcaccgtagttggttgctctgtgagggtgactttgtaggtgatggatctgatggagacctctccaagaagtttcgagagaggcctcccacaataccatatttgtcatttgaatatagggcattaactgcatgggttttctttccactttttcagtgtctagtgaagataacaacttccagttggcacttttaaatcttgaagagattagcaggcatacctcttgcgcaggtaaatcttgatgacccaacctcgctagaaaggccttctgaagttgtttggaccaagcagcaatgaaaagacaaaggcaaaggcaaggcctgggacgcatctccatctcctcttgtacttaataattctatttgggaaatagatcaacaaactaatttgatgagaaattacggtctgttggaggcgtactctactaatggagacgttcggaacatttcgggactcatgtgtggcactagatgtctgtcctttaggaatcgccatcccaaagtgtttactgaaatatcatttacaagtatctaagtgttttaaggataaa

SEQ ID NO: 89549 - DNA, 510 bp, Cannabis sativa
ataccatatttactataatatttaaaatacttttaaatcatataaaataataaaaaatattattatttaatttaaaatttaaaatttaaattcaaaataaatattatataactaaatattatataactgaatagagttctgttatacccttttattttatattatcttttaatttaaatacattatcctataatatatttaatccaaataataaaagataattatcattttttaattcgatttattttacaaataaaatgatcaaacaaaaactaaatgggcttttatatgtcatctacatgtgcgtgttacattttaaagcccgaaattaatttttaatttccccacaaataaagtttattacttcttttacaacaaataataattgactaattctcattaatctcttattttattaggattaaaacaatatttactctaccactagcaatgtaacaattgggcaggccaccgcctagaccactgttggtcataggacaactagccaaa

SEQ ID NO: 89550 - DNA, 1519 bp, Cannabis sativa
agaaacttactttctattggtgaattgattgaaaagggtcacactataaagattgatagttccttttaggtcatgaaaggggaacttaagaatggaatttattatgtaaaaggaaagaccaccactagtgaaaatgacatggttgttagaggtcctgatatggagagcactaggctttggcatctttgacttggacatgtgagtgaaagaggcatgagtgaacttggaaaacaaggaattcttcagggtaaacaaggagagaaactggatttctttgatgactgtgtatatgggtaatgttgcaagttaaaattcacaccaaggaaacacactacaaaaggaaaactatactatatttactttgatttatgggggggcttctagaacaaaaactctagaaagtgcaagttactttatgagtatagtagatgactacactaggaaggtctggattttcttgcacaacataaagaatgaggcctttagcacttttctcacttggaaaagactgattgaaaaccagatagggaagaaaataaagaaacttagaattgataatggcttagagttctgttcttatgagtacactaggttctgtcaacttaaggaaattgatagacacaagacggttgtgaaaaatccataacagaacagacttgctgaaagaatgaataagactattggaaagagtgagatgcatgctgaagggtgctggccttgacaagatatttttgcgtgaagcattgaagactgcttgctatgtgataaacaggtgtcgttcaacagctctcaaattcaaacaccacaagaattcgtgatagggcaggtcctaattgttgatcatctcaaagtatttgggtgcacagcctttgcacacactagacaagacaaactagagcgaagggctctcaagtatttgtttcttggctaccctgatggggtaataggatacaaactatggtgtttggaagagggacatagaaaatgcataatcagcagagatgttgtattcaaagaacatgaaattgctatgaagacagatgcaatgaatagtaggccaactgacaaggagatgacgggtttagaaattcaaagcaacagagaagaagagcatggttcagatcaggtgaatactcaagaaagcatacattcagagacagataaacaagcaacagaagtacactataaatatatacatataaatatatatatcaatgtttatatacaaatttaatgctttattatattatatagtttagcaatattgtcatggtacctacttctaagggtggtgattcctcgcctaaataaagagcgggccgggagcagagataattttgaatcctcgcgagtgctaagtaacggggatgggatagcaaccccaatggatgggcctagtttaataattttttttaattatttacatataaatatgtattgtaatattattttagttattatacatatatgcttatgtttttttgtaattttttaataactttttaaatgtatttattta

SEQ ID NO: 89551 - DNA, 738 bp, Cannabis sativa
tttatcatttaacaaaacacagggtccaattgataacttttgtaaagcagagggtccaaaatggtatttacccaatttgggtggtaaaactcctttaaactcatgttttgttagcacttaactttttccatttatttttaggaaaagaaaaaaaaaataagaaaacaaaaagaaaaaaaatatgaatataaatttatttaatattttttttgaaatagtttttaattgatttttataattattgggaaaatttattgagattaatcacaatattttttcttgtatgtcaaaaataagatacttgtcaaacattacaattaacaatataaaatatcaaccaaaccatcacaaccaatagaaatacacaaatcaagctacatctttgcaagtatatcgtgtttagatctagagttttgttgaaataatttcaatgttcaagaagcaaggggatcttactgggtttgccaagggagttggcatttagggtaatttcatattgtaagggatttgggaatttgtacaacactggtgtttataatttgtctatcatataatgaatttactttggtttagaactcaagcactattcgactgatatgtgtttccagtgcaggggaaagcttgtaaattgattgtatttttccaaaacacttgaatcaaattgaacaaatatacaaagtaataagggctcgtttggtatgtaggattagactagattagactggactggacaagatt

SEQ ID NO: 89552 - DNA, 749 bp, Cannabis sativa
cagactttttagtcacaacataagaatgatggtttataattagtcaatttttttttacttttagtcacaagttttgttgtaactaaaagtaaaaaaatttgtagtaagagtatattatagttatagtaagtcatttcactcgcaacagaatatttaaatatatatttttaacactaaaattattttaaatttttcacaaaagagtagaatgtaagttataactaaaatgtactcaataatataataaatttgaatttaatttttataagtgctaaaaatagagatgttcctataccaataaaaataaaatggtaatctaccacataatttttatataatatatatttaaagtttaaatattgcattttccaaaaaataaagttcataatattacaaatatatatatatatgaaggaggttttcatcgttaaatcattattggacggttgtaattaatttaaaaatttactaaaaataattaataaattacttataacttaatactaaatttatttatttccttaaaataaaaaaaaaataaaaaaaaaattataaatatcaatttctaaaaaggttttttaaatatttaattaaaaattctatttattttagaaaaagttttgagcctactcactacaaaaaagttcatttttgtaggcccgtttatgcgccgataaaagtatactatatgtaccgaaaaatttttatcggtgctgaactgcacgggcaaaagttattcgctatgcttg

SEQ ID NO: 89553 - DNA, 1644 bp, Cannabis sativa
tgagggctggaaaagttggctttcgttgaagaattcaggtttgattagaagtatatacattgctattctcgctgtcgtttgctactatatattgttgaatagaaacatgtgtatttttgattgtttttctaggagagatgtgcatatagttgccgaagtgaagaatatagtgttatatagattataccttgtaaaaaatagaaaaatgactagacaggagaggcttttattgaatacactacaatgtaataatctatctttgattttcttattggtttgtataggagaggcttgagggtgtatttgttcagttgattaatgaagacttcctcctcctcctcagataagagatttgggtgatgggccaaccaatcgggctccaagagtttgtcctctttagtcgccttagttttaacaacgactaagtcagttgcaatggcttccttcacctcttttggagcctggcattgcccctaaagtttaacagaattgatgttctgaaattttgcaattaggctagacttgcaaagcatttctgtcgtgactaactccttgaccttcaatttttcctcagtaaaggctctgcattgagctgctttttggctatctctgcggttttgacgctctgggtagggaattctgaaaaaagtcaaaaattcacaagaaagccatcagtaaaccaactaagacaaagaaaatctaagagatgggaaattaaggttgcgagttgacaatacctggcagttggaagtttagctggagtgagggcaccctttttacggggaacccagaggagaagaaccaatactccagatgtcccaggtgcagtcagtgtggctgactggccagtaagagttaagacgcttgtccaacttgaaaaagcttaactttttttttagtcctcatggggttagccttaacgctgttaaagtaaaggatttcctccagggaaggcacttccaagctattcatcttgcaaaagatgtaccacctagcgaggagcctatacgatgaaaggatcatttggaaaggagttatcccgatcttggccatcaggtttggaaaataagttcttaatggaagatgtgctccattggagatgcgggactagctctaagtgttgaatccctccacactcatggacacagactctcgtatagcagacacctagtgccacattaatcctagaatattgtgaagcctagcaccatcagcatataccgtcaacattctgtaggaacgaaagctattagccctctagtccatctcccaaatcgagtcattgaaagcttgtgcagctgggggtcctagccctcctttttccattggctttcacggagggtccttcctccatgatggatttgtcctttgggacaatttcaagaaccatcccttgttgggacaatttagcaggaaccacatcttgggttccttccgcgagtacttcccctacatggccaacaggtgcaccttcaatggtttccacgatgcctaattaaaaattcctagttcatgtccatctctaccaacacaaacacaaagagaaaccaagctttttgaagcaaccagctaataacccagaacaaaaaatcgccagagttgcattccaatcgacaaatccctaaggtttatatacatgcatgc

SEQ ID NO: 89554 - DNA, 1292 bp, Cannabis sativa
  modified_base (47)..(55): a, c, t, g, unknown or other
  modified_base (1011)..(1016): a, c, t, g, unknown or other
cgatttgtttgtgatttggatgatttcatgttgatctgtgtgttatnnnnnnnnngattgatgtttgtgaaatttttataaaaaataattaaagtttttgttctggaattattttttttttttggatagtttaggaaaaattaagcaattcacttttttacagaacttgatttcaattttatttgaattagttataattttttgaaaattcgaaaaaaatttgaaatcgggtacacttcatgtgcgcgcgcagacacggttgatcacccgtgtgcacgcgcattaggacaactccctgtctgaagaagctcgcccatgtgctgactgaagggcttcttacgcgcatggaaatcgtgcaatgcaggatccgtgtgcgtgattcatcggctgtgcacccatgctgcgtgcacggatggtatgcactgcataccatccgtaccaaatgcaatttttttccaaattttttccaattttttcattttttcatggaattaatttcgaatgttttctgtagttttatattttgatttttacttttcaaatttcaaatctaattatcagaattaaattaattggtattttttaaaaattaatttaagatattagggaaatttgaatttcaaaataggtaaaaatctattttttgcttagtttgttgtcttatttttaaaatttgattattttatcttatttttcaatttaaggtcacatatttaatattttttttaattaattttctttttttaataaattgaccttatttgaaatttaaaataagattattttaatcataaaattttaaatagaaataggatatttttgctaacttttaaaatttattattgtttatttaaattaaattataaaatcagaaaaatgatattaaattatcattttattttattgaatatttaatttttttaaaataacatgaaatttgaaaagttgttagaattttttttttttgaaaaagatacttagcttagttgaaacgtaattttttcaaaattnnnnnnttaattttaaatttttttaatttatttaatatttattttattcccaaaaaaaatattatttatttaattattttttgaaattattaaattaaattaaattaattttaaaattaaataaactctatatccaactatccaacttgttgcaggtgtatatgtttaaaattgtttggttgtcaaaacaagttttataaaatctattattggttgatctaaatttccatggttaacttgttgatagatccaatgatctgattttaacccttggttcaattg

SEQ ID NO: 89555 - DNA, 654 bp, Cannabis sativa
  modified_base (419)..(424): a, c, t, g, unknown or other
atataatattaataataatataataatattaataaaaaactttattatttataattatcttatcatttcttagccattaaaaaatctatatttttagggcgcttagtcaaattccacatactcctaattatctcaatacctatactatcaacttatcatcccgatcgagtctccaaagtcgccaaactagaaaatatttttattacaccggtaactcatatgacatttacatataccatataaatctccataatttataaattatgcttatttatccacttatagcaaatttaaaatttatgttgaaatagattagtaggatcataatcccacatattatctaattaacccataatataattacaaaccttatttatttactattaggcttatcgagatattacaaccatcccctcctnnnnnnaatttcgtcctcaaaatttacctgaataattttcgaatacaactcttgcatctacaactctaattcccaagtcgcttcctcataaaataaaattttttacagttcaacatcatcataactcaaaatacgtgtcagaatagactcatactttctcaatatagaaatgtgaaagatattatgcacctcgtacaatgcgggtggtaaaactaatcgataggccacctggccta

SEQ ID NO: 89556 - DNA, 1106 bp, Cannabis sativa
gaaggctgcttctttttactcttaaaaaggcttttgaacatcttatttacggctcctttaatttctttaagcgctcctaatattttcttactcttggtctttgtacatcattaaactcaaagtgatgatgaagatgatttggtgatatcggtgtatatctcatgctttgagttctgtgtacatcagaaaaagaagatctcctcatacttagagttctaggtatatcagaaaaagaagaccttctcatatttgctgatctgtatacacaatttataaaaattataaattaatacactaacaattatactttattataaaaaataaattagatctattttaaaagttgtcattaaacatattaatattggtaacaatatacagtaggaggagaggtatatgatctattctcagtgtttaatgaaatatatattatatttatagtggaaagtggaaagcgagtttttttaagttgtacgtacattgacttatgtgggtttattttctgtattttgtttatgtgtaaaattagtttttgtttaatttttatgtttatatatatagtatgaatgaacaaaatgagtaaaaagatttacccttattgtcgtttgctgtagtctgcgagagtggtcgggaagtttccttcgatcgtggtggtcgacagcgattagggctagggcttaggcttcaactgtaaatatttgagattagaagaaaaattgagataaagggaaaatagagaaagagagagtcttactgctcgcggttagggcaacgacaaaggcagagacttaacatctttggggtttgaatgtcttgcagagagaggagagtttgtgttgatctgtattaatactggttttaaatgatattcttagggttctaaactatgcatatatactagttgttgttgttcttgtggttttcttttctcctactttcataaatgttacttatatttatgtttacccaaattttgacgacgatgacgtgtcaagaatagaaccgcgtggcacaaaaattccgggactaaattaatgatgaaggtgtaaagtcatgacagttgagatgctccctcaatttgggtggttgttcttttccccccaaaa

SEQ ID NO: 89557 - DNA, 538 bp, Cannabis sativa
gaggcatcaaaatcagatttagagtaacttgatttttgagcaacggggcccaagcacccagcgcccaggttgataatttgtcaatctaggtgccttccaagtgtccgatcgaagatccaacttttgcattgaatccatcttcattaaaaaacaggaaataggtccttttagaggaaaaaaaaaacaattcatgggaagaaaaaatagggccaagcacctaggttgacacatggggctggccctgcgcccagattgacattttgtcaacctaggcatcaaaaaatggagttttcctagaaattatttcgagcaacatctccatcttcagaaaatattgagaatacattatttttttgggaccaaacagaacttttgaaggggcagaagagggacctaacgcctaggttgacacttgggactaggccatgcgcccaagttgacatttaacttgaggagaaagttctccgagcatcttcaccttcataaaaaataacaaagattcaagtaaactcgaggagaaaactgttggaaattattt

SEQ ID NO: 89558 - DNA, 2249 bp, Cannabis sativa
ttaaaagtattacggtaactaaactaattatatataattaataataaattttaaataatattatttttttcaaaaaataacacttattaaatatttttaataaaaaattattttatttattgaataaataatattaaaaattattaattatacaactaccaatatacataattaaaacaaaaactaaaaatatataactaattaagtttggaggtaatatttatatgtataatatacgtgtgtgaatatattaatatatagggttaagattccatatgtggtttcaccaaatgcgtttgatccaaaaagtcctttcccattaaaatacaccaatatatataaataaatgaataaagagcgccttctcattgaatttgaaagtactcagcaaaagtacttccactaaaccatgcatagccattttgatgattacattattaagttgcttatgctaattaaatatgttataataaattaatttataaaagcgtcaataatacgaaaattaataatgaattttaaataatttaattacatgaaaaagggaattttgattttcatatatcccatttataaagcaataaactaaacgagagaaaaagaaaattaaggaagaagtttctttttgtttttgtattggtaaaaaccactagtatacaaattaccaaaatgattcactaccaaagcaagtgatttgtatactttgcctttctaccatttacaaagagcttgctattaaccaatacaacttaatgttttataaatgatttaacaattttttattgtcattaattattaatataaaataagtaaaatttaatattaaattaaatacattataataacaatatgatattttataagggtgtccattaatatatatttgatgccttttaatatttctcatttgcaaataatatattcaccagtaattggtatatatataatagaattatttttctatttatgaatatacttgagaccaaataaaatatatattgtaattggaagagtataaccaaataagtacactagaaaaaaaaaatacttcaaaataaaaaatatcaaatgtaatattaataacaataaacaatattttaaataatattatataataacgaaattacttctcagtaaatataatatttataatcctacatatatatttaattaatgtaaagaacctaataatatatatatatggacttcaaaaatatgtaataagaaaagtgtcgaaggtaggcttatatgtattcctatattagatggaatcaagaatctgtctacctatatatatagccctttttctcattttcagtataaaagtgaatagttattacaacttcatgcatttaatctaagtaatggcaatttaattagtctttaagaaacaaaataatattaatcaagttaattaggctatataaatataagtagcaatttaatcctagcttgtatttttcaaaatattccaagccaacatcttcctagaaaacactcacttcacttatatatataacagaaaaaaaataaagaagaagaagatcgacgtttatgcttatgaaaactcaaaataaatacgttatatattataattaatttaattatattaaagaagaagagaattgaatattgggtcccatgtgaggagcaacgatggaacatgctccgaattttgatgctcatggcaaagagtttattagttggcgtaaaaatcctttcactaatgattacctcttccactaagccaccaaagataaaaaataaaataaaataaaattcttacacttaattaaaaaaaaaaaatgaaaaatgaaaaatgttcatggggtttgacaaatctgaacggctctatctcattggttggaaccaactcacaataattcatattcatatatatatatttagtcaaaacgactaatatataaaaagtcatcaccttctctcttgatcatcactatatatatatatataatagaaaaagatagtgtttttgtgagtaaaagtaataaaattaaagtgaagaagtatgaaacaagtggaggatgtgttttgagagggccaagagtgaagaccctcaccaagccgacatatccccgttaaaatggtgcaacgtgggggttttgttacgaatattacctacacttttcaccttatatatatatataccattttaatcacaccccattatatatataaatatatatttacatcattcttattatctctaatataaaaaaaaaaaaaaa

SEQ ID NO: 89559 - DNA, 936 bp, Cannabis sativa
  modified_base (45)..(71): a, c, t, g, unknown or other
tttatgagaaattcatgagtaattttttatttttatttaataaannnnnnnnnnnnnnnnnnnnnnnnnnnaaataataaaataaaaataaaacaatcctcaaccctatatctctcgcagcaaaccctatacttttcatgcttcaataatcccaagcgtatttgaagttgtgggcattctattttataaaatataagtaccattgacaagcttcctatacttcttattcttctatcatgtcaagttcttactttgtctaatatatatttacattttcaaaagttgacaagaacctctttacatatttttagtggtttatcaactgttacctcttgttcaaacctgataggtaagtaacgtttcaccctatgattactatttccttaaccctttagtggatcattaatcctcactctgtggataatggagagtataagttttaataaataccagaaaaaatcaactaatgtaatgcaatagcaagtaagaattttaacatcaatattatcataataaatatataaaccagtgaaaaattgttgcttgttttagattaattttttttgtttgtttctgtataagatgaagccaattgtatgactattatgtactgttgaaaaatactaggaaattatacaaaacaaagtaacttctctttcttacagggaatatgactttgcagtgactttcttttgtgcactctacaatgacttttttctctttcatatagagaagggcttttccaaattgttgacaaaacagtatcaaatattttgggcaaatgatatgtgcagtcaaatggtgagggtttggcgactttcaatttctgggtacacctccatagcctacgacccattctcctttctcctttctcctcttcttaaagccccaaactccatcgaccaccgaagctcgagctttctctattctacgcca

SEQ ID NO: 89560 - DNA, 668 bp, Cannabis sativa
atggtgcctgaaatttcttctctctgtgaaagctctgagaaaatttggtgaactggtgaaagtaaccaaatgaagcgagaaggttggcttttatagtccagaacgggtgtgagacaactgtgattgacaatcatcgtacggtcaggatagcaatcgattcacattctacagatccaacggttgggacaagcgttcatcaaggcggtagaaaatgtttgagtactcgactgacacccatttaatgcgctgtatcattaaatggaccggaaacaaatcgttgtgtgcaaaaagcaaataactgcagtaatgatgaccataaacgcatccccacacgcctgggcacgtgccaagaagttaataaggcaaccggaggcatctaagcaagccttgtttacttcttaccaaacaaggcttggggggtaaatgttgcccctgattttgtccaaaatacgtggaccaacaggactatgacacgtgggctgaagaagcaagactttgagataattcgactaagcctccttaaatcaaacggatcagcattcaacgtgcctcccgcagtaggcatgaagatttcgtatactcccggagagcaaggctacaacgaagcacatccgggaggtatcaaatcctatctgaacagtcacctcgtatttaatgccacatgggag

SEQ ID NO: 89561 - DNA, 728 bp, Cannabis sativa
atttacattgaaagatctcggttccttacattattttctgggaattgaagtttacagggacgaaacaggtcttttcttaacacagaccaaatacattgaagacttactaaaaagaacaaagtttatcaacctgaagtcgtgccctacaccagctatagcaggaaaaccgatgtcccagaatgatggtgaaccgttgagagacatcacaacttacaaaagcatcattggaaggctgcaatatctttgtcacactcgtccggatattgcctatgctgtcaataaattgagtcagttcctaaaggctcccacgacagcacactagagtggtgcaaaacgtgttctgaggtatctcaaaggaagcatgaacaaaggtcttcacataagctgtgattctcaactcgacattactgggttctcagacacagattgggcttgctgccctgatgatcgaaagtctgttgcaggatattgtgtttatcttggcaacacacttgtctcttggtcctccaaaaagcaacatgttgtgtcaagatcaagtaccgagtctgagtatcgtgctttacctcatgtctcggctaaaatctcatggattgaatcattgctaaaagaaattggctttccccttaaaactgttgttacctggtgcgacaacttaggagcaagtgcccttgcttctaatcctgtttttcatgcaaggacaaaacacattgagattgatatacactttg

SEQ ID NO: 89562 - DNA, 571 bp, Cannabis sativa
aaggtgatttttaattttttttttaaagtataaatataatattacataaattatatttaatagttaaattattttttttttatttaaactttcaattttagggtgataaatttgaattttgattttgtaattgttgattttgattgtatttgctttggacatagctaaactattttttattttaatttaaaaatttggacattatggtgacaaatataaacatttagttgttgattttgtttgtagttggatattttcaactttagaatttagattataaaaatattttctttctatattcagaataaatattagtttaatattttaatgttgatctatttaatttaatgttttccttattttaaaattttaaatactaagttagaatataatattttataagtttaatatataaatatttaatatttaatttttttaattgtaattatttaaatactaacaaataatataaaaaaaaggtatattgaaaaatacctcttttatttatcaattaactaaatctatctctaattttataattaattaaaacatacctctttttatatgtatt

SEQ ID NO: 89563 - DNA, 564 bp, Cannabis sativa
tccaagattttgcataatgcctcttttcatgccctccgtggtattgtcactgaaaaagatagatgtttttagtttgttgacactttgcccagaccaatcacaaaactgttcaaggcattgccaaactcccttggcctaagcaatcgtcgcctttcctaccaggataagatcattagcaaagaaaagatgtgtgagtttagggccagttctgcttaatttgatccctccaatagtgccagagtctaatgccttctcaagaattcgagacaagatatccgccgcccaaataaagatatactgggatagaggatgcttaaatgtaaaatatattgttttaatataccaccaaattacaaatactatatatatacttttaatattttttcctcccaaaaatacccttacatttcaaaaaaacttctctctcactctctggcgtgaaccccgacctagaatccctaccgtcaaacacacagacccagaaccccagtcgcaaggcctcgacgtcatcttctctcacgacctctctcgttttttgcgtttctttcttctagtttaccagtt

SEQ ID NO: 89564 - DNA, 728 bp, Cannabis sativa
tgctcgagtttggggggagtcctctcgcgagcattccaaaaacctctcccttttggttaaacaacatcaccctcaagttttttttgttacggagaacaagcttaggtctggttctagtgatagatttaagactcaactttcttttgatttttcttttgaagttcctagggagggtctgggaggaggtctttttcttttttggaaagatgttgttaatattaatattttatcttattctagcaatcatatagactgttttgtagaaatgaatgataatataagtttccatctttcatgctattatggttccccttatttttctggtaaatctgcttgttttaccttgcttaatagattatatgatgttgctccatctgctccttggattatcattggtgattttaacgattatcttagccttaatgataaatccactagtactcgaccttctccttgtgccatgattcacttccaatctttcatttataagtataatatttcccccatgccttatattggtatccgatttacttataagcatcctaacacgtttgaaaggcttgactgggccattgtaaataaagctttgcttgatctgttccctaaggcaacccttactcaccttccctattttggttcagatcacagatctttaaaagttctcctctctgattctagacataaaaatattatttctcatacttttcgatttgaaactttttggttat

SEQ ID NO: 89565 - DNA, 960 bp, Cannabis sativa
caccaacaacaaccaaataatacaaaaattattattaaacacacaacacaaataagttattacatcaatgacatatctaatctaacttagattacaaattcaatcccacccctcaattttagcaatttagtcccaaataaataattaatcacaatcaagtccatagtagcaatttaacatttatagttttttgtttacaaaacttttagattttgccagaattttgttattattcaaagccaaatgataagtgaaagtatttgaaaatgtataatattttaaaatgagcattgtaacgagacactcatgtgcttagtaccatgataatttataaagtatcgctttataattagttagcgattatctttaatagttattcaagtaaaataagtgtgacccattattgagttgcaccaacaactatattacacccgataaggatgttaagcaccagaggtaccttcaacatttcttcttcaaaaaacagacagtgttaagttaaaaattaatcaaaaaaaacttaattgctattgtttttaaaattaaagagcttgaatttttaaagcgttccgtttaatgtttaatataaactaggcggtcgttttaaatattaaatcattattatacaatttatgttaatatttatttataacttatttaaattattattttttttaattttcaaagagtttcttttttgatatatatttgaatttttcttgataaataaataattaaataaattcgaaatttataacttataaataaaaaaaatgtaattaataatacaataaactatgattatacaataattaataacttataaattatggatgcataagtgatcccttttcattgtagaatttttgaaaattatttactaagggctcgtttgtaacaggtcgtattgtattgtattgtattatattgaattgtattttatgcaatatttttatgtaa

SEQ ID NO: 89566 - DNA, 1597 bp, Cannabis sativa
aattatgttttttgaattttttaagtcgttaaaaattcttctaaagtattgttggatgtaagtaattttgtctaatttaattcaattttgctaatgtgatccatatactaaattgtgcctcaaaactttattatctattaaattgtgtcttaaaatgttaactaaattgtgtctctaaatttttatttttgtcaaatttttttagtaaaattgaacaaaaattcttaaattcaataatgtttatatttaaaagaaatttttaaagactggaataattaattaaaagtgaatgatttggtatatcaaaataaagtttagtctaatatatataggtgttacttgatgtcaatatgcatatattatcatgtatttgattggtgttctataaattgatgggataccaatatatgtgtatgttaacattattaattaattaattgaggtttggacgttttcgatatcaagaatacttgtcaactttgtttggttaatatgtaacaagaatgaagctttgggttgcttgtcttgataactaatatatacgaatagtgtagtacttatccataacatactcaattattttaattttgaggaacataattaaagttataattaaggtaatgttatgactgtgaaattttatattaaattgtacttacatcaaatataatatttttgagcttgtttgccgtgtaggatagactgatctgtatggattgatatttataagaattttacatttcatattttaaggagtgttaattataactttttagtcaaccttcacaccactaataaaaaaaataattttttcggacggttttaaatcgtcggataaagtattcccgtcgatttctataaccgtcgcctattcgatgtcgcaaaacagaaaaaattgacgacagtttgaaaccgtcgccattttttcatttctaacggtttaaaactgtcgatttctataaccgtcgcctattcgatgtcgcaaaatagaaaaaattgacgacagttcgaaaccgtcgccattttttcatttctaacggtttaaaactatcgcatatgatagggtacgtatatgcgacaatttatataaccgtgcctaatactataggcgactaaatgtgacttttagtcacaacaaaaagttacttataactaaaatataatatttagatacaagttatcactaatttaattttagtcataacaagtattatgactaaaaaaatatttagtcacaataaattataatttttgtaactaatatatttagtcacatagctttttgttacaacataagaatgttgatttataattagtcataattttcttacttttagtcacgaattttgttgtgacaaaaaatatttgggaatttgcacttcctccaataatagttggagaacttattccctttctagcacaatgttgatagtctgtttgcacaattctggacagtgctactaacttcttaaagaaagcgacctaattcgcgactcaacttagatttttctgtgacaactatttcaacacaatcgcatgtccctaaagcctatatagcatgttgtttgatagagtagtcttcttcagtgcaaacggt

SEQ ID NO: 89567 - DNA, 727 bp, Cannabis sativa
tttatatacccacacttgcaccctatagcttttcttccaggtggaagaggtacaacagtataggtaccatttttctttagagccactatttccactttcattgcaccattccatttaggatctttgagtgcagcttctaatgtcaagggtgtttttgaactgatatagactttgggtttataaacaccggctttagcccttgttgtcatgggatgagtgtttgtgatgagtggaggaggtgctgctgctgcggatattggggaagattgtgctggtgttatatgtgtcgaatctgttgatggtgactcagaactggttgttggagatggggatatagtaggttgatcaagagaggaaggtgtttgttttgttggtggctgggaggtagaaatggtaggaacaggtacggtagaggtgttaggttgagtgaaattagtggtggtaggataagtgtgagctgtaacagcataaggaaacttgtgttcattaaaaattacatcccgtgagatgtaaattctaccagagtgggagagacacttataacctttgtgtttgatactgtatcccaagaatgtgcattcttcagatcgaaaattcaatttatgtttgttgtatggtctagtattgggaaaacatgaacatccaaagactctaagagagttgtaatcaggctgcagattatgtaatttatgcaagggtgtgtctcccttcaaaacagaggatggca

SEQ ID NO: 89568 - DNA, 1087 bp, Cannabis sativa
cttgttattgttgagtatgtccaagcaaacctttgtgatgtccctgcctataacttcccaatgattctcatagaagagccgaggcatcccatctattccgggggctttcatagtgttaatttgagataaggcaagttgaatatcagctgctgtaaaatctgttagcagccggtcattttggattctgctgaggcgtaacggcacaaatcgttgaagggtttcggttgtagcttgaccaccatccgttgctgagaaaagatcttggaaatggtcacaaatggtgctttctatgtcttctttagagctcctccatatcaggtttttatcaaacagtccattaattcggttcttttttcgccttgatgttgctttttggtggaaatatcttgtgttgcggtctccatgggctaaccaaatagctctactcctttgtttccaaaacaattcttcttttgctagttgaccattgaggtctttttctagcattttaagtttggtgaagccatcggttgagtgttcattcgagtacttctccacctctttttttagatcttttattttggcaaggttggtctttctttgggttttattccattgatctaacatagtaccacaattatttagaatctcatcaaggtctgttgccgaagtaatgctattgccttctttccatatgtcttcaattatttgttggcactcttccttgtcggcccaagccttttcgtaatgaaatcggtatcaccatcgttgtttcttttggtctccacaaggaattgtattgaaggttagtaataaagggctgtgatccgaacaccatcggctatggtgtttgactttagctatagcatttatcttccaccaattattgttcaccatcacacggtccaaccgttcatagatcatgttggcagcccttccattgcaccaagtaaattggctgccctcatagtctatttctcgcaatgcacaagtgtcaatggcatgattgaagtttttcatgaggtatcccggtttcccgccacctccaatcttctcatgaatccccctaatctcattaaaatctcccccacatagccaaggaccgttg

SEQ ID NO: 89569 - DNA, 956 bp, Cannabis sativa
  modified_base (614)..(638): a, c, t, g, unknown or other
aaatttttagaatgacatctttttttcttcaatagtataacatctcaatattttgccacataatatattcacctcaccaagcatcctttaaagttttaccattggagatactctaacgcgctcaatttcaaatccgaaactaacacacaataattatgggtttttcaatttttatacttcaatggttttttttaatatatatatatatatatatttttctagaattccacacagaaacctctataacatctaacagatcaacttaaaaatcgtaaccgaaatccgcataacgacccacataaaaaccacctgaaaaactatcgaagcaatttaaaccgtaaatttaacaaaaaaaataaaaaaataataatatataaagtaattcccttaaatatattaagttaggacacaacataaaatttccataatcaacttaactatatatataaacattagtcatagattttcatagctttaattaaaagtcactacaaaaaatcttacttttagccacaacaaaacttgtgattgaaagtaaaaaatggtgactaattataaattattattcttatgttgtgactaaaaagtagtaactaaaggtattagtcacaaannnnnnnnnnnnnnnnnnnnnnnnntatttttagtcacaatacttgtgactaaaattaaattagtgataacttgtaactaaatattatattttagtcacaagtaacattttgttttatgactaaaagtcacttttagtacaaaaagatgatactgtgactaaaaaattgtcactaaacatagcattttttttgcagtgagtacttatattttcattttatgtgttagtgtcatttttaggttaaaggtattgatttgaaaaaaaaaaaaacactaataaacctattaagcagaccagcataattttgatatgcaaaatgaagtactttcactcaaaattattt

SEQ ID NO: 89570 - DNA, 501 bp, Cannabis sativa
agccagttcgtctcccacctgactcagttcccgcccaaaagatatgctgcttgcgcctctctgaactctgtctaccaggtccaagacatttgctctgccatggccacggtgagtactttgtaatttattccatcctttgatattttgtctaaggcatctgatctcactcttgtctcttttttcagattactgtcgagaccgaccgcctttccaagaccttaattgaccatggcttcgtcatgtccgaatttgggggcatagacgaggctgtgaggatcctgcaggacttgtctgccgaaaggcgggcattccaggaggaggctgaacaaatggaggcccttgcggaggcgaagatccgagaggaggccaagcagaggggaatctgaagtggaggcgaggcaccaggaggcgctaaaggtggaggtggagggcgaggccgtggccatggccagacgcgagcttcgggaggccagggaagctatggacgaaatggctgccaag

SEQ ID NO: 89571 - DNA, 1061 bp, Cannabis sativa
catcttctagtgactatggtaaattccttaggtggaacattatgccctaaactccccttttacttgtctgtaattaatgctaacacttttaaattgtctcgtagaaatgcatttcaagggtctcatgcagagcaaagggaagaagagggtgaccacctcgtaggctccttctgatgccgaagtggaacccctcaaaaggcaaagaaaaaccactgccaataagaagaaagcctcctagcctgttaacctcgagatccctgagactgaaactcaagatccaattcctccttcattctccgcaagtaccaacgagcatgctccaagtatgaacctcacttctccctcttcgagctaacccctcgagtctcttcctatcgacgccaatagtctcgattcgaaattcacctgcagaatttggtgcagcctgcttgcgtcacttcaaatccttccttccccatgaatgggatttgacctgtaatggggatttggagaacatgctcgagaggagtgttgctcatggcctctcagtaaactctgtttcctttctcttcttatttttccttttaacgattttcaaatttgctaatacattcactatctgttcttagcaagctttcttcgcatttatcgtccaacggcgtggcctggacaagctgaagtacctggaaggcgaggttcaaaaattgataggtctacacgaggttgtgtccaaacaatggaacgataccaaggatgctgagaaagttaaaatgaaccttgaggccaagcttgaagctgccaaaaaggaagaaaaggacaaggctgaggaatgcaagaagcttgaagaggaacttaatgttgccaaggtgatactcaaagggaaatagaccaaaacccaagaatgatgcaacaacattggcctccgtaccctttattgtgcttgcatggaaatcggactatggatacaagttttctagaggaggaagaagaggaaattcttgcttattgcgagaagaccaggaaggaggaggaagaggtcgaggcagcagaagaagaaaatccatccaagtctcctactatgt

SEQ ID NO: 89572 - DNA, 1214 bp, Cannabis sativa
  modified_base (410)..(432): a, c, t, g, unknown or other
tagagcataattataaaagtatgccaaatataatatttacttatttcttgtgaaatttaacacaattttatatgcattgaagatagtgttactattaaaaaaaaaaacgtaacataatggtgtaatattctatgactattttaccctcaattaaaaattaagtttccaaatttatcctctcgtggttttctctactgtatattggcttatgatgtaaaggtggaccataaaatttctcatttatacaatgctctaaaccccaaaaaattatttcacaaatacacaaaaacaacaaaaaagttacaaaaatacagtttcataaactttaaatatttttacaatttttttattttatttacagaaaatacggtctttttatgtggtactcttattaatttgttgttgatttnnnnnnnnnnnnnnnnnnnnnnntgttgttgttttgatgttatttaaatgttactttcctgttacttttatgtagttttcttgttgtttttcgtgttatttctgtaagaaaccgtaaaattgtaaaaaaaatcttaaaatataaaaatataactttttttacaaaaaaaaaaaaaaatgtgttttatgtaattatcccaaactatagaatcaatgaaaactaaaaagcaaagggaatgttacaaaattatccaattttttggttaattttatattttcattatgatactcttttttttttttttacatttttactttactgagttttcaaaaatattgtgttaaagttttaaaattataaaaatactgtgtttcaatgaaaaaaaatattaaaaatacaacttcacaaacaatatgaaaataactataaaataacgaaaaaataactacaaagtggcgaaaaataacaaaataatgacctagttgcaatatgcaaaacaatatcaactccttaacatatttttgtattataactttttttacttagctttgacaacttgatttatttttttgtactactacattatttttttcataaaatttattgttgcaacttcatactttcaactttttttctcttttcctttttgatttagtgaaataaaattttttaaaaattaaataaataactacattaataatagaaataataaaatcttatgatttcaaaatgtaataaataatataatgagtaatatataattaatatatcaatatctactactgcacattgtgtcaattaaaaa

SEQ ID NO: 89573 - DNA, 518 bp, Cannabis sativa
ttttgtgacataaactgtcaatcttgaaaaagagtggaggaaaatcatgcatcaaagactaatccaacaccatcatcatagcaagctttagtaactgtgagccttcctataaaataaataaaggtgaattagcatatagtaatatccataataataatatttaaaatttaagggatattttctataataaactaaaaatggaacaaatttacatttatgacctaaaaaagaaaaataaacaaaaatagaaattaaaagttgttatttacaaaaataccgtacagaaaaaacgaagggatccttcttcttcgtgacccagccgacgaaccccaacaacccattctcaaccattttccttccaaaactaggaaaatcaaatttaaaaaaaaaatgtagatctcaacaaaaaaaccactcatatcccgaaaatccaaatacaaaaagggaaaaaaaatcatccaacctccattgctgtacaaaaaaaactcaaaaataacattcagccaaaagccaaacgc

SEQ ID NO: 89574 - DNA, 635 bp, Cannabis sativa
gggggataaagaaaaggtccgagagttggcccaagaagaattgacaatggaaacaaaagaagggtccttgagccaatgattttcaaagtgaaaacgagtggagttgaaattgttgaaatttgggtcctgcagcaaaatcttaagggcatgatgatcagagccatagaaacctaaatggaaaagagtagcttgcggatacaaatttgcccaaagctgatttgaggtgcaccaatcgagacgttcaaggatcaaaccatgccgccaagtgaatttaggcccaacatgatgaagaggagtatgactgtatctattcagaaaagagtgcaaagaatgcatagcatgagagggaggggagagatgcgtgttcctatcactaacagagagataatcattgaaatcacccataactaaccaaggcaaaagaggagcagtatcaaataaacgattaagtgaagtcccataacagatttttgatcagcataaggagaaccataataaccagaaaagtgtcagtctttaccattaaaattatttataatacaatcaacattgttaagggagtaagtaataacattaacatcaacagagtctttccaaaaagtaaaatccttcccccaagacctttcctaggcact

SEQ ID NO: 89575 - DNA, 815 bp, Cannabis sativa
taatttgcttggtctttagctagccagggtcatttggccgtggcaactaccaaacatgtcacaagaaattattaattttacttgttaatccctctttatattattttctatatttattttagaaattattattgggtattaatagtacttaatactttctaaaagtgactccttacaattacgattggtatgtaatattcttacaaaaattatattaaattatataagacttatacttaattgtactaatgaaaaatttgctagacaccaatatttctctttattttatcccacaaagaatactaaaggagtattaatgtgtcactaatataacaatttttaaaggaattttttgtgaagaaaaaaaaaatccatgttataaaataatataaaatagataaaaagaaatgaagataaagatgaaaagagtaagagaaattaaataagaatttctcaattatttattaaaatagggtgaacccttatttatacaaaatatgacaaaaagaatgagaaactaaatcaatgtaataaaggaaatataacaaagcattaaatgtgataattaacttagtgatttcgacatccatatatataatatttcacaacaccccccttagatgtccataaaaattgcctcattaaaaatattgctaaaaaactccgtcaaaggaaaaagagtcgtgcagtgtaaactaagtcccccttatttaagcattcgtggagatcttctaatcggcaattccaatcttgtgagccatcttctcaaatgttgatgttggtaatgatttttgtgaataagtctgcaagattga

SEQ ID NO: 89576 - DNA, 692 bp, Cannabis sativa
tatagttaggtccctgtgatgttccagtaattaagcccttcacttaaaaactgctgaaacagaaccatttgataaaatggcactgatgtctgtattgttttatgttttctcatgctttacaagaatcaattctgtaaatggtttattcaaaaaaaaaaaattctgtaaatggttgtttcttatcattcaaaacacttttgacacatatgtattaactattaaatgccgcatcctaaagttatgaaatatgatttatttaacatgagatgagcagcagaatgacattaaaaagaatacaacaactttagttagtatagaaattatggaagatgacataccatcgtagccgcccaaaatgcaaggattttcagaatctccagaaaccttcagaatctctgctcgagctgctaataagccataacgcaagtaactgtacaagaaatgtaaagacaaaaattaaacttaggctacataaaattctaccttgttctaggcgaaataaacagtaacaacaaaaaaaccgtagaaactagacagaaaataaattcaataaaattaatgatgcaactgaatcaacgaattcaattttaacaattcaagatactaagagaattaacattataaaagatagaggtaagatatccaaaagcatcgggagtacaaaatcgtgacatattttataactctgggaa

SEQ ID NO: 89577 - DNA, 1343 bp, Cannabis sativa
agtgtataaaagcattatgcaaaattcctctaacaattttctcggctaacaaacacaacgctaaacttctctatttccagaactttgtttcgaaattaagataaaaaaaacccagaatcacatcgcagggaattcaaaatcacattcaatcaaacctaaaagtaaaagtaaaagacgaagaggaagcttcttacctgggaaccagtctgatgaaccatttcaatttttggagaagagagtgatttttatttaaaatatttattctccacattaaatcctttatttcatttaaatttactaaactttttatttcttacggattttgatacccactttaactttcttatttaattttatcttttttcatttattagtcttcaattattaattattttattatatatatatatataaataaatacaattcacatttctttacaatattctactatttatttttgttgcataacaacccaattttttttttttttgaaaattttcactgatattattgattataattgtttacaataacagagaaaataggactgtaaacaacacccgtccaacagacatcttcatccaactccaaagcatattttgctaaaccatgatactgtcacgtatatgcagttgagtaatctgagcatcacagtttgggaaatataaaattccaataaaacaacagcaacctctcaaaaacattattatttactattcataataataataaatttagaggtgtggataaatcaatagaatctaataataatcgatcgatctaattataactgaatgggaaatattaaatatttaattgtaatcgaattggattggatgttatttttgaatatccaattagatcagatcgaatgttggatgagatgtctaaaaatcctatacatccaatatctaattgcactaattagtattttggatgagtaattaaattttacattgttatacttaaaatatatatgtatatataaaaattaatattaatattttatatttttcttttttggactggatggatccaacccaatgcatactagacgcgcgtaaaatattagatgaattcgattcgatcaaaaaataataaattcaaattaaactaataaattaatatatatatataatacattcacgatagaacaatccaatccaacatcaaatctaaataagtctaaaaatattaaatgtggttcaataaacattcctaataatgatcctatttaacctttcaaaaaaaaaaaaagaaaataataataaataaaaacaattgtctcatttaaataataaaaatttaggtgtcgtttggtaacacttttgctttttaattt

SEQ ID NO: 89578 - DNA, 897 bp, Cannabis sativa
tatattattatatagtatgcatgttttgctctttttcaagtgtgttctgacaagtcggcgtggtatagtcacaattgggcatttcgggatgaaccgagttcggggctgaaatacaattttgggacgatttattagcattttatttaggagtgataaatctaaaaattatttggttatgtgatgtgtgttggaaatgacctatttgaccttaattgaatgtgtgtgtgtgtgtgttatatggccctaggggcatttttatcatttttgggcatttgaattatttgcgaaaattggaattttggcattttagataatcagtttctgctttgttcttgccctagccaaacccccccccccctctctctcaaattttttttgctttgattgttctttgcatttgagttggtggtattgaagcttgggatttagagcttggttttgagaaggtttgaggtaattttcacctttgattttgaattttattgctggagtttgaagttgtttaaatatgtttaattgttattttgctcttgattgattgaataaagaaatggatggaattaagatgcttatgctatttcctctagctagatggggttcaatttaatgttgtgattatttggaacttggattgagtttaatgtgtaaaggttaagtttgagaatctgatttttgattctcttcattgtggtttgaatgatggtgaagcatgttgtgattttcaagttcttgaatttacatggtgtaaagatttgctcatttgtgagcttatgtttgagtatgtttatatcttattttagagcatgttgttgttggattttgatgcatgttatatgtattttaatgccctgctttagtacttgctagtttgtggaggatgattttgaatcatatgta

SEQ ID NO: 89579 - DNA, 658 bp, Cannabis sativa
atactaagtgttgagagatacacgacgtattaggttgatgaattttgaagtgtcagtcctaactcctggtactttaaacgcgtagaaccacttagatttccaatcctccatattgaaaaccgtaccttctaccccataatcttataattggcccatttactaaagtagcaaaagctgttatcgtggcctacgttttttatgtcataaaaatagctaaaatcctccgtcgttggttccctttggacatactccttatacatctcataaaaccccagaattatgcgatagttattcggggttagttgaaagggagagacatcataatgtctgagcatgggtttgacaaaaggatgaaagggtaaagttaccccatatcgaagaatagggatcgaaaccaccacgtcttgcgtggggataattgtggggttggtaaaaggaaagtgaggtctttgagacgctaaagggcataaggtccctattcaaaccgaattcaactgtgcaaatgtatgcaggtcagatttggtgactcgcgagactaggtcctcgaatgaaaagggttgattcatttgagcgtcgtcaattgaatctgtctcgctaccctcagcaccttcttcctcctccgactcgcaatctggaacctcaaagtcttccatttctt

SEQ ID NO: 89580 - DNA, 580 bp, Cannabis sativa
tctcctccaccaccgaacctcctcatctacccaaaacttaatccaacaacccccaaatctcacctacccaaatctttctctcttcctcctccgatcgacttctctcaaccatcatcgccatttgccaccgcccacctaaccctcctccaaccagaagttcattgaatttgtatttgtttgagacattagatggtggtagagggtaagattttccggccaaaatatgattattgatgggatatcgataatttatcaatgattttgtctgtggactgttatttttgtacgcaaacagaaataatcgataatatgtattgacaacctatcaataaatatcattgatatactatcgataatctattgataaatgccatcgataaactatcgataaatatcaaattgacaaaactgtgttacatgcacataaatcattgataaactatcgataatcatgttttggccagaaaataccataactacaaccatctaggtctgaaacaaacacaaatccaataaaaaataaataaacacgaagatgaagatgaagatgaagacaaagacagaggttcggggcctctgg

SEQ ID NO: 89581 - DNA, 611 bp, Cannabis sativa
attcattttcatgcaaatggttagaaatttttgcaagaacactcttgtgtaaaatacttcatagccaaagagctcaataatattgaattgttgactaaggttcattcacgccccaggaagcgtgcgagtgaggataaagcacgctggaaatactcgtgttggtttgcaggaccagtcgtcattccaagaagcagccagagtgacatacccttgtataaaagtcataattttgtgggcaaaggtccaatagaggtttgaagcggaggcgttacaggtcaaatatgatttgtaacagccctactttaagcctccattaggtccttacactcacggaatgatggctctcatacacgagtacgtcactttagttgcttcctggaatgacgactggccctacaagccaacacgagtgtttccagcatgatttgtcctcacttgcatgctacctagaaaaacttcccaggttgtcacccatcttgaaattatctcaggtcaagcacgcttaactttagagttctttcgtaatggactacttgaaacaaaatgcaccttggtgatataggtagtaccaatcaatccatttaagccctcttcaactgtgtagtcccata

SEQ ID NO: 89582 - DNA, 762 bp, Cannabis sativa
  modified_base (35)..(40): a, c, t, g, unknown or other
tcatttataagtagttaagtgtttcaaggataaannnnnntgaagggtagaacggtaaatttaatcgacgcaaaaacacacttttgtagtattgtcttgagtattctctctgattgatttcgtgttcctaactagtgagatgagaatactatttataggggctaattacatagaaattatttcccttatctataagaaataaaataggaaattagtatgttttcataattacaataaggaaatcaggcaaatctaggttaattgcctttattctctaaaggtacaaattcatcccacaaaaataggtattgcttcgtgacctgcaagttaggagtaaatgtcaattactgttggaattggcaactcacatctcttggtcggtgcatgcgagttgatcacatgatcgtgctcgtaagatgtccaccaatgactcttctcgacatcctgccatgctcatataacttggacattcatatcaatccttgtgggctattaagaataaaaccgtctgcccatgttgagaaatgtaagacacgtgtcatccagtcaggtgtcacgtcataatacaaaaattaggataacaatatatatacatattttatatatgtacaatagaatctaagtgagatattgtggtgaaccattgcttgcccgattgaggggaatcatctcttttttaattcaaagttaaaccaacaaagttaaaaatatcattaaaagtatctacaatctacataatttttatttttaatatatataata

SEQ ID NO: 89583 - DNA, 879 bp, Cannabis sativa
ggtccaaatcccaatttaggtcaggggcttgatttgggtccgggatcgagtcctaagttcgggtttatgttctactctaagtcatattctgggtctgggaacgagtacaggactggttccgagcacgagtttcggggctgggttctggtctagttctgggtcccagtccaggtgtggatctggtcacgttcacggtcgtgttccagggtcctagtcatgttctcgatcatgtttcagttttgggtccctggtctgggtctaggtccaagtccttggccagcttcgggtcctaatccagttacagttttgggtctgtgcccaagtcttgttcctatgtcccgatccgcttctagtttcggttacagtttcaagtcacgaggtatgggttcgactcgagtttgggtccgagtctgggttaagatgttatttgggtgtggagctagatttaggtctgagtttcgatctcggttaaggtccaagggtgggtccagtttcgagttcaagtctgggtccaggtctcggtcccgttccaagatccctgtccggttacagttcaagttttggttttggttcccgaatgtaggtttgggtcttggtatgtgtccaagtcttggtacccaggtctggggtacgggtctaggtttgggtcagggtcttggtccgagtctgggtttgggtttgagttagggtatgggtcccagatccaaacactgactacgggttaggtccaagccccgggtccagatttggtcacggtctcgggtccctatctagttccactttaggtcctgggtctggggtcgggtcgtgggtctcaatcctagttctcatgcccgtgtcctgggtccaagttccccatccaagtccgagtcctaggtc

SEQ ID NO: 89584 - DNA, 623 bp, Cannabis sativa
aatcaactcgaaacacgaaaaaaaataacctgattcctaacaatcaagcatttaaaattcaaaaacccatttaaataaaaggaaaagtttagaaaaatacctttttcggtgattacgttgtgggttccgagattataatgggattttgcaattaggatgtgggtttcgcgattgggttgtgcgacttgggattaggttgaggtttcatggtggagctgaggtcaaaggttagaagtcgtaggtctcatcgaaaggtggtgggttttgtgtggtcggaggttgtgggtttgtgggtttttcgggtggctggtgagagtgagagagagaggagagggagagtaaacatgagagatggagagttgaatttcaaatgggaacgatattattgggattaaaagtttttggaatattaaattcctatattatttagagtagaatattgaaacactttgtacttagtttaagcgtgctttaataatctttccttataaaataaactatggaaccaagccgcgcttcacgcgagttggaccctattttagtattttttttaaatgattaagtgatatagtttgaaatgtaatattttaatgtgtgtatattataaataaagaaacagttat

SEQ ID NO: 89585 - DNA, 562 bp, Cannabis sativa
aggaccacgaggggactcatatgtctccatgagttggagtactcatggacattatcaggctgacctggtagtgcgtctaagaagctgttagaagttaacgggtacgtttccattggcttgtcggtatgccgcttgcacggaatgtggcctaaacctccaagagatgttgtggtgcgtcttgcccacgagtctcaacacgagatgacacggaggcatggcgccttgaggattggtccatggacgtatgggagtccttgggcgatgaagaagactttcggacagtattgaatggggcatgatagaagcgttggcacgtcggcttggtgttggtatcttgccacacatgctaccttggtcacgagtgacgagatgagcatcggtgttgggatttgtcttatcatagtgggaacctatggacaatgtgagtatcttggctagagagccctgatgcatggatgcttgtgagcatgactcggtagaagttgttcgagagacgggagtgtgcacgaggcacacggtcgcgcgaaaaatgagcccattgttactcggatggttggaaggc

SEQ ID NO: 89586 - DNA, 521 bp, Cannabis sativa
tccactatagtgatggtttaaaatcgccgcctatactatagccaagggttttaaatcgtggtttatagtatcgactatagccgacgattttaaactgtcgataattcttttccttgatatttttccaccatcgcctattctgcccagtattcgtgacggtcttataggcaacagttttatagaccgtcaggaattctttacccaaggtgtaaaaatgtcaggaattctaggttgttagtagtgttgcttaatttgttgccatctcaataccagcaattcaaagacacaatcatatactcgaaggagctatctttgaagcaagcaggcaaggttcagaagaacaatttaaaggcccactattctttaggaagaaataattacaaaggcaataacttaaatggaaattactcacatggaaggaaaggaagaagtcaaagtgctaagggaaggggtcgatctcaatcaaagggatccaagactgacaatagtttgttaccattatggaagataaaacacataag

SEQ ID NO: 89587 - DNA, 636 bp, Cannabis sativa
catcctttacttaactctaacacacaattcacattaacctaaaggcataatggagacatcatctataaaagtatgtatattttgaagaatataaaaatgaaattaaaacaaacatataaataaagtaaataaagtggatatataatataatttcctcaataaaaattgggtcttttatattagaagagaaacaaatacaaaataaaataaataaaaagaaaaaatataaaagaaggttaagctaaagacataaattgacttaatttttagtggtttttgcaaaagtggtggattttggataaaatattttaattgtacgtattgtcacacgacagaaattacatctatactgtcttttttttttttttttttcttttcttttatactgtaaacactaaaaaaaaaatatgagcttttaatcttcgacacccacaaccagaaccaccacagtatacaccaatagagctagaaaataaccattaattctggtgaggttgagcaaaaaatagtaaaatcgacctcatataaataatcatgggaaaacaattgtaaaacaacactaataaatcaaaaaaaaaaaaaaaaggaaaaaaagattaaaaaaaactaacaattttttgtacagcctcaacacca

SEQ ID NO: 89588 - DNA, 592 bp, Cannabis sativa
cacaatataatttgaattattattcttggcttgtttttatgtattttagaattaatagaggtagaaatatatattttcctccttttttttctagtttacttttttatttttagatttgtgtgggttaatcattttgttgttgagatctactttgtgaccttgttattacacaactatgacattttttttgaagttgaaattgtgcttcagctgagaagaaaaatggagagaatgatatggtgtggcttggaatgaagaaggaagaagatgcggactgttcagtccgtagttttgaaaaaaagaaaaaactttgaatttctttttttgtttaattttccttttcaagctaaaaatgtaaaatttgggcctaaaatatcccttatacaaaaaagtccttatttttatgtaagttgtgtcttattttgtaccatgtgtagtagttgtttatgtgttatgcttgtttggtatactcatttgtgtaagctatgttttgggttaattttaaaaatgacgtgaggtagcagtgatacctttcgatttaacgatattaatgataatttattctttagaatatttttcaacattaaaataa

SEQ ID NO: 89589 - DNA, 781 bp, Cannabis sativa
  modified_base (702)..(714): a, c, t, g, unknown or other
aaacaaaagtgttaccaaatgctatctaaattactctcccaaactttttaggttattaaaaattctttacgaattattgagattgttagattcaatcaatttaattttactagcgtgatgatgtccatgtactaaatcgtacccctgaactttgatatccaccaaattgtgcccctggatttgatatataccaaatcgcgacccttgaattttcatctacgccaggcttccatttgtaaaattggacaatttttttttaaaaccaatgatttcaatagttcaagtagaatttttaacagcttgaaaagttcaagggtcatgattcggtacatgttaaagttgagttgcaaaaattccaaaaagaaatactctattatagaatccaaaaattacatgaaatatgagatttgatactaaagttacaaaaatatggcatatataagtttatcactctcctatggcattttttcacatttatgattttttatggtatttgatatgccatatttttataaatctaatatccaaactcatatttcattgttttttgtttctagcctttttagtttattttacatttgtattttaggatttttatttctctatctttccattctactctaatatttttagtgggttttgtgtttgcttggggtgttatttgattattaaagggcacgtttggaacgccgtattaggtcnnnnnnnnnnnnnttgtattatattgaattgtattttttgcaatatttttctgtaaaactatttgtggtattaattttta

SEQ ID NO: 89590 - DNA, 1551 bp, Cannabis sativa
  modified_base (1480)..(1481): a, c, t, g, unknown or other
cacttcaagctctcaaaatatcagtcacctcagattgaaattgagaggaagaacatggactgcataacctatgccagttgtgttggctgcctgatgtatgccatggtgtgcacaagaccagatttggcctatgccatgagcataatcagtaggtttattgctgatcctggcagcaagcattgggatgaagtcaaatgggtaatgagatatgtgaaagggtccatgtaacgccgcaacccgcagggctgccacgtgtgtgcttttacaaacttatctcttactaatatattagtttagataaagtgtggtttaattaaaatttgataatttaaattatacatataaattttctttttaaaataccgctaaagtatggggatcccctgtttataaaatttctttatagcaaattgcaaaactgatattacacaaaaataaagttacattttcacacataaagaaaagaagtcgatcctgcttcccagaagccaagacaccacggctgatatgtacattactgggagacctctgactcatgggcaaacacagcttccaactcccttacctggaccacgaagcacctgtgagtcataatgacttagcaagaaaagctactagataataatcttggaaagtgctagcattctcattacaacattatatacgtattagtaggtcattacatgttcagcatgcataggtaatttaacgtttatacaacacacttattacataatcaagaatatttataactattcatagtcaacaatctcagtgtttcatacaacaccctaaacatacatcataataaatactcaccttcagtgcttcataaagcactctaattcacacattaccataacaacataatctcagtgcttcataaagcactctaaccttacatctctatgaacacgtattcttacactccgtgagtcactaagattttgcaagaaaagtgactaacttcataagcagtataaggtttgtctagtcacaccataacaaaacgtatttgattacaacctatcacataatatatgcctaatcaatttctcaaaattgcaatcacacaatcccggtacttcataaagtacccgtaccactcgctaaccacgagttatgtatgtcactatcgttgcccgatacagcaaacgataagtaagaaacctattcgcagtttcaagagtaattactcataacggtaatgaccgtttcttttactcaatcataatcaagtcacaacgataataatcgtttcataccatttccctcgatcataatcgagtcacaacgatgataatcgtttcatattatttttctcgatcataatcgagtcacaacaatgataatcctttcatattttccctcgatcataatcgagtcacaacgatgataatcgcttcatatttttcctcgatcataattgagtcacaacgatgataatcatttcatattttccctcgatcataatcgagtnncaacgataataatcgtttcatattttccctcgatcataattgagattgtaacaatcataacgttaactat

SEQ ID NO: 89591 - DNA, 1058 bp, Cannabis sativa
tccaacaagcgaggtggggaacaagatacagtgtaaattgtttgccacattacttgctcgcattatttctctttcaaaaatagtttgcgttgataccatttctatctcactaaaatacccatttacacacaactgagaacattgttgagaataatttctcaaaaaatttgtagatctctattttgttaataaaacctaatcatagcttaaatgctaccgtagacgtaggcaaatgatattctgtcgaactacttaaatttatgtgttacatattctatacatatatttatacttatatgcgtaattagcaatatatacatatagttttgcttggcaaccgattttgtgcccagaagtggaaaacacggattgcaatccgttgtacggctggtgcgtcccacgttacatgaaaatgttttttaatttttttaatttagttgatgaccggttgttgtaggtttgttaacgagttgtaaatttgtttttttaattaaaaaatgaaaaggtacaatcaatttactataggtgttagttatagtatgataaggtataacaaacttactgttcgtggcagttaatagtgcaaaaatactgtagacagtgggtccatgttgtcggagtgagattattttgctattttcattccttcatatcatatatgtatttgtcggatgctatttgagtacatgatatcacgtaccgtgtacattaatttattctgaatgatgtttagtaaacttagtgtacaaaatatcacgtaccgagtacaaaatatgacgtaccgagtgcgttcatttatttttcgtagtatattgttaagaaaaatttgttataactcatgaaattatgtgtttttatacattgagttttacgttggtgtattttttatatgttaattattttgtatattaaaaattaccacaaaaatatattttttgaccttgtaagattgattttttttgcttaaaatactttagttgttcgtcaataataattttgaaatttgttcaagatgaaataattaccttaaacatgccaaacataacaagaagtatata

SEQ ID NO: 89592 - DNA, 604 bp, Cannabis sativa
tctcaaatctgcaatcgagggtgggccgcggcatgcaattgccatgccgtggcaccggggaccgattcccaggtgccactcaaaggggtgggccgcggcatgctaaaagccatgctgcggcacctaggttccaaacccagaaatcagcatgcaaaccttcaaattttagcaacacaacacacccaattcatcctaattcacatccaaactctcaaatcactaaataaagttgctaacaaatattagggagtcaaaaatacatatttcatgcatcaatttccagcaataaaccccataaattcagattaaacaccaataattaaaatgccagcaattcaattcaaattgcatttcgggctcaaacctggtttggcccgaaatacccgattgtgactataccgcgccaacctatcagaacacacctgaaaaagacaacacagccatactatataataatatagcctcataagcacgtaaatatcttaatttcattattttacccttctccggtaaaagttactaaaatgcccctagctcaccaacagggtcttaacatatcataaatcatataaattcatagatattaaattatataataatataa

SEQ ID NO: 89593 - DNA, 502 bp, Cannabis sativa
tgttcttctcgagtttgaagggtataactatcgctcacatatacatttatacaatttactttgtactgattatgaagcttgcattgaatagccacctgcgtctagtttcttagttccaatgatgacatttgattgaagtgttcttttacactgtgattatagaagaccatttttgtaatatgtgatgaagttgcatcttttccctagcttccataaattttcattgaaacaaacaaataaacagaatatcaatagattatattaattttacatttttaaaatatatatataatctattgatattctgcttttgccttgcactttctcggttaccttcaaggctttggcctttgtttcaatattacatgtattacttctatgagtgacaaagtcatcaatgcccagaaggctggatttgatgctgtaaatgtaattgtgtatgacaacatagacaaagtcatcaatgttctgttgagctctcatattcattcaaaatttatgt

SEQ ID NO: 89594 - DNA, 699 bp, Cannabis sativa
ggaaaaattgccggagttgctgacggcatcgaaaaaatcatctgaattggtattgtcgctggaaaaattatcaagaaacagaatttgcatctgaattggtaatttttctagtaatttttcgaagaaaccagttttttatgatttttccagtgacaatgtcaattttgataacttttctggcgctatttgcaactccagtgacttttctgacaccggaagctactccgacgatttttccggcgccggtaacaaacttcggtaattttatcggtagatataacaaataaaactgcctaaatgaataaaaatattaaatatgggctttaaaaatctaatttacatatatatgacacatcaaatactataaaatatctaaaaataaaaaaataccatataaattagtcaaacttaaaaataccatatttaagtaaataacttttaaaatcctatagtgaatataatttttttttttattatatgatagtgtatattattattattgaaatattatatgaatttttgaaaatttataaataatttatagtattaaaaatttgaatggattgtttttattgaaatattaaaaaaaaaatacctgtaaaaaaattgagtcagcccacgtgctgttattgataaagcaattattattttgttttttaagaaaaaaattggctataaaggaatatactaatatcatgt

SEQ ID NO: 89595 - DNA, 1042 bp, Cannabis sativa
tactttgtgaacacccctaattaaaatacacctgaaaagatagcagaaaccagaataaaacttttattaaaaaattatcaaattgatcaaaaactatcaaataacaagaactaagcaaccacaaccccactaaaaattactagagctagccaaagggattaccctttggctagtagcaactaaattataacactctacttcataaccttcttaaagtcactattccttactaagaccatattatctaaaataaatttcagtatgtaatttagtaaaaagcaatgaacctaaaccctaccatatatatgtataatgaaattaccacttgatccatttctattatatcaatcatagaagttgactgtcttgtatgataaagatcttctaaaaataactttggaaaaatctaagctttcttgattgacattaccaacaggataaacactattatttgactctattgaagttgactgtattttaaataaattataatatactactagtagtatattaagatagatagatgtcagaggaaaatagtaatgtatatcttaatgctttcctaatactatatataactattcatattagtatttttcaatacaatgaaaaatgataaaactcatacttattaaactttattgtccatttattttagcatcttataagattaaatcaaaattttctaattcattattaatgtcccctaactcccattgatgactaaatcctcacatttataatttatacaataaacctatattattctatttatctatttatggtaaaaatcatatttatagtcaatgtaaattaattaacattaactaatataatcacaatctaattcaacttaattatttcttatttattatctatacagatgggttggactattaacatcataaccaatactaaaatcttctaattatttatgccatacgattactaaaaaaccattcgtattagggatgatggccaagttttggtggcggtctgatagttcaaagtcacatggtgttcattggaagagttggcaaca

SEQ ID NO: 89596 - DNA, 1208 bp, Cannabis sativa
agggatgactttcattctttttggcgacattaaacgatgtccttgcgattttgtgcgattttaatggttttgcgatttgtgtttacaccattatgcgatattttttttgtttttttattattatttccttactatattttttgtgagatatcgttttgtgcttgtgcgattattctacgatattatttttttgtgcaacattatgcgatattatttctttcttgtgcgacactatttcgtttttttatttgtttcttgttgccttttgtgtgtgacattatgcgatatgttttctttcttgtgcgataattgtgcgatatgttaggctaattttttctgtttattttcatatttgtttgtagtttttcttggatagattcaactatacttgtgcctatactatatgatggtgtttgggctatggagaatttcaactgggtattcaattccccaacaagtaagacaatgatgtttgacattgacactacactggaaaatgtgcgtgaagttttgtatgaagagttggatgtggatcctttggtgtatgaactaaaattagaagtcggttgcatgtacatgaaagacaccaagtttcccttactatgtttaggcgacatttatgtgatatcttttgatatttgtgcgattttatttttcataatttacttgactatggtattataataattttcttaattgacaaaatatgcgattttaagcgatatctttttataattgtgtgacgtttgtgcaagtttatcccaactgtacagaagggtaaaattggtaggcacagaagggtagtttatctcaactgtacttaaatcaaatattatagcataatatttataattccctgcatatctaaatattatcgtactctctctttttaatccataatgctttgcaaatctagccactgcttctcaaatcaaatattctcatatttctttgttaaccccattccatttcgaactacatggaagcttaatcaacacccaattggataaagtttcaccgtatttggtagtaaactttttgagaaaaattaaatcaaatgaaaagttaaaaaatttatgtatcaataacatgtcccacaataatcgcacaagcacaaaacaatatcgcacaaaaaacacaacaatgaaataataaaaagaaaacaaaaaccatatcgcataatgatgtaaagatatcacacacaaatc

SEQ ID NO: 89597 - DNA, 772 bp, Cannabis sativa
aagaaagatgcatagtagtacatagtatttagtaaaaaaaatatgaaaaagtaataaaatagtccaaaaaaaaaaaaataaacaagtaaataagataacacattttcattatgaataaaaagtaaaaaatgtataattgtaactatttttcaacatactttagaaagttacatatgtcactcaataagaaagagagtttaaaagagagtgcagaagagaatttgcctaacactcttcttcttttaatacagtataaattaattcaatatagagattaattaattaaatataaaaatatgtatatttatattgctaccgacagttcatagaccctagaacttaatcactagatataattgaaaattggagacaaaatacacacctagctaaaaatatatatatttatataattataagtaggagaaatgaaacatcattaagaccatttctaatagaccatttgctaggaatattaaagtgcttaacactttaacattatgttttataattaataaatttaaaataattatgttttataatttataatattataaattaaaataaataaaattaaatattaaattacaccatgataatattacaacttataaaaatactaaaaaaatatgtaccggagaggaggacgggttattcacatttcatttgatagtcaaaggcgaattgaaagctaagcagtggtaattctaaggattctccggaagaaaaatagtataaatgtccattaacaatttctctttccaatatgttgtag

SEQ ID NO: 89598 - DNA, 594 bp, Cannabis sativa
aggattaaaaacacctctggacacaatccacatgataaaaaagcaacagggccaaatactaataatgttcaaatacagagggctaatggcaaaagatacgaacatgaaggccttagggctgaaaataaagtaatgttctaaaaagacctcaggccacataggacatgaaaatagtgttctaaaaaggcctcaggccacctatgacatgaaagtaaagttccaaaaaggccacaggcaacatggaacacaaacgtgagtaatgttctaaagctaaaaggccacatgccataaaaagccataggctatgtggaacatgaaaacattgtctatctggtacaaatataatactgattactattaataaaaatgttgtctgcatgtgtgcaagggcagaaggagctgaatttggagccacgagattgagatccacagagtctaggctggccccatcatcacaatgctggccggcctggtagtcagtatcttggccagtcacctcctccacaggtgggtcggccaactcctcgtcgtgtgtgttggaaatattttaccaggatctagatttactattatgtatgtttcattaacatccta

SEQ ID NO: 89599 - DNA, 675 bp, Cannabis sativa
ttcgtgcaagaaatatcaatggggatacgatacgttttcaaccctccttcccggattggaaggattgcttgaagtctattttaccctctgtgatgctttccccttgatcttttcaagcaaagtctaagcttgaatttttatacaacttcagtcttctttcccagaagccgaagcttgtcaaataaaaaattcaacatgactctcgcatgcacgttgcttttcttgcaagagggatcactaagggtacgatacatcttcaaccctccttcccaaattggaaggactacttgaagtctatcttaccctctgtgatgctttcctctatatcttttcaagtgaagtctaagcttgaatttttacacgactttagccttcctgcttggaagtcaaagctcgttccataaaaaatgcaacacgacttctgcaaacccaacgctattaaacctttcgacgcttgcaagatcaaactccttgcgcacttttaacctttcttagtgaaagccgaaagtttgttgccatgggaatcggcacgatcttcgcctaaacaaacccctatgcaagagagattatttgtacaaggacgtgggacaagctttccctccgggaaaccaacagcctcccgtgtctcggaagcctagactttcccttacggggtttacgccatgaaggagatta

SEQ ID NO: 89600 - DNA, 1446 bp, Cannabis sativa
gtcttgacagatcatgatgttgtgcgctatgaatctccctttgacaaaacccccttgattctgagccacaatatcaggaagtatatgttttagtctcgagcaaatgatcttcgtagcagctttatagaccacattgcagcatgcaatcggcctaaaatctcctggtgtgttcgagcatttgacttttggtataagtgtaagggttgtgcaattgatttcctttaagagctttccagtgtggagaaaggatttaacagccttgcaaacatcctctccaactaaattccagttatcctaaaagaagtaactagaatatccatctggcccgggtgctttagctcctggaatgtcaaaatggcttgtttgatctcagcatcagttatttcttgtaataatatctccctgtgttgacttgttacccgtggaccatttctaagtacattagaaatggttttcttcatgttgatcattttggtgccaaggagttgttgaaagtatctgaggaactcttgtgtgatgctatctatatcttctattcggtttccctgagaatccacaatagaaagtattctattttggactctccttgatttaatgctagcatgaaaaatgggtgtgttatcatctccatctctagtccaagtcgccttagctttttgcattaggaaagattgataatcgttatgtgctttggagaactcattcctggcagttttctcctctacatgcagtatcacattcatcgggtctaacatgagtttgtgttggtgttcctccagtaataactttgttcttatgactgctgcttgcaaatctgtgtaccctgcttgattaatctgtttgaagaccagtttcaaagctttaagtttagtcatgagctgatacatagcagtcccctggtaattagcctcccaaactgccttcactttgctgtcaaactcagagtgagattgccacattttaaaatacctaaaaggttttttcccattatgtagcagtgtatgaaatgtgacaatggccggcgcatgatcaaatactccttcactcataaaaattgcttcagcacctgagaaaagatcctgccaactctcattggtcaatactcgatccagtttagcataaattctagcttctccttgctgattattgcaccatgtgaaaaacttcccactgctttttatatcttccaattggcaaaaagaaacacaatctctaaacaaagtgagattatgctccttaattttagagccaaccctttcttctttttctaaaatttcattgaaatcccccattactacccaaggtagatgagaagtaattgcttttaaatcctgccacaatatccttctaccctcttcatcattaaaaccataaacaaaagtaacaagaaaactcttaccatcaatagtagatacttgtagatggattaattggcttgtacatttg

SEQ ID NO: 89601 - DNA, 844 bp, Cannabis sativa
ttgtattttaaatttttagttaaggaccagacattaaattttttcagttgaagcatgaaaagcgtgaaaaaaaaaattggacctgggaacccagtggtcgcgaccaccaggttcttgggtcgcgaccctttttggtagtcgcgaccctggtcgcgacctcgggttttacagaaccacaaaaaaaattttattcccagtagttgtgactagggtgactggaagttgcgaccctttttccaagtcgcaaccccagtcgcgactagccaattttccagaagcccccagaattttgaatttaagctagtcgcgaccagctgacggttttcctataaatatcccaatttttccccccattcaaccctacaccaatttcaaatatttccttcttctctcagccgaccctaacccattctcattcaaaaatttcaaattttcttccccaaatctttaattctttcatcttcaatccaatttctcaatcccaatccatctataaacctaatttcactcatccatctacattttccaacaaaaaccatcccaaaaatcaccaacacaatcccaaatccaaaaattaccattgttcttcatcttcaacctcaagctttcaagaacattcaacaatggaggtggagtgaaagcttctttgggtttgtaagtatcacttcctaccatattaaggaatttgatttactttttataaattttgggtggtatagtgcatactgtgtggatttgttgttatattgggcttattggaattgtgttgtgttattgttgggtttgtttgagtgattttaattttttgggaagtagaaaattaaggggaggtgctgcccaaatt

SEQ ID NO: 89602 - DNA, 897 bp, Cannabis sativa
tttttccatctcattaactatttgggctaaaaaataataccagatctacatattaaattgatcattttaaagtaagctccctaataaccccattgtcatcgggttaagttaagattttgctttatatattatatgtaaaatataaatatagatagatatagatcattagtggaaaaacacaccaaaaataataataacaaataatgggtatcccacatttttctcctcacatttctaaatatggctcatatatatatttctctctctcttgttccctccaaatccgaataacaagaaccacctgaatgaacaaaactctcaaataagaaaaaagagaaagaaaaaaaaaaaatacaaaattcccaacagaacacaatacttttctttttcatctcttcacaattcaaatcttattcttaatatagatgatttgattagatgtgtttctgcatgggtttagtttttttacattgacattgctttgattgatcattactctaatatcggtttcaaattgcgtaaaactgaaaaacattatgtgggatttgggtaaagtggaagaatttgaggcaagctttcaaaggtggctcttttgagaaaagtttgtgtttggggtgtgggaaaataccccattttgaagaaatgagaagagaattatatggacagattggtgggttttgaaagccatggtactgagaagaagagcctttcaatatcatgtgattgtttgtgtaattttgctttgtgcatttgtaattaggggctcacaaaataacaggaaaacgtttcaaacaaatgaagatggtcatgatacaccggaaattcaccaaaaaatggtaaataatactcaaatctcaaataataattttcttgattttagttggatatttttttata

SEQ ID NO: 89603 - DNA, 561 bp, Cannabis sativa
accttcaaggctttagactcacacaacaagctccaccagttactcacttgtttgcggatgatagcctcttgttctgccatgcttctaactcctcggcattagctattcagcgtgttctacatatctacaaccgtgcatccggtcagctcctaaacacatcaaagtcggtaatgtcgttctcaccaaacacaccaaccattactcaacaattttttcatgctactttgaacatgcctattagcgaatgtcatgagagatatcttgggctacctgcatattctggtagggataaatccgaattgttcaagttcaattaaggagcggatttggaagttgctcaacgcttggaaggaaaagttgttttcaattggaggaaaagaggttcttttgaaggtggtggttcaatttataccaacatatgctatgaactgtttcaaattaccacaaaagttttgtcaccaaattgagtcaatgatggaaaaaatttggtggggttctaataaaaatggtaacaaaatacattggaaaagttggaatttgttatgcaaatcaaagtttgaa

SEQ ID NO: 89604 - DNA, 823 bp, Cannabis sativa
  modified_base (587)..(595): a, c, t, g, unknown or other
aacgaaaaacacttaccgaatgatatataagggtgttactgatgagtccatatttgtcttataaatatgatcaatttatgtattaacattcttaaattgatttaaattattgattattttgattttaattgttttggatattttaaagactaatcatgcatttagagtcatttggagggatgttagcatattttggtagaaaattgtggaagtaagcgagctcggttttataaatggagcttaataataaattttgactaccttagaaggagaaatggacttgaagtttgacatgaaagttttagatctcgttcttatctttctggaaaatcttgaatcgtccgattccgagttgtattgaagaagtgatggccaaaatattaatcagtagcgtcgtatttatctttttttttttaaaaaaaaaaaaaaatcctaattctaaggaaatacatatatattttcaagcactataaatataacattttaggatgtaaaatttaaaaccctagagctaccaaattgagagagaaacttagaaagagagcaaggaagagatgtagatcgcagcttcgaagtgttcttcattnnnnnnnnnttcttctccttaaactcttactaattattatgattgtcgttataatgtctagttctgagtagtttccttttagttaagggttatttcaaaacccgagatattaattcttaatttccttatcgaatgttaatttctagtttctattatatatcaaattgtttcttttcttctatgttcaatgtcatgattattgttttaatcttatttagacggccgctaaattaggtt

SEQ ID NO: 89605 - DNA, 666 bp, Cannabis sativa
ggtccaattgataacttttggatccaaaatagtatttacccttcaatatactagttaagagcatcgtagtagtaagttatattgtggtcttaaaataataatttatagtttatattgtggtcttagaatagggttggtcctaagatctatagggcttaaggcgaaatcaaattttgggacccatatgtatagtttaacaattatgaaaatgatagttctagtgatttagtgtaatgataaagtttttaaaaactctaaagaactccaaaattcaatccttcataactatacattaaatatttttttaaaaaaataaaaaagtagaggttgggaattaatcctataatctcttagttatagtaggaccctttactagtacaccaaataatttttgttatattttcttcttatttaatattttatctatacatttatatttttttttcacaatttttgtgccctgagccttcgggagctcgagacgcacgcctagctcgcatataccctcaggactaaccctgccttagaataattatttatataatttttaagctttcatttgatacaccactttagataatatatatatatatatgattgtttttcaatgaatgttacccattcatgagaacttttaaaaagtaattataattaaatgttaatttt

SEQ ID NO: 89606 - DNA, 502 bp, Cannabis sativa
tttggtttgaccattttgcccttgatgcatatggatattttggttttattaccttagggttatttaggtcttttgatagggagttttgtcttgttgtgggatgttactagctgaatataacttaaatattaaagtaaagggggttttattctttttgataagtattaaagaaactcatcttttcttcatcaatctccttctttctttctttttcgaaacatcaagaaacctagcctaggtttgattttgcttgctgatttttggaattcctagcagtgttggtgaagctttgatccaaggtagtgtaccctagctctcttcttttgatttctttagttgaaatttaagttagataaattcttgaactttgatattggggagctgtgttgaagtctattatttgaaatgaaattctgaagtttaattaaggttacctgagttattttatgttgttttgttcattgtagtaaggttttatcaaggtttgggtttgagaactcaa

SEQ ID NO: 89607 - DNA, 675 bp, Cannabis sativa
tttgtatttattggtgaaaaacatgcttaattaatgttctccactccattaggcaactttactaatgatagactctttaggatattcatttctttattcatggtatattgtactacaatttcgattctttgcatttcatagcgcaaaggaatattgtagttgaactcttattgtatataatgtaatcactagaaaacatctatcttattattctaataaatcatcttaaggatgaaccaaaaattctttaaagagcaaattgttcaacatacatgttgtttagaaattgtaagcaattattaaataacatgacttgttagaattttatcaatgacttgtgtattattaatggattctcaataatcattaaaggtaacggttgttctgaatcataatcaatctaatacttgaggtggaagtttgagaaaataaataatattttctagaaactaggttccgagatggatctctcctattgatcaagtaaattcttaattccacaattctagtattgtgggatggataataaaatatgtaacccccagacattataacatttcagatgaaatgcttatatatggtatttgggcccagttctatcctttgacaattgtacttattgacctcaaataatgatcaacttacagctgagtcatatagatctgatgcttgcca

SEQ ID NO: 89608 - DNA, 734 bp, Cannabis sativa
acaagacccaagtcaagagtgcctttaatgtatcgaagtacccgtttgcatgcattccaatgtgcaacagtaggttggtgcatgaattggcttaacttgttgactgaaaaagcaagatcaggtctggtcattgtgagatattgaagggagccaattgtgcttctgtagagagtgggatcgtggaacaactcactgtcagaggtatacagtttgtatccaaagcataatggtgtgatgcatgactatgaagtttccatattggttctttttagaatgtccatagcatactgagtttgggacagatggagagatgcattggttttgtgtgcctgaaaaccaaggaaataactgactgagctcagagttttaagagcaaacttggcttggagatcattgattactttgtgaacatctttagaactggcacccgtgatgaggatatcatcaacatagaccaaaatgaggagaggagtgccattttttgtgctgaaaaagagactgctgtcagaaaccgaattagtgaaaccccaagctagtaaggcagtcttgagcttttcataccaagctcgaggtgcctgttttaatccatccaatgccttcttcagttgacacacataagttggataattcggatcctcaagcccttgtggttgttgcatgtaaaccgcttgttctaagtcaccatttagaaaggcattatttatgtcaatttgttgtatgtcccagccataggt

SEQ ID NO: 89609 - DNA, 532 bp, Cannabis sativa
gttttcgagttcaaaatccaaaaacactttctcttattattaaaattcccacataaatacccaaaacgaaaatgaaatatgcatacatatataaatttacacacaaatacaatttgataagtgagacatatctgaataaatcatgtaattttattaataccaattaactaaaataataatttgaaattcaatcaaacatctcctccattagaaaaatgacttaaactaaaattataaaaccgaaccaaataataaaccgactaatttttaagaataattacataaaacactaatttttacattcgatttttttttaatatttttcgctattttataaaaacacaaaataacaacataaacgtaacaataaaataacaaaaaaaataatattaaaacaatacaaaaaataatataccaaaagatcatattttatataaataaaatttaaaaaattataaaaatattaaaattttcttacaactgtgtttttataatttttataattttcttaattatttttatgttttttttt

SEQ ID NO: 89610 - DNA, 514 bp, Cannabis sativa
gtaggaatgtaataccattgattttgctttttatcaagaagatcagcttatcaaataaaaatgtgtttttcaatttttgacttctcatatatatttgatgtccttttctctctttcaagctgtttccctatgtttacaatgaatataaatgagaaattaagttataggctttgaaatgctacattctattaatagatgtcatctctgttaagattttttttcaatgataagaaaggtatttttacaatatttttagtacatagtttgtaggaaaattaacggaatcttgtacatttttttaaaaaaaatcttaattataaaataaaataaacaaaagttatttgtgacaagttcaattatactattagtgtcaagaaaatcaagctctggaaaataatttgcaagaccaaagtttgaggacaaataatttgtaaaattaccaattatttgaaacttttgtcgtgagatattgttgtaagaagtttaattactcttttttatcacattaatgatc

SEQ ID NO: 89611 - DNA, 1199 bp, Cannabis sativa
gcaaagctcgaaagcctcacaaaatgctcacacactaaacactgaaaagcatgtatccaactcattgagctcttttattgaaaaaaaaatgtaatccaatttgatgaacgactaactaattacatgccataaaaacataagcatcatgatagacattcatttgagccttcaatttatggtgagggaatattgtagagtacaaaatttgaatgtagtagtgaacattcatgtggaggttcaactatgttatttggaaagaggtgtccttggactttaattataccttgggacagcaatgaaactaatatatgatgtactgcttctttgtgatctatttaatatcattatgtttgggtattcttaatagtagaagaaacttttacatgtttgggtattccctaataatagaagaaactttgctaagttttttaaaaatactttacatacaagtacaaatttagttttcaagagctgaagcaacgtttaattacaaccttagtgttggctttggcatcagatcaaaaaaagttggtggtctattatgaggcaaccagataagatttgaggtgtgttacaatcccagtggtggctttggctaaatcggttggatgcattgctgaagcatgggatcaattgtaatgtgcctttaaaagaaggtgcatgccctatgaagtatttggatatgtgccttagaccaaccaaatggaaacaagaagattgtgtgattattttaaattttttgaaaatgaagctacattgtgtgctagtagatcagaattaaaagtaattggatgaacatttttcttttacctcaaaaagtttctaaggaaattgacagaatgtgcaagaactttctttggggtaaaaaggacaacacaagtaaaatgcacattgcttcgtgggaactagtctgtaacatgagaaagtttggaggattgggcgtgagggtcagaattggaataaaccatcaccggccaaatacttatggacagttacactgaagcaagatttcatataggtaattgggttagcaatgtactttgaaagatcaagaagtatggtcacaagtccgatgtgagttggtattgaatgaggctcatgagacttagggggacattctcctgaaatgaaattctgggtcactgtggtaagttttatattagcaaggtctatgagacgctcataataggaacacgagt

SEQ ID NO: 89612 - DNA, 696 bp, Cannabis sativa
gggaaaccaatttcgccttttttttcgggccttttaatgattttatatataaaaaaaaagcacgcatcgctacaaggaaaatgtagaatttaatgtaacaatctatactgatgatcttattttccatttgactagttagaattatttaccaacaattattaaatttctaagtttaaattttggcggtaaaattcttcaaactattaaattagtagtaaatttaagttatcatgtttaatgctgatgtgtatattttttgtacacctaatattattattttaaagttattttcaaaattaaataaattaaaaaaaataaaaataaaatatttaaaaaaaaaaattacaaattttgaaataatttttatatttttaaaataataatattaggtttactaatataaatttgacacatgtacaaaagtgtgcacataaacaatctatattaacaattaattgtaaaaaataaatgacacttagtagtttagaatattttatcgtcaaaatttgagcttagaaagttaagtgcaactgaagtgatagttgagaggatttagccgcaagttgttatttttttttattgtgaaattactcaaattattaacaaatttgatactacgtatgtagagtatctaaaaaataatgatttttttacacataatacttaaaatcctaccttttttataattcttttaca

SEQ ID NO: 89613 - DNA, 629 bp, Cannabis sativa
aggaagatcgttaaggaaaacaaagttggtgagttgatgttcaaggattgggaagaggcttcaatgatgtcaaaaatgttggagaccgcagtgagtgtgttggggcctgaggaacaacccaagtctgctattcgcaaacactttggcaacattttattacaataaattgtaatactttcatctagtattggccttgtaattgatatcaccgctctctattgttatatatataaaaaaaaaactagttattttagtttaaaaaaacaacacataagaaataaaaaacaaaaagaaaagaaaaaaaaaacagtaatagtcaaaatgttagcttaatcgagcaaatacgctaataatttgtaggggtttaaataaaaaaatactttaaaaaaatatatttttttaaataatttttaaaaataccatttatttttatagtaaggatcccaaaaatttttatttttgcttatggtccattaatttcaactcaaagccggttctgcttcataagaactaaaattcaatgttttctttaataacatatattgttaaaccctataatttgtacccatagctttagcaaaaagtatgtagtaattatttttatattatatatacatacagatatcata

SEQ ID NO: 89614 - DNA, 1062 bp, Cannabis sativa
attctcagctgatgatagcctgagcgaagatcgatcttggagaagatcgccttcagttgatcaaacagatcattaattcgaggtaaatgatactttttttatagtaagcttgttcaactcccggtaatcaatacacattcgcagagacccgcccttcttcttcacaaataataccagagcaccccaaggagagtatctcggtctaatgaatcccagattcattaactcttgcagttgtatttttaattctttcaattccgctggtgccattcgatagggtgcctttgatactgggtccattcccagaaccaacttaataacaaattcaatctcccaagtaagtggaaatccttgtaaatcttctagaaagacgtcaaggaactcgcacaccaatcttgtaatctcaggtccagatgtcacaggttgactgatatccactgcagtgactatgaatcccagataacctctcttcatcaagtccttagctttcaacagtattattcttggtatgcgtgccccctgaactttacccacgaacaccgttgggttagcactatcgggctcaaataccaacatcttttgcttgtagtcgatcgttgccccatactaagacaggaaatccattcctaggattatatcaaagtcagacaattgtaattctattagattggcggacaattcacaaccgtcaatccagaagcacaaagattgaatccacctagtggatactataaggtctcccgagggtaacagggtaccaaaccccgaagcataaatatcacatggcttatgaaaattttcaataaccctactcgacacataagagtgagtagctcccgagtcaaacaacacaaaataagaacaaccaataatagaaaactaacctgtcaccactgacggactagcatcagtgtctgcttgagtcatggtaaaaagtcatcccaagttttgagtaatattcttcttaggttcctctttcttggtctgaggacaatctttgatgaagtggcccaccatgccacactggaaacatgccttggctcgacattcaccctgatggtg

SEQ ID NO: 89615 - DNA, 1012 bp, Cannabis sativa
  modified_base (500)..(502): a, c, t, g, unknown or other
catactacttggcccttgcacctcccttcaacttagcctcgtgcttcagttgaataaactcattctctgaatgagctcgttcggcccatccagcaccagacatcctctgcttcctcgtcacggacttaggaataaagtccttgggaaagagcccgtacttcaaaaagttatcgttggaggtcaactggataatattccggtcttccaccaatagtcgcgcaagtttttgagctctatccctaagaggaagagtgaggggaggacggtgatatgtcagaatctgctagaaccgagtgcgagtgatgcccgtgccatccaccatgaagtactcatcagcaaaacgcccaatcttcctgatggccatgtcgtccgtgcccgtcaaccacttaaagtccggttgagagaaatagaaataccccgacctgccttgcttgggggtggacttcaaatcagagaatcaggaaaattcgtgagaagagggcataccccatttctgggannngtagaggacgaagagggcagacaagtacttgatgcccttaggaatgaactgggccgagcagaggccgaagaagtctgccacattcttgaagtattgatgcaaaggcatcaatgccccttgctaaccatgaccacccgaccaggcgcacatcgccttttcagggttggtggcacaattgctgtgggcgggaatgtagcaatccaggtggcccaggtattcgtcctagtcgagagtctgaaggtgcgcctcagtaaccttggacggagggcttaccaacctggcgcccaaggcaccttgcctcctatgaggaatcacagcaaaaagttcctgactgacgtagtccacgccctcaaccaagtcatttctatcagcatcgacgggctccccaacctcgttgtactctccgtagtttgggggttcaacctccgactcttccactacctcagaggaattgccaggacgtacatcatcctgctcctcgatctactagaccttagcgtccccttcatg

SEQ ID NO: 89616 - DNA, 654 bp, Cannabis sativa
gactcttgcccagacctacagccctgactctgctcttcctccggtgcctgaccagttggtgaccctggggaggtcttcttctagtgcccctctaggccaaatcatcttgatcgatgaggacgaagaggtcgaggaggaggaggaagagggtgagatcctggccctcttggaccgaaaacgcaagggcaaaatggtggaggcagagtcttccaaaaaggctaagagggtgaacactctggccgtcagctctgattcggggattccgtttgaagcagaagaatacactgtacctcccagtatcatccttacttccgtcccatcagatgaggagaggcaacaactccggatagccaagcacaattatgctatggccgagtacacaagggggaatgccgaggtggaagccttgaaaaaggtcttacgggaggctcagcgaaattccttacgcaaggaggccttcaggagcccttgggacctgaacatggaccatttgacagactggttcaaccgcttcgtcggtcctacctacggctgtacaaaattttttcgtaaaccgcccaacccgaataacccgctcaaaccaaaccgacaaaaccgataaaaaatacaaatcgacataactcgacaaaattctaaaccgcccaatcagttaat

SEQ ID NO: 89617 - DNA, 9909 bp, Cannabis sativa
accgggaaagggggatctttgactaaacccaagcatggatcgtctaaatcgaaccagagaaacaagaagaaggttcgtatggaatcgggtaaaaacctctctctaccttctaatgctgaaaacgaaatctctactcttggtaatatggttattgaaatcaagcttgatcaaaattttcaagtgggcgaggaggcggcccttatcaagcccccccactccccatgaggtccttatcttggaattgccggggtctggggagatctacggcgatacaagcccttgcggcttgggtgagaaggtttaaagtggattgtgtgtttttaatggaaactaaggtggggtatgatcaaatggttaaagttggtagagatcttaattttcaatatggtgaatatatagctgctgatggtctggctgggggtttttgtttgctttggaacctttctgctggaattaagcatgtcaagccttgttctatgggatttgaatgctctgtttttgatgattcaaagaactcctcttggaagatgtatgcgatatatgggcctccttatgaagatttgaaggtggaattttgggagagtgtggccaggaatctaaatggcttagactgtgcgtggtcattaattggggatcttaacctcattcacaaaaaagaagataaatcggggggaagaccttttgctcctcgtgatgggcggattttaaattctttcctgtttgatgttggtggggtggatatagggtatttgggctgcaaatttacttggcgtaataagagagatagtgggggattgattagggaacgactggacagagttatctctaatccggattggctgtctctgtttcccttggggcgggttcgcaatctccccatggttgcttctgatcatggcccgcttctcttcgagcctactccctttaattccagaggttcttgtcccttccgcttcttcgaagcctggttcagtgataactctagcttccaagtaattaaaaacgcttggatgaaccctgcttcagagaattgtgttttaactctcagttctaaactgcagagtactcgaaaagctttacaagtttggaaaaaggaagtttttggtgattgcgacacaaaactgaagactcttgaaaccaaacttctagccatccagtctaatgatattgacaaagatgtgccgggggaagaaagacggctggaaatggaaattcttgaactcataaaacgtaaggaaagcatgttgaagcagagatctagagagctttggctttctaaaggggatcgtaattcttcgttcttccatgctgctcttgtggtaagacggagaaggaatcatattcactccttgctcgacgagaatggtagaacgagagtctctgaaaaggataagggtgttattttgaataattttttctctaatttgttcacggcaggggatgtctctgttccccgtgacctggacgggctaatctcccattctatctctttacaggaaaattgtatgttgatggccattcctgatatggaggaaattaaaagtcatgtatttcaaatgcatccgctgaaagcgcctggtcctgatgggttttcgggatgtttctaccgccgctgttgggatacggttggagatgatgttgttaatttcgttcaggaggtttttcgcagtggtgtgctaagtggaaacataaaccacacttttctctgtctgatccccaaaggagagaacccaaagactgtggacaggtttcgccccattgcgctatgcaactttgtgtacaagataatcagtcgaatcattactcagaggcttaagggagtgatggatcggcttgtttctcctaaccaatccgccttcatccctggaagatggattgccgaagcttcaattctaacccaagaaatagttcaaacgatcaagaagaaaacgggtaaaggaggtcttatggccataaagattgatatgttgaaagcttatgatcgcatggaatgggttttcttgagaagagtattagaagccttcggtttctgcgatgcctttgtgaacctggttatgcagtgtgtctccacggtctcctattctgtccttttgaatggcaaaccactcaagaagattattcccggtagggggctccggcaaggtgaccccatgtcaccctatttgttcttgttatgtaatgacatcttgtccagaattctggatagagcccaagatagaggagacctccatggaatcaaaatctcaaaaaatgcccctgccatctcacatctcatgttcgcagatgacactcttctctttgccagagcgaacacgatggaagcgagtatcattggtaagtgtctgaagcagtttgaggactggtcgggccaactttgtagtaagcaaaagtcgggaattctttactctcgaaactgtgttaaatcgctaagggataatattgaagctaaggtgggaattagcacgatcaatgaagcggaaaaatacctgggcaatccttttgttttctcgaggcagaaaaagaaggattttgattttttacgctccaaacttgtgcaacggttggaaggatggaagatgcggactctttcctttgctgggaggatggttgcgatttcctccgttgcctcaactattccttcttacaccatgtccacctaccaacttccgttgtcttcttgtcgggatttggatgctatcatcaggaaattttggtggaatggccgcctcgataaacaacggtttttagccactatctcttgggatgccttgtgtcggccgaaatgcacagggggtttgggattcagaagaatggaggatataaacaatgcctttttggccaaactagcttggaacttggcgtcgggattaagaagaccctggactgaatcctataaagctaaatactttcccagggattctttttggtctgttcagcaaagaaattcggactcctttgtgtggaaaggaatccttaatgcgagacagttaattctctcggggtcctgtactatcattgcttcgggggagtcaattgatatttggtttcaaccttggatcccctggttgacgtactctgaatttcgtgatttgatggagggaattcgtgcaaaggcccctggccttcgatcagttgctgacctcctttttcgaagaacaaagcagtggaattctaactatttgtgcttcctatttggagttgaattgggaacaaagatcagtaccattcaaattgctactgaccttaatgaagaccttctcatatggaagcaatcaaataatgggaacttctctgttaaacaagcatacttgctgaaccagggcgggagatttggcgcaattgatcctctgtggaagtggatatggcatggggaactgcatccgagaatgcgaatgactctttggagagccttgtcaggtgctcttcccttgggaggtaaggctggtattccctctaacaactgttgtttctgtccaaaccttgaagaaaatactctgcatttatttgtgaaatgttcttttgctgctggtttatggttcggttcccctgtccctctctgcacaaacgctgtccactcagattccttgaaatcctttgtcattgagatgggatcgaaccttgattgtgctcaaagaaccagattccttctctgcttggcagtaattattgacaccatttggaacaaaagaaacgccctttggcacaatgtcgatgagcaggctgtaaacatcggggaaagtttggattctatccacagaaaattctgggaactttcccagatagatgagcatggagatacgatgagtatggctccagcctcccccccttcggaattgcagaatttgcccacgggaaatcgtcttatcttcgttgatggatcctttaaggagggaaaaattggagctggaattttagcttgggaccgagcaaccatggattggttttttgaagctaaagtttcggatggtatgtctgaggttgcggccgaagtcttcgcctggttttcagctttccagtgggcaaaaaagaataactgggacgactttgcgttgatatccgattcctcaattgtcctcaaagctttctctaatgacatatcccccagctggaagtgtctctcttggtttgctgctgccataaaacttaaacacagttttacgaatgtttccttttttcatttcaatcgcacttatctagcctttgtagactctttggccaaaagtgctcgctgttctgagagcgatactctttgttgtaaaggggagggatttccccctgtggatcccattttctcagttgctaatctaagataaacactttgtcttttcaaaaaaaaaaaaaaaaaattcgtgtacaacgtttaaaatagggcacgtgctccgttctactcaacttactaattgttaattaatagtttaaattttaaagcggagagctaagagttttttatttttttattttttgagtacgagagctaagagctttactatccttcattagttgatagatttaataattaagttaatattatgtgcaaagctaaatatattacatttattttcataattaataattaagttaataagtagggttcctcctctggaggatagtatgattaactgcagcacaaacaatgacaaccaaaacaaaagcccactatctgtggcaaaaggctaatttgttcccctgattatctgatacatgacataaatattaaggacatttaaagtttgtttagccaaaaaaaattaaaagttattttagcaactcgttattctttcttcatattcttaattactttagcggtgatcccaccaatatgatatttatatttataaatatatatcgatatgccaaatagaaggtgatatatatggaccaaaataaattaaataattaaacgtaaacatcgacaacgatatatgttactttttcttattatataatcaatttactgtataattaagattatatacaaggatgatgatatatatataaatgataagaatttttaagcactaaaaactgcagtacacagcatccaacaaagaaagcttatatgttaagaaaaaaattgccactgatcatcaaaaccctaaaaatataataaaacaaaaagaggatgagaataaaaaagcaaataaatatacaaaagcctctcctagctttcctccctctctctttaattctcttttctctttctctctttgctttctctctttctttctttctttcttggctctggtagtattcccttgggtgtgattctccaccatattttcctaaagagcaatcaaacttaagaaaaagaaaaaaaataaataaaaccatggttttctcatccattccagtatatttagatcctcccaattggcacgtccaggtgaggttttttcttcaatttattatttttatgtatatatatatccactgctatagctatatctaattaataagcttatttttcaccaaaaaagaaagtaagagaaaagaaagaaaaaaaagatggaaaagaaaggaaactgaagaagattattattcctattcctttgttatctcttccttgtgaatataccagataattaattttggttctccacctcaaaataattgtatgtatataattataaatatatatggtttatcatacataactatcatttgggatttttttctccgcagcaacaaaatcatgaacaatatcaacaacaccaacaacaccaacaacaattatcacgccttatttcacctgaaagcggcagaggcggtagcggcggccagcttcctccactgccgccacctgcccaacttattccgtcacatcatgttggtggtggtggttctgattccctttccaacggaggaactgggacagggtcgatcagaccaggttccatggctgaccgagcccggttagcgaaaataccacagcccgagacagctctcaagtgtccacgatgtcaatccagcaatacaaagttctgttatttcaacaactacagtctcactcagccccgccacttctgcaagacgtgtcgccgctactggaccagaggtggtgccctccgcaacgttccagtcggcgggggttgccgaagaaacaagaaaacatctaaaagcagcagcaggggctcgaagtctccagctggcaataattcaggtgatcagaacaagcaaacagcggctggttcgtcttcttcgacctcgactggtgggggcggcctaattagtccctcagcagatccgatgagtggtcataataataataataataacaacacctcctcgttcttggcctctatgcaaaacctaacccgattcggctctggaaacttgggcttaaactttactgcgaataataacaacaataataatgatcatcatcagatccaagctggtgggagtgatttagggtttcagataggatcggaagtagtggatcagtggcgtttgcagcaattccctctaatgggcggtggtcatcatgactttgagtcacacccaggtaataataacttatacccttttcaaggcagtagtggtaccagtggtatggtcgaggttggagataatcatgatgaccatcaaatgagtcatgatcatagcaatatgatgtttaggtctagggtttcacagttaatccctcaagtgaaagttgaagatcaccggggtaatcaattattagtcggtggcggtgggcttaatcttttacgaccaaatttgggtctttcatcatcagaaaataataactactgggggccgagtaatggtaatacagctagctctacacagtggacagatttatcaactctcaacactactaatatcaatacttccacaacccatcctctcttgtaagtactttcgtttggattatatgttggataaaaccacatccagcttaaagatccctctcgacggatgatcatgatcatcatcacatcttcatctttatgtctccaaaaattatcagtactcgaaatcaaattttataatttggttgtcttgtgtgtatttgtgtcgactctcttatatatactatattattataaatttgtttgattataattagttttattgtgatatatatgatggagtttgagtagtatagtagtagtacattgagtacggtcatcgtgggtttgtttgtagtaatatatatagtagtagctatagtatatcgtgtcctgtaagttagatattatatggggttgacaagtattaatatgacatcttatattctttttcatttatctgctgttgcttgagcgcattaattgatacatatgggactagctattagctatactatacttgatttatttttaacgcacaaaaaaagaaaacagatgaattattaggatcgatcaatgtatatatatgtacgtatatgaatttgtgatatttcatggagtacttaaatggctagaggttatcattgtgtttttaaatcagcctatatatatgatcagttcgggaagctaggcattataagtccctctcttctcaattgagttcattatcatatttttgcatccatcgatctactggtaattagttctcaacttttctctcattatttttttatttttaatttaattttttgaaaataaataaaaaagttgtaagtaacaatattaacttggagtcctcatttattcaccaatatagaaccatgcatggcatggccgcctcgtttatagtagctttacttacaaaatcagtgaaaaatgtaataaagtgatatgggtaaaccgattatcatggaattgtgagtgagacagtgactttacttaactcttacattctctgaccactcttaaatgcatttttttttttattttagttagaggttttcacctgaatttatatatatataatattttttatagtgtttcgctccagattcagattactaaggaaaaagatgtacagtaccaaacaaaatgatttgtgtaataattaggatgatgatatggtccggtgagagtgaaagttgaaaagaaagacaacaatatgtgaaaacgccaagaatgacactcaaaaccatgcatgcaattctatatttaaccaaacgcaagtgcccaaccattctagaatttttatgcaaatagaattcaattgggttcacattatgttgtcactcttacgggtgggtactggtagtggtcaaaaaagctagaagatagtctcaacatttcaacatttaataatctttttggtcaataaataatattaaatataaatatatatatatatatatatatatgagggcttttacctatatcatccttccatagaatatcgccccacactttcaatttaactccaaaccgtttcatgcattttggaaaaccttcaacagaagagggtttgagttgatcagatcatttctacctaccctacgtcacaccaaaaaatatttatatattggaatcaagattttgtgatttccatgttaaatcaatctaatttttataaattaactattttaatttatatttaaatatgctaactagttttgttgaccagcttaaagtgtaaaatttttaattattaaaaaattaattaacatgtcaaatttaaattagttcaacacagtatgaactttatttttaacgggagatctttaataattacttatattattaatctataaattaaatggagttttggtcgttccataaaaaagagaggaatcaagggattttatttttacttttgcaagaaccaaggtgttagctgcctagccttaatggacgaataaagtagaaagaatatgcagtacagaagagaaaagctctccaaagctctctaaagttcattctctctctctctctctcaccatgatagtcaagtcagtttttggtcatggaacgttggcagtgaaaacagttacattttcattcgaaaaatgtctaaatatgcctatggatgccaatttgaaaaaggttgatgcgttaaagaaaaagaacttacttgagtggttgctattatatataattactgagagaggtacgatcaagaagagaagagcaatcaaaggacggctcggaaatccatgatctgtgccctgtagccaggccaggccacatcttaatctgtatatgttcattatgctgacccacttatggataagcgtgaaatatataaaaattggctgggtcactatgcaatcttgcttggtaagaaagtcactgttttcagcattttgattttagagtatgtaagtttaggaagaaaaaaaaaagattttagagtatgtagaaatttataatttaatttgggattgaaaaaattacttaaattctattacacttattcacataatggattttttgattgtaaaactctccaaacattgtttctaataactatttatccattccgttcaaaaggctctattatgtgttacggtagacatatcaatgtgtacacgtgataaatttttagtgagagacatagacagcaaaaataccagaattatgatcagtgacatacttaactacataaatggattttttgataatttttgcggttaagtgtcactttgccaccaaaaacttaatttatgtggttaagtgttactaatcagatagagttcaagtagttttacgtcaatattttttactaaaaatttgacacgtgtaatagaagaatcaaaatctcccgttcaaaaattgtgtgtcatactgtattaaaccaatttatgtttgacacatcaattaatttttcatttattaaaaaattaaccatctatacaaaaaaaaaatttctttcaaaatgctcaaattaattgatgattcacacactacaaaaaatcttatttttagtcacaacaaaatttgtgactaaaagtgaaaatattgtgactaattataaatcatgattcttatattgtgactaaaa

SEQ ID NO: 89618 - DNA, 540 bp, Cannabis sativa
attttaggatttgttaataaataacaatgctctagctcccaattatactaattaaatacttttccatgttttttttttttttttacaaaattagaaacaaactccaaaactataatttatctcaaaaaaaaaactataattaatatattgaatttcattgatgccttagccttagcattcacatttggatcatataatcatttggtccaaaatatcattgacaactaaagcaaattaattaagaaagtttaatattttaatattagtaatgatgatcatgaattgggatatatgcctttgaaaagtaatggtagaatcatatttaggtataaatagtactaattacacaatttaacactatataattacactgagggattacatttttcaattctcataaaaattaagtgtaattattaaaaaaaatattaataattactaaaaaaaatattattttctcttgtaattattaactattttatcaaaaataatataataataaaaaataatgcattgaaaatttatatatgattagtacct

SEQ ID NO: 89619 - DNA, 518 bp, Cannabis sativa
tcttcgtcccacgtaatgacacttaagggtttagagtagacttcgtcttctcgattttaccctttttttttttttttcctgtgggaggccatagaaagacttattgagggtttaaggcttcgaatatattgactcattcaggaaaacaatatgttgttaatggcaataagaatcatttaatgacaaacgacatatcgtaagtttgtgttttcaagtaacactataagtatgtaccctcttcattggtttttttttttttttttcaattagcttgcataattcatcattttcctataggctatagttaaaaatcagtcaatagttagtgataaaccaatatgaattataatattctttaattagtattatgttattgttagattagttatactgtattttagaccttttagtcacatttggacacctgtctacttttaaggctatatatgagacattctttagttttctcattaaatactttatgtgaataatatattatttatgtgaattattcttat

SEQ ID NO: 89620 - DNA, 779 bp, Cannabis sativa
ttgaactcgagctgcctgaattctgggttttctagtttatttttttgtgttttagcaatatttagatgcctttcacgatatctagtgacattaatagcgtaggttgaagattagggatgactttctacgatacatagcaactaagtttacgacaatggccagtttatgttttctacctacaattttcgcgatgtctgtcgatattatttgcaaaatgtgttgaaagttttggaaatatatgttggtgaagtagagaaggacatttatcgacatgttgcgatttttggcgatgtagttgtcgatgtgatttacgacttgttgtgacatcacttgcgatatttctcgacatatttttccttaactaatttttttcttttttctttttttttttttgcagattcaactatatttgtggttgtactgtatgatgggatttgaacagttgaagatttcaactggatatttagtaacccaaaaaataagatgctaatgtttgaggttgacactactttacaaaagatgcatgaaattttgtatgaagagttagatatagagtctcttgtgtataaactgaaagtagaggtgtgttacatgtatataaaaggcaatatgatacctctggaggttttagtgaaagatagtcaagtaagattgttcttaagaatgaaggcaaaaatgaacttgctgccactatttgtgactaaggttaagaggcatgcgaatttggggcctaattcgccaactttccccccacaaagtgttgttgggagttttgtccc

SEQ ID NO: 89621 - DNA, 569 bp, Cannabis sativa
tccttaaggaattgaacggtccgagggttcccaagcccacggcaattccaactaagaacactcataattcgtggtgggcctggacaccagaacccaccagaagcccatttttcgggagagtcgcattattggaagaaataatcacctcagcctccataccatcatttggcccactatccattaagtccacatcattcggcccattatccacaaaatatatatcattcggccttctccttttgtggtccaaattctccccattgaccaataacaaattagtagtcttaggagcatttaaagtgttctgaccaatattctcaataaaagaattactattaaaagaatgagaaaatagtggggcttgattacctcccatgatattaggagaaaatggttgagattttgtatgaccgtgattccctccatcaactaaaacaggtaacttttctttgcctctgctagtcgtaccagtagctggcacaggatcttcatcggcgttgacagcagccgccgattctcttggcccaaaggtttgatcatccacatccgtaccagtccgaagatattga

SEQ ID NO: 89622 - DNA, 985 bp, Cannabis sativa
gctgcctatatattcaaggcatttcctctgtaaaatgtagttgattcataatgtaatactctccttttttaatacaaagcttctcttggtcattctctttggttatatatgttgttcttcgggcgatggaccgttcggggcgtgtcaagtgataccaaccgagtgcaacagcaatcgaaacaacaaagacagcagaaaaatatgatgaacagcaagaacaaaatgaagaacacttggttaagcaaagagactctctctgtatgaaaaatgggggcctttacaaatgaaatgcaactaaactttacaagattaatgccttgattaaataggcagccaacaaattaaagcataaagcataaagcaaaaccatgtgaatgggtttcctccaagtagctcagcccacttgggcgtatgggaagtgtcccatcaatttggggttgactctttgcccacttgtggtgacatcagcatgacaaaatggggcagtttgctaacatgcaccgaatccatgcaccatgcaccccgacacttcccgaacgcccatactcagcgtgctacaatcaggtgcatactcccgggaattattttccaagcagctcaagcaccttgccaccatctgcttgtcccgataaaatactcgggacgtagcaccttcccccactcaagcctgcgacgtccccgtcgcttcaccatccttaaaccgaaggatgtgatccttgaattgccataattgggactcaggttcccaacttgcctcggcatcaggcaaattcttccatttcaccaagtactcagtataccgagggattctcttctttctgaattcccgcgaagacagtatgcaatcaacttctttatcataaaaagttactacagcagttggggcgcgcttcgacattcccctggaagggtctttctcatcaccatggtatggcttcagcatacttacatgaaatactgggtgaatcttcaactgttgtggcag

SEQ ID NO: 89623 - DNA, 612 bp, Cannabis sativa
  modified_base (551)..(557): a, c, t, g, unknown or other
ttgttagagtctctattttgtaccttgatcatactttcagtatggagtttgttcctactaatttattaccttgtttaatgattgagtttgttggttaatgaaatttacatttttcattgaaaaaaacatttaatatatgacaattgacaactacaacagcaacaacatcgtatatcaataactgtttgaaatgcgtagttaaatataataaatgcagtggaagaaacttgtttttgattttcaaatgaaaaaaatatgtctaatcaatacataaacaaccattaaaagagatttttttttatctattttttttaagaaagaatcaaaatttactgtctaaaaatgtgtggaagttatttgaaatctaaaaatgtggtttgattggtgtttaatcagattttgacaataattaaactataattaattacaattaataatttattataaaagtcaattagcttaataaatatattaaacatcattgaaaaattgaaaatcactcaaatttttctaaaactccaacacaacacatataaataagggtaaatacnnnnnnngaccctctgttttacaaaagttatcaattagaccctgtgttttgttaaatgacaa

SEQ ID NO: 89624 - DNA, 946 bp, Cannabis sativa
gcgggcgtcaatcaggtcgacttggccgagtgccgtcgccgaggggtttcggtggccaatgttgggaacgcttactcggaagatgtggctgatatggccgtgggtttattgattgatgtgcttaggaaagtttcggcctccgatcgctacatcagacatgggttctggaaagtcaaaggggattttcctcttgctcacaaggtaagcactactactttatttttagggaaaaatacaatagttaagaatatcccatatattttatagctgtaatttaacaaaaactaaggatttgtcaaactgaattttgctaactccacattgtcaattcaatttaccatttacaattgcttagctaagaataacatagacaacttgtttagttagataaaatcccactttttcttttaggcatatttagattttgtaggttgtgccacattatgatttttgtcattgcaaaataataatgataataataataataataataagaatcagggttattaattttcagttgggaggaaagcgtgttggaattgttggattggggagcataggctgtgaagttgggaaaaggcttgaggcatttggttgcacaatctcttacaactcaaggagcaaaaagccttccattacataccctttttattctaatgttaaagaacttgctgaaaataacgatgttatcatcttgtgctgtagtttaacagatgaaacacatcatatggttaacaaggaagttctttctgctttgggaaaggacggtgtgattgttaacgttgggcgtggtgctcttattgatgagaaggaattggtgaggtgtttggtaggagaagatatcagaggagctggtttggatgtgtttgaaaatgatattgcctcaaatgttcctgaagagctcttccaattggataatgttgttctttctccacatgctgctgta

SEQ ID NO: 89625 - DNA, 977 bp, Cannabis sativa
acctcaaattttaaccccacgagatgaccatcggactccatcggacgacatcaagccaataggaggcccgatgccttcaacctcaaattttaaccccacgagacgaccatcaaaccttaccccatgtaacccatcggaccatcggaccaataggaggtccgatgtcttcaacctcagatctaaaaaaacctaaaaccgaccgatcccatcctaaatctaagaaaaactcacaaatcacagaggtttaactcaaatctaaacaaacctatcaataatctcttacaatttagccctaaatcatgcaaaaattaaataaatacataaaagtgaggaaaaactaaccttcgacatattcgcgactgcgggtggtggtcgtgcgtggtcggacggtggtcgtgcgtggtcgggcgctgctgtcggtggtggtgggtggtcgtcggtggttgggcatggttgggcgctgaagccgctggtgtttgatggggttgggtccaattagagccctaggtttcagcgagagggacagagagaagttttgatttttgtttttcaaatgggaggggtattatggggaaaaatcaaatgtagtcatatatgggcaatcttaatagatatagatttagggaaataattttagagtgttttatggatagttttacaaatttcccttctacgaaggagtttgtattccttcgactacatgttagacaaccagcaaaaaagactatatagatacagtagatctttttttatttcattatcaagaaattttatttatcctaaagaaagtcaaaggtttcaaaacattacaatattagtaaagaaaactaacaacaatgggaaaccagcatgtgagctgcaattacatttgaaattattatgagcagagaataaatgatctattgtaacattaattacaacaaatcttgtaaaaaagaaaaattcttttacaatgtccaaacacaaaaaaattaaaa

SEQ ID NO: 89626 - DNA, 790 bp, Cannabis sativa
aaattgtcacatattttcaattttcatatgtattcaattagggaaaaaattatccaattaatgcatagatattcaaattcccctatccttattatttgacatataaggtgttttaatcttgaataattgtctacattgcaatatttaaaatattctcaaaagttttaagaaatttgaaataatttataataactatgtataaaattattgtgaatttcatttatgatgttaagatttctctcttggggagagttgtccagtgttggatttttttcgtttcctttgttgtcgattatgtctatttttttttctgagggtgtctgtgattagggttttcatcctaaaaacctttatccgacaagaaaaccaacaaggacttgatttgtttatgcataaaaggctagaacttgaacataaagtcaaaattacacaaggaggccactcgaatatgcttggccggccaatgccacttttaggcataaaaagatggtagtactatctactctcaaaccaccaaaggacacttatctaattaatgtggtcccccaacgccaaggtgaacaacacaattgaatggaactatttttcactcaataacaaagctacccgacttctgccatcttttgcacaaaaaagtgacataggtcggccacaccaaatgggaaggagattctttgccaaaattacattttcatcatcaagacatcaaaacaaagtgaggaaggccaccaagtggtatagaaaccacttgatcgaccactgccatctttgtggtccaaagagtggcagt

SEQ ID NO: 89627 - DNA, 889 bp, Cannabis sativa
taatatacaaaataagatattggccttatcagacgggtaatagccattgagttgataactactcctcttcccaacctaaaatcatccttggtcaccgatatgatgacccgatatgaccatccaagcaaaactagcaaatatttatgtatatttttcaaacaaaataaataataagcaaaaaattaataacaaatatagtgggattggctcctaactttctcagtaaccaaacacagtctgaagattgagttattcaaataacccaaaacccacataagcacatgattagttataaactttttttaaaacggtaaccaacataaacagctgctccttcagataaatttctaggagcagaaaccaagcatacaagaaatttctgcattgtttatgtttctcaacaaccaagaaattacaattcaaacaaaacaaaaaaaaaatgatgaagagaaactacttgcgtcacctcaaaacacataagtagacaaaagaaaaatccaattttgaaaacaacccaagtagctcgaacagtctaagatttcaaaacaaccatcttaaaagtacaggcatgtacacacctaaacatatatacagaaaacaaaaagagtacatagggagaggaaacatacagagacaccaactggaggcttcattattctcttcttaaaataaataaataaataaataagcatgcggtggtgattccaatgataaacaaaagcttcaaaagaaagagcttttctttttctctttatttttgacagcaaaagccaaaagtctgaatgttaaagcaaagaatgaaacacagtgagggagaagagaacgacacaaggggcaggggaaaaaagaagaacatgtaatagttttctcatgttttaatttcatatat

SEQ ID NO: 89628 - DNA, 642 bp, Cannabis sativa
ccttgtcatataatcctagcttcgtttctggatgggggcataaatggagaaggagaatgagagtgcatttcttgcttattacccactaaatatttttatccctaagtgcagtgtagtgaaaaggagtatagatagaaaatggaattattgagaggaaggttcttactcccacgctcgtgaaatcgtgaggtaatatattgcagagccgtacatatcatatccatgtggctagctgcatacaacacaatacaaacaaaaaaaagaaagaaagaaagttggtttgtatatccctacggctacattttcattattatttcctcaacacgcatccaatattccctcttcacttttcccactactacaaatcatcatcatcatacatatcacatatcacatgagtattgagtttatttggtaatatttttttcattaattttttattttttaattacaaaagtaaaaatatttttcaaaaacatatattttattgagaatcattaaaattttgaaaaaaaattactttcaaattcttttgaatcagttttttttcttaataaatattttggatttcgaccccaacctagactttaggatccagactccaacctcagtccccagatcccgaacacggaccacgactct

SEQ ID NO: 89629 - DNA, 976 bp, Cannabis sativa
acatccttattactcgcataagaacgtagtaaagtagtctgcaccatagtattcgaaatagtaccgcatttcattatccacgagtgtatttgtctccctgtccataatgtaggcactaaaggtgatcgagcacaagcaccaagaacaaaaatgtaggtgaaatcatcgaacactaagtctcaccttgatgcccatctggagaaaacaagaatggactcttttggtggagaacatcgtatcaaagtgttaaaaagaaacagattaggcttgtcaaagtgctcgaatactaaacgggcattacagtagttcttctgttgagctaataaggtgcagtattgcttgataagtttggctgcaaaggagggtgagttgagaccattgacaatcaattgggcatgtgtttgtttaagttggtaatggataataatttgaggtgtagaaagccagtagttgcaactttagggagagaaagcatatggagtggactcaaatacagagctcattctttaaagaccacatttcctctgctttctcaggctacgaaatttgctaaaccatcaaatgaccaaagaagctagtataaaacatcaaaataagatgcgtgagctatggtagttgcaagtgcaaatatttatgatagaatgaatattacttgaagcaaaagaattattttgaatacaaccttacaatctatttttactataaattttccatatttccctttcaactcttctttttaattattattactgttattccaattggaaatttttagtattaatgttgtagtatttaaggctgactttgaaaggtatatataaatgcagaggttaatactttcttgctttttaaataaagatgcataatctcattgagaatataatatacctaaattctgaaagaaatagatatgcaataactatataaaatcagtacttgaacacaatgagtatgtgatatatatatactagtatat

SEQ ID NO: 89630 - DNA, 593 bp, Cannabis sativa
tgatttgaggttctgtagtgtgcaactagtttgggtttgaattctggggttaagataggtttgttttagttgattttgtgctgagatagctagttgtgcaacggattgctcaaacttgaagttagagagcttaagttggctctctaatggtgtttttaatttctgagctatttgatgtgtgttgttgcttgaaatggatttcgtatagtatgtgcaagtgttctagagagtatgcatggtagagtttgggctcgatttgagttgtgaaagacatttttggggttccctgcactgaaccctgtaacaaccggtcgaccggttgatccctaggaaccgatctttcggttaggaaccagtctgctggttgggcttttttcagaaccctaccttagactaagttgaagaataagcataatatgaatgtatattatttactagttcatgcatgattttataattaatgtaattgatgtaagttattgaacattataatcttgaaaaataaaattaattaatataatataatagaattttaaaactattaaattaattgaaatcttaaattaaatataagcaaagaaaagaaaagaaaa

SEQ ID NO: 89631 - DNA, 614 bp, Cannabis sativa
  modified_base (178)..(191): a, c, t, g, unknown or other
ggttattatatttaattaatgataaattttatctattttatttcttgtatgattattaaataaggaaattaatatctaaaataataattataaatagataattaacttaaaatatttacaataataaacgaattatattaaggtaaatttttattataatataaaatatatatatatnnnnnnnnnnnnnnagagagagagagagagagggacaatctgatgcaattgagagcctcacgaaattgtgcctttttttttaatgatcttaataaacggttctgtattttcctttaatgaataaaagcttttggtttgggtcaaataattacaaaatgggtagctacattataaacatatggtgagtaagctttcaattattcctatcccaaagtagtgtctttgattctaaattgggagtgtacgcgtctatgtgagtgagtatatgtatattaaatatccatgtgttgtgttgtgtgattctaattttatgggccattatgatcgatccaagtcatgatcactattcactattaacactactaaccggccggcgccttttgcctaacgcgcctacctacctaggcctaggcataaaattccatttggagcatatg

SEQ ID NO: 89632 - DNA, 924 bp, Cannabis sativa
aaaataatttccaacagtgacatgtgtcaatctcgtggaatatgaaccaactgaaatattaataattatatcattaaatgcaagatggaataactcattaaatgtagaattaatagagtatattcataactcgctaactgtataattttaggcaagacaaggatacacaaactatcaattcctatattgacgagaaactatcttacctcagagggcacaatcccgaggaaactacaggtaatgtatagcgagacatccatctcactctataaaaggaattattgacgagacaaattagttagtgaaacacttagcgtatattccatattataataactaagtgtagcaacttggaaacatgcaggacatgattgtccagtctgcgaggtcttatggtcaaagagcagttcttaagtttgctcagtacactggagctcatgccattgctggaaggcataaaattagactaagttattatttggtggtcatctatatgcaaagcgagatggctctatccacgttagtgttaaccgccttgaagataggaatgataagcggtagtgcagttatcaattattatctacacgtgtttaaataaaatgtgatcaaagcctacattttatgataaacgattatataattcaaatttaaatgtaaataactgccaacctatattcctataaatagcgcagattctacaaaaaaagggacgaaaaaaaactaggagagaaattgtaatattgtatccaatatccagaaatatcttgaataagatagactgatggagtatgcagatttaactaaaaaaccacgtaaaatacctggtgtcattattattattatacttatcaattttttttaatatacatatgtgttaaatttattacgaaaaggctcaatattggttaacgaaaatctacgtta

SEQ ID NO: 89633 - DNA, 960 bp, Cannabis sativa
agttagctcgttctacggttcagtaagctttttgtaacaccccttttttggtttttctttggcttactaataacaacagtattctagactatcgcaatttgaagtattatttgattagtttattgattaactacttatgaaattattgctaatttaaactttttaatttaaagtaataaaatacctttagatagagttcctactattggttacatcgaagcatatacaaacaagtgtctactattacacttaactactaagagcacatagacgaatcaaaagtatagggttagaccctcccacgcggtcaaaatatccatatgtacaccaccagggttaggactgtgctccaactcacccagccatctacttatttatagctttacctgcaacacaagacaagttgtgagctacagctcagtaagtaaagttctgcatgtatgtgacattatgaaaatacgattcagagtatgatcgtgaatttagaacatttattttcttttatctctttgacctctaaactggtacacactgttcggttaagcctgagcctgcagggcttgctgagctataaaatcccatgggctctcctctggctagctatctctcgtcacagcagggcacatactaaccttgttccttcattgccccgtcgagctcaagaattaaggttgcccctaactgtaacgctataatactcatataaatggaggagagaaagacgggaacatggcatgttatctcatggacaacactgacatggcccactctattgggctgccactatgagccataaagacctccgtctgaaactacaacttttctctattgcttcccgaaacagtggcacttcaacccttctttgatttcttatatcttatctttcacctatggtgcttagaataaaatcttatcaagcaattcataagactgtgagcttttctcaaaaatcatgcatgg

SEQ ID NO: 89634 - DNA, 731 bp, Cannabis sativa
gggattttcagaatccttatctttctacaatatgggctctttaagaaaaagtcagaaattaaacctcttaacattcatgtcaagctatgttaagaccttgtaccctgttatattagcatcagtgctttttggctttaagaatgtgcaacattaggagcctatttttgtgaccaattaggttcattaacattggtcattcctatctaaacagattgttaaagctagaaggacaattataagcacaattaactttcactaatcgtaacaactaccaagagttacaactctcattatctcagcaagatgttagaataatctttgaacaactcaatgattcaagatcttggaataatttgggcaataacaaaactaattatatcagatgaaggataaatatttttagtaagaacttctaagatcaccaactagaatcatcatagcatgtctctggctactagccaatttttcctacttgcttatctttgttttcaccattcattatatggaaagagaatgataagtttcatcctagttgataactatcaattataaagaaaaaaattaacaaaagggatcagaaaaatgcaggggagttattactactattcataaaaaaataactgtgtactaaatcttttgagaatagggagataaattggaaacaagtacactcaaacacacaaaaaaaaggatagaaaaagagtgagagatttacttaccaggggaaatag

SEQ ID NO: 89635 - DNA, 532 bp, Cannabis sativa
agttcttaagattgttctggatgacgccagtttacacactcctaggaataaaagatttttgtttgagaacttctggctcactgagccttctttttttgatacggtcaaggatagttggagcaaagttccctctcattcggctaccacacctcttggatctttcctctctaaacagcaatcttgtattgctgccatcaaagactggaacggttcttttaaaagtttatcatctcgcattcatacccttgaaaattctcttaatactcttcattccaatttgcctcttaatagggaggacattaagcgggcctccacgcttcaatccactcttgatttccttctctataagcatgaggttttttggaaacaacgatctaaaatccattggcttaatgcgggtgataagaataccaaatacttccacaataaagccactgctaggaaaaagactaataatattcgaaaactcaagtgtgaggatgggaggcaggttacttccttttcggacatttgtcatgaggtttgtgcctat

SEQ ID NO: 89636 - DNA, 2267 bp, Cannabis sativa
  modified_base (2230)..(2230): a, c, t, g, unknown or other
ttcaggcggtgatgttggtttgggtaatttggttcgcacgaaatcaactcttatggaagggtaagaaaagtcaggtggagtttgttgtcaatttggctcgtatcattcttgattagtggagaaaagctcaagaaagaagtttgtttcctacgtttgatacttggtatctttcgaatgaggctgagttatggtctaaaccaggttatgaaaaattcaatgtgaatattgatgctgcattgtttgacgaggaggaaatgcatggttttggtggagttgtttgggatcacaagggttgggtcgtggttgggattacaggactgtggattagacaagttcttccagagattgctgaatccatggctcttaaggaagtgttatcatggttgaaacacgatttccaggtgttagtattattgaatctgattgtttggtattggtacaagctgttagaaatttgaatattttgtcatccacttttggtggtgtcgttgaggattgtaaacaatttttatcttcttttagggatgtttcttttacgttttgtcaaatagtcttctaatcaggttgctcatcttatgactagagcatcttgtttatatgctgattatatttttttggagtttaatctcccttttgatgttgctaatattgttaaggctgagttggtctagttgaatgaaatttacagttaaaaaaaaattaataaaaaaactttgcttagtagctaattacaaaaacaaattattgacctcacttttagccaacgacaacgagtcttaattaaaacaattagaataatcaaataaaagaaagcaaagagcataaagtaaagaaaacaccagatttatagaggttcgaccccttatagctagtaatagcctactttcctttttgtagtattgacttgtcagaagagtaagtaagaatactctgatctctctcgaaagaaattactatgatcttattttagatcgaggtttcactcttgagtgttttctctctgaattaatttgtgcccctaaatagtgaaattaaactactatttatagggactaattacacgaagaatggtttcccttaatctataacaaataaaataggaaattagcatatttccataattacaatgaagagattgagaaatctaaattaatagcatttattctctgaagatacgaattaattctacaaatgtagggattgtctttgtgacatgtaagcttggaaataacaacgtccatctttgaaattgccaactcacatctcctagtcgctacatgcaaattacttacgtgattaggttggtcggatgtcgtgagcttgttcgggcatcctgctatgtatgtgtgaccttgagtactatatcaatctgcatagcttgctaggagtataatcatctgcccaggatatagaatgtgagacatgtgtcacttatttagatgccacattatagtgcaaaaattaagataacacaaattagtagttttaattaaattttattttaaaataaaattaatcttaaataatattttataaggaaataaaaaatattaataaataaagtaatataaagttaattttaaattaaaaataatttattgattatttttaaattaatcacaattgtagaataataattttagggctaaaattaatataatcatcgtaattacatatttaatttattttaatgtggatgatatatatagatatttcttgaagagattaaatatatttttttagaataatttcttattaattaataaataaattgaggatggttcctcgcggatgatgatagagaaagagatacaatagttgttagatgagagagaagagaaggaggcggctgcttataatgctacagtgaagaaaatgaagaaaaagaaacaaactgattttgggtcatctcgatgggagagttggtcatctactgctctccctcctattatttttcttcttgcttaatgttgtctttcttcttattttagcttgtgttttctcttgtttggttttagattcagtttgccctgggtgtttttgtctttgtttttttttttttgttcttgattttcctaatctttttcctttcttgtctttagctttcctcttgctttttgcggatttgtgattgttctttggcttctgctgtttagtgttgtgtgttttgtctcttcgtgtatcctgtatgggtgtggtaggtggtctttgttggatattattttaccangatctatttactatcatgtatgttggattaacaacct

SEQ ID NO: 89637 - DNA, 644 bp, Cannabis sativa
tgtcttcacaagtaagtttttattgtttttaaaaagaattttcattttttataattaaattttttgggaaaattttatgaaaatatgttttttttaataaattattttgaatatatataaatacttcaaggtaattactaattagggtaactaattatcttattaggtaaccaattactttattgtttttttatacctgttttttttttttaaaaaaaaaatttggccataaaataattttcttttttaagaagttatatttttataaaacccaaaaatatatataatttattaattttcattattttaatattttattttataatttaattaattgatttatttaataaagacgatgtaggtgccataatgcactaaggttttgcaccgacgaatgtggttgcaaccgccaagacccggtgaacggctgcctaaatcgacccgatctcgccgtcaattatatgcttgaggtataatatttaattacacatttattttaatttgatatgttttttttatatatatatttttaatgaattaagtaattttttcagcaaattcttcaaagtcccaaattttgcttctgcaattgtgatgatgccctaaactgtactggagaaaattgtgcttgtaataaggtatat

SEQ ID NO: 89638 - DNA, 559 bp, Cannabis sativa
atttgatgcaactctaaatcaaagtgcgcaactaaaatcataataattttgaatgaatttttagtagaaacaggcgagaaagttttaatgcaatcaaaaccttctctttaagtaaaatcttttgtcactaaacgtgctttatacctttcaatctgttccttattatcttttttagttttaaaaatccacttacaccctattagtttaaactatcaggtaatagaatcagctcttatacattatttttctttatggacccaatctcatcatccttagcttctatctattttgaagattgtggattattaagtgcttcactataagtgagaggatccacaaaatgatcaatatcacatcctccttctctaaggtaaacaaattatcatcacaccttgttgactttttttgtctctgggatctccttagaggaggtacttcaggaataacatttatttattaatcatcattttgaatgacatcttccacaactgaaattttttcgataacaagaccctcatcaacaacaggacatttttcaataataggcccttaggactct

SEQ ID NO: 89639 - DNA, 858 bp, Cannabis sativa
atgtgcctttttaatcttttttcatgttcccatacttgcggttatgccaacgttgtaatgaacttgaacatgcttcaatatttttgcagaaattgtctatagaagaaccagcctgattttttttccattcatgttggattatttctgcagcagcaggatcagataaccatagcttttcaaacctaaaccttgagtgtcttgtagtggtatgatgctggccagccaagggaacaaccgtgacagaaatagctctatggtcagacttgaaatagtcaaggtgatgcgttgtgataggttcaaaattacaattccattgatcattgacaaagcaccaatcaagtctttccttagtagcattaacattatgacgtcccttgatccaagtgaatggatctccttcaaatggctgctcataaaggtaacaaagatccaagacatttcggaatttatccatttgcgattcactccgtaaggcaccaccaagcttgttctggtttgatagaatttcgttaaagtcaccgatcactagccaaggcattaaaggagcaacatctttacatctttcaagcaatttccaagtgtggattctattttgaatttcaggagcaccatagaatgcagagaagtgccaagaaagcccattatcacacttcatgtaacaatcaaagagatttgcattaaaattaagaagtgttacatcaacattgtctttctacaataagagtagacccccacttaaacctacccttgggacttcaagtccattattgaaatttaaagattgacgaaaacgaactactgcattacaagctaatttagtttccataataaataaaacatgaggagtttgctctttga

SEQ ID NO: 89640 - DNA, 617 bp, Cannabis sativa
taatatttatttaattacccaaactttattatagtaatgatttagataaaatttaaaatgtataaaaaattgatataaagattattaaattttttatcatcatgcactaaaacgatgtttatcattctactaaaattgtagaaaaatcttttattgaaatgatatttcaataaccaacaaatgaatgaaatgaaaattattttcttttcattttactattaaattttgaaaagtgtaattgaaaatttagattacctttacttttaattagacacactgtaattacatatttgctaaaataaatttcttttagttacgctactacaatgttggcttttagaagctgttttttcacccccatttataaaaagagaagctaaagggtgtgaaaatacccgctttgttcgaaattgacatttaaaggcgaatttttgataaagatcgtaggtataaaattgcattataccatttagaggcggttggaaagtaatttattattttttttatgctaagccctatggcgtcggttcctttataggaactgacaacatagagtacacgtgtcagcaaaccgtgtaccctatgccgtcggttcctataaaggaaccgacgccata

SEQ ID NO: 89641 - DNA, 758 bp, Cannabis sativa
aagcctcctgatacgaaatgattccctcattttccctctcattttcgttttctcttttcatccgaaactttcaaagacaaaatcctctcagattgatttttgttttctcttcttgaatttcaaagctttccgaaacaatcagagctaatcacagggggaattgtcaaatctcaaggttagcttttgaaacttctttcgaattttgtttttgattttgagaaacactctgcattttgaattttttgaggaataggaaatgcatgttgttcatagggaatgcacatagagctgggtaattctcagaaaaagtagacctgaaatttgtataatcgtgaattctagggagaacaccttgaatattcgcatctttttcctcgctaaccatactattccattgcccttattgtataacttatcacacatttagttcacatcttctaactatttaaaaataagacaaatatcaatatcaatatgcatataccatacacatattcttatcacaatcatcactatgctacttttccagcatactttataataggctaggcaggtaatctaatagcaaataatataaatacttactatataccatgagtcgacctgtcctcgcagcaaatcttaaagtttcatatggatggatcagccaccgaccagtttttcaaagctgggattactctcatcacacctgggggaaaccctttcacagaacaatcaagtttggattctaagcatccaacaatgaggtagaatatgaa

SEQ ID NO: 89642 - DNA, 582 bp, Cannabis sativa
cactaacaagccatcacgcgacactattatctaaaaaagatgaacaagtaaaagaaaaaaaaattaaattataagtagtgataagcgtggtgtggattaggtggtgaattgatgaaaacttaatcaatccaacgtgcctttaagtgacaatcttaaccgcatggttaatttcatatttcttaactgtaaattgcatcatacctatgtgcggtgcaaaataatacggttaactataattaaattattacatttatatattaaagaaaaatgtaaaaagaaaaaaaaagtcaatcaacatactcactaaaacttttgcctcactgcaaataatatatatacaaatttaatatcaaaaaacatgaaacatatatttatttgaaatgaaacaagtttagctaattatggtaaggttaatcagaatttttgttcctgaattttgacatgtactaaattatgctctttgaacttttgagaccgttaacaattctccctaaactattaagattattggatttaaagatttttatctaattttagtaagaaaagtctaacatagataaaaatttagagagcatgatttaa

SEQ ID NO: 89643 - DNA, 1282 bp, Cannabis sativa
accgtgatctgactgaaccactacgttccctcgtgttctttgtatttctagtttttgtttagtatctgtgttcctagttcgagtactcgccattctaggttgaatagtcgcacttattaatcatattattattatcattattattattattatttgttttggtgttgtaaaattctttcaacaacaataggcaactttcccttttatttttgtttttttattttgtctttgttttaatttaaaaaaattctttattttagtttcccttttatttggttgtaagttggctatatcaagtcttgtaaacactttggaaattagattattttaaataaaattttgagaggttttcttcttgagctcttgaaagaactatctgaacttatcaaggagtattccttgtggcattcaactaacttatcaaatagatttccaccatcgtttgtggcatcttccttcgtacgaaggttcatgcttaactaatcattgagtcgtagttccacatcccaaattcgtgagttcttggaggctgccatatttggtatcgggtttcatcacaattgttggtgttattcatatcatttggtatcagagcataagatcatcgtgtttggcctatctttcttttgtgtttttctattcaattcatgctctataatcttgtttaacttgtgatctatatttctgtcaattcgtgtttcatatcctctattttttcttagtgaaatccaaaattgttaaaaccatattgtgataattttcttgtgtcaaaatcgtgtctttgttgtcatcaatttctttttttttttcttttttttcttaaaaaaattaaaaatcaaagcctagagccataattagaaattcattagtttcccttatttttctagaaattcaaaaattcattgtctagagcccaatttgatattgctgaattatttgtttccttatttaactagtttccctatttgtgtcactaatctctttccttatttttgtttctcattgatttccaaaaattgtttcataaagcatgtctacttcgtttcctttttttctttgtgtcattagcaagttagaaaattcgaaaaaaaatttcaaaaaaaaagaaagaaaaggaaactgagcaaaaaaaaaaaagtgtctggaaacctctcttcaatttttttttgtattttcttaatctctatagtctagagacttgttttccaaaaatcatcaatttttttcgttttcatcggtattcttttggtttgtttggtttgaattgctgcttgaattctct

SEQ ID NO: 89644 - DNA, 658 bp, Cannabis sativa
  modified_base (308)..(311): a, c, t, g, unknown or other
agccaactgtctaattaattattgtttcataattgtgtctttaattttgtcaacaatgtgcatataaacatgaattgtatacaaatattacatcatattgcttaaagtaataaattaaagctacattattattatacttcattaattccttttataaatttttctaaactaataacataaatatgacttttagttacaacaataagttatttatgactaaaatatcgtatttatatacaagttatcactaatttaatttttatcacaataagtatattgcgactaataaaaacacatttagtcacaannnnttgtaatttttgtgactaatatatttatctgcggactttttagtcacaacatagaaatgatttataattagacttcttaattataacttgcatgtgttcttacttgtaaccaatgttttaaaattaattattgtttcatataaaattaataaataaagttagaacatgataacttccatgtattgtgtgctgcatgctttaattaattgattgtttgacaaaagaaatttgaaagtcatcctcttaatatatgacatagaaaaagaccattataagaagacttctaaagttagaatatgctaatttccatttttatgcgtaagtagtttaattaaacattaaaataa

SEQ ID NO: 89645 - DNA, 933 bp, Cannabis sativa
tcttactttgctttaaagctttcaataactaataaatattaataatttttatatgtggtaattaattaatatgggcatgcatggttgacttgagtctacttgggacttttaatttcagcctcttatattaccaaacgcctacttattgggatctcttctatatatatgtaatgctagctagaattaaaagaatataatatattattacaataatgattattttaaaataatatatatataaacccactaagaacgtgtagttataaatatgaaatcaataatgcatgtcatttaataaaaccactatatattatatatatgatctttctaggcttatagatatagtagagtacacgtgtgaattatcaacaacaaaaaaaaaaaaaatcaattgaaagttacaagagtagtaaaatgataaatataactaaatttgcatggtcattctcacattttaaaatttcaatatcatcatattcacatatgaaattggtggtttataataggtcacgtatctatatatatatatatacatattgattattacacgacatgcattgtgtgtacttgtaaatattaattctctatgtgtggatatgaggtaattggttgtgttgtgcctttgtttattttatataactttcaagaaagggcatacacaaagtggcttgtgtaaaaaaaatactacacattggtgtttatagcactcttcgttatcaaattttatataatttaatttaataattattaattataaaatatcagtaactatttacaaagtgctactttatcatgatgttagacaccattagtatctaatactttaaaaaaatatagtacttaagcatatttgctccttcattaggttttattggaaaactccatcaaatatatccccatacacttaagctaatatgataagggaaactaaca

SEQ ID NO: 89646 - DNA, 626 bp, Cannabis sativa
tcgaaatgctggacctagatctggaacgagatcctgacccagacccaaacttggacctacaattgggacccgaacctgtaccagaacctagactcagattgaggtcaagacctagacacaaacccgcacctggaatcagatccaaagctagacccagagttggcccaaaactcgaacccagaccaggatcagaacaaaggacttagacccagaactggattaagactcagatcgggattggaacttgggactcgaacccaacctagaccaaaacccaggacacgaacccacacccagagcctgattcggatctagactgaaatccggaccagaacccaaactcagaccacgactcgaactccgacccgaactcaaacccaaactcaaactgagaatcgcaaatggaactagaaccgaactaggaataggaccagggccaggatctaaacttaaacccgaacccagatcaaaaccaagacaaagacgtaaacaaaaacaaggactaggactcgaagcctaacctagaccgggaccgaaacccacacgataactgggacctggacccagaattaggttagtgtccttagaaacagaactaggatcgggacctagtacccgacccagac

SEQ ID NO: 89647 - DNA, 830 bp, Cannabis sativa
ataattctaacatagggctggagctggggctggggctgggtgggttcaaagacggagtcccaaattgggtcttggaacggggtctagggttggcgtttggggccagggctagagtctgagaccgaggcgacattcgggtctggggtcgcgactggatccagggcttaagtcggggtcgaggctggggtccagataagggtctgggtctgggtcccaagatcgagattggggttggagtttaaaatgttgattaaacaattatttaaacaaattttgaaagtgactttttttttattttcaaaattttaattctcaattaaaaaattgaaaaatgaaaaaagttttataaaatatgtttttgaaaaatattttcatttttctaattaaagaaaaaatgaataagtaagtgttacacacactttatatatctatatatcttatatttgtatattttcaaaaaaaaaaattagtaaaacaacaatgtttgataactatattaggaaggttattagtagaaaagggagaagtttcttaaattcttggccatagtctcaactgtattaaaatattttcttacaactttttaagtttggtgctttgcgaatgatttttctgaatggttatggatattcattttatagtatattcgaaaaaacattttagcacaccttaaagaaaacttgtagtctatttttttcttcatgacggtgtgttatagttattatttataactatctatttacattttcaaaataacctgaatatagtgtagaaaataaaattcaaacatattgttgcacatattattttttttttaaacgagtggtaaa

SEQ ID NO: 89648 - DNA, 530 bp, Cannabis sativa
aagatgaagctactttcctatgtcgggagattaactctaatcaagacactcgcctcgtccatgccagtctatgcaatgtccacaaccaagattcctatttctagttgtcgtgagttagattccttgatgaggaagtattgggggatgggaaatgcagagaaggaaggattcttagcattgaaggcttaggaccagatttgtcaatcgaagtcttcagggggcttgggtctaagaagatgcgaagatatgaataaagctctgttagccaagttggcttggaggcttgcaatgaatgaggatagaccttgggtctcttgcctatagaagaaatattgtaagtattagaattttcggtgtgtaaaccaaaagagtaatgattcgtatcagtggaaatgtattttggagtcgagaaaaattctactcaaaggatcgattttagtggctgtctcggagaatccatcaatttcttgaggcagccttagatcctttggatggagtaccaggagtttttggagctaatgaataacatt

SEQ ID NO: 89649 - DNA, 587 bp, Cannabis sativa
tctaacaaccttcgaatatggaatatcaatccatcttccccatggcaagcttcctccgtttgctttataagattaatggcttgttggcaatctgattccacagttaacttcagaagccctctctgaatcccaatctctaatccatataattcagctgtaagtggtcgcaactctggctgttcgactgttgccgcagcattctataaatattcatgtgcaaccatcacagcaaccccaataccaaatcgtcccttgcctttaacaatcccagcgtctacatcgattttacattcattcatgttgtctcggcggctgccattgtgctgcatggctcattagattgttttcttcttccattctccctttgaaagttgaccgaaaatttctcacaccaatcaagaagattctcaatccgtggcctttttcctctatactttgtgtaatttctaatcgactataaatgtcatgtaatgattagaaaacgttaataaaataaaataataaataattaaaacctctgtaaaagaaaaaatgtgatgttgtgttgttggtccaatgggatgtgtgttagataaattaacaattaa

SEQ ID NO: 89650 - DNA, 1091 bp, Cannabis sativa
gtacagggtgccttaaatttggcacaaaatggggtatttaggacaaaagctctattatctaaatttagtggcaaaacactcttctgttactcccttgaatttggcacaaaatttgtactattaattggaagtggtctaaaaggggattttaggacaaaagctctcttatctgaagttagtgacacatatgcccctataaagatagtactgataaaattgaataaagcaaaattttcttaacatttataattgttacacataagactttaattaaaaaaaatagcggcaaaagtaattttacgattttgttgcagtcgtaatcttctttggttgttaagtgctaattaagttcgttaagtgttaacttaaaaatacgtggcgatatatttctttagtttatttaatatatcgtctaataatatattgttatgtgtttttaaattgacatttactggtcaaaaaagagtacaattgtaataaaattataatataagatactcttgccgctattttttttttaattagaattatatatgtaataattataaatattaaaagagtttcgctataaatatttcaaaaaaaaataaaaataaagaaatagaagtggcaaaacactcctgttactcccttaaacttggcacaaaatttgtactattaattggaaatgatgtaaaagggatttatgacaaaagctctattttctaaggtaatttttttgcaaaactattttctaaggttagtgacacctatgccccaattaaagataagttttggatgttacacctatggaaaacttctgttacttttttacatactaggttttgctctgttgcagttattagcggttatcttcctggtttttctgggttcttgtcttcgacctcctcccctgttctccacttcttccatgactatggttaactacccactattccatctctttccgtcccagtgccccatctccagtcgatccactttctccatgttgtggcctgaattacgatataaatatcacaatagtctgtatgatttgtatcttcattttctattctctttctccttctctgatatttgtatggaatccatct

SEQ ID NO: 89651 - DNA, 651 bp, Cannabis sativa
aaaaaatatatattttttaataatttttaataatatcatttataatctttatagtaagggcccaatttttttttcctatgacctattttaactcaggaccgaccttagatgctaggcatcttagcattgctattaggtgccagtggtgtccagcaccttttataggcagcgctgcacgattagttagtgatattttttaaatgctattttgttaagttatataagatttgatacttaattacaacaataacggtatgatatcgaagatggtgctaggcaccagtaatattttttagcaattcttgatatctttgtggcccagaacaattaacgcccataggttaacttaaagatatccaacacaataaatatagagattatatatgttattgtaatttaatattgagtcttactatttcttacaggttcctgaatataatagtatggaaagaaaaatcatccagcttgactgtccacctccaaacgtagacttgtttagggttcaaggagtatttccttcattttcgagagatggctcgaggcttgcttttgttgacaatgagttcatgagagtgtgggtagctgacaaagatggattgtatatggtttaccaggtacatatcataaacataatcatacatacatatatat

SEQ ID NO: 89652 - DNA, 2915 bp, Cannabis sativa
tgccgtgtggcagtaaaattgaaaagtattaccccaaatccagtatttttgtaaaataccctttatttttgaaagggaaattgaatatacatttgttttagtacagatattaaatatagattaataaaggcaattatcatttaaaaagaataacaaagaataaagtcagagatttgaaaatataatatgtgaacggactagaggtataaaatgggccatgggctgggccagtatgttgaaggcccaagaaacaccgaaatagtaaaggaaatctaaagtaatagaggtcaaagcatccatctagagtaggaatgtcaaccaggaaattacatagtatactactttattttatttgttttaatttttacctctatttttatatcctttaacatatactcacttttataaataatgtccttattagaccttttagattaatataaatttatatgctagagttaattagagagtgagggtatagtgggcaacccactcaaaaaagtgtgtatattttaataaaatataatataaggatatttttgattaaaggatacaaaaataagatatttttcaacttatcctaatattaataaggtcgggcccggcccaacctgccatagacccagcccgacccgatatcactttggcctgaccccgcccaacccgactattttctttagcttagcgggtcaagtctgacctgaaataactaggtcgggtcgaacccgacccgtatttttttaaaaaaaaaatcaatttatttatttatttgtttgtaaagaatagtcactgagacatgtagaggtgatcattggcattgggcaagagaacatggctacacaacaatataaagacgttttctaatcacacaaaggatgtgagttcttcaacttgggaactttgaatgtggctaagaacagtattggagtcattgacgtgggcacaacatcgtcatttgcctttctcttcgatcttttgctaccctgatcgcaagaaaatatcataacatcaatttataaagtaaaaaatacatatgttttaactcaaattttcaaaggaatatacatactaggctcaatgagacataatattgaaaagatcataaaaattgatatattcaacattttgtcaagaattatcttttacatacaggatgattagattttaaaaagcacaactaaacagtttaatttcatgattttctgaatattaggaatgttggaacgaaagaaccagaacatgcatggcaaaatatcaaaacacaacatatgaaaaaacctagaaagccattgttacagttgttacttgggtaagtaagtcagaggatgtcgtcgtgtctgtcaactgtcgtcggagatgggagtcagccgtcgttagagagaaagaaaatgggagagaacatagaagagtcgaagtttaaaactgaagaaattgggaatgaattttttagggatttagttttatttaatatctaaaatcgggatgggccgatcccgacccgaaataatatgtatcgggccaggccgagcctagagcccgataaaaaccttagataatcgggccaaagtcgccccgtcgggccgggggcccgacccgactcgcgaaaatggcccaaattgccattcctaatgtagagagaagggtgtaacgtgtggatatttttctcttactttataaaaataccctttaaatctataattacaaaaaattcaaaattatctgaaatataatagtagactttttttttttgaaaggagaacttcattcaaggtgggagataacttaaatgttggccaaagccctacaagcccagcaaagaaattacacaaatctcgcttggagataacttaaatgttggccaaaccacaccgaacaaaaggaggagtaagctcatggctctcgcaggagcatcaaaagggacgaaccctccaaaaaaggcctaaagacaatgccacaaaggacataaggtactcagcaccgacaaaactaaacaaaataaaataaacaaaccaaataaaaacataacgtaaaacagtttcaaaagactttcccctagcacaaaggaggtcgcacgaagacctaagacaagcagaccaaaggcaaaggaacgatgccatcttccgacgaaaaaagctgaaaccttgccatccaatggggttttgaatggtgagagtgctaggacaagggaagcacatccctttaggaaaaacccgagtcccccctctatatcaacaacactccgaaagctaaccacaagccattgcgtaccggagccaagatgcctgaaaaaaaaaacccatgggacactgagatctgaggaaaaaaggaagaaaaacaacgctccaaagcccaagctctcacctaagaagggccaccgcaactcgccatcgccaaaaacaaaaaggagatagcctagagagacccatcttcatcgcttccaccaatccatgagattgggcctacccacgattaaagacctcagacgtgagacacctcaaaggagacgtccatccaccttggtcggcggccagtcacctgaaactcagccattgaagagctgacctcaaggagagaaaaggaggccaaactgtcatcgtcaccactcaccacaactacctaacggaagaccctctgccttcaacctgctacaacgtggagcctaggtaccccaggcgccactagccagatctggccagcgacgcccaagcaccaaaaaccctaaaaagggggaagaagaaaaagaacaggggtaaaccctaattaagagatatagagcattttttaaccagctcccacatgcacaattcactaaaaactttaaataaatataatagtagattttagaaattaaaataaaatagtgaaggatcttttattaattaaaaaaaatctgataagtaaataattttaaataa

SEQ ID NO: 89653 - DNA, 506 bp, Cannabis sativa
ccagcaggctgactaacatttgttctctgagcagaacgcaaattgtccatctccgtctgcaatattagaacaaacaaattaacaataaaaatagtaacaaagcaaataattaatcaaataaagtgacttgattgtgagtaaatttgggtactgtatttagtgtttgtaaatagaaataatcacaccatgatcatacatgtacagaaagagaatgccaaatttagctaattttcttgtatttacagtttccatgactaattttttttcaaccacaaatttagcaattcatatattaacatttaactcatatacaatctaaaaaactctatattcatattaattatattatgatgaccagtactacgttaggtaagtatagcaatcaagttatagcaatagaagattttgtaataatgtaattaaatcgattaaatgataacctagttgcatcaaacagattttagtcaatgttctactataattacacaagttgaaacaatgacaaa

SEQ ID NO: 89654 - DNA, 902 bp, Cannabis sativa
cagaggatgaaaagcaatacgggtctgggacctagagaagaccaagttcattatactttcaggagacacttggaagccacttgagaaatctaacaagaacgccatttgaacagatgaaacagaaggcctaccatgaagcaatagtcagatagcccaagcgatggttatacttttttgatacaggatcggatcttgttccctacgtcagaccatggtagtgcgcacacctcgcctctgaataactttttttgcctgacggcttgcctaggcgtcttattttcaaggtgcaaccttttggtgacacgtgtcctaccacaatggtcccattgtacaactgcctcatcgcaccagaaagaactttcttgggagcccaatagtcactattttatatgtatatcaccataatagtgagctcttttgcagaaaccctaaacgggtcatggttacacccatacccgtactttaacttataaatacctctttattttcacatagagggggggataaaaaaaaaagatagccggagctctgctaaaattattttaagctttcttcttcttcaagagaaactaagagagcagagctagggttttcttgtaaacaccactttacaagccttttttaggccaatatactgactcgtggactaaagcttattaaaacctgaaccacgtaaaactctccatctattttacttaatgtatttattatttcttaagctctttattaattagtttatgaaaatctcagtaaatgttttggtgctttcattgagagcttaggaaagatcaaagccacgatgttgctcaaaccatggtggctaagttattaaacacaaaattacaattttaaaactaactaagttatttaaaaattcatttaaatataaaaaaatattaaaa

SEQ ID NO: 89655 - DNA, 1593 bp, Cannabis sativa
tagtagaaacaggcgagaaagtttcagtgtaatcaatacattttctttgagtaaagccttttaccactaaatgtgctttaaacctttcaatctatccatttttcgtttttaaaattcacttacaacctatttatataaaaccatcaagtaataaaactagctcccatggagtcaatctcatcatctgtagttgctaaccattttgaagattgtgaactattaagtgcttcactataagtgacaagattcataaaaagatcaatatcattatctccttctccaaagtcaatcctccttccttccaaggcttgcacaaatcatcccaagacacataacctgaaccactaaaatcagccacccctttccaacgaaaagaatgacaaattgcatttatttgcttcaatactctcttaggcaacattataatctgaacccaataagagtgaatagagattaataccgaattgatcaacgtagcccgacctgcatacgaaatatgcctagaactccatactcttattctagcaactattttatcaattaaatcttcacattcagctgcctttgagagtcttttatcacatataggtatgcctaaatacctgaacgacaagtaagaattttattgcaaactaccagctttttacaaaaaacaacaaagcacaactaatgtgttatacttaaacaatctaaccactcaatatcctctatactagctttctcttttttgaattgagaaaacctaaaacagatctttctttgcaaggtgtctatgtttattacttctttgttggtagttaaacaaatcaaatgaatggtggtcggctagcacctggattttcggaagtgtctttcacttgtgttgtggataagaattattttggatgtaagaggttgtgtcaaagatgcatataatcatataaatattgaattttgtaatatctgctagtgaccttgtttatgtagatattaattaaagtgaaatgggagagacaataaagattaaagagagaaaggccctaaacgtagtgataggcaacttacttgccttatgaattgatccacaaagttcatggacttaatcgtgcagaaaactacttcaacaacatgtcacaaaagttaaaaaacacaccatgcatgtatatgttgctcttctaaggagctacgcctcttgacaaagcagaaggcaatcaaatcagcttctgcaaactttgctggtatatagatttctcttatggttctatctctagtaagctcgtagctagttagacaaatctggttgttcctcagtttcatttggagttgtgtatgtactgtcattcttctcaattggttcaaatcctttaagctcaatttcaaactctgccaaatatttcctgttgccagatgaatctacatcagataccacactgctcttcacgggtttcaagtgaggaaaatcatttttattaaacacaacatttatagaaataatcacctttgggcttcccattctggtttatgcaaattctataaccttttgtgcctataggatatcctagaaacatgcctttgacagatctagcatctagcttatcattggattgatgtaca

SEQ ID NO: 89656 - DNA, 718 bp, Cannabis sativa
gatctatgatactaatttgtatattaattttttcttaattataaatttaagttacgttttgttaacatttgttttttaaaaaaattataataatttattttaaaatatattttttagtaactcatgaaattgaatagtatattaaattttgtttgagttaataaaaaaaaattaaaaagtaatatttattattttcatataaaagcctattgaaatggtttgatattaataaattttttaaaatatgaataataaagtttttgtaagtaatacattaaaataaaattacaaatctaactttgttgattttacaatttttataattgaatagaaaaaaaaaataacaattttttttatttgtatatcaaaattatcattttatataatagattataactaataattttttagctggtcaaactagaaaatgtttttataattttttcataaaaataaaataaagagagatatctaaatgttattttaattagaaaaaaagttgaaaaataataaagagaaataaaataataataataaataaagaagattgtcatgtcagaaaaagaaaagatgaggatttttttttttaaaaaaaaaaaagagtaattgacacttgatagttagcaaaagaaaatattagtgacttcggtatacgtgcgtagtaatttaaataaaaaagtcggcattaatagtgtattaaattattagagtgcatttt

SEQ ID NO: 89657 - DNA, 560 bp, Cannabis sativa
ttttacactgtcaggtaaagaatttctaacggtctacacaaattctgcctatatgaacattgcgaatactgagtagaatagacaatggtaaaaatataccggggaaaataactcccgacgattgaaaattgtcagctatctaaaatactataggcgacagtttaaaatcgtcagctatactatagacctaaaaccgtagcctatatatagtcgatggttttaaactttcgctatagtggattccaaaaaaaaaaatcaccgtcttcatcctccttgaaactaagatgtgagtttcgtttgatattaagagccccaaagagttaagatttgagttacgattctgccgaaaccacaatctttgatatcttagacaatctttgaaatacaaaaatctcaaaaatacataaatcctaaaataaaaataataataaagaagttacgagaaagagtggatgagagagagaagactgaccagtgcttgtggtggctcgtggtcgtgcgtttgtcttcggacgagagagagagagagacgagtgacggtggttctcgtggtggagctc

SEQ ID NO: 89658 - DNA, 1200 bp, Cannabis sativa
taaaaataaaaaagcccctatatactattataattattatcattattataattatttttattatacaaaagttaaaaattaaaaaaaatatataaaaaatactaatatcgacggaatattaaagttggtctgccggtattaatgtgtcagcgtgtgtaaggacagacattaataccggcagatcccactgctattaatccgccggtattaatattattaccgatggaaatatattttggtctctactactaatattagcgaccaattattatggcagaatctactggtaatactcaatactcgtggtttgtctatttagtattggcggaggtttccaccggtactactcttaattgttgtagtgaacctaattacccacactaataagttttattttcttttacaaatctaaaactcctctgggactaaaacttaaagaatcagttgttgaaggtatttggatcattcaattattttatgtgtaaaagtaatcatctattaaaagagaataaagtaaaaacatctgaaactggaaaactcttaatttaatcaagaacaattatcatgacagctgaatttaataatgacttgcaaggggcttaatttaatcttgtcttaagataaagatgtatcgaattgttctgatctgaccaacttttttttgcctaactcttccaaacattctacaagtttgaaaaaaaaaaaaaaaaagaagatacatatagtgattttgagttatgcttggtgttggtgagatatataatattatcttttttatttattattaaatcaaagttataataatataaacaattagttgttctttgctatttcagaaaaaaaaaaaaaaaagaaaaatagttgttattggtaggtaagcctatgaattagtcatatttgagcgacgcggattccattagaacccttctattctatactaactcaggagaatacattatttactacttgaaataagtagtaaatggtcattatacaactttgaattggaggcagtgaaaaggtccactctttttttctgaaatcgtccactattatacattggaaaataaaaatttaatgagtattgataagaataatttttaatactcactcctctgttttatatcaaatttacacggacgaaattttaaaataataatacaaacaactcctctcttttagttctctctctctctctct

SEQ ID NO: 89659 - DNA, 689 bp, Cannabis sativa
cttggatccataggtgttttaacaggtttgtttaccgcataacccgtatcttcgagtaactgcatagtgtacttatgttgagaaaggaataaaccatatttgctattgaaaatttcaaaaccaagaaaatattgcagtggtccaagagttttgagtttaaacttctaatgtaaagaattctgtagctgacgtaaagcagcaacattaggtccaacgatgataatgttgtcgacataaacgagtaaagctatgaattgacagtctatgccacgagtaaagagaatataatcagctagtgattgcttgaattcctcttgaagcaaggcatccaaaagcttcttgtaccattgtttggaggattgttgaagtgaattttacagcagcaacaatatgaaaccttacggcagggccgaccctagactacgtcaggttaggcccgcgcctagggcccatcttaaaaataccacattttttaaaataagagcctaaaagatgtttttttaagacccattttcggtagtgtttgatactatactaatcccttaaatttttctccaaatatgagatccgatattaaactacaccactgatcgaattgaactttggcaaaattctctctctctctctctctctctcttctttttttttcttaattagtataatgaagtgatgttttttcttaatttttt

SEQ ID NO: 89660 - DNA, 522 bp, Cannabis sativa
tataattacatatattcatgcaaagcaaactaatcttgtctagatgtctttttaatcccatctcatcaaaactacttaatccttttgtttagtttcctgcttagaaattaaccaaccatctagcctagctagatagctaactcttaattagaacatgtacctagccaaacaaagacaccatacatttttaattaactattaattattgacaatatatatctatttatgtaattttcccatatatataaccatctatacatgaacccacatgctctcatactcaaacacaaatcatcaaaaacagagagaaagaactcattattaacttaactagaaaccttttaagttcaaaacatgatgaaacaagctgtctacttctctttcctctttctcaatttcttttgccacagcaaaggagccacattattagctcactctccagcccaagctccatcaaaacacgtagctgtagccccaactaaagctaaggccttaactccaaccaaagcaccaacatcattg

SEQ ID NO: 89661 - DNA, 900 bp, Cannabis sativa
ttttaaaaaatgagcaaaatgtaattaaagggagatattttcaaccatttagtttggaaagattttgtcaaaaaaaaaaaaagtagtttaagcaaaacgtttcataaaaaaaaaacttatttattaaaacattttcttccctaaaaaaaacattttcttaaaaaataaatcgggacttaatttgggctcgaacgaccaaagatcaatccatcatatggatatcttgtatgctttttgaacaaatggatatattgtatgttatatatatgtatacaaaaatatttgtataatagggagtttcattgagtacttcaaaatattttcttctaaaatatatatgtattttgaagtaatttttaaaaatattgtatattttttaataaagaacccaataattttttttttgtttaacactcaccaatttttcttaaaaaaaaaattatagagggtatgctacaacaacattaaacactatcattaagaaaatatatcatgataaaacatttaaaatagacttattataattagtgatctctaggcttactaaagaggacaatgatttttactcaaaaaaaaaaaagaggacaataatttattatataaataattttaatcatggcttacaaatttggtcaattcatgaactcattaattaaagttattttagtatccaaagtagatgtgaaatgatttggtaaaaagagctgcgaaatgaagttattatcaatactcattgttggattattctgtctttttccagacatattggaaaataaagctaaccctattattctttgattataaacccatccttaatagttaatataccatttatggttaaaattctatatccaatatcactaagcaaaaagagaaaagagagaaagaaaaaaaaaaaaa

SEQ ID NO: 89662 - DNA, 501 bp, Cannabis sativa
aacaacaaaactgtcattacgagaaggggaacctttttcggatataacgctgtacaggagtacagtcggtgccttgcaatatttgtcattaactcgtcctgatgttgcttttatagtaaataagttgagccagtttttacaagctccaacgtccgttcactgggatgcttgcaaaaagcttctcaggtatctcaaaggcacaatcaaagagggtcttcatctacagcctgcatctggtttacatctttatgcatattctgatgctgactgggcatcgtgcattgatgatcgccggtctacaggaggttacttagttttcttgggtgacaacttgataagttggtcagctaagaaacagcacgttgttgcgcgctctagcacagaaagcgagtttcgggcattagcaaatgcagctgctgagttaaaatggattcgttcattgcttgctgaacttcaagttcctgcaactcaacctcttgttatctgggttgataaccagag

SEQ ID NO: 89663 - DNA, 1290 bp, Cannabis sativa
  modified_base (1235)..(1235): a, c, t, g, unknown or other
tgcttggagagtgatgaagggaataggaaagcaacattaccatgtttcgttgacattggaatggaatgtgacaactttttttttttttacaataataattattttttttttgtaaaatactaataatttaatattttttttttctttctaagtgttcaaaataatttttatttattatttttcatataattttataaaaaaaggttaacaataataaataattataaagagtaaatttatatgcaaattgatattatattttataaaataaaatatataaaaaaaataaggaaaatacttcatatatcattttttaatttggggaaattacttcatattttaaatatttttatatacattagtattcatatatataaaaaaataatttaaatacaagagtttgtgtcagattgccagtagtattggaaagtcaattgcaagttaagtgaaaactacattttcattggattttccttgctagccaaactaaagcccaccactttaacttagccaacattaaaatattaaaaacctaaccaaacacagtaaacttttagattctcattcctacttctctcaataccgcatactaaatagccccttaagggtttggacttccaccacccaaacagccactgtttaggcatattaggattgtttttactcaattttttaaatctctcaatttaatacctaaaaacacctttctggtattagatctttttttttagtattttagagtaaaatatctttgagatgatagttgtggtggttgtagttccgaaaactagtattggaggagaaaacattaaatcccaatgtctattaaagtaaaaatatgatcattaataattttattaaggtacattaatttttttttaaaaaaaaattatggctttagcttgtggaagattgtgagttatttgggttgccgtggtggccagatttgtgatcagtattggtgatcgaatctgaatgataaggtaaaaatataatctttaataattttgttataaatttttttagattggaataattttttgattagtgaatgtgtttatgttaaactattagttttgttataaatgtatatatttttttttaataaatatgttaaatattgtgattaaaagaggaaaatagagattgagaatgagatatgagagtattaaataaaagtttagaaagtttctaaaaaatatattagtgagatatagatgcatataggttgttgntgctaaataaaatatcatagttcttgatagattttatttaggcccatttcgtttt

SEQ ID NO: 89664 - DNA, 525 bp, Cannabis sativa
atcactttttgacacattattaaagcatactttttattaaataagttatattttagctttctactacttttttacacctccatgctctcatgcctattagcaattctcattaaaaaaaaaagtggataaaattgtcaacgaatatgaaaagacaacaaaacaattttagaatagttattagacaaatacaagctgcttataccgtgggcgtgggctattgaatcatcatcctaggatgtgattcccattgcgccatgtgaattgtcgagagagtccaccccattaattaaacatttttctttttacaaaatgaaaaataatagtggaattattctcgtatattattttttttttatttttttttaaatttacggtttgagtttgtagctgcaatgctaattatgagtttttatacgattttttttattacaatttaagttgcagcgctagttgcaataaaaatttttatgtaaaattatataaaaaaacaaaaaaaaaaaaaaaaaaacttttttaaaatgtaaa

SEQ ID NO: 89665 - DNA, 725 bp, Cannabis sativa
tttattatatatttttatttttatatatctgttttatacttttagttttttttttttctgtgataaaaatatagtttaaaattattataaattattttataaatgtatatgaatttatattttgggaaaaaatataaaaaataaaagttttgtataacataagtttttatacatttgtagttgtaatttgatgataatattattattattattattattatgatagaatcttcataatttactacaacactttaaaattaataattaaccaaacactcggttctgaatttttcaataattttattgtagttattttttttcacgatacaaatacaactgttttttctcacggcacaactatactaaagtggtcgtacgatccatagtatcacgtttcatctaaatatctagagatattgcattagttttaccatcacacagctagatttttgtttttcatttttttttttataaatttaatcacacctaacataatatttagcggcataagttgaaaaatatattttttttgtattcattaatcaaaaatactctcatattgttgttttattaaaatatactcacatttttgagtggattgcctaatatactctctttagttaagtctagcataatttacattaacttaaaagatctaatggagacatcatctataaaaaggggtatatctaaaaaaaatatgaaaatagaggtaaaaattaaaa

SEQ ID NO: 89666 - DNA, 535 bp, Cannabis sativa
  modified_base (207)..(216): a, c, t, g, unknown or other
gcatggactgcatcataatattttgcccaaaaataaaatgtatgttgataattctcgacaaatctaataccatgatccttcttatctcatgttagtttattgcatatgtaaacattcaacatctattgtcgacaaaaaatttcattatatgataattttctctcatattaatatcttatagtgatctctttaaattacatatttttnnnnnnnnnntatcatttataggcacctatatagaaccacttcaaggattcaattatgatcaaatatgttataactaacttctctagggtcaattttttagagtaccgttttcatcatagttatcatttttaaaattattaatactttataacattaaggcatctccatgattacctctagatttaacgtcttcaatgcaaatcaaatgaaatatattaataatttctacatcattcatttacgcttcaggcgtttttggactcattgtaacttaattttgaataatattgatttgcagttggtatatatcattttaaactatatcgtt

SEQ ID NO: 89667 - DNA, 636 bp, Cannabis sativa
tataaggttctttcagggccttggacttatgcatgtgaaaatattttttattcattattggccctcaaggctttcatgttcttgattttggcctatagatactttattttcaaacactactattatttagccttaaagccttttatcatggacatatgatcgtcctagatatcttcttatggccttgatatgtaagtatatccaaatttacttctctttatgtcaagccaaagtatgcctacacttgacttagggccaagtttagtagcttattctaagcgttgaattttctttgcataagttgtacttgtttatttcatcgtattaggaaattcatatttagggtgttagattatagaattaataatcaaacacatgtgttagtaaatttagatcctagtaaaataatttccaacactcctctgcatttggttgtgttacatactcacatgtttctggttgtagtacatactccccatgcatctagtcatagtacatactcccatgtttttgttcatagtaatacatactctcatgcttctggtgatagcacatactcctatgcctctggtcatagtacatactcttaatgcattgtagtacctactccacaatgcatcaatcatgagaaacaca

SEQ ID NO: 89668 - DNA, 927 bp, Cannabis sativa
tgaataaatattatatttagcatatgattaaatttatcaaaaaataaataaataaatactgcctacatgggaaatgttataagaatagacatggtgaaactgttaaaaagtaggtataaaattaataatttggcttttacaataattttatgttagctataggtattattgtcaataatttttttatttttttttaacctcaaattatgcaatagagatagagctaccactaagtttaaatttgtgattggtctagaccacaaatctcaaataatgcattaaagtgagataataatgttttctagtaacattttaaataaatatgcttcactacttcttaatttccaatccataaatacaaattctactctctacaattcaattcattatataattatttttatttaattttttttttttttgaaaagtatttttatttaatgtaagtccaattaatttcttagcttaaaaaatgttgtatacgtaatgtaaatataaatgcataatgcactactactagtgagtagtgtgtagtagtaggtaatggtagctaaagatataagttataattctgtcaaaaaaaacagaaaaggagagttataatatacattcttgttagttactgcatttatagacttttatcttaaattcaagcccggcagttccattagttttggctataaataggaggagcctaactaaattaatgtggttcaatgtaaaaatcttttaaaccttttgattagttgtagtttttcgttcatttctagattgtataatttgcagcccataatatagttaagtgggtttttgccagtatataactggtatagtcgatccgtcctctataccagataaattattatataatgaccatgaggtctaacgttttttagttttaatatatctactcatttttttcaaaaa

SEQ ID NO: 89669 - DNA, 1776 bp, Cannabis sativa
cttggtgggggtctttttcttttttggaatgatgttgttaatcttaatgtgttatcctactcttgtagtcatatagactgttttgtacaaatgactgataatattaattttcatctttcttgttattatggttccccttattcctctggtaaattagattgttatactttgctcaatcgtttatatgatgttgctccttcctctccttggctaataattggtgattttaatgattatcttgctcttgttgataagtctaccagtacaatgcctccttccaatgccatggttcattttaacacttttatctctaagtattctctctcccctatgcccttcaaaggaaacatattcacttataagtatggcaaaactcttgtgagacttgattgggctgtgatcaatgcgaattggtctgcccttttccctaaagcatccctaactcatctccctttcttcggctcagaccataggtgtctcaaagtcttacttactgatcccagtcaatccatgtaccactactcgggctttcgctttgaaaattcttggttctctgaaccagattttcccaatgttatactttccaattggcactcatctcctccctcccaaaacagtaattgtctttcttccttccttgccactcaatctcattgtatcgaccaactcaagcagtggggtaaaaacaagcaacattttaaacataccatccaacaacttcaacattctctcaacaatatctattcctctcctactcttactgacactgatattcatcgagccaaggcccttcaaaacgatcttgactgtgtcctctataaagaggaaatcttttggaaacaacgggctcgtgcttcatggcttaaggcaggcgacaagaataccaaattcttccatcaccgtgcctcttctcgtcgtagacataataatatatctcatatcactctggataatggcactgttatccatgatttcaatcaaatctaccagcatttcagaagcttctatgcttcccttttcacttcccagggcattgatttaactgctgtacattctattctccctggcatcactcgcactctcacctctagccaatattcaattctcagtcacccttttacccctgatgaagttcatgttgccttgttccaacttcctggagacaaagctccaggttccgatggtctaaatgctcaattctatcagaagaactggtccacagttggtcactctctcactgaggctgtccttgatgttcttaataatcaatctgatccttcctccatcaacaacactaccctggttcttatcccaaaaaaaaaagaatgcttcctctcttaaagacttcaggcctattagcctttgcactacaatctataaaataatttccaaggctattgctaaccgactcaaacttgtcctcagtgatctcatctctagtaatcaaagtgcctttctcagtgatcgaattatttttgacaatgtccttattgctaatgaaatcattactgccatcaataatcgtaaatctggaaaggtaggctgggttgccttaaagctagatatggaaaaagcttttgaccgtgtagagtggggtttcctacagtctattcttactcatttaggtttcccccctactttcatctccttaatcattcgatttctatccacagtctcctttaccatttctattaacaatcaccttctcccctctttttctcccaccagaggaatcagacaaggggaccctctctccccttaccttttccttttagt

SEQ ID NO: 89670 - DNA, 751 bp, Cannabis sativa
tatattgtcaaatttcccttttataaatatgaaaatatttttacttttttaattttaaaaacaaaaactaattaaaaatgttaccattggtgagtgccaaaaatagtcatttaaaatcaatagtgatttgtggttttatgtagttagttatcgtttcatagaaatattgtcgttttctaaaacctaaacgacgaaaattggaccacgcttacaagaccaactctgtgtgagagaaattgagatggagagtaagggtttagtttagggttttcttctctctcttcatactgtgagaaatgagaggaacagagcttccattgaatcaaacccaaaaggttcgtttacagagagctctcgataaacttgagtctctttcttccaagtccaattctaatgcttccgtgacagtcgcagattccattcctgttaactacgaagatggcgtactcaagtacctttctctcataacctttataatctgaaactgggtttttatctgtaaaagtatatctggctaactctgtttttgtctgatccaggggacacggaacctcagaactcaatggtgaggtcgttgcgacactttgcggtattgtggagcgtgtcaataagctggtctacgttcgtgctttacggtcccggtacaagccggaggttggagatatcatagtgggtcgtgttgttgaggtcatatagttacaaacccatttttctataaatctatttccctcttaattttcttgtatggtga

SEQ ID NO: 89671 - DNA, 917 bp, Cannabis sativa
atttaagatattttactaaattttgagaaatttaaaataatttataacacagaaaacaatgttcaaacaatctatttcacatacgtatataataaaatagtcacacgtgcaaaatattgtttgagctatgtttttgacatgttaaatttgtccaaatttcttaacattttgtaagatatcttaaacaactatagcatatatgacagtgagaaaaaaaaattaactaaaagattatttcaaataccaaaacagataggagtgtatcagtgcattccttttaaatggagtacattgcaaaatagaaaatttgactttctatgcatacattagcccaatattagttccctaattcaatattgacgggtattagataagtggatatacattatggtggactacccaagatacccctccgtacactaaccgtcattctctccatttctctctttactctcttcactctcatctaatttttttttccattctcaatatcaaattcacactaatattttacattttgcctctccaagctactagaagttactacaactaaataaaattagtgtgatactctattctttgaggcactgaacaaagttgtggaacaattaatcgacaagtaattttttttgttattggttctttaatttagtttagaatattgttttgatgctcgatccgtgggttgttgctcttttgtgtgttgaaatggttattgtacatgaatactgcatttcttcttgtttctgcaatttttttcgtctactttaatagcgctcgatagtggcttgatgctagtctaatataagatttggttccaaggatagggatgatggcctgatggacccgatagggggcccaattcttgtccaatgtcatatggaccagattgtcaggtctgatggatccgatgggcc

SEQ ID NO: 89672 - DNA, 519 bp, Cannabis sativa
ctctgctaagtgaatacatcgcaatcaacacgatgtggttcttcaaggaatttgcatctctactgagcaaatacatcgcattcagcaacacatagttcttcaattaggcctacatggcctacaacttccctgagtttggccaactcaaggtcttctccgaagcctaggtgaggctctccaatttttggtctcgtctctcctgcatagtactggggggcaaaatccagttgttgttttttggggggtgcccccaaggactcttccttaagttggaggtgtctgtggagggtcctcgcttggaggctggggcctatcaattggatccaatgggatgcttgtatcagtctggtcactgtagagtcctgcctagtagtcttggccgcctatagacctacaggggtggtcaagccgcccaaggtgtgcaagacctaactgcttaaggtgtacaggatctggaaggtcaaggtgtacaagatttagcaggtcaaggtgtacaggatctgataggtcaaggtgtac

SEQ ID NO: 89673 - DNA, 649 bp, Cannabis sativa
atattagttattatgtaatagtttcacacaccgataatttgttttaaaaattaataggttttttgaaataggctgacatatatatatcaatgggattatttcacaaatatataaagacaaccaaaaaaaattaaaaaaatacgactgtacggaagtttaaatatttttataatttttatgattttatttataaaaaatacggtctttttatgttgtactcttgttgttatttgaatattatttttttgttacttttatataatttttttgttgtttctatgttgtttatatagaaaaccgtaaaaatatataaaaaaaaaatcttcaaacgtaaaatataaaaatttacaaaaaatagtattttgtataattatctttataccaatatactttagtgactctcttctaggctagagtacctacacattttttttttgttgattactttttttttgtctttatgtgactcataatatatacaccaaagttattttttttaataattatgataaacttgccaaacattctatttcttcttctttttctttttttatcaaatactttagtttttttttatactttgttaataaataaataaatatatttaaatttaaataaaatttaatttatcaaacaacttaataagtta

SEQ ID NO: 89674 - DNA, 1308 bp, Cannabis sativa
tccactttccactctttcaagttttctagaccaataagctgaagagattcaagtcgagggaaacctcctcttgagcacaccatctcatcccccataaagctatcaacacgaatctcaaggactcttaattttggtagcttttctaatgttggcattggatcatcctcaagtctgagatcttccaacgttaacttgatgagatttggggagaattgattgacttctggtaaccttactatagacaacaacactgaaagcttataaatgtgaggacagcttaatatcaaaggaacaatatctatcgtgccaaaacgattattcacttgtaaagactgaagacgagtgaatgtgagagtttggggattgtgtaagaatctctcaaaatttccatccacatgaattcctaatttcttcagactctccaactgtagaagatcactcagtagaacatcttcggtgtgaatgcctaccaatgtttgtaaatttctagacttagttgacctcaagaatttacctaatctcatgccatctacagtgataaaatatagatgcctcagttgctccaacttgcacattgaacttggtattatgataccactcttagtccatactctcaaagtctgcaggcatcttaaattcccaaaagaagatggaatcttttcaatccggaaactaagaatatataatagccttagatggatcagattcccaatttcttttggcaacttcaaagaataggtattaacatctacataacccacatgcatgcatgcatgaccaataatcaaaactctaagcttcaaaaagtgattgcatgcatgcctcaatactcttttttcattctcaattcctacatctacagcaaggcacctgagagagccatttatatttccaaccatatgaataaaatcactacaattagttttttcactatcatagatggaaactcttcgtacctttgtttctgttggctcttcccttctatttcgccaatctataaaatgtaggaaggtttcttcttgagctttagacaggcacacatctcgcatgagatcatgaatggaaaatgattttatctttcttcctgttgaactcatttctttcacctggatcatgctcctctcaaccaactcacacaaccaatcatatgccacatcctccgaagtttccacagaccctcttcttcgcgatattaaaccctctgcaatgagtacaagacataactcttttactcttatcgtgacatcttcagcgtaacgagccaagtacaaaaaacaaggcttcaagtgagatggtaactcactgtaa

SEQ ID NO: 89675 - DNA, 694 bp, Cannabis sativa
agtatagccttgcaaatcaagtaccttggcaggtttaaaagtgaggccaatatgtttagttcctgctagataccttagaactcttttgcaggccccccaatgttcaattcgtggttgagacatgaattgactgagcctattgacagcataggctatatcaggtctagtttgacataagtattgcaacgctctaataatacttcgatactctgtcgggttgggaagaagtgttctagattcatgagttaacttggagtttgagcacattggggtggattgaggcttagcatctagcatcttggtgcgaatgagtagatctttgatgtacttttgttgagtgaggaagatagtgtcatgttgcttttgtacttcgaaaccaagaaagtagttaacattccccagctctttgagagcaaatttgttgtgtaatgccttaataatctgtttgatttgatgagtgtctgcccctgtgagtaatatatcatcaacataaactagtaaaaggagaagcttgccttgtttgttgctgtaaaataagctactgtcagatttggactgctgaaattcaagtgacagtagaaaattcttgagcttgtcataccaggccctaggggcttgtttaaggccatagatcgccttgtttaacttgcaaacgtgattggggaattggggatcaatgaatccttgtggttga

SEQ ID NO: 89676 - DNA, 563 bp, Cannabis sativa
cgataacgctcctaaactagtaggatgttacattttgacttgaataactcattttcaactaactatctttcaatattctgtaacatgaagacatggagaaattatatctagaagccaccctgggtttcactcagcaccaagttgacattccctactaaagtttcagtttttaggatcgtcttactacaaatgggtcaaactttgtattgggacattaaatagacataccacagacttatttgaggcatcataatcaaattcagagaaagttcatttttgagcacccgaagcactcagtgtcaggcacctagcgcctaagttgataatttgtcaatttgggcgcctttcaagtatcagatcaactatttgactttttcaccttctttgccttcattaaaaataggggaataggtacttttagagaagaaacaggacttcctgggtgctagaagcatgacctagcgcccacgttgacattaattcaacctaggacgattctgatgatttttctgagaactcttccgagcatcctccttgttttcaaaaaatattaagattcaact

SEQ ID NO: 89677 - DNA, 688 bp, Cannabis sativa
taaaaaaaaaaatctgtaaaccgagtaacggtttgggcagtttggtcgggttaacccgcccaaaccggccaaacctttttttttggtttcaaagttaaagtaaaatattgcgcaaaattctttggtctgaaaaagtttgatatatattcatattgtaaggtcttgtttggatttttgaatttacgacgaaacaaaatccttttcattttatcagaattaaatcattaaattaagattattattattatttttggtctaaaaaaatcctattattttttctcataaaatttaaactttccttggaaagtttatattgaatttgaactttgtccgccaatgatctggttccagctcaaactttggggattgataaaccatagatttcatgttatttatttgtagagaatttgaacatggcatgctcaatgtcaatactagtatccctatgagaattgatgttcggcataaggaactgcctccataaaggtgtcccatttctattctgccaataatgaaaccaaaaaacttctcagttggtaaccaaatcaaaaaataaagtatttcctccataaagttgccggctgcgtgaagacgtcgttagaagaagggagagaggatgaggatgagagagacagtgactgagtcttagatttaggggtttttctttaacttttacttttaataaaaa

SEQ ID NO: 89678 - DNA, 1078 bp, Cannabis sativa
atggttaatgctattaatcataggaaatcgggtaagtctggctgggtagctcttaagttagatatggagaagatttttgatcgtgttgagtggggttttgtgaaggctattatgcagcatctccattttcctgttaggttcattggtcttactcttaactgtatttcttctgtttcttttcgtcttcttattaatggctccctcactaataaattttcttcctctagaggccttaggcagggagatcctttgtctccctatatctttcttcttgtttctgaagctttatctgctgctattagattaaaggaacataataggcttttccaggggatttctatctgtcgtttagcacccgtcatttctcaccttctttttgctaatgatagtcttcttttttccactactactacccgatcatgccttgctattaaaaatgctcttgatctgtatcacagggcaactggtgaactcgttaatttttctaagtcatctgctctttttctccaaacactattgcttctgagtcggatttctttcgcagaactctaggtctggataataagcctttcattagtaagtatttaggtattcctcagtgcttcggtagatcaaaaaaaagaccactttagtttcattcttcagaaggctagctctaagatgaattattggactaatcgtttcttctccaaggctgggaaagaagtgcttcttaaagcggtagttcaagctattccctcttaagctatgtcttgtttcagaatccccatttctatttgtaaaaagattaagagtcttatggctcagttttggtggggttctattgggaataaggggaaagtccattggaaatcttgggaaaaactctgtcaatctaaatgttctgatggcttgggtttccggtcttttgtgcatcataaccagactttacttgcaaagcaagcttggcatgtgttttctatgccaaattctcttcttgcttgcctcttaaaagccaagtactttaaacagaactctttccttgaagctcctaagggtcattgtccctctttcacttggtgtagtttactttggggtc

SEQ ID NO: 89679 - DNA, 840 bp, Cannabis sativa
  modified_base (42)..(44): a, c, t, g, unknown or other
ttgaaaaatattttcacttttctacttttaaaaataaaaaannnattaaaaaagtgttaccaaacggcaccttagtatttgcgccataaatatcttatatttttagttttataatatatatttttttaatagattaaatattatatattacatttttgttgcaactcttactacaaatttcgtcaagtgttaacttagattagtaatatgtcacgagtcaatatattagtggtctaactcattttatttttaggaaattactaaataattttaaaataaataacaataaaaattgaaatatgaagaaaaaaattaatagaaatatgttttgatttatttatttaatttacaattaataatttttttttctcaattttaaaattttttaataaaatttttattgaaagtgaacaataatcaacatatgcctgttggtttagtcatattgaataagccttaatgaaactgaaattaaaaactacaataaaaaggtaacatataatttttaattcgtcaaaaaaaatacatgtgatatataaatatatgaaattgaaaaaaaaaaatatttaaggaccaaatatatatcccaaaaaatttgattttaatttaatatctctatcgaaattttaggttaattatagagaaaattatagaccactgtttttattttttcttgaaagtatctttatatataaaatgtagatatttaacggtttttgttagtttaaattttaagaatataagagtattttgttaaatttaaccgtgttagtaaatattaatattttttagattaattaattgaatttatactaatttaaattaatttaaatatacata

SEQ ID NO: 89680 - DNA, 518 bp, Cannabis sativa
gaccccttcttcaattccaagttcgtggaaaacgcgatccctcatttcgaagcttcaccaaaccttcgccaacctgttgctgagcttctccaatcactttctcaaaccacaaaacgacttgtcgttgttcacgatgttatgatggcttcggtggttcaagatgtcgttcgtatcccaaacggagaagcctactcatttagttgcggctctgcttttattttcttcgcaagtatttgtaatgccttgggacgaaacgatatcgtttcgataaagaatatgccgtcttgggaatcatgttttcctgatgtgataaaaggttttgtggatagagagattgaggtggtgaaatttcaagctggagagattttcaatagttgtagagctattgaaggaagttttctacaaagtcttgtaaacgactttggttgggagaagaaaaaggtttgggctgttgggcctttacaccaaacgacaataactaataataaggacaagtggttattggagtggttggataa

SEQ ID NO: 89681 - DNA, 1171 bp, Cannabis sativa
aagttaagggtgcatcagtacttctcttttaaaggggtgtattgtagaatgacccaataatttatagtaccaaaaataaaatttaaatatttagttgcaatatttttattttgaactctttccttttccttgctattgttaaattttttagaaatcttataactataactatatatatatatttatagatcctatgaaaaaatttggttatatatatgattaggatacatggtgaaaatagaaatatatctctataatactggatagaaatatatatatatctctataaatatatatatgattttgtataatagtgagaatagtatataaatatatatataccttagagagccaatgtaaactgtaagaagaatgaaacaagtggataaagttattaggaaaaagccttccatagaagctcccaggcatagccatgacaaagcatgagcaaggatgatcaaacttgtctccctttattattatttccttattattgttattattatcaaacctctcataaaagctggaaagcgattgaaagatggtgttgaaatcgttcccaagaagatcattaaggaacacttgaaatgtcaatggctcaataagcttctttttgatatgctcatgatcagaggatattaatgatgacattattgcttccaaaatataagatggcatagccagacagtttggccctacagagcaacccaattcagctattctcatacaatctggtaatatattaccataaacttccaatgcaccttcttctactatgcctctcacctttgaaataaccacattctgtaataatattatatgtatattattataacaatattagtacatatatatatatatatataaaattactagtgcacatacttccattgaagaattttctgcatagcttccgttgccgacaccacctttcataggaagaacttgttcgtccttcatttttgattataaaggaatctaattttaggatatgatcagacaactgagactgattaaagttgatgccatattgagaactatttataatgagaataatatatgtgcttttacagcttcacaaatttcaaagtttgtacacatagtaaaatagctacacatacgtaattaggcaaaccaaaccaaactatacatttaggcagagggctattta

SEQ ID NO: 89682 - DNA, 514 bp, Cannabis sativa
taaatattaaatattatataataaaatattaaataaaattttaaagctgtgcaggtaaaattttccaatgttatattatataatattatacggtataataaaaagcgtacaaaactaagtaaatattatacggtataataaaaagcgtacaaaactaagtatggtatctcataaaatttaatttaataaatattataaaatataacataactaatcctaaaatatcacctcatacacatacattctttttacagtgcattaagtttttcttttcatacacatacattcttttttgctgtggcatacgcatacattcttacaactttggtagatgacattaaactattaattaggcaaacacttttaaagctaaaaaaacacaaaaataggcaaacactttatttaaaataatatctgtttttttgtaaggttatttaaaataatttataatttttttttcatgcaaaataatacttataaataatatttccatttgcagaaatttcacagggac

SEQ ID NO: 89683 - DNA, 724 bp, Cannabis sativa
attttttatggtaatttaattaagattttattttttatgaatcttaaattcagatttctttttaatgttttatatggttttttttagaaaaaaacaacgtttttaatttgattgttagataatgctatatttagtggcatttactttttataccatatttattataaccttaataattttttccatattttttaaaatagcccatatttaaatgagtatattaattatataatatatatattcattataatataattttaccgagctcatgtaatcaatttttaaaattaaattataaaaaataaaagaaaaaatggacatgaatatgaataaaattgaattgtatttgaatattaatatttaggatatttttcatggtaatttattttgagatttttattattattttgaataattaatatttataaacctattaaaaaatttaaaattgaaagaattaaagagagaagagacatatctatttaaagtaatttgagagtgtcatgtcaccgactcatagtctcatacttctcatttatacattgatatatattttttttgaaaaaatatatattgatatattaatgattgatgctaaaaataaaattcaattatttaattacatgaatatatttttcataaataattatttaaactttatttttgtaacatacattattcatattttctttttaaaatttatatgtggtctagaaaggcacta

SEQ ID NO: 89684 - DNA, 507 bp, Cannabis sativa
tgattagtaaaccaccgcgcataaaccaccaaaaaaccgcaccgcaccacactatttttctaaagtgttatattgttattgtaacattgttacagttaaatatggggactcatataattatttgtaatcgtttttaaggaatattgctaactaatttcaaaatgttacctctaaataatgttataaaccactcgtataaggtagcaaataggcggacccacattaaagcgagggggcagttgtccctaaaaaaatcaagaaaacaatgtatatatattttagctaattataatatatatttataataaaatgtgatatttatagacataatactagttttggtgtaataattaagctagattgtatatatatattaaaaattaaagattcaaatcccaccaacaacatattttttttctttttaagtttacttttatacccttactttaaattatagatcccttagcaatagcaatgatctttccaatattatatttatatattgta

SEQ ID NO: 89685 - DNA, 1095 bp, Cannabis sativa
  modified_base (945)..(948): a, c, t, g, unknown or other
aaaagaagcgttttgagttgtgaacttgtgagaaaataaaagaaagaaagaaaagtgtgtgtgtgttttttttttttttgagaagaagaaaagtgtgttttgtttttgaaaaaaagttttggttttggttttttttaaaaaataaaattaataatagataatggaaaaatattattaaaattttttacaatatattctataaaataaggagaagtttttaatctaattttttaaaataaacggtttaaattttgttttagatattttaatttttttaaatttttttaaattatataaaatattttaaataacaataatatatatctagtaatttgcgatataaatacttaaatttaactctcaattataaataaatacttaactttaatttttggcaataataatacctaacttatataactctataagcatttggaggttaaatattaaatcattatcatgtgtcattttcttattggtatatttaaactaatttttaaaaaataaaaaataaaaaattaatgacttgaattaatcagaaatcgctacgtagcaatttacataacacttaacattcatgtacctaaagaagtttcagaattataaattaggtattattactgttaaaaattaaattagtattcatttgcaattagaagctaaacctgaatatttatactaacaattactctaaaaaaaattggattaaatttttttctatgattggggtacatctataaaggtatattattgaagcacctaatagcatgtatttttttgagcattgctattagccaccagtggtgcctagcaccttcttgacatgtcgcgttgcgatttgctagcgatattccctaaaagctattagtatattaaattatatgggacccgatacttagttggaccaataaagatattgacatataggagggtgctaggcaccannnntgccctttagcatttctctatttttttttttttttcttgtgtgtatggtttagtaaatgtgtgtaggattgccctagaaacaattgttaacaccaattacccaaaaccattataagggggttattgtcggtacaccagaaacacggt

SEQ ID NO: 89686 - DNA, 595 bp, Cannabis sativa
gatgaattggatgaatttacaattgtggaacaacatgtgtttgtaactttctatgtaactaatgatataatgaatgattattaattttattaattcataaagcatattgtatttcaaaaggtgtcgatgagaattactataaggtagatttattattttttccagtgattaatataaggtttggttagtgtatatgagaaatgctaaaatgtatcagtagtgtttagtacctttgattcttacgtgtcaatattattattggtctaactaagtattagatttcatataatttaatgtaataacttttagagagtatcgctagccaatcgtaaaatgatacgtctagaagatgctagagactactggtgcccaataacaatgctctgttttttatcgtttaataattacttcttataatttttcatctctattttataggactgtttgatgaaactggtgtttggtgtttatgatattctgaatattattaaacgatagtataccaatctcttcatgtcttccttctcaattgatgaggatggtaaaattttttattggcatattttataatataaacaaaaataattataaaaat

SEQ ID NO: 89687 - DNA, 780 bp, Cannabis sativa
gtgtagacgtaccatcactttcttgctatcgtattcccattcatcccattcccattcccatttccatctccattcccattcccattcccaaactcgtttggccgttttcgcaggattaatacttacacacacacataccgcaccaacaaagaaaggaataaaaaagctttggccttttctgcccttagatacctacctatatgctaagctaagtaattaccccaagggctaaaactgagttgttggggcctcgccttgggggctcccctttaacccattccactcccttccaaatgtttacaattaagtgaatgtttgctttcgtctaatgtctaatgaaaatcggaatgaaaatggaatggaaattacaattataatgtttaattggattttttgtaatctttttatattgtaatgagtattacagcacttgcatcaattctcattatatgagtatgactgatgaatgaggattacaattactaatacattacaaaaaagacttttttacctttttctcccttacctctttatcattgataataaataaaatagaatattttggtcaatatattaattatttaattttatttttatactaaaccaaataaaaaaattgattacattgttcattacaaaataaccaaatataagtcaaatgttagtattgatttcgaagatctctaggccgtcgtttgtcaaggaatatcggcctattagtttttgtagtgtgatgtacaagattgtggcgaaggtcgtggctttacggttgaaaggtac

SEQ ID NO: 89688 - DNA, 933 bp, Cannabis sativa
tattattattattattaaataatagttagtattattttaatattttttgagggacttatcattagaacattttaaaacactatgtgtcataaaaaatatgaaagagggaaaaaatatagagttaattgtggcaaaactcctaaaattttcattttgcttgcatataactcctaaaattcaaatttgagcggtaaaatctcccaaaacttatattctgttaacatttagtcatttccatcaattttatgcagttaactgccatgttaggctgtccacgcgtacatagaatttatccacgtggacacatttaacacatggcacaattaaattggcccacataattaattattaaaaaattaatttaattaaaaataaatcacaaaaaataatttatttatttttcttccaccatctttatttttctcatctcatattatttttttctaattattgttcttcattcttcttaaaaaaaaatatcaccaccatcaccatcacccaccacaaccgaactgcccaccaccaccaaaaccacatctacgcaccacaaccatcaccgaaacctctttttcaaatccaaacaaaaccccacatcttagatccaaacatatcaaagagacctaacacctaccgaaattcgagtcccgattccataaaaacaaacaaacacaaattaaatccacatgaaaaaaacttcagattaaagagaaaaaaaatcgcaagggtgagagagagagcttattgaacacgaagttcaaaagcgactagatgggagtcgaatatctcaaactccacgaattccggcgaactttaatagctgattccaacgatgttaatgcccaaactttttgaagggttttgttctattagagcttctaagctccatcatactgctccctatacgaaatggtctcgaaatcatgcccaaaaatt

SEQ ID NO: 89689 - DNA, 695 bp, Cannabis sativa
cttgcaacttggggttggtccttaattatgtgttaatataggatgaaaaggaatatggttttattttattttgtcattagcactacatatatataaaaaaaaataataaataagcgaatcttataattaactattttaattttattttcggtactataaattatttaaaaattctaaaaaaaaaagtaaaatatttagtataattacaatgcactttatcacaatttaaaaaaataggacataatttctctcagcaccaaagaatagaaacattgtaacgacaaaagtaatgtttatgcttaattttttttttctaagtatttacagaaaacttgttaaattgatacacaaagaggcaagatgcttactacaattacaatgtttctgagtatatagcaataatatatatataataaaaacaaaactgatgcccctacctatcattaatggctcaattgtggcatgcacaatctaacattccatgtgtcacctaattcattaatcttttctaaaaacaataatgtgagacaagccctatacatacatcttgtgttgtgggccctcttattttcaatttttttttagtgtagcgaaataatatttacaatcaattaataatttaatatcttaaaagttttgagtttgaacttataattttttctttttttctgtctccctcaccactaaactagttt

SEQ ID NO: 89690 - DNA, 1413 bp, Cannabis sativa
aacactaatttcattgaacaaaaatttagaaaaaaagaaatcacacgtaaaattattatatatatgtgcatcgatcaatgcatgcatgataagtattaattaaagagaagaactgcccattaatttaatgtttttgaggctaaaaatggtaagcagttttaaaagttggatccacatgttcgatgtcgagtgattgatattttgggaatatcttatatgaagcatgaagaccactaatatttatgaccaatacataaataaaaatggataaaaacttgaaggaagccatcacagggaattaaactaaagattatcattgcaactcaaaatgaatactgcaattcaaagtgaacaggatttatttatttatagataagaataaaatttaaaaatcatcattcaaatttaggtagttattagaatattatttcttttttaatttttattgggaaatgaacgtaaaaagctattcaaaatagaaaaatatgaatttagtttaaccagccaatatttttatttatttattattttaaactttttgaaagttattgtttaatgttaaatttaataataaaaaaaaattgttaaaccaaaaaaatatggttaaataatcacttttaatatataaagatatagacaatatctattatcagaagggataaaagcacattaagcaaaatgactaattaattaatattaataaaattgatgaggattatttattttatttgaaagcatggatattcttaatgaattattaagaaaccatatctattatctatctacatctaccaaaatgaacaatacaacgagatttacaatcaaataaacgaatgatctgagatttttggactcaacttgaaaatatttgcattccattaaagtttggtggttgaacatttaatgagccagcctaaaactaaagtttctagttaagcaataataataataataataaaaaaatagtttctacaagaaattagggtcagacaattatggtatacgttattataaagtatatttatttaaaatgtactactttagcttcttgccagctagcttggttaattattattttaattttttgaagaatgctagcttggttaattataatcctacctattacggccattaaataaaactaatcagcaaaaaataaaaataatctttagaaagatacagattattatcatataatcatttagtagggatgtaaacggaacgggacgggagtggaaattactcccccacatatccattttttgaattcatctcatacctgcttcaatactcatttaaattaaagtagggatatggtagggattattctagggatgtacaaaaaaattcgtaaaccgcccaaaccgaaccgaaaagactgataaaaattacaaaccgaaataactcaaaaaa

SEQ ID NO: 89691 - DNA, 746 bp, Cannabis sativa
tttacatgtaattgagatttatatttatgagaagactataaattaccttagtaaacctgctattgcatagaaattggtaataggaagataatcatattaggccataatcaatagatacacttgaaatcgaaagccccttttattcactgttaatttcttttattaatttccttgcttcttactttagctatttttcttgtttttctaattttaattttctctcttagttttatttagccaaatagaagtaaaaatttaattttaaagtacttaactacaatcctcgtgggatcgacctcacttttgtgagtaatacttgtgtaaaacgatatgtatacttgcgtgttgaaaataccataacaatgagttctttaacttgttcgttaaagctgaccaaaaagatcgttccaatacttacatctttggaactcggtagttcaattgagtgggagcgttaattatagatatggaatatatatagcttctataactaatagaagtaaattaaacgatattttccttagagcttgcctaaacatttttaagtgattgaggtctcattttggtaatattatatttttcgaaatattatttacacgtagctaattgttttaagaataaaatatattgaagggtaaaacgataatttagtctctattcaatgtaagctagaaaaccctaaaagactcactttttctttctctttaattttcaaaaatttagaggctcttttctgttggatttct

SEQ ID NO: 89692 - DNA, 616 bp, Cannabis sativa
aataatcgtaaaaatatttaaaattccgtgtgtgtatttgtgaaataatctcaagttttaatctatatcaatggataattataactacaacaaaaatagacttgccaaaaaatgaagacaaaaatgagcaaattgaatacaaaacagtcaattttaatgacttggacccctacatgtcttcaaaaataaattggtaatttaattttaatatgctaataatattttccttctataccaatttttattaaatttaaaatattttaacattcaaaatgtaaaatattagcgattacaatacaaggcatacaaataaaagatgtaccagcaacatatgaaataaaaagtctttaataaatatatctaattgataagaggtaagaaacaaacttataaatttaaattcctaaataaaattatattgtataaacttatcaaatatttttaatttttagtttcaaggcaatttgtttaatcatgttgccgggtcgcttatcaatgatgaagcacaaaaagtatctaacatgatcgatgaaaaactaatcatacttgcaacaaatatatatgtaaaatcattcaaagataattactacaatccactatattttaatatatatat

SEQ ID NO: 89693 - DNA, 729 bp, Cannabis sativa
aaaaaaaaattacctaataattttttataaacaaagaattcggtcatatatacattttatataaaatagatatatatatattagatttttaattattattttttatatttgtttatataattttattaaaaaatatataaaaattaaattgtataattatttttagacgtcaagtaacattcattcggtataaaaatatacttcttagacttttcaatctaatctaaaatattgacactttacatgattagattgaaatgaattggtcatacaccggccacttgcttatttattatattccttctcatttggacatgcaaaatcaaatgccaatatatcatattaaaattattccactctgaactacatttatacactttttaattcaacgttcaaccacatgatactattttaaatattattattttcttctgaataatttttaactactgctaatttctacgtacgtaggaccctattttctttttctttcttaaaatcttaacatttaattcttttactaattaaatgtgactaacaagaaaaataaataagtatttatgttagtttaactctacgttattatcaattgcaaaaaaaaaaaaaaattaatactatactcttcgatattatagtttcaacttaagatcgagtaataaactgtcaaaaattaaagattaatttatttttgtcttgtaataaatatataatatatcagtatcgaatttt

SEQ ID NO: 89694 - DNA, 786 bp, Cannabis sativa
  modified_base (289)..(291): a, c, t, g, unknown or other
ttcaattattttatctcatggttttaggcataataatgctgataaatgtatatatatgctaagtttaaagattttggttggatcatatgtttatatgatgacatacattgttggaacaaacattcacatactaaaaagatcttggtgagatagatcttaacaagtatataaagttaggattactagttgtctcaaccacactttataggaaaagtgctacttaaattcaaccacttcaaatgtaaagaagcaactgcccgaatgaccacttaggtggcgtttggttggnnntaatgaaatggaatggaatggaatggaaagaattttattccattcctttgtttggttgtattttaaagtgttggaatgtcatttcaatggatgacttttccatcattgtggtgaaatgatttttatgcattttaagtttaattccattctattcatgttctcattctcattcctattcttatgttctcattcattccaaccaaacgtcaccttagtgaaacttccagagaatgatgttcgaacaataacatatcaggaatatgcagtattattggtagtttaatataggttacattaggcaagaatggaattgtgtttgcagtgtgcaaactttcactattgacgagaaacccatgtgttgaacattggacaacacattggaaagcaatagttagagtgcttggttattttataagagccattaatttggttgtcataaaatgattgtatggtagcagttgaagggtacttcaatgctagttggataacaagtgc

SEQ ID NO: 89695 - DNA, 2074 bp, Cannabis sativa
caaactttatatgtatttaagtttcattgttttagatacttgttagtaaatctaggtctaggtaaaatatattccaacagattttccacagggtgcaaaattattcctgttgagttttaggaaaaatggttgattgaatgtgctaaaatgttgagggtaagtgtttaggagctgagaggaactactagtagtgtttcctgttgccatgggattattcccaattgtgctcattgttggagcggttggaaaatcaccttttttcagatgttgctatgggtagagatcgtgagtggctctgataccaagaaagaatttaagaatgacaacaattataaaactcagctcaattatttctgagacaaagtgttctatttatagaacaaattaatacaagagtaaagacaatagccatcgaatttacaacaggtgtttgtgtataattgtacaatgaaataacaagaaagatcttgtactatgttgacagctggtataatggattggtaaggattgtaatcaattttagaatttgtgccaataataaggtgtactaaggtattggaatgaggtgtgactcatgtggtgacctgtcatgataattttgctattcttttacactatatgctgagaaaacggtggtaaggaattaatatgagtaatagatggtgacataggaattgtagctagctctagcaggtatatttcgatttaagagcattgttcatatgatagataatgaagataatgatgcggcagctatatacataaatcccaataaataagcaatactatatgaacatctcaaaagcaatgctattctcctagccatatatagtgggtattttggtggagagagtactaattaaatcagccaaaatatagatcacatcacacatgctactactctggtataggttaataattcactcatataaaagggtaaggcaaagctaacagataaatttttatccatatgatatgattacacttaaaacaaatttaaaataaagaattataaattttgttcaaacatccagacatgccatgtgctagttacaagaaaactcctcttttgccaattgtctatatcctactcctatcaaataataagaagaactattggatttaaagacatagaatatataataatatatataccaatatataattttcacccaggccagcttataaaataatataattatatatatgcatatataacaaatccttatcatttacattattattgactaaattatttgtatcaggcacgactttatagggacataatttgttaaaaggagttcaaaaaaaattatatggaatattaaaatgaaaaatatgaatactgttggtaaactatgtttattttatattatttagttgaacacagataaattataataaaaatttacataaaattattaatatattaaattcattttattaacatggaaatatttggaataacccacatttttttaaaaagatttaaaattatcctcttgtaaggtaatctaattagcagagtaataattttcctagacgtaaaataataaaaaccgaaatagatagattatggaagtaattatatagctgtgttaattgctgaaaataatatataaagggataaataattttctgtttattagatagaatattatttgttgttttgatttttgtctcttaataaatagttttggttctacaaatttactgaaataaatgcatcttcttatatattgttcatgatgattccataaataattaatttgtaataaacatgagtactactactctaaaaatctaatgagaccccacatggatcataacaaacacatcatatatatcaatattgattggtttgttgggttgcttaagattctaagagatattccgtaaacaatacaaatgtaaggagagctggcattattgataaattacatttgcagcagtggaaaatgataaagaaaacactaataatttcagtgattgaacaagagaattacgctactctccatatcattaaaattctttggcattgattccaaatctaatgtatgtattacttagatca

SEQ ID NO: 89696 - DNA, 1104 bp, Cannabis sativa
gtgcagatataacagactaaaaatccactagacattgaatagaacaaacactgtcataaaataaagacactaacattcgcccccttgacaggttatgttcaatgactaacaaacaaaactaaagaccacaaaaaagagttaacatagaccttaactaggaccttgatcgggaccccaacccggccccgaaaaaagacctggactcagactaggacccgaacccagactcaaacctgaacccgtactctgacctaaactcggacccaaacatggaatccaaacccagtctaggatgtgaacccagacttgggactgtaacaagacccaaacctaaacccaatctaagaccagacccataccaggacttgaacccagaccaggacttgtgacctgggagctaaaccaagaccgggacctggacccagaccgggactaagacctaggcccagaccctaaaactggggatgaacccaggacccaagaaccagactcggacctgggacccaaaacccagagctagactgggactgggacgcaaactcgtacccgaacccaaaccgagatgtggactcggactcgacccgaagccgaacccggaccgagacctaggacccgaatatagatgggggacccagacctaagaattgggcgccaaaactaggcctagaacttgggccttagaacttggatctggatcggggacctgaccctagacccaaaccttgacataggacccatctcgggaccttggatccaggactcgatggttggactcgattcgttgtcagtgtctatatctaggacgtagactagaacgtgaacccaaactcaaactcaaatcaggacccaaacccacacttgggaacaaaaaccaaaacttaaacttgaaccggaccgagatcttttaacgggaccgagacctagacccaggcccgaacccggaaccagacccagccttgaaccctacttgagaccgaaacccagaccttaaactcacctcgaacccgtacctcgtgacttgaaactagaattgaaattagaagcggattaggacccaggaacaggaccaggaccaggacatggacccagacccaaaactgtaac

SEQ ID NO: 89697 - DNA, 949 bp, Cannabis sativa
tgaggtatatacataccatatataatacaacaaaagtgataaagatgataataatattatatagatatgtattatccattaactaagctgtaatgctgtatatgatcaccaccatgtataaagagaggtactatttttcttggataccaaacatatataactggaatctttgtacaaatagatggagagtactcagaaacacacagcaccagctggtcaaagagtaaacgtaggccaatgtatgcaatgtcatgtttttttttttattatttttttaattatgtgatgagttcaaagtgatgaacagtcatttggtacaatcttagttgtgaatcattatcatcatcactcccagtctttcttgtatataatattaactatttgtgtatttatttttggacagaatcatgccaagcttcaagttgaaacaccacaagagtgaacatcaaggacttgaatatatttgatatgtcatttgaagggccaaatgccacaagttttacctaacttattaattttgcatatataaattgtcttaaatattatatgatatgtatcaacgttgctttcacttgtaataatgaatagattgcgacatagccaacattgatgaaacagattggacgttcgtacaatgagttgtttgactacttatatggtgtttcctttattaacaaatatataaaaaagaataataataataacgttacacgtattgtttaactaaaaatttgatttattattaatgaggcctaattactgtattaattatttaataaacagtaaattattttgtaattaaaatttatatacttcatgaatttatcttatttttaaagttttttggttgcaaacactataagaaatgtcacttttaccagcacatttcgcaaactgcgttggcaaaaagatcaaagttttaccagcgtatatttgcagtggctaaaat

SEQ ID NO: 89698 - DNA, 774 bp, Cannabis sativa
agatctatctaaatattcaagtcatatgtattaatctaattgttactcaccacctaaagataaactccatttagtagttataaaagcttacacattttaaaatattgacaccacatataagatataagttatattttaatgtctttagagcctcatccatggttaataagggtcatggcaaactctatcttggtagcctcatccatatttttcaaagcactcacattccatggttgttcagcaaatatctttagagctttgatttgatcagcaacatggaggttcatctttgtgatctcttcccaaacagagtcatacatcttgttattatctctattttttagcgtttcaatgagcaacttcgtttcctcatgtgatttctccatcatattatccaaagactttgctagattttctaacccaacacaaatatctgaacctggtctagctctcttctttcttccagattgggattgattaccacttgattggttgacagacattggggaaaatgatgattcttcttgcatttcattgccatcataatcatcttcaagatcgactgctttagccatatcagctggagtttcaccggcttttccagttgcacgatctgctccaaagatattagccaatctgtcatagataggaaattgtttacccctccatccgtcagcttctttgtgactctgaaataataagtgatgaattagaatgtagtgtattagtattcatcaatttgaaaccaactaaacaaatttaatataagtacct

SEQ ID NO: 89699 - DNA, 758 bp, Cannabis sativa
ccaaaccacacaaatcgcccgcaccgcaccacactacataaaaatgtagtttaaagttttttgtggtgcgattgcagtttgcattttttccaaactgcatggtgcggtttagtttgcggttttgaatttaataattgtggttcaaaccgcaccgcactatacattacaaagttaccaatttttataatatgatttttatttttttcatataaaaacaaatatatataatatatgtattattactttattttgtagagacagttcaatataataacttaatgattattatacatgttatgatgttaaaactttaataagaattttttgttttgtgttgttaaaactttattagtttgatttttaaattttcattatgatgtttaataattatgatagtgtaaaccgctcaaaccgcaccgcaccacaccgtattttcgcagtgtggttttgttaattttaagatctcgtagtgcaattgtggtttgagaaattataaaaactgcatatgcgatttggtttgaaaaaatggctacaactcgcactacgaacacccctaatacctgtcactagtatcaaatgtcactattgttgtcataccagacaacccagagacctagccactagtatccaatgtcactatcgttacctataaaggataaccgacaagtaagaaactaaacagtggtttcaatttatagtcattccacttcatcattgtttatcaagacaatctttaataaaataaccttttcatcatt

SEQ ID NO: 89700 - DNA, 792 bp, Cannabis sativa
tagattgttatggagtatggactttataagaattgttatgaaattttcatggactattattatgccttgttatggagtttataaagattgatatgaaatttttaaggatttttatgcattgttattaacaggtacaaatttttggttgaatatttttttccttgtgacaatatactttggaagttttgattttaagcaacccaaaccgctcgaaaaactgcctaaaactgccccctaaaaaactgcccaacccaaactttagagggcaggtatgggttgtgattttgaaaaactgccaaataaaaaactgccaaatagcccaagaaccgcctaacccaatccacgtgcagccctatctataccaggttttcaaaagttcctttattgagtaattcccaatcattggactcaaaggttaaatagcactgccaattattggtagcgtgtagcaagcagagttgtgagccttctgtgtcagcttcaatgggcaaggggcaagagggctcgaggaagaccatctctgggcaagaaccagagaatttcacctagtgtacaaacccaaggggttgttcattggcgctcacaacagtaggtgcagccttttctggagactttgtaggctcgatggtgagctggtttaaagatttcttcttattcacaattgtttttgttcttttgggttctttggtagaacctgaggcttcattcgcctgtgttgcacgttttttggatcttttgtttacaagattggggctgagcatgtcttccaaattgagatccatatctacgagg

SEQ ID NO: 89701 - DNA, 768 bp, Cannabis sativa
actaatctattagtttagaaaaagtggtttaattaaaaactattgattaagttgaaataaaactttcatattaaatataccataatacaaggatcccctgtttatacaattcttttacaataggttacaaaaatcattgtttcaaaaataaggtcacattcccaaatatagaaaataggttgatcctgcttcctggaagtcaagacaccatgactgatatgtacattactgggagacctcaggctcatggatgaacacaattgctttccttcttacctgcaccacaaagcatccgtgagtcacaatgactcagcaagaaaagctactagatcataagcattggaatacaagtattcaaatcataacataataaacatactcgtgattcaatacctattaagcatgcatatttaattagcgtcaatactaacccataaacttcacattataagaaaatcgtagtaactcataatcaatagttttatcctttcaccaaatagacattcattcagcatatagccacacaatctcagtgctttgtaaagcactctaactatacatcaccataaacacatagtttcaatgcttcataaagcactgtaactgtacattaccataaacacatagtttcaatctttcattaagcactctaaccacatattctcaaagcttaataaagctcccctaccactcgttattcatgagctgtgtatgtcactattgttgcccgataaagtgaacgataagtaagaaacctatctacggttt

SEQ ID NO: 89702 - DNA, 753 bp, Cannabis sativa
tatttacaaagatttcatagaattgttttaggatagtttgagaatagacaactttaagagcaacccaaacatttgggaaagagtaaaatcaaccgcacctgttaccaatataattttagctctcaaaataagcctttcatgtctacctccaatataattgcatcagagtacatattttttattgaatatagttttatgggcaatatgtataattgaatatactactgcatattatttatagtaaaatatattaaggatagaagataaaaaaactctttatatattaattactgtagccgttactaattcttttattgtatttatgatattttaacagatttcagtcataatttatacactgagtatagtaacgtatgatattttatcagatttcagtcataatttatatactgagtgtagtaacatttgtcatagagtatattacattaatatagtgagtaccacaaattaatcaaaatttaaaaattaagaaaaatgagagagcaaagaataggaaaagaaggttattggtgatgccacctcacataccttaacaacagcattatataagtatatagatgtataccccttagcgagagcttctccaccaacccttgatcttaccaagactttttcataaataatctaatggatactaaggcttgagggatgtgatttctaaaaataaagggagggattacataagtccccctttaatgaaatagttttctttcaaaagtttttttttttttt

SEQ ID NO: 89703 - DNA, 695 bp, Cannabis sativa
acaataccaaaacaatttacatacatattaatttatgccacccatccgaccgcagtatatttttcacagaacctacttcattatggatgaatatataagatattcaagctgtactaatatgcattttcaaataattttttttttaatattataaataatataacatagacatactaaccttccaatattccgagaagtgatttttgccaaacaccgaaaaaaggaatactacaaaacctatttaccaaaaaaataaatattaactaaataaaattaaaagtacagaactataggtaatatatacattgagatatacacatatatatatatatacacaaatatatacttttacatatatatacatatatatacacacaaatatatatttacctatatatctttatatatacatatatatacacaccaatatatttttacatacaattacatatacacatatagcaatacttttacatatgtatacatctacacacatatatatacttatacacacatatttatacaaatacacacatatatatatacatttacatatatatatacacacatatttatacatatgcatatatagatacatacatttacacatatatacaaatacacatatataaactattatacacatttatatacacatatacacacaaatttctaaaaatacacataaaactata

SEQ ID NO: 89704 - DNA, 988 bp, Cannabis sativa
ttacaataataatatgtagataataattgaattggtgataatagaatatgaaccatcttttgagctatttaacttctcattatcactaattttttcctctatatatataggttctcaccatctaatttcttgcaaaaaaaaattagaaaaaattcatcttttgttaattagcatattatcttctaactaattcggcagacgcactaacaattatggagatgataatggtcaatgttgaatcaagataaatttatattggtatgtatgttttggtgtataatggaagagttttgttcattagttttgaatttgatgtaaaattttagatattgtaactaagtaatatataaaaatatatatatatacatttagttttcatgttctcatccagtaaaagaggtcatacatttcttgaaaataaaaaaaaatatatatatattttaatatatttcgttgatattcgacacttgatgtcttgatatttttcttgacatttatttattttaattatgtaaaagtgtttagaattatttttatgatataattgttactttcatttatttatctatatttaaatatatatataatattatgattatgatgctatgatctttttgtcctaatcttttttttttcttttctcttatttcattagaattttatttaatttatctctaaaaaagattaataataattactctcatttaattagtttttagtttctctcataaaatatcattaactggagagtcaattttattactataacgtttttctaatagatttgtgtatttatgtattttatttgtcaaattttaatgttttgatttttataaaaatttatacgttacatttatatataaaatcatttagaaacagaaaaataattaacttagaaaattaatataattttttaaaattaattataaattatttgttaaccattaaccttattattattattattattatttgaataaacttctta

SEQ ID NO: 89705 - DNA, 603 bp, Cannabis sativa
aatgtgacccgaaacttaggctaaaaatagcctaacagttctccggtcaaatagctccatgcattaggacacattcgtctcccattcactataggaaagtctgatgatcgacatggtgatgtcccaacttttagtgattgatgtcccatttgctttccatgtcatgacaggcttgagattttgtgccctaaacaatatctaatttaatgtaacatatttactttcaataaagatcaggaatcataccacgactttgtcatattctttgttcacatgtttatatgtctttaatatataagttctattaagttccaaacatatagttactcacaattacagtgatgtcatcacaatggaagtaattgtgattatatgcttcagattatttagtcccacgatatatttatcagtgcactggatttacactaacgtgataatcaacgataaggtttatgtatacttgtgtaagtggaatatcttttccaagacattagtaaagtaaatcaggatcagatgtattagctatacatcagactgaatcgatattaacagtggaaaagatatcataaacttaccattatatctttgttggaaattatttta

SEQ ID NO: 89706 - DNA, 759 bp, Cannabis sativa
tgaacgtccctgaagctattttgaagtaccattgttgggtgacctatgctaatgtagctgggaagattctgcactatacattacctttcaccccttgcaagtccatttgtatctcaaagtatttcaggtgagatagatgatcttcttttcctgtatacatcttccatgctggcattttgaacttggggggtaggttgagagcattgaattctggtgagaacaatgatcctcttgcccgatcaagtttaagatatatgagttttgggccggtcaggccttttacgatgctcttaagccgatctatttgtgcttgcacaagtggatgaacttggccagcctgttgaccgacctgcgtcacattaggatctcttagaattggacttgagacataattgttcactttatttggctagatgataggaggaacattttgttagtccagtcttcttctgtggttcaaattgtttctaaggtcgtgtacggtatctagtcggtcaaacactgatgtgcaaggggtctttgtatttgaccaacttggttgataggttggtctaatacctccgcctgagtatggttgtttagctgactacctcctcccaaggggaagtctggtaagatctgcccatctatcgtttggtccataatttaaacctgtgaccttggattggacgattgatcgatataagtctgtatagcatgaccaattacatactcttacgacccattctgagatcacaaggggatgctagaatcagtcat

SEQ ID NO: 89707 - DNA, 718 bp, Cannabis sativa
ttctctggtttatgtttactgatacttaatcaccaagcatttcaataaaaatatcttcgactccgaatagtactctgcatcattgtttcatgataattcatcttacaaattatatatctctactattatataaatatcaataagctggtgcactgtcttgtattgtcattttcttaatatcatacaaataaattaatagatagagttagacttcattaaatgtaaacatatcttcctcaagttctatgtattttgagcgtactgccgtacttgcttaaaattctaactgctctaaacatacatatatttctcaagttctatatcgataaatatccattccacagaacccaactcatttaattgaattcaattatcaaaaatcaagtatctaattatagttaattaaattcaattaaatgttaaaatttagattctaattaaatttaaccactcagaatgttttattcttaaaattcaattaaaaactaatctaatctaattatatttataatttaaaaaaattatttatatttttctatgtataattaaaaatatatatttagttatacttttagtagtttttttagtgtgaatcgaaattgtaatatttcgttgttttatatatttgttttcataatattttattctatttcattacttagtagtattcactactacaatacaaatctttaaaggtagtttttttttcttcaacaaa

SEQ ID NO: 89708 - DNA, 989 bp, Cannabis sativa
tctatcattcccttgccgtttattattccatgttaaggaactcccactgaatttaatgtcttctaattggcagtagttcacacagtcaatgaagtttgttgctgcattatatgttactctcttgcgaattctttcttccttattcaatatatcattgaagtctcccaaaatcatcaatgaatcttgagtagctattgtctttaaatctgaccagagtatgtttctcccttccaggtcattgaaagaataaacaaaggtaacaaaaagcatgtgcttaccatctaaggttgagacatatagatgaataagttaactagtacaattgagaatgcttacagtgaaactagaagggttccaggccactattattcttcctccttcatgccatgcaatatttgaagtgaaacaccatcctcaaaacatatttacatataagaccccaagcttttgggccttaactctcgtctcgagaagaccaacaagcccaaccttgtgaacatttatcatgttctttacttggtttggtttgtgttggttattgatccctcgaacgttccagcttacaattttatctattccgaagaggaggaactccccctcctcttgttttctctattgtaggtaacacattaggtcctcttgtgggtgactctgtctgtttatgagaaatttctgctatgtcctttgtcccatcatttacacaatcaagtatttcggttacgacattaaacgaattgcataattgtgtctcactcattatatctttgccttttccttttctacctttactaaatttttcaaaaccttccttatttataactttttcttcttctgcaccaggtggtttaccctctttttgaccttccacagttgtttctttccttccttctttcgatggtccgttattgcgtgtcccaagcctttatagtgattacaaagtagcggtttccattcataagtaacataggctatcacattgtaaccatgtt

SEQ ID NO: 89709 - DNA, 513 bp, Cannabis sativa
gctaaagtcatcgtccaaaaccactagaagttaatttggaaaaattgtaactataagatgattactctgtctagagtataactttattggaagcttaccaaagccctcttgcactctgcagtaggcttcggactttactgggttgcaaaggtcaccattttgcattccactacattcgtgtatcgctatggcggataacagcctcagccatcttttcgaagattccgttcagattactactgaagacttaacatgccgtcttgacccaggggaaactgaagttcaggaacctcaaggaaatgtgcttgggaaaacttatatgcaaaggcaaacttggtcgtaaagcgattgctggaactttaaaaaaagcctgggcatctttcaaagggtggagctggaaagaggatgatgaagggatcatacacttcacttttgcaactaatgaagacgcctggaatgttcttaacagacgcccttggattatctgccgggcgttattggtcattatgcctt

SEQ ID NO: 89710 - DNA, 720 bp, Cannabis sativa
tttctggcaagtaaacaaattaacttttgtatgtaaattagattttcatcacctttgatccaacaataacttgagattttccttttagataatctaacctgattttgttatggtttttaatgttctttctttcaaagatttgtagtataaacccaaaatttgtattattgctttctttggaagaagattcttcaaggactggacatacataagtagaacctattttgattttcatattttttgttggtattaatgacttgcttgttcatttactaatacaaagtaagaaaaatcccataactgagattcttgtagctaatgatctaagtgtgacaatctcgcttcaatctacatacattcacccttattggacacattgttattatttgtgtgtaatatagaaataaattacattacatattgaaactattttgttagaactactgctaatattattctcggactaggatatgccttgcagctgccattattgtattggtactgcaatagttactacatgaatgaaatggatgtagttttctcttacaagaagctattttgtaaaataaatacaactctaagcttagttttatttttcataaggttttttatattgaaattttaactaataattcttttcttctgatttaagatgatattttttcattcattttcgttacataatatttcctttaaatttttcaaaacgcatatattgat

SEQ ID NO: 89711 - DNA, 812 bp, Cannabis sativa
atatatatatatattaaaaagttaccaattaaatacaacgtgagttggttgccctttttttttcacaattttacccttcaattcattttagtaataggatattatagtttgactttaaaaattaatttaataattgtaattgtgtcgagggatgtcacacctcataaggaatgtgatggattaaataattagccattatttaatccctcattcactttttgagggattaaacacctctagtatttggtggctattgatttagtattacctttttgtgttgactaaatgtatgggttgagatttttacaagtagtagtgggagtaatcaatttggcgaaaatttgctaccagcaatgttatatgttcccttgtactttttattttattttatttatttatttatttatttaatgtgtatatttggtaaagtagttgtttgtgaatgttcatttttgctcaaaaaataaaaattgtgtttttgagtagcgcacattggtgagtgtagtaagtaaaatagcgcattgttaataagaatttgatctactctataaaggagtgtaatttacaacatatatttattttcatatgaattattatttcacactattgtatgcgactgtgagtacgaaattaaatttctattcgatataaaatgtgtctatataatagaattttcggtttatgaaaaattagccaatataactgctcttcgcgcgactaatttaattttttttggtattataataaaaaataattatttattaatttaataaataattacttaaaaatataattcttatatataataaaat

SEQ ID NO: 89712 - DNA, 966 bp, Cannabis sativa
gatgcacttatcatacagtaaagaattcagtatccctagatgagtaatacattagaaaatgatgttgcataatgttttatgaacacaaaggaagtaatggtggagatagaagttgcttaccacaagcgttacagttcttgttatttggttttagtcaaacaccctacacttgatatggatatcaagacaatggattgattgaaatgcacttctagttttatgttagtgcaagtggtatggagctttaacttgtttgtttaaataccgagctactttttgctgatgggctatcagttttacgtttgctgtggttcgcttctcttcaatttcatcaagtgattcagcaaggagtacatgattggcctctatgctatatgtcaatcttctgtgggatggtggtttgagttttacaggaagcatagcttcatatccataagccatggcgaatggagcctgtccggttgttgttttctcagttgttcagtatgaccatagaacttcaggaagttcctccagccagtttcctttagcatcctcaagtcttttctttagggtatccttcaatgtcttgttgactgcttcaacttgaccatttgcttggggatgtactactgtggagaaacttttgatgatagcatggtttgtacaaaaatctaaaatgattggctatcaaactgcttgccattgtccaagactattttgcatggaaattcgaaccgaaaaattatgttcttcacaatgaagtcttgcacttttttggacgtgatggttgctaatggttcggcttcagtccacttggtgaagtaatcaaccacgaccacagcataatacacgccacctttacccttgggtaattgtccgatcaggtcaattccccaaatggaaaaaggccaagaactttgcatctgagttaacttgtggggcggtgctcaaggtatcttcaaaaatctctggcatttatcacat

SEQ ID NO: 89713 - DNA, 588 bp, Cannabis sativa
ttaatgagtcttagtccacaagtccgtctattagtctcaaagggggtgtttgatgtttttacagtattaatgcaagaaaccctaactctgtactttttgtttctcttgaggaagaggaaagcttagagctatttttgtagagtttcaactatcttggttgtcctcccccttcgtatggaaatagaaagatatttataggctaaagggcatgtatggacatgctcatgacctgcctagtgtttttgcaaaaattccactaatggttggggtaaaatacatgcaaaaggagctaactgttaggccccttggaaggatttgtgctcgtgtgttgaagcagctagacaataggtgatatctcctcattttttgggatattaacctactttggcttagatcttctttaagctctctcatatataagagcactaggctaaacctaaagggcttagttctcattcctaagctcttgagttcaaatatttaaaaccctagcctctctctcctacacgccactagcagtgtagtagagactcagtcttcctcatctcatttacttgagatctgccttacattctcactattgtaatt

SEQ ID NO: 89714 - DNA, 687 bp, Cannabis sativa
  modified_base (332)..(346): a, c, t, g, unknown or other
agatacatcatatataactctttttgataatcccccttctcccacaattttctttttcataaataatatgggcttttgggacttaaagaaactaggtagtgtttggttggaaggaatgaaaatatagaaataagaatacgaaacagaatatgaataggaatggaatagaataaactttaaaatgcataaaaaaaattgataaaaaaattattaaattttttctcttgttaccttgaaatggttttttctttctttttaaaatggaataatcattccaccaaaatggtagaaagagcatttcattaatttgtcattccaatactttaaaatgnnnnnnnnnnnnnnnatagaatgaaaattgtttcctttccatttcattacctccaaccaaacgccatttaagttattattttcataaagagcaagtgtcaaaaattatttctattcccttgtcaaacactaaccaacctgatgaacaaatggcaggaaaataaacaagtgaattcaacaagagatcaacatttttggcagccaccaaatattggaggtctaaaactcaacatggatgcagctatgtacaaacaaaagaattcttttgtttgttggagttgctgttagaaatcataaaggggaagccattgctggtttggctaactatttaccagggacatattcctcaacaaatgc

SEQ ID NO: 89715 - DNA, 573 bp, Cannabis sativa
gttttactggtgttttataaaaacacagtatttttgaaaaaaatttcgtataacaaatattttgtaaacgttaacctaaatttcagtatttttataaatttctctagttttattgttacttagttttttatcacgagttacattttgcatttctctttcctttttgatcattttgttgtggtttattttatctttttattctatagagtcttagagcactcttaatagctcttctatttatttttaaaatacatcactattttttttttcttttaatttcacatcaaatttttacatttctccatatatcaactttactacttttttctctccataccattaaatattatatttaaaactttttattcattaaaataataataataaagacataaagtaagaaatagaaacaaaatattattacctttagaaaaaaataaggtgaaagataaatattaaaaaaagtttacagaagttttagagcatgtttgacattgttttctgtttttcgttttcaaaaaattgtttttagaaatgagaacaaaaaacactttttgaagtttttaaaacaca

SEQ ID NO: 89716 - DNA, 1056 bp, Cannabis sativa
gtaaccacgtgttattcttaaaaattacggacaacaatataataagatcatctctaataaaagtacattctctactgttgccaaaaatgtacacattataataaaatattatttttaaattttctcatttatttacatacgatttaacaactttttatacaaaagtgctccaatgatagacaatttaaattaaaatcataaaaaaaaaaaaatcaaaagataataacaggaacgttgtcctaacaacaaccaatttaattgtagctctcttctcttaaaaattaaactaaattgataaggtcgactctaaattaaggtaagttcggcctgtgtctagagctcacttatctcaggagcccacatttttttttctttttaaaattatatttttttttatttattttaaaaaaaccacatatttatcaaaataagggttcaaaaatatttttttttctttgaccttctaaattttaggatcagctttactatgcctatagcccatccatcttagggccccaaataaaaaaatatctttttttaaaaaatacatatatattttttgattatttttaaaaatactatttatttttataataagggtccaaagtccattacaaagctcaacgataagcataaactaatcaatatcgacaaaggcgagcaaacgacaacaaggctaacagattgacaaatcgagacacatatgtctatcgtagtcacggtcaatttcaagtaccatacataccaccataaatagaaggtaaagaactaaaataaggatacaaaccccaaaatctctaacaagagaaaatccatagctggactgaaaaaccaaagaaaaaaataacaaatctaaaaaaagatctaaaacaaaataataacaaaaaaaataaaaacatgaccatagagcccaaacgaacgggagaagaagagtcatcctgccaccagcaagctcttggcactggagggaacgcagaattggactactgtaacgccccgatattttgccttattttacaaaaatactattttcatgcataatttgaaaagataaaa

SEQ ID NO: 89717 - DNA, 655 bp, Cannabis sativa
gaagacttatgaataaactaagctgttcatgtactaggcgagacacctcagcgagatatatttggcagcgtgtcctaatccatgtcagcgttgacttcctcaaaaatagattaaatcacatatgtgtgattttcaaatagtcactgcatttatttacgtggagcgtaattgaagcccacaatttcagggaatattattataggatttgaacttaaatgtaattaactgccaacctgtattactataaatatgggcagattatacagaaaaaagggaggaaaacctttagagaaaaagaaagatactaaagatcctaattcaataatcagaaatatcttaataagatagactcgtggactatgcagagttaactgcaaaaccacgtaaaaaaacctagtgttatttttgtttctatcagtttttcttagatctattataatttctgtgccaaatcaattatgaaaataggctcataatcattaacgaaaatctacgttaacagatagatatataaatatatagattaattaagcattaagcattttatatattataaagctaatgaaaaatttaaaaaaatagagaattaaggagaaaataaatagaggtatttggagtgattttagagtgacatatctgttggaattattttacc

SEQ ID NO: 89718 - DNA, 558 bp, Cannabis sativa
tcattccaccaaaatagtagaaatgtcttcaatactttaatataaaaccaaacaaaggaattgaatgaaaattgtttcttttccattccattctattcaatttcattacctccaaccaaacgccacctaaatataggaataggaatagaaatagaaataaaataaaatttaaaatgtataaaaaaaattgataaaaaaaattattaaattttttcttattatgcattggaatgatctttctttatatttcaaaatgaaatagtcattccactaagtacaaaggtcactccattagaatgacattcatatactctaacatgcaaccaaataaaggaatagaatgaaaattgtttttttttttcattctattccattttattatctctaaccaaacgccgcctaaatatttatgtgagggaggaaataacttttcggacaaaatttattgaccttctttaagcttttgagagatcttcttctcttctttgtactcatatattgtattattattgtaaagagttataatctcttcttattctttccatgtaatcttgttct

SEQ ID NO: 89719 - DNA, 1036 bp, Cannabis sativa
  modified_base (478)..(478): a, c, t, g, unknown or other
gtctggttccatgtttgggtctgagttcaggtttgggttcggttcctgagtctagggttctgttggaatccgcatccggctccttattctcgtctaggtccgatttggagtctgggtcttggtcgggttacggttctggatttaggtccaattttagttatgattccaagtccaagtcctagttccagtctcggtcaacttccagttttggttccaattttgtgtcacatggtacaggttcaagtccacttttgggtttgggactgggttcaggtccgggtgtggcttcgggtccttgtcagggttcgggtcaagggcagggtcccaaatccagacccactacgggtttttatccaagcccttgttccagatcgagatcccgatctcgggtcccaatctagttcaatttctggtgcaacgtcacaaggtgggtcctaggttaaatttcgggtcggggtcgggtactaggtcccggtcntagttctgtttcccaggtgcctatcctgattctgagtccacgtcccagttattgtgtgggtttgggtcccggtctaggttatggcgcgagtgctaatctcggttcaggtttaggtctctgtctcggttttgatctgggtgcggcttttggtttagttcctagtcctggtcctagtcctagttcggttctagttccattcgcgattctgagttcgagttttggtttgagttcgggtcagagttcgagtcctgttctgagtttgggttcgggtcaggatctcagtctaggtccagatcaggctcttggtttgggttcgcgtcctaggtcctggtctaggttacgttcgagtcccaagttccattcccgatctgagtctagattgagttttgggtctaagtccttggtctcgatcctggtctgggttcgagtttgggtctgggtctagctttgggtctaattctaggtgtgggttttatttcgcgtttgagtctgtgtccttgtttgtgtccatgtctagaccctgatctgggtctaggttcgggtccaggtccaagttgg

SEQ ID NO: 89720 - DNA, 717 bp, Cannabis sativa
cttaacaattgggcaatctgggaacagattcccaatgctacattatgtcatggtcctatggaggtgatgtgcttgtcctttcatggtgtttcttaattattattattattaataatttaatcttttggttccataacttgtattatagtgcaaaccatagatctattcaagtaatgtaaattttgattaagaaaaaaagttactaagtttggtttaaattccttttacattaaaaaaaacgaattacgaagtttcagtacaaataataatatgggtaagtactattttaaatcttgtattttacaaacgttattaaatggatattctattttgttaaatgagaaaatggactttatatgtttcaaaatagtaaaaataagacattaagttcaatttttaataattttattttttaatataaccaattttaaggcaatttctaacacggacagatacagaaaatgtaacaagttttatcataacatctctagatcggattatttttaaattttattttaacaaaaaatcagttcagggtcctatttgtacaatttcgaaaaatacaaaatctattttatcatttaacaaaacagagagtttaattagtaatttttacaaaacacaaggtttaaaatgatatttaccctaataatatagtaaaaaagtatctttcaaataattaagttttaactaaataaaagaaataattctataata

SEQ ID NO: 89721 - DNA, 856 bp, Cannabis sativa
tagattgaaggtaagtttccattctaatttttcaataaggaaaatctactccattaaagtatggtgctttatttgtgttaaaaccttcaaacatgttattttatgaattacttggaaacgccacactctagattatgaaatctaatcaaataaattaagcctttgctctgataccaattattagtccaagatatgtttccaagagggtgtgaattggaaatttaaactaatttcggtaaattaaaacttttaatacaaaactaagcaattaaacacttcattaaataaatacaagtaatatgacaagcaataatgatagcaaataatcaaacttgtaaagtaaagagtttaagggtaagaaattacaaactctcaatttttacaaggttcggtagagctaagccaccttcaaagctatggacctagctttaagttccaatatcgagccaagttaatgggcttgactaacccttacaaccgagaaattttcacctaggtatattttccaaacctcatacaatgatttgcaccgccaaggactattaacctctttcttggattgttgtagtgacaatctcactataactgagttgtttacaatactggtgccaacctcacctcaatcacaatataaaaatatatttgaaattacaagtaaattcactctagaagtatgatgatacaatagaaacttagagtgataagcaagcacacttgaaatgaatatacacaaattttggttcaaagtgtgtgtaaagtgtttgttaaattttaaacttgggagctcattaatctcacttgaatagattaggtatatgatataaatgctgaaccaactacaatttttgagtaaaaa

SEQ ID NO: 89722 - DNA, 637 bp, Cannabis sativa
ttttttgactaaatttatgttgtgactaaaagattattactaaatgtagtcagttttcgtagtgttaaagtttaattatgaaaatttaaattatttacgttttttcataaactttttgattagcaaaagagtacacggtgttaagaaattacaataacatagttaagttaatagagtgttaaggtaggagtgtacatcggttggtttagtcgggttgtagtgtatttttactaacctaatataaatgtcgggttgcaaatatttaattgtaacctgtccaatgaaaaaaaaaaaaaagtgtaacccgtccaatgattttcgtcagtttggtcgggttaacccgtttaaaccgaattttattttttattttttcattatcgttagtttttgatattcaaataattgatttgaaaaaataaatgtatagtatagaccttttaagattaaaatggttatagtttaaattaaatttaaaaagtaaatacaaattgaataaaaattaaaatattaaataacatttttcaaaaaatagaataaaaaaaatatactcatatgtaaattctaactttcaaattaaacacaataaaatataaatttaaatgtatagttgaagtattaaacgtaatttatatattat

SEQ ID NO: 89723 - DNA, 556 bp, Cannabis sativa
tatatttgtagtttttgaaattggtttttgtaggtgttttatgattgttcaatttcttagttggttgtagtaaataactattttttgtaattgaatattatatttttttattattttaagaaattagtttcattgttcatatttcttactaccagataaacgtaactggtttctattagttagattgcaatgtctaactccggtgacaactctagcatcaaactccggtgataactctagcatcaaactccggtgacggtgacaacttcgacgaatttttcgatgattttttcagtgacaatgctaattctttgacgaattttttcggtacctgcaacaactccagtgacttttccagcaacgtcaactcaggcgagttttctcggcactgttagcaactctggcggcttttctgtcacgatcagcatcttcgatgactttttcggtaccgacatctaacttcgacgactttttcggcaccagtgacaactccggcaattactgtagtttcatttgttttatttatttttcttaaaaaaaaagagaaattactcca

SEQ ID NO: 89724 - DNA, 601 bp, Cannabis sativa
acttgacaaaatacttgtgtacatatatcaaatatattgactcgtggactagaggttattaatccttgaaccacgtaaaaactcttatctcattctttgtttttaatctatttctttagttttaatatattttatattagttttcgaaaatcttggtaaatattttggtacttttaatgagagctgaagaaagagttggtatcaaagttgtatactgcaacaaagaccacagttgggaaatctaccattcgtgatggggacactcccatggatgacgtgaatcctcctattgtacaatgaggtgttttaggagatacatttgaagtgactagccatcctacaaagaaactcaacataacgaaaaatatattgatgaaaattccaccaacgaagatgacctagaagacccagaagatgactcagaaggtgacagtgacaataaagaaggggaagggtattacaatgagctagaccctgaagtcatttgaataactaaagaacttgctaaaaccaaaaagaagttggaaaattaggaagaattatctcgtcaaatgtgagaaactctagcacgattaaaggtcataattgaatcaggggaact

SEQ ID NO: 89725 - DNA, 713 bp, Cannabis sativa
tcttgatagttctttgtgttctgttgtttggtttcggagggttcacaaccaggtagcacatgttcttgctaattagggagtgtcccatttcagatgtggttttgtttccttttgggaggtgaatccccttgtgatcaccaggattctaaatttactttaatgaattataggtttattcagcaaaaaaaaaaagctccaaatatgcaatttttctaaatggtctaatgagtcttatgagctctggtgagggacaaagctaaactcgcaagtgcgagagaaagatgatggtggtgtgttgtcgagtttgataggcatttagggttttttgagtattgagagagtgggtgtttattaataattagtagggtatttttttttttttgaaagcaaaaaatagaacttttattaatttactaaatcagccaaaagacaagattgtacctcaacaggaacatcacccttgttgagcaatcgaactggaaaagaacaagatgctttagcaagactatgagcaaccgtgttagcagatcgtttaataaaaaataagaaaatattatttaaatatgcaagaagtttacgaaaatcttttataatagccataaaagaagaaagtataagtaatgaattttgaatagcttgtactgctaccaagaaacctaactctagctccactttctgccttggttgaattttaatccaacttagcacttcct

SEQ ID NO: 89726 - DNA, 1537 bp, Cannabis sativa
acagcagccgaagtcaagtggctcaaatctgttttgattgagttacaggtgcaactctcagctactcccattatatgggttgataatcaaagtgcagcctctcttgctgcaaatccggtgtttcacgcaaggtcaaagcatatagaaattgatcttcactttgtgagagatcaaattttagctaaagagattgaggttcgatatgtcccttctgcagatcaaacagcagacattctcacaaaagctctctccacagatcgcttcctctatctcaaagccaagctcaaagtctgttccactccctttcgcttgaggggggatgataaataacagttttttcagctttctgttattggttttctgttaaagaattagttatttcttttcttgccacttgtactctgttcaacagagtttgttattttctggtttgaaccttctgtatcattcttactgctatataatgaaaaggttcagctctttgtttagcagagcttttacaattctttgtgtccaatctttgttgttccagttaggaattgtattgataagcttctctttcaggcccgaagagagcttagtccaaccctccaccaacaaactagcagaattacgagcaacaatgcccgaaccaaaactcctaccaccttcaaacaacgcaacattcacattaaccttgatactatttgcttgtggcaaagtccaatgcttaacacaatcaaaggcccaaataaaaggccatgacaaatccatacattttttagcacatttccattgatcaagatactggtatgcgaatgcaactatgtccccgttcacaaaagctttccccttccaaaccaagtttttcttagccccccaaactgcccaacaaattgctgcaactctacaatttgcttctgcagaattattgcagaaaaaactcgagcaccagtcaaaaaaactggcccctacaggtacctcagtaccatcacaacacttcttaggactcactacaggttaccaagacatgcaagattgactcctcttcaatgcagcagagaggacacaaagaactcacagctacatgtttggtacataattgtctcattgttggcaaacagttggtacatgcatgccagaccagattttggatcaaacgccacagagtatacgccaaagagagttatctgagtcatcaaaccagtgtcttttataagagatcattcaaaatctcatcatcccaaacgagttcacctgatctcattaagctacaaacccaagcgtcctgaaaatccgaaatgattcgagttaaccattgggctttcatcaagatgttacaaccaagatatttaagtacaaatcatattgaattctagtttcaaattgaaatgcatacgtactgatgtatgattctttgtagaaaatgcaataaagagcattgttctaaatttgattttaggataaaaaaataaagggcttttttgtacaccaaaaacaacataattacaaaaaatgtgcaaaaaaaattattttaaaatcttatatattttgaaaa

SEQ ID NO: 89727 - DNA, 1308 bp, Cannabis sativa
aactgtatcaaactggcccttagttgcacgagtttttcgacacactatataaagtaagcttatttgtactgcaggtccctaaactatatatatatatatattttttggcaagttagtccttaaactttattttttggtaatttggtctgcaaattatataagttttggcaatttagtcctcaaactttattttttgacaaaattagtccctaaacttttattttcttggaaacataaagttatcactcttaaatgatgatattttatttatttattcttttttttttattaattttaaaaagttttatattaatgttttatcaaattaaataaatatattctttatttatatgtattttttttcaaatatgctaaaataaaaagaaaagaacaactgaaaaagcttaaataataatattattaatttttataaactattaaaataaaattacttttaacatatactcagcggggaacccatgaaattttatcagcgttgttgcaaaatttaaataattaataaatatatatatatatatacaattaaaaaattataaaaattataatactacatattcataaatcaatattaataaaataaattataaatgctaaaatataaaaatatgaggggggttagaattctccctagccattatatgagtcccctagtgtttatactcttttttcttattaataatatatatggataaaatatatattaaatattttaataaatattacaattatataatgaatactttaaaataaaaataaaaatattaatataattatttttatcaaaatatttaaattaaaaaaatatgaaattatttgaatttaacataaaaaaatatatattaaagaataaaaatgttaatatctaagagtggagacttaatgttgctaaaaaataaaagtttgggaactaatttactaaaaaataaaatttaggggacaataaaatttggggaccaacttactaaaacttatatagtttaggaacttgcaatagaatcaaaccatatatattataatgaatacttaaaaataaaaataaaaaatattaatataattattttaataaagtattaaaattaaaagtaaaattatttgaatttaatacaaaaaaaatatattaaaatttataaaataaacaaaaatcaataaaaaccaataaaaatattaatatctaagagtgaggacttaatatagctaaaagaaataaaaatttagggacttatttactaaaaaaataaaattttaggactactttgtcaaaatttatataatttagggactaattta

SEQ ID NO: 89728 - DNA, 654 bp, Cannabis sativa
tattcacttaaatacaatgctacataaagtacattgttatataatgaatatatcgtaatacatagaagacaatactcatcatataatgaggacctattgctattattcatatgttacgttgagtttaagtgggagaatattagaatatttctaatagtagtacgaaatcactcaaattgagtttgcattatctcgttgactgtatttgatcacaagtcaatatatgataagtatgaatattctatatatggtcagattttgatttaccgaatcattcatttttcgatttgattttttgaattaattgtcaaaatattttaaaaattaatgtgccacagatactgatgaagtgtcttacctataaatatagggtcttggtttccgaactcctcactcattctgtacaaatagtaaattccatctaaaaagagtagagagagtttgaaagtccgattacccaatccgaagcaacacaagaattaaaacttaaagatcaatggctgaaggtattacgatatctttcgtcgccatcctatacgcttgatatgtttttattattctgctttgcatatcgatcgtatgctttattttttatataataaagtgtaacaacatgaatagtgattaatgaatatatgtatatatatataaaat

SEQ ID NO: 89729 - DNA, 678 bp, Cannabis sativa
aatcaagatgggaatcataaaattttagttctacctcatcggctatcatttcttagtgtttgagttctacctcatcggctatcatttcttagtggaattcgattttgttacatcaaaaggaatgataaacttgagaaataacaagacaaccaatgctcaacttttgagactgacaacatggtttgatcattactcttttgaaataaaataccttcgcggaaaagaaaatattttagccgaccttctatctagacctacgtctataaatatggtctcctcatatccactcaaaaccatccccattaatcagccacaacttttcccataccattgcatacatatatataatggcatcatcatcatcacaaaagaattgctcatttccttgctcatttcaccgagatgcaaagcttatcctttctaaatctaaaaagtcagcaaaagaaagggcctctcacagagctatttatactcacaaccaaattctttcaaacttggatcctattttcaacatgattttctaattaacccaaagtatccttttgccaatctggtccccttccaaactgcacttttcactccaaaatccataactcatcttttttggtatctaacatgcatctatacgatggttgtcgaagtccaaactatggctcttcacactgttatatagtattt

SEQ ID NO: 89730 - DNA, 1915 bp, Cannabis sativa
tcaaaagctgatgggaaaaagacataagaaaaacaaaaagaaaacaacgacaagtttttttagatttttatagttaatatgcccaagatttgcatgccacatatcagtggtattgttgttaactgaatgacaagtgaacataggagttagggtataacaattatcagtagattgaaatccttgcaaaatacattgattatcatcattaagtacataacaatgatcactgtcaaaacagacaatataaccttggttacaaatttgactaatgctaaagtaaattaacccttagtccctcaactaatatcacatttttaaatcttggcaacccttcaaaattgagagttcccattctaatgatatttcctactaagttattaccaaaggtgacttcgccacactacattgacctgatgtttaccaaaaagtccttgtcatctgtcatatgtctagagtaactactgtcaaaataccacatttgtgagacaagactttgtaaaaaaaaccatctacacatttttctttttcaattcatttttatttcaaaacactatgtttcttttgaaatttttttaaattaccaaaataatttattttgtacatattctgcttggtgaaacatttaggtctaatatgccccttcatatcacaaaaatgacaaattgggacaaacctccttacctgagatcttactctttttgaaattactaaagactttgcttctgcagacactacctttgcaacaacaggctttgaatttgtagcagcaaactttaaatttgcagtagcaggaaaattcactggaacactagattttacaaattttgtgtttctagaatttgtagtgccatttcatttaagccaacaaagcctctttgacatgcatcctgtacttcctcaaaactaaaagatccagggttaagcatttgaacatttttcttgaaattttcaagttccttctttaatagaataattttttttcatctttaagacaaaaatcaatctcataatctttaatttttaattcaagagattcaatttaatgagacaattgtttattaatttttgacaaagatttattttcaaatgtaacatgtatccactttttatacataatcttgtaagttttagcgagagactcttttcaatggtattattcaaataatcaatctttctttcacttgtgaatcacataacaaactagaagaagctgaagttagtgcaacattatcagaagattcttcttcactatcaattttatcatcactccatgtgacattaaaacttttcttactctttttcaaagtatttgcacactcagattgaatatgtctaaaactttcacattccctgcactgaattccctttttattagtcatagaaggtttaaaagatgtatttccttttgaaaatattggagaattcattttattatccaacttttcatatatttctaaaagttcttgattaataaagaaatttcatcatcacattcattgtaagaactttctatttcactaacttttaatgcgatactcttacctttatcacagatggacttgggtttgtccttttctttgatttgttgattcaattcaaaagtacgcaaagaactcattaactcctccaccttcatcgtgctaaaatcttagcttcctccatggctaaaagtttagtgtcgaacctgtctggtagaactctaataatttttctgacaagaatatattcatcaagtttttcaccgagagcaaaatattcattagctatatcagatagtctttcataaaacttagatagggtttcatttttagatatcctaagatcatcaaattgggtgtgaaacataataaacctagaacgcttaacatcagaagttccttcaaattgagtatgaaggatttgccaagcatcctta

SEQ ID NO: 89731 - DNA, 686 bp, Cannabis sativa
ataataataataacttaatcatattaaatgagctaaattaattaaaattttaattgaaaacaaaagggataaaatataaggtaaatactattttggactctgtgtttcataaaagttattaattggacctttttgttttgttaaacgacagaatagatcctgtattttttaaaatgatacaaatagaccctaaactaattttttgacaaataaaacttaataataatccgatctagagaagttatgacaaaatttattatattttttgtatctgtttgtgttagaaattatctttaagttggttatattaaaaaaatatgtcaaaaattgagctcatgatcttatttttaccattttagaaaatatacggtctattttgttatttaataaaacagagagtcaaatcggtaatttttataaaatacagggtctataatagtagttaccctaaaatataaacacatatataagcaaaggcagagctttattgaacttcacaggggccatctttctatatatctatatttatacaattaactaatgtatccttgaaaaaaaaaactaacgtatttttaaattcttttagtgttcactttttaaagtttttcttttcaaatcaataatatatatatatatgtataattactgtataatatatcaattaccaaaaaaaaaaacaaaataat

SEQ ID NO: 89732 - DNA, 693 bp, Cannabis sativa
atttcggcaagagtgaactggtgttcatcagaatagtcttctctcaaagaaggcattaaagggggctttgaaatatttggtttgaactttataattattctatctcacgatacgcttctcttgtaatgggtaattcttcactgtaacttttctagagtaataaaagtatggctttacaaggtgaggtcatcatcaatagggttgaatccgaccttcacagcaagcagaggtttattaagtaggattgattctttttacattacccagaattaaaatattttggccctaaagaaaccaaaaagctatctagcaattatttttcaatctttgttttgtttataagagtttctgtcactggaatacgacactttccttcacattactcctttgtaactatctttttttgacatagtgaagggtgctctgttttatcttttacgaatttttgcttgcaaggtaattatatgttagaaaatattttgtgttgtttgcataatatttatttatcatcattcttttgcagcaacccaaatgggcatttgatctacctatctcatcattttcttaaaatattaaaatagtttatgtttgaaggtcaaatgtttttgtgtgaaatttatttctatttcttccagtaccttatcactggtttttaaattatagctggagctcttcctaatatttgtttagttc

SEQ ID NO: 89733 - DNA, 637 bp, Cannabis sativa
gtgttcgggtctgggtctgggaccgagaccggtgttgggtcttgggtcccaatcccaatcctgggtcccgattctggttctaattttgagcttaggtccccaatttaggtctggtccttggtccaggtctgagtctccaatctcagtccgagtcctgggtctgggtcatggtccatgtctgtgtctgggttcaggttcgcatcccaagtcccgatccgagttttaatttgggtccacgtctcgatccgggtctgggtctaaggtcctagtctgatttcagttcccgaactcaaacctagactcagacttggacctaggtctagggtaccggtctaggtctaggtctgggcctgggtccgagtttaggtatgtgtcccaaatccaaacactgactacgggtcaggtccaagccccaagtccagatttggataacaatctcgggtcgtagtttagttccacttcgggtcccacgtcctagtctcggtccatgtcctaggttagggtctgggtctagtgtcaggtcttgggtctcggtccaattctgatgcccgtgtcccggtccatgtcctaggttagggtttgagtcccagttcggtttccaatctcggtctaggtcaggatctgggtttgagtcctg

SEQ ID NO: 89734 - DNA, 901 bp, Cannabis sativa
  modified_base (188)..(205): a, c, t, g, unknown or other
  modified_base (863)..(871): a, c, t, g, unknown or other
atatcgagtagggacgattttacctctctactatttaatgtattttattcttaaaatactgacctccttttaaataatataataatattactgaaatgagtactctaccatttaatctcgtttaacaaagctcgaacgaaatcattatttcacttctatgtatttatagaagctatagattccgtatnnnnnnnnnnnnnnnnnnctcaattgtactaccatgttctcaagatgtaagtatgtgtaagatccaattggtcaactttgacgaacaagtcaaagaacacaaataatataattgaatcagattctaaccatctcagaattgagatcattgatctaagatcaactaagtgatatttacatagaaagatattaaggtaagtttatgatatcttttctatgtgaatatcggtccagtccgatgtataacaatacatccaatacaaacttactttatcaatacattggaaaaaacataccactatctaagtgtaagtaaacaacattgttgattatcatatcagtagaaatcttatgtactaataaattgtgggactaatatttaatcacataatcttgcttactttccactgtgtagacaacacaataatcatgaatgataatgtgataaaaatttaaaagaatttataaatcaaataaatgatcatgaagcaaacatgtgaaccaagcattatatttaaataagtaataaagtaataatgttcatttattaattaataatgattcatgataatattgcaataaagttttagttagagcatataacccaacaatatattgtcatgtactatagttcaattaaactcgtatacagataaggtgtaaagcccgcttagttnnnnnnnnnaattagcagttaattatgattaatcatgaa

SEQ ID NO: 89735 - DNA, 2426 bp, Cannabis sativa
aaaaaaaaaaaacaaacttcttcgtcgattagcacaagttagtgttaatcaatattacttcacttatacaaacacattcatatgtaaatttttgaagattaaataagcaagcaatctcaagaagtgaaagttaagaagtgtgatctattaattgactcaaagcaatattaacttattacaaccacaagagaagcagcggcaatattactagccgttattcgtttgcctacataaaattattgttaagccgatcataaattctcatagtgtttttttttacatctcgtattgtactaatttaatttccttaaccacacttgggaatacacagctggatcaaattatgaccaggaaaatttctttccccaagtgaccacctttgagagattatacgtaaaacaaagaagagtagaagcagagctacaaaactaaattacaaaactttgtggcagttttcatgggaagaatccagaggaaagcaagtctcatcaccaccagtgctccataggaaattggcgtatttagaggcatggtaagagttatttgactccattgccatagcctgttgataccgctcttcagctccccaaaggtctttctttacaatccacaagaagtctgcataccggctcaaagcctctgcatcgggtggctccgcctccacagcacgccggaagcactcctcagctcttcagaaacatcacaaccaaccgtagttagtgaagttggaaaatgaaaaatatggcaatgattgaatcaatcattcattgcaaaatacttattgaacaatgacttcaatttactaaaagagtaacactaaggtaatgttttagatatactgtttatcccagaagatttaaacacttaatataaagatttaaattgaagtaacataaagcaaaagaagataaggaagctcacctgttattgtcatggtaaacgagatagagaaattgtgcataattagacagtagaagaggattgttgtgttcacgagctagacctatctggtatgacagatcagttctgaagtggtgttcataatcatcttgttcaagctgcacattaaatggagacaccaattgttgtaatgtttcttgatcaagggcttcaccccatgattctgcttgcatttttaaagcttcatccaaaaatgagtcccacaatttaatctcctgtatccccaaaaatggaaccccatttctattgtcatttacaaaatgagggaactggactgaacccttcgttccaatcccaaaggaatttgctttgtccccattataagaaggcaaagacataattgatccacaataaacgttatcatacatagattgtacaataaaatttggtaaaaggatcatcaaatagaccatgagagtaggcgttcgagaaaagacattctgaaagagccaaacaaatgagacattcatgtctctctgcatcttggttataatctcttgcaaatcttcatcataaaggttttcccttaagctcaaagcacaagtctgaagctctcttaccatgaaaaccatacaagagaaaaccttgctcacagagcagtaggtggaatcttcagtttttctatatttctcttcccattttctctgtttccttattatccgaagagacaaaggaagttcaatgctgttggcctttctttcaatgctagctctcacaatttcagttctttctggccatttaggtggttctggctcaataccaagcagtggaggccgtgaagaatcgaacttgaaactcgaaaatggaattggaaaactgctgtttttgtaattttctccatttgggtacttcaaattcagataaactttagtgctttcatccttcttttccacatcatcatgttcttgttcatctggaagactgagtttttgaggcaattcttcaatctgattcgaaaactcttcatctgagaaatcaccaaaactagctctacaaactttggaatgcctcaaaccaaaagagtcccaagaacgaagtactaatccatgagccaaagctggactttttccaataagtttatttggaaaagaaattgcaggtacttcggaagaagaacaagaaaaagaagaacgagaaaggggaactctacactgtaagctttggcctatcattggtgaaaaaactccaaatcccattatcttattttcacaactaacaaatagcttaaacaatcctgatcaataccaaaaatccaccaaagaaaaggaacacccctccaaaaagaaagaaagttcttttttttttccttcctctgctgaatatttatttaaaagaataaaaaagaggaaccaaaagtggtaaaaggatgagaatagaagaattgaatagaagtcaaaatcaaaatcccatgatacccgtgtgaaaggctgtcatttaactgcctcaaacaagagtgtgatgctttc

SEQ ID NO: 89736 - DNA, 560 bp, Cannabis sativa
  modified_base (75)..(78): a, c, t, g, unknown or other
aaatgtatttttagtcacaatacacttgttgtgatgactaaaactaaattagtgacaacttataactaaatactnnnntttagtcacaagtaacattttgtttttaattataaaaaattatgttatgattaaaaaattatcactaaaaataacagttttttgtagtgaataaaaaggcttatcaatatgccatgttattggctattcattcacactgggctgaaatgatgattctgttggaaaagttctcattacaagagagaatatgaggattacaatcaaaatactcaaaataaaaatagaagtatttcatcaagattacaagattgctaaagaaaaagaagaagaagaataacacacacaaagcttgactaaagctaaaggacttttgtcctaaaagtcattttctccctcatatggacacttagggagattctaaaaatgctcttaaggatttatcaagcctcatatgctcagcctagtgtctaaggatgagcccattctcacaaggttctaactacaacaaatggtttcaactacttctcatacaagtgaacaat

SEQ ID NO: 89737 - DNA, 1479 bp, Cannabis sativa
tgcaataggagtttctatgtaaaattttgtaaaaatacaaaaaaaattatttagaagtgtaaaaatgaaaagtcccaaaataaattaactaatattataatatgaataatgagccaattaataagctaaatagaactatactaagtagtacaatatcagaaatatattgatcaataatcaaacttaaacttatgaataacattacctttttaacaacatcattgtaacattgtaaaaatctcgatgcatcaaaggaaaatgaagtcataaaccaaccattccatctagaaataccacaatggatattcttgagaaaaaaataaaatataactagtcttcaatcccactatttcaccaaaaaaaaaaaaagccaaattgaaagttaagtataaattaaaaacctgctatatatgtgcaaaaagataaaccaaagcatgaaagcatgagaagtattaaaatttagtatgttgatgaaaaaaaaaaatcctatatatacgacttaccaaaaaacgtacagtgtgccacgattgattactttgcttattaatatgcacattttttgtaacttacattcaaacctaaaacaatatgtgttttcaaccgaattccttaaaaggaaaaataccttgaattccttcttaaggttaaaaatactttgaaagtagaagtattttcagctaaaattccctattatactcgaaattcggctacatttcagaagctgacatgtgtgctacaagaggaatatgaatcaacttcaatgatatagtaaagttatatcattaaatacaaattaaaataactcgtaatcattaaataaaggaatgatagacaatagttaaaactcgttggttgtataagtctcaagcgagataaggataataactattgaactgatattgacgagacatacatctacctcggaatacatgtgcaaaaaaaagaggagattcatctattcaagcagactaaataaacaaatacaaccgactcgggtaacacatagcgaggcaatcacctcgcaatacttaatcaaatgaaggaatgcagcaagatgaacgacttaccaacacttagcattttttccttattgagatggagaaggaggagagctcatgtcaagtgagatacaaccttccaagtcaccaataaccgtctaaaggatataaacaaagaacaattgggtagttattatatattatcccacatgtgattaaatgaaacgtggggattatccacgtttcatgaaaagatacatttgaactgatcccaaaagaataactgccaacctatactcctataaataggggcagattccacagaaaaaaggacgaaaatttttggagagaaattattattattcaaatattgtattctgtattcataaagaaaccctaaaaagaagaactcatggagtatgcagattttaactgcaaaaccacgtaaaaatatctagttattaattttttattatttatt

SEQ ID NO: 89738 - DNA, 702 bp, Cannabis sativa
aatgcgtgttgaaattgatgtctcaaaacctcttttacgtggtcagtttgttacttttccttggatgaatgatgaactttggatcgattgccgttatgaaagactaccggacttttgttacgagtgtggaatcattggacatgtttttgataaatgctctcggtttttagaaaaaatagatgaaggtgttgaaccaaatctgccatatggtccttggatggaaggatcttcccttccaagatctagttatgatcgataccgacaagatttttctaaagagggtccttggccttttctcactcggctggctcgtaacacaatcaatctgattcttgagcacccacgacatcttcctgctgcccctgccaatgctacatcttcagagaaaggcaaacaagtattggattccacaaacatcattgaatccaatatcaagaatttacactttttgcgactcactggtgtatcttctcaatctcccaaaaggctctctgttaaggatcaggcttcttcatcttgttctaaagaaattccaattgataagttatctccttcaaataacagtggatttcatacacctgcttctgcaattgaatatccctctcggagtgccgccattagccccacggtatcacatataacacctaatcttaatccatcattagcctctactccagtggccacataccccccccccccccc

SEQ ID NO: 89739 - DNA, 1923 bp, Cannabis sativa
aaaaaaataaatataaataaataatatacattttttcttatttccatatattgtaaaaaatatgttttgatttgttttttcatcatattttggcatattaaaaagtaatataaaactaaattaataaataaataaataaaatacaatcatttaagattaagaatttaatgtttctaagaaaaaaaaaaaattgaagactaatttgctaaaacttatataatttaagaatcaatttacaaaaaaaaataaaatttaaagagtaacttaccaaaatctagtttaggaaatataaatgattaatgcacctataattcttattttaagtaaataagcatgcattattaatattattgttaataatagcaaaaaatcttcactaaacaaagaaaaactactaaacataaggcaagatcatcaaaatatttacacggctaataatatttccaaagtttcctaatttaactcaaaaccaaccaattttgtacaaaccaaaatcaaaaaacaagaaaagaaattcttactttcattatcttcttccatattacttctttattaatttttcttcttaattattctctctttccaaaatcataataacaacaatggaggaacagctaaagcttaaaatcaagctcaagctcaataatggcgtccgaccaccactgttctcaaactcattcatcatcttcttattcttcattctctttaactcaccaaccgcattttgcgtaagccgaaacaacacactcttcggactttacttaacaaaatccaaaacggcgtcgtcttcttcctctgtttcaaccccaccaaaacagaatccaaaacttccgtcaccgtcaaaatctcagcaaacgttttccgttaaaccaaaccctaaccaacccaccaccaccaccgacaacgacgaccccaaaagcaacgactacatcttctcacgttcatcatcaatgccgattcccacacagccaccgacgacaactccgccggagattaagaaaatctgcgacaacaccgattacccttctctctgcgttgcttcgttaaccccatttttgagtgggagagggaaagcggagccgatttctcttctgggtctggctattaaggcgacgactgttcacgccaagaaagctctggccatggcgtcgaagctggcggcggctccgggagcgtcgaagggagatgtgatgtcgttggagagctgtaaagagatctatgatgatgccatttctaaccttgaaaatgctaatgaagcggtggggagtcgagatattgggacggtgaatagtatgatgagtgcggtggtgactgattcggagaattgtgaagactcttttgatggagattcgccattgtttaagtatgatgataagcttaggaagatggctagtaattgtttagccattgcttctttaatcaattgattattatatatttatatatttaatttatgtatggtttagctaataatataatataatatatacatgtttttgttatttagatttttagagtaattttagtactatgatttatacagttgtttaatatgagaaatgctaaaaacaaatcggttgctttgctcctaatttgtatttttgttgttgtatttaagtatcaaattctacatcaattgaataattgttataaaaaataattacttacataaatgacatgtcttgatattgttttgggtaaatattattttaaattctgtctttttgtaaaatttttaattaaatatttaattctgttaaatgataaattaaatattatattttttttttgtagggtaactgatacagtttaaaataacaaagtaataaagttacgcaacaagaagaggattttcttccatctataatagttcattgtctatcctaagagcatgcagagataccctaggagagctagacaata

SEQ ID NO: 89740 - DNA, 654 bp, Cannabis sativa
tacctaataacagtgctaaaaaaaataataatgagtgagagtgggacccactcattggccacaaaattcttgggctaagaaacacatacacacagagagacagacacacatacttactgtgctgatgttggactcatcacaatgtttagtttaattaattaattaattaattattattactttattatatatgggttgagtcctcaaaggaccccgccctccatttcctcgaactttctctctcttctctctctctctcttactcattcaacattaacccccaaaaatcttttctgggtttgattgtatttttgtttttttgacaatccagcaacaacccatctcccaaacaaagcttcttccaccatggttctccaatcactttgattttcttttttggtatgtttttctttcttttttattgaacttacatctatctatggcagtttctaaattttcagtctgtatttgaaagttatagtaagaaaaggcttttcttttttatgttattacaaatttccgtaagtttaggggtgagataaaggtttgctttttaggaaagtaatttcataatgttctgaaaatgttttgacccattttctggtaaagtgtgtttttttttgagtaactacaaaaggtttttttttttttttt

SEQ ID NO: 89741 - DNA, 1001 bp, Cannabis sativa
ttgtttattcattcactgtggatcggttttgtttctaattcgataaattggagccagaaatccatgtttcagatacgtatttttgtagacgttgattgtctttatgggtttattttggggatatttgctgaactagtttgaaatggctaattatagctatgttattgttgttttagatttgcttctgaagtgttcaatattgagcaaagtcatatatataaatatctatatatgtcaaagtccaaagtgatgaaataactttatagttaaatattccttggaatacaactactttacacattttcctatttttttggtgagattaggacagctttatgtgttagtgcactacttatagtgagacattgtttgtgaaatctctctgtggaatgtgttttgaaggattcatttaagttggtctcagtatgtgggatcattcccagccttctaccaatctatatttgcctaagtgactagtcctcaagtccatattgcttgctagttgcttgtgcttggtagccaacgagctcaatgaagcttgttctcaagtgttttttaatagttcttccatgttaacattttgcaagttgcaagttttcttactatattattttcattggtcaatttattccatgttgcatatgtaatatttcatgtctcctctgtgtaggcgtactcgaccaccattgaataaacatcttcttttgacgttcttttttcttgggttaactgggtaagtcactgtattctaatctcaatttccgtgtttatatataaattctcacagcatgtattatttgttgcttcatatatgtggtactttatcgatccattagtctttataattttttttccttccaggatatttggaaaccagcttttatttctcattggtcttggatacacaaatcctacttatgctgctgccatacaacctaccattccagtgtttacattcatcttggcagtcctaatggggtcagtttgagattctacttttt

SEQ ID NO: 89742 - DNA, 780 bp, Cannabis sativa
  modified_base (142)..(148): a, c, t, g, unknown or other
cctaaacccaagttctgttagcacttagccccttccatccatttttggctgttaactgccatggtggaatgtctacgtgtacatagtgtacatgtggtacaattttaatggtccacgtaaataaatatttaaaaaaaataannnnnnnaattattttaaaaataaaaatttttctttttctttaaaaattaaaaaacaattttaaaaaaataaaaattaaaaaaaacctaaataaaccctaatttcttttttttttttaattttatttctcaagaataaaccctaattttattaatcctaacccttattcccatctcttcaacctttctcttccgcctccctgctctttcctagaaatctcaaacaaaaaaccatagccccattgcagatcaagctctgccgagccccaaggaacaagaaaagctcgacattgtcacacctaaccccgccatcaccactgccaccggtgccgtcccctcctcctccttcttcttcttcttcatgctcagacaccggcgaaatagcaacctgtttcagcccttgaatcctagtaagtagctccgacctcgattcattcagttcctgaataaaactcaggaaaattgattcattaaaaaaaaccaagggtatattgataataatcacagccctaatttcaccatatatattaaaaatagggattactgtgacgtcgcgtcaccttcatttgctacaaccttattcaccaccatgggtatgtatgggcgggaagacctcaatcatccctatcaccaataagct

SEQ ID NO: 89743 - DNA, 773 bp, Cannabis sativa
ctggcttctggctagtcgcgactactaacacccagtgagtagatttttccgatttttcaccagcttgtctcgtcttttcatcaattgactgaatttgacttttaataccccgaaaacctgaaacaaagaaaatcaagcgtaaaaccgctccaaaagacaccaataaccgagaaaatgcttacttgttagacccgaaacataagctaaatataacctaacatctactctctaaattttgcacatcattgtaggatctcaaaattggaggagatggttggttacatcgaggaattcatcagagcacctatgagtagctgccatgaaatgtgagaacttttgaatctgctcctgttgctagatcaaatgtactgaggatttataggaaattggctccgtatttaatcttgatacctctgtcatcttcattccattgttgtaagcctcctcatcatttgtgaattcaattggttttattctaagaattgcatccatcaattttgtctttagaacattagatgtggaattaggacctctcttttttttttctttttttttttcactgttgattttggttttctctactcatttgccctcatctttgccatggcaccagtttttgagagaaagctagagagaaaaaccttaaagcaatataattgtaatatttggcacattatgttagatagtcccacatcgctaatgtgtggaaatataatagaatatataagataaatgggctactcctccccttgccaattgattttgagatggat

SEQ ID NO: 89744 - DNA, 676 bp, Cannabis sativa
cgatctctaaatatataaatgtgtgtatcttaattcttaaactatttctcttacacctaacttatcatattaattattcaaagaaaaattgtaaaaaaataagttaataatgttaactctttgcttgatttattttttgataagctaaaatgatagcgagttagtgagatacggtaataacaaaatgtgatatatagtgatgagaataattttaaataatcgagatatatacagaagcgtgttatatgaactatatcgggctttcattataaaaaatattatacttacatattgagctaacccatttatatatttaacttttcatattattcaaataaaaattatataaaaattaatgatattaaatttttttaaacttccgccgcgaagcgcggactgtcaactaaaaagtcaagggatatttgttgtgttcataaactactgatcaagtaactacgtaaacatatatacacaaggtttgaagtttcagcactgggagtggagatcgaagaccgcgttccgtgaactatataaatacattcaatagtcatatatattaaatcaaagtcgacgtacgccgcaagaccccctagaagttcagaatagtagcctacctaattaagttatttgggcttgtttggaacgccgtatcaagttgtattgtattgtattgtat

SEQ ID NO: 89745 - DNA, 773 bp, Cannabis sativa
aattcaagtccaaaattattcaatcaacttctcagcccatatatatgccggtaaaagtcatatttactggctagcacaaagaattttcagagattaattaacttttattggtccaaatttttgccagcaataaccttaagagatttggcgggtaaattcccgtgtatgaaaaagttgtaatggcaaagataaatttgtaccataggaaatgtgtgctaacaaaagtcactttaaaaaaagttacttttagtgacaacataaatttttaatttgtgattaaatgtaacttttagtcacaacaaaaaatcacttgtgactaaaacatagtatttagatacaagctgtcactaatttagttttagtcacaatatgtattatgactatataaaaacacatttagtcacatcatttgtgattttgactaatacttttagccacggatattttagccataatgtaaaactaataatttacaattaggcacaactttttttaattttagtcgcaagttttggtgtgactaaaagtcagattttttgtagtgactctaaaaaataagtgggaatcttcccgtgtttgtttttattttagagggaagagctttgtcggtgcatatttgcaccagtaaagatatagtaaaatgatgcgttttactttagggtttctgaaatttattttagcggtgcataaagacacttttatcagtaaaagtttcttaataatacacgaaatagggcttcttcttcttccccatttactctctctctctctct

SEQ ID NO: 89746 - DNA, 843 bp, Cannabis sativa
ctaaaagcttttcacttttactttaatatttttgtgccgcccattggtactgcgggaggtattattttagcttggaaatctggatttagttttgagcgtatttcttgctctcgtaaccatatttcggggcttgtctattcggaccccctacccacccgtggctcctctcgtgtgtgtatggtccgccgtataaccaggtcggagattatggctcttggggatagatatggcggcccttggttgatatttggtgatactaattttgtccttagttcctctgagcgggaaggatcaatgggccgagaccctttcatccctttcatctctcatcttgtggagactcgtggcctaataaatatgcatattcaaggagatatgatgacctgggataatcatcggtctggaaaaaaccatgtgaaatcagccctggataaaggcattgtgaatggagcgtggcttcagctgtttccaaaatctattctctgttccgtccagacaagtacttccgaccataaacctttgtgcttggacacagggggaattggtcctaaattcaccagatgctttaagtttgaggaaagttggacgcgggattgcagaagcaaccttgttgttgccagtgcctgggattcgctggcccatccttgggcccctgctcgagtttttaagaaaatcggtgctactcgggtagcgctacttcattggaagagaacccaatttggtaaaattgacgggatcattcaggagctggaactaaaactggaccaaatgcaacaattgccagctggctccagagactggaattcggagattgaaattagacgaagcttgaatgaagcccga

SEQ ID NO: 89747 - DNA, 794 bp, Cannabis sativa
tgcttttgactagacttcatagctatgttaagaggaaaatgagtaccattgatcaagtgtatttactaaaaatttttagcttgttgagaacttgaggtaggggcggtttgtcttgtagccttggtgccttgttgcttgttctatttgctctagtgattaatgaaagcttctttcttgatcaaaaaaaaaaaaaaaaacagtgatgacaactgtttttaatatagtggcaactacaaatgtgtgatgataacaattatgaaatcataagatggattttatatatagatttatcaattatctttttgtttgatctatatatatataaatatatatatataaaaaaatatatatatacgtaggggtgaggacgtttcaatggttatattaaatatataatcatgatatagttacatttatttttagtccattgatcattattagatagttgtgattgatttaaaaatttactaaaaataattaataaattacttataacctaatacaaatctaatttaaaaattataaatattaatttatgtaaaggttttatcaaatattttaattaaaaattaatttattttatatatataattaacttaagtctaaaaataaaaatttcacctgttagtgacctgctataacagatcataaaaaaaaaccattagggttacatttttactgtaactattgaatactcactcatgtatatatatatggaggaggttctaatggttacatttttattgtaaccatcatggttacattttttgtagccattggattactattaaatg

SEQ ID NO: 89748 - DNA, 4754 bp, Cannabis sativa
  modified_base (3246)..(3249): a, c, t, g, unknown or other
atttagggtgtttaaacaacatacctgtgagtagatttaagatcctggtaaaataaattccaacagggatgtgactgagccgactggcgaggcgatgccactgctctgggatgggactccgccggcgaagagaaccagtcgccaactcgctgtcgctggtcttggagaagaagaagttgcgtggtaatggtgggtgacaactcaagtcgactggtgtgggtgagtcggacgagtcgagtcagtcgactagtgtgggcagtgggtgtgggacggtgagtcgtgtgggtgtgggacggtgggtgtggccgtggtgtgtgggtgagtgatatactgtgtgtgatagtgataatgaatactgatattaactattaagtgaagattgaagaagaatagtagattacgaataggcagtgagactctcattcattgattcattgaaatttgaacatgattaaaaatttaaaatagcatttacagaatacgaataggcagttaggcacggcagcaataaagtaattactttaattatttaaagtattatttttttaataaaaaaaaaacatttttatattttcgggttacgggttctaacccgaccaccgaaataaactcataagtgacccgaacccgaaaccaggttacagtcctttttgggttgaacccgacccgactatacgggttttcagttgttcaatttttttggcattgggtcggggcgagtgttcgggttttccgggtctaaatgtgcagccctaatatctccacctaaaaaatttcctatatatacaattatagatatgtagtgattgtttttaataactagcatatagttttttttttaacaaaattttagaaatcaagcttaaattagctatttaataaataataataataatagtaaaattcaatacacgttctttttatggtagctgatttacttatgcatcttaaattatttgaaaaataagtgtaactgcattgtacggcaaaaaattaagttgacgtaggtattttgtagttggcaaagaattatgaaacaatgtacaatgatgctggtaaacattctctaccaaaagtaatgttacttccaaccaccaacgttagatagatataataacacttccaaatgcctaaaaccattgtaatctatcttattaagcatgaactaatgatacaacactagctatcgagtactcaaaaacaaaacttgaggctggagagagaaataataataataataataatatacatttttaatttctatattcatcacaatcacgagtgagctagttttgcaagcatagctaaatctaagatcttaacatcaagagtgtcatctacttttacaattccatcagtgccgtccactcctattagcttgccggtggctccgcgtaatgcaccacccatgatcttgattctgtcattcttcctcggcaccacagcctccaattcactaggaacggccaccatggattcaccaccgccacccgaaccaagaactaccctacaagatccatcctgcaacaacagaaataacatcaatattattcaaacacatagtatttgcatgtctagaatgtcacttgcacttaaatctcacggtttatattagcaaaactaaagattaaaagggtgaatcaggaacgtactgagagtacgtcacggattgctccgacaatagcttcatctccagatctgcgtacagttaccaatatgtccggtacacaccatggaccttctgcatctccccctgaaaaataaatataaattgatcattacttaccgcaacactttcaagatcattcattaagaaataataatccagtaaattccaaatcaaacaacattctaatttataactacaaaacaaactagatattaaattgcaagtcttacctatgacaggagacatagcatctaaaccaccagtgcccggtgtcatcggctgccctccaggagttcccggaagataggatgctgaatttggagtcataggctgcccacccggagtggatggcatataagggcttggagcattggctgttcaaacacaaaaaacatgttaaaggaggcaaacaaaactcaatagaaagaggatgtagagaaagaaactatacaaattacaaaaaagaaatacataaaacaatgacgcatgctggtcattgatagatactagacataccataagaagaactactatcccttggtgttccagcttcactgtagttaccaccaggggtgttagcccaacctgaaccaggagttggtgcttcatatggacgtgaaggcgggctgcccggctgagaaaggaaaaaaaaactgaatgtcaacgaaaaagccactacacttagcaaaagacaaatcacaaattatacaaaagattgctgacctgatactgtgggctggtagcccaagaaccagggtttccttcctcccagttatccctaaatttgtcgatatcaaaaacttgcaaaaattagtagcagttactcaaaaggtcacatataaggtgttgcacttttctcctcttgaacaaaattcttttattacgtacaacatcaggcattttgctattgacaaactgaatccaaatccaaacagaacgttatgctaatacatgtgaaacaaatctatttataacatcttccagcactaattaagtatctctacatcttttttgttctttccacaatttttcttggtggaatgtacctggattctgagtaatttatgcaaatatggaattcttggacaagtcatgaagtacgaagcaacttttatcaacagcaaataagttatattgttcttagtagtaacccatttcttaaattaacccagctggggtttgaaccccagaactcttaacaaacacacacacccaaccactaagtgttgttatgcaacctgtgactcttgtaattgcaaaatgagcaatacaatttgttcatttatggcagaaaacttgggggtaggaaagaactaatacagttcacaatttaactaaaaattagattttgataaatcacctgggtggactcatcggagtataaggattccaagctcgatctcgcatgggggttctcatgccatcatgaattggagttgctgcattatgaaatacagaatattaatgcataatttcctcttccacgaaataaaaactaaataaacaaatacggcattgatgttttacattaaaagtctcaaatcaaacttttccacaaagagagagagagagagagnnnnagagagagagagagagagtagtctaaaatcaaaccagaagaaaaattacctccagcatctctcatgggtgtcatatatgggtgtagaggagttcgagaaggatgcatgggtgtctcacttcccatgccatatctagacgtatcgctgaaacattttgagcaaaataggtcttttagcaagaggtctaaaaaatgtgaaagggcaaaaatagatgaatctagaaaattaccgatggggggttgtaacagccaagttatcagatatacaactccgatcaactgcagggaaaaatttcatgtaaaagcccatccagaaatctatttaccaataacaaaacttttctatgaaaagggtaaacttgcctgtaacaaccttcatctgagattccaattcaacacgaacatttggtcccttaaattctaaaacacgcccacgatagcccttaaatggacccttgcaaatttttactgtggtgccagttgcaccatcatgccctcttccacctcttccacctcttcctctaccaccaactgaatcatacaagaacttaataccgtgcacttggtaaagtaaaaacaatattggtaaaatgcatatcaaacaaactgtgaaaagcatcaacttacaatcattttgatgaccacccctagaatatctcattggagactgaggaacatgagatggaggtttgagttggcctagtcttgaataggtattaccctgcacaattaaataagattttagagtttttaagtttaaaggaagaagaagaagaaaagaacataatgaggagattcaataggagaatgaatttacattcatagaacactaggaaaaaaaactcacatttctatcaccatttgaacgtgatcctcccacaacaacacaagactgagacttggcacaaataaaaccagcatgctcaaggtggtggcggtcatagataaatagaacacccttgtatatgtgttcaactggaccttgttttccctggtatgacaacaacaattatcagattacatgaattcatcccaaatcttgcaagaagataaagaagccaaagatatagagatctcactctgcaaggtccctcgacaatcctaacaacatctttcacagatactgtattcttaaaccgatcttggacattatttttcctatcgatcttgcactttatttctcttaatttgacaagggaaacttcaggcctgtaaatgaagaaaaagctaatatttcaattttgtttatgccattcctcaccattcacctatcactaacaccatccccctcaccattaaagcatccattatttcttagggactatctagcaaattattattaccaataaccattaattatgcagcgtacgtcatcttaaaataatgtatcaaaatatatatacaatattagctagataggcactaaacccaaaatttgacatggcacgtaaaattcacctaggtaaagtttatttgaaactcaaccaaaatttaaatttaattgtt

SEQ ID NO: 89749 - DNA, 1116 bp, Cannabis sativa
ttagtaatttattttcatagtatgctataagaaaagcttgataagaagcatgttaatagcctaatagttgaataggcgcatgttttaatttccaaaataagtagaaatcagtaaattattcatgaccgtgatctgaccaggctagctcgtggttttgcgggctgttctattagaatgaatgtcaggcaaaatgcaagaagccaggaggtaaggtcagatacagtggcggtcagggagtttagtttcccctggatagacgtggccgaggtagaggctcaagaattagggtacgccatcggggagaggttaacctgccacatgctgcccaggaatgggaaaaaacttgttgcagcaatgcaaaccaaaatcaacaaacaagacaaagaaattagacgcctgaggcaacaaagtgctcttgtaatgcctgcttcagaagtgcaggtggctcatgcccctgctgtgtggggagggtcgattactgtagtgaaccgaatggaaccactgtaggaaaggttctgcaagcgggcacctccattctttctgggaggtttcgatgtgatgaaagtcgagtagtggctagaggttattacaagaattttgaattacatgggcatcatcgacaatgacaaagtggcctgtgccacattccagtttcaagaggatgccctggtttggtgggacatggtgtccctaaattgtgatgttactactatgacctagcaaaagttccatgagttgtttaatccaaagtactacaatgaagcactcagaaatgtaaaaagaaaagaatttacccagttgaccaagaaggagaatatgagtgttattgaatacacaactccatttgatcggttggctaggttggcctcggaaattgtgccaatcgattttagcaagaaagaaaagtacctggatggattaaatccaaagataagacgtggcttatgattactactgaagacaacaccaaccacatatgctgatatgctgacactgacatggtgggatggtggggaaggcactgcgagctgagggcgcagtggagtgcactaaggagtcttgaatgactcaggttgtcagtggggcccctactcctcctacctcttgttatggtag

SEQ ID NO: 89750 - DNA, 542 bp, Cannabis sativa
cggtaggattcgaagtaggaattttggtgagataagacctgacgagtttgcggctgatgggacaatgcaaaagaaagttgtcaatagttgtttatagggacacgcaatattagaaaagtataggttagatccctaaaacatctttctgatagcatttccattttgttgtttgcaacgagagtgccatctacaatatttttgtcttagaaaatgtaccaggattaggactagcttgtgaatctttgaagcttcgggaggtcattatcctctcgaaggattagtctatggcttagctttgggatcttcttaaggacgaatgtttgctcttggatactagggtgcctcctagacgctttcatgatcttagaggttgatattaatattttacctcttttatcatgggcccaccgtacacgtggctcactcctttttgaatggccacctattttgaaaaaaaaaatacagacaatatttacattaacctagtccttctttctattacatttaattcaattttattatgaaacgagtgatacgatgaa

SEQ ID NO: 89751 - DNA, 550 bp, Cannabis sativa
cttaaattatgttcattaaatatatgaagttattgatatgtttttcaacctaaaatattcttgagatatctccattaaaattgaaggaaaaagaaacacagttaatgttccaagttatctgttatgtattttttattttatttgtgcataatttattgttttgttccttgtgctagtctctttcagtcatatgagatattcaaatttatgtatcattttttcagacttctttgtagggttaatgttctcttccattttttatttgtccatacagacaaggaatattaatgcaaaaaagaagctcggtgaactcccatcatttgtttttcctgtgctaaagaaacagtcgatgtttgcaaagtatggtattcctgcagatgtagttttggatcaactgacggtatgaatttagtgatttttgcacattatgtttgtatattttgctgtcttaaaatgtaaagttgacacatgcatattatttatatgctgtattttgttacaactgaggactgaattcataatatgtgtataagctctaaagaaactttgc

SEQ ID NO: 89752 - DNA, 944 bp, Cannabis sativa
  modified_base (28)..(39): a, c, t, g, unknown or other
ttattttttattttattatatatatttnnnnnnnnnnnntatgtagatattttatataaaaaatttaattttaatttgaaatacttaaaatattatagacattttagctatattttttgtttaacttttacaaaatacataatctaaaacgatattaaccctataatatttttctaattattctagggtgttttgtgatgaaattgtgtcgaatagatgggttgtgcctaaacatcgatttattgggtggttcaccgcttccaatagattgaatactagagctcagctgaagcatttgcgcatcgtctctaatagctagttgtcttctttgtatgaatttagaatatattgagcatttggggtttaactatagatttcttgacagtttaaaacaaccaaaaaaatatatttctgtcggttcttaaaattgtcgcatattcgagtatcgcgaatactaggtagaataggcgataattaaaaaatattgacaaaaaaaaattccgacagtttaaaaccgtcagcaatagtggctactataggccacggtttaaaacctatagcccacggttttaaactgtggtctatagtataggtaaccgttttaaatcgtcagatgcactacattaatctatctttgctgctctcttcgtgtagaaattcttataactagattatctcaccacattttggttcaatataatatatatatatatatatatatatatttgttacaaatacacaaatatatattataaatacatgtaaacaaaatagaaagatgatcagagatcccgtgcgcaacaaaaaaaatgattgaagctcctccacatgcgcaacgaagaagacgaccggagctcctccacgtgcgcgacgaagaagacgactggatccggtagtggtgggtgaagacgaaggtggtggtgggttttgtgggtggcgagata

SEQ ID NO: 89753 - DNA, 705 bp, Cannabis sativa
  modified_base (260)..(261): a, c, t, g, unknown or other
tgtaatttcagctcccaaaccttgtattaggttgatccatgtcttcatggtatagaataatgaaagatagttagttggattcaagtgaagtccaaaattctatattggagatcccgaaatcaacctaggcgcagggctagggtcccctcccaggttgactactatgactcaagtctactcacctccgtgacattatatttcatgccacatgtgaaaaattgaagtccacacaaccagggaaagtttttgggttaacattnncccccaagtcaatttcacacttgtgtagaattgacttgatgacgtgaacaaggaccgtgtcgctcgatactaccagatgggcatcaattttggcattcgtaagcacttgtatctattctacaagcattcctagctaaattaggaatttgaacacttttgattagtccttcagaattttgaaaggcaattaacaaagaaaaagaggaaaaatcttaccatttttttcagttatcttttatctcttactttgaaaatttggaattttcttgttttcttatatggcattaggattaattggattggaatcctaatcctagttgaacatgccatttaaaattagagagataaaggaagaactgaaaaggcttttgatcttttgcttatcatttatctttttcctttgatttttctaatttttccttaatcccaatagcattaggaatt

SEQ ID NO: 89754 - DNA, 577 bp, Cannabis sativa
  modified_base (126)..(134): a, c, t, g, unknown or other
caatatctgcgaacatgacagcagataggctctttgtattgtcatcaagttcaacacaacatgtaagcacaaacaaattagctcgaaatcattgcacgatcgatgatgataataataataataatnnnnnnnnnaataataataataatatcttaaagatataaattaaaattaataattgttattcttgtttttagattaataacgtgtgtatttttgtaagctttttaaaatatacggccgacccagcccaacaagcacatgtttagtgaacattatagattgcaacatattgaagaccaataatttccattcagacaccaatcttttgttacaacataacaaagtagaagctgtttgtttcatctcttcctcctcatattttcttagtaacttccatgagtaacttccgcagctgtagaatgagcagagaacccagatggtcccttaacaccaaatatccacatttttattccgataataaaatcaatattaacttaactgaatcagtgaagatcagtttatagctgtggacctgtggaatggctgcactagttaacaagcctcggcgtcccat

SEQ ID NO: 89755 - DNA, 577 bp, Cannabis sativa
aaagcttttgatagaatggaatggcactttattcaaagtatgatgctcactatggggttttctcctctgctggtcaatcttataatcaggtgcatctccacaatttcatactcatttcaacttaatggatctgtccaaggaaatattgtaccacaacgaggactacgacaaggagatccattatctccatatctcttcattatttgtgttgaaggattctcaagattactacaaaatgaagagcacaatggttctttacatggcttccagctttcacgcaatggtccatcagtctcacacttgttttttgtagatgatagcctcattctctgtcggcctaatagcacctcagcaagagcaattcaaaattcgattaacacatactgccaagcttcgggacagcgattaaacacagagaaatcagtcctctctttctctcctaacacaagggaatcgactaaagatttattccagcaacaactgaatatgcaaactcagccatgtcatgaaaggtacttaggcttaccatcttatttgggtcaagacaaaagcttactctttggtgaaattaaagata

SEQ ID NO: 89756 - DNA, 657 bp, Cannabis sativa
tagttttaagagaaagggcattttagtaaattgccaagtgaagagatttggtggctgccttgtatggtgacacctagcactagattatttcagccaagattactcgtttctctttgggcaattaaagaaaggaatcaaagaaaaacaaaaaggaaaaaacaaccaaaattcaagagaactttctctctttctctctttcggctgaagcaaaccagggggattcattactgaacttggtattttcagcaaggttggaggaggattcaagcaaaggtaaaaccctagaacccttgagcatgtttttgaagctttttctttaggttgaatgtgtgattttgtgaattgggtgctgtaggggttaggtgttaatgcaattcaaattttaggcttaatttgagttggttttaggtcctaccagctagttttgatgtttaatttaagttttgtgcaagtttgagcatataaaccttaactttgatctctaatggaatgttttgattcagtgtgtttttctttggtttattggctgcaacatgttgtgtataacctaattaggtactctggaaggtttggttgtgtttggtggaagattgagcaagaaacaaaaaatttggggtgaactaacgcaaaccggctagccgattttaccagacctct

SEQ ID NO: 89757 - DNA, 892 bp, Cannabis sativa
tttccactcttcgtatgcgtgctgctgatgagaaaagcttctatcttggtttgcctagtgtgattggtagaaacaagaatgtggcttttggtttcttgaaggaaaaagttagaaagcgtattcagagttgggatagcaagctactttcaagagcgggcaaggaagttttaatgaagtcggttattcaatctctaccatcttatgccatgagtgtttttctgattcctcttgagatttgtaaggatattgatcggcttatgggaaggttttggtggcatactaaatcttcccaaggtggtggcattcactggaaaagttgggacaagttatgtcttcacaagcataaaggtggattgggttttcggaacctgcgggatttcaatttggctatgcttggtaaacaaggttggcggttactaacaaatccaacgtctcttgttgctcgtgtttttcaagcaagatattatcctcgtgggtcattttttgaggctgagttgggctctaatccaagttatgcttggcggagtctttttgaagctcaggaagttgttaagaggggtgctagatggaggataggttcgggtatctccattccgttcttaaccagccgtggctcccttcaaaggataacccttatgtgtcttcttctcatgaggcccttcatcattgtactgtgtctaatctgttacaagttggtactatgtgttgggatgaagagatcttggcggatgtgtttgagcaaagagatgctgatcttattcgcagaatacctttgcctttaactccgagtatggattcttggtattgggcgtttgaagactatggaagctattctgttcgaagtgcctatcgtgtgttacaagagtttaatgggagatggaattcacaagac

SEQ ID NO: 89758 - DNA, 502 bp, Cannabis sativa
taagaacatttcaatacaatatgtttattttgaacaaaagtaaccattccaatggattttttttttttctgggtgtgttcatcccaatggagttaattggacacacattaagatactatgaatatacataaggaattagtcattatccaaataattaatgagatgtagtgatatagggataggttaatgatttcacattttatcgcaggcactaaatcactccaatggagttgggggcattagggtttgtttggggtttacatcatttgttttttctttttggcacaattgatacaagttattaaaatttaaaatacgtaacgcattactcttatttgtattgagaattacattattttgatttttctgaatttgtttagggatttagatcgtgtttttagtttttcagactcgaaataggtaaaatatttttgtcttttaattcgttttctggtttataagaattttattgttcatgaaaaaaagagcatataattataaa

SEQ ID NO: 89759 - DNA, 647 bp, Cannabis sativa
gagtctgactggattcctcgcacagagcctactccagcgggagtagggaacttcattgtgagatgatagatcgacgtcacgatcttcatcgctttcaggattggtcgatcaatcacggcattgtacgccgaatattggtcgattgccgcgaagtcacccattgtcttggctactacgggggcggtttccaaggtaataaggagcttaatcattcctttcaacacaattacgtcgccggtaacaccgtatatacttgaggtaacaagtcgtagatccttctcatgcaaccccatttgcttaaaggcttggaagttcaggagatttactgaacttccgttgtccacgagtatacagtggacgttgtctctgccaataatggcgacaatgaccagtgcgtcagaatgcgggtgatggacccatctcgcatcattctccatgaacgtgatgtcgtcgcattctctcttgaataacttctctggtcgctcactaagattgttcaagttggtgagcgacttctccttggcttccttcgcatatcgctcctgcgactttcaggggtccgcctacgattgtcaatatattgcgaggcgttcttgagccactcgcattttggttttcctctttgtcatccgctcggggatgacttt

SEQ ID NO: 89760 - DNA, 811 bp, Cannabis sativa
  modified_base (416)..(417): a, c, t, g, unknown or other
caggaagaaggtaatcccagttggtgaggtcatggattctactaaagaacccaaatggctcaagacccaagcttgcacaagaaaatctctgaaccagccaatcactggcgtttataaatttcccaatactgggaatgaggtctcggccgtagggaatgaggtctctgctgcaggaaatgggatcttttgatgcagggaatgaggtctatgcaaaggtcgagtccttattcgtgtagacggtctttctcgagctatgtgtagatggtctttctcgagttcaccagccccccatgaataaccttgtattctttgtttaggaaaatttcttactggtttccccctagtggcatttatgtaaagacaagtttgtaaactaacttgggttttctcttatcttaaatgccttgtactttgtnnttcgaacttaatatatttgtgtttgcttgtatctttattcacaatgtaaacaactatattttgatcaaatgcaaagtacttttgggtcttttcattgctcataattttcctatttaagtagttaataatctactagacttttgatttacaaacagacatcaattctggctcgctatgacagttatagtctgtcttaaacaaacttgaatatacttttaatgatttaatcactttgtacatttttgattgcttgtatgaatagttatattatctatccattcaataggtttaagtacttttatcaagacatctcgatgtctcgtttaatacattcctatcttgtgtgaaccgttaatatttagctttgtacgcaagttatgagttatatctcatt

SEQ ID NO: 89761 - DNA, 603 bp, Cannabis sativa
tcgaacaactgtaacagtgttcttcttccctttacctctacctctgcccattgccaaagttctaagattttctttcaactttcaaaactaatgaaaactcctgcacatagaaaaaaggtgatctttagatgccaaatcaacatcagctaattaaatgaactagatcaatatagggactgcatagtttataacaagacacagaaaattcaacacaaaccatattcaatgcctaaggaggataaagtgagaacaacatcatttcaccatagaagaaaatgacacaactagagatatgtaaccagaatataatatacaatttaagggtttgggcattcaatcaaaactaacaggagcacaagccaaaataaaaatgtattttataatgaaatgaaagcactgaatcatttttcaatctctttttatcttgaatatttgattaagacagacaaatgcaagctcaattcttctctttgtcatgataaagtatattcccaaatcgaaaatcaatactaagcatgctaaatcaaacaagaaatatataaattggaaccaaagattatggcatggaaagaaagaacgtggattaaaatggattccaaaagt

SEQ ID NO: 89762 - DNA, 1658 bp, Cannabis sativa
  modified_base (46)..(49): a, c, t, g, unknown or other
  modified_base (292)..(293): a, c, t, g, unknown or other
  modified_base (844)..(846): a, c, t, g, unknown or other
agtaacctgctattataaataaaagaaaaatgtaaccatgatggtnnnnataaaaatgtaaccattgagtaatcacccatggttatatttttattgtaaccaccataataaacatttcttttttacatgtaatagtaggttaacaataggtaaaacttctttttttagaatcaattaattataattaattattttcttaaaataattaatgaatatttaacaagatctcttttagcaattaatatttataaataattctttatacaaatccttactataattattttaacanntaagccatttgattataatatttacaatgaaactgtatttttttttttacaaaaattagacttatttttacacaaattagaattctcttcttgtataataaatttttaaataattaattatttttaattgatattaaattatttttttataactagaagaattaagtatgagtttttctattcgagtttgatcaggttgcttcgttttttagaggagcttgactttattttttgactctcgtttggttttttgagtaaatgactcttataaaaaaaaaatagaagagtttcccaatttttttggaaagtacattcaacctattttattttttatttttttcaaatatttaaataaaaaaacaacataattaagtgtaataattttaaattaaagttataagtataataaaattttaattataaaattatatgtgtacaattttaaattataaaaaattttactataaaaaaattaataatttaagggcaagaaaaaattgctaacagatccttattcaatcaaaactatgaaaaattaattaataattatnnntaatttattttaattaaaaatatataattaatcttcttcattaaagttttataaggaaataaattattaggtgactattaggttacaggctaattattatttatttttatttaatttctaaattaatcacaatcattcaataataatctaatggctaaattcaaaaaaaaaaaaaattaatgctaaaaagaatgtaactttgatagttacatatttaatgtaactattgaaacctcctccttatatatgtatgtttaattatttgttgaataccttataccgttggcgaaggttttttataaatgataaagatttttaattatttaattaataaattataaaaaattaggaaaaataattttatttattatatgtatgtatatttatttttatcaattgaattgaaaaagtggtttattatagatgtataggtttttaattaattaatgaattaatatttataaatttaatcacaaataaaaaataaataaataatagaatcaataaaagaaaaaaaaaataacttttaaattaattttaaaatatcatgcttcatatctctcaatataattgttttattaattagttttcgtttctttagctggttattgacaaaataatgtctcactagttttaaagactcttcacaatttgaaaagcgaatttgctaagagttttttttttttttttgagaatttggtaagagttaataagctgttcattgttattggaggaaattacacttattataggattttaaaagttcttatgataaatatgacacatttaaatttgaccaatttatatggtat

SEQ ID NO: 89763 - DNA, 954 bp, Cannabis sativa
  modified_base (209)..(213): a, c, t, g, unknown or other
gagccgctgtatgtttcaagccatgttcttgtcgtgtaataacttgaacagtagttgtaaacattcaagttcatctcttttatcacagcaagcgcacaagcacacggtaattcgtcaatttggaattagttgcaactgcatgttttctcttttagattgatcacccatgctcttgttagttctgccacttcgaacatgctctcgtttannnnntttacctgcaaattaggtcaatataattaattgtcaaactgtactggaatctgaaaaacaactattaggaaactgtaatgcaatagaatggaaacttacttctatttcctttcctctgctcaagtcttgtatttccagttctaaaccctgtttttgtcattttttgttttattactgttatgaaactatgaaaaaactgaaatgcaactattacgaaatgttttaaatttattacacaaactaaccacttgtccaagtgttttttctttttcctctgtccaaaataaattcctgcaatattgaataaaactattatgaaataatgatgcaactctaattcaacttgaaaaaacatggaacttaactccaattaacatagttgttgcttgattttattttgaaatcttaaaaaaaaaaaaacgactatgcaactgaatataacttatatgtattggttatacctgatttggattgattgggagctcctaatctttttgttatttcaggtcagttgttactaattgtgaaccctgtgcttttcatcagttttgtttgaatcatatcttttttctaaataaaactaatatgcaactatttgcataaaaattaccatgtataactgttatttgttggtacccgtcaactgaaattcctgcataatatataaactatcataagacgataatgcatgcttatatattagttacactaccaacacttgtacggttatagtacagaagg

SEQ ID NO: 89764 - DNA, 785 bp, Cannabis sativa
agaaggggatctgctccagtaccatgaatccaagtccacggtttcactcaactgaatagaaaaaattaaatttttatccctatcattaaataaatcatcaatcacttcagcatcccattgtttacttcccaccgataacaagctagataccagctggccctccaaagcagggtgatgagaactaacaaatggattttgatcatcaagcaaccatggatcaaacaatatactgactgagtttcctccaccaatagatctccttgcaccagaccgaaccaagtctttggcttccaaaagactcctccaaatgaaacttgggttatgacccaaagtagcagacaaaaagcttccattaggataatatcttgccttataaatcctacttaccaaagaactttcattggttaaaagtctccatccttgtttaccaaggaatgccaaattataatcctgaagatctctaaaaccaatacccccttcatgtttgtgtctacaaagtcgtttccaactcacccaactcacacctttagaagagttcgactgagatttccaccaaaatttggacatcattccttcaaggcttgaacaaatctcttttgtgaggagaaatacgctcatagcataactagggagcgcttgggccacagacttaatcaacacttcttttcccacttgacaagaatcggctttcctaagaaaaaaatttcttctgcattttctcctttaggaatccaagaatcgcattcttattccttcccatcgtacatggcagccccaaataaaag

SEQ ID NO: 89765 - DNA, 501 bp, Cannabis sativa
cggtttaaatttttttacagtgcggttgtagtttgaatttttcttaaactgtgcagtacgatgcagtttgcgattttgcattatatattaatatgtggttcaaatcgcattgtactgcacattataaaaatgtaatttctatatttattaaggttcaatatatgaacatccaacccaaagcccactaattattatattattgaaacttaaaattttcttttatatttattttcaagccttatggtatttctaacaaatgttgctcaagttttattgtatttgtgatagtttaattattggtgatagttcaaaccacaaaaatcgtactgcactgcactattctttgtggtgcggtttcaatagtttttttagttttgtagtacgagtgcagtttaaaaaattgaaaaaattagatatgcgggttaatttgaaaaaataatcaaaaatcgcactaaccgcaccacaaacactcccagtactatttaagtaggcaaatatgta

SEQ ID NO: 89766 - DNA, 1026 bp, Cannabis sativa
taacacaacctcttctctaactcaatgcttggttgaatgttgttctccagccttgttgagtgagccaaacgtgtgcctatttataggcagttataacagttaagaattaaccaacaaccaaactgttgagctgttaagaaaatagttggttgacttcttgaaagtagtcaaaacacaatagtaatctagtataattttattctattttaattgaataagaatgtattgtaaactcaatatgatgtgcttttgattttcaacatttagatcaactcaatcttaattcagtaattatagtgaccacataaccatttggtaatacttgcaaaactcattctctatattatgaatggtgagtctttccttcatttcttagcaaatgaaataaagtattggtgagggagagttggtgaaatcaaggaggtaacctctttggatgtaacgtttcaatttatttatttatatcaatatatatatatatatatataaaaaaatgttggagacaaaacattaatatatcatctaaaataataataataaaggtgagaacaaatagtgtcaaatattaggtgagagaatagatatgttatctttttatgtacttgatttgtcaatatgccatagaaggaccacacttgtcctaaataggctaattttattttaaatataaatatgacttttaaccaagtttgatatacaaaatcaaatatattattattccatagtttgtttcgtttaaaaatatcaattatagctaagataatcaaacacgctataatgtatatatttggagagttaaaaggagaagagaaaggcaaaagactgagaaattttgctctgaactttactgttttattgctcaatattcggttgctatacaagaggtaaatacacatatttataatgcacaagagaataatctagaaagggaatattcaggggaatatattttgaacaagatattcctatcttttaggatatcagtaacggtattgtaccaccacaaggacaatcattagctgtcat

SEQ ID NO: 89767 - DNA, 719 bp, Cannabis sativa
agtataccttaaaggggtgtttcagtaaattacttatttatttttggcattctaaaaagtgttttagtataattttttttttcatgatcgtatatgtaataatatttaaaattagttgtaaattttaaaaaattattttttctcatacgtgtaatgggcaattaattagattttatttttaacattgtaaactatttaaaatatttttaaattttataaatagtcataaatagttacaatatacgtaatgtatcaaaacacaaaaaatctactacgacgactatttaaaggagtccactgcaaaaaatttccaatagtatattatactatacatattattatcagtttctgttttttatttttgccaaatatagacataaaaattatacatttgataataactataggaattaaattatttatttgttattttagaaggaaaacctatgagagttaaatttttcatagtacctaggtatatgattctaaattataatttaatattttagtatgttttatttttatttttttattttttaaaaaatgggatgtttttagtatttttttttaatataaaaaaggctcaaaagaaatcacaatctaaacaaataagcttaaaaaaaaaataggagatactgattcattaatcaacaagctcattaagaatgagcaaatgaatataaatatgatacatgaccactaaattttactaataactt

SEQ ID NO: 89768 - DNA, 1994 bp, Cannabis sativa
  modified_base (412)..(419): a, c, t, g, unknown or other
gtgcctcggcacgtaacttctacctagtataatataatatataaataacaaagaaaaagaagagaaaaagttaaagggttcttgaaattatttcagtcagatgagtatatatataaatatatatttagtgtatcacgattttgaaataattcaagaactttaacaaaaaaaatatttaccgtgggtagagactcgtgctaatgctaataatgtattataaaattaatatgactaatataaaatagataagaagaaaagaaaaaaaataagagagaaagagaaattaaatgaaaattccttaatagtttattctaatggagtgaactcttatatatacaaaaatatgactaaaataataaaaaaaattaaataaatgaaatataacaagcatttataataataataataatannnnnnnnaataataataataattaatattagatatccataataatattttataacataagtagttttcaatgttatttatatattacttctatctatttggatgattagatgagacagactagtatatttataaaacactctggagaaagtaaaggagtttattatatttatttcaacagaaaatttattattcattaatggctgaaaatcaagttcacaactcagagatattagcatatcaattaattatatatacgattgtttgatactttattgtttctcttactctttagtcgttattctctcctttccaagaaatttcctttttctttctttcctgtcattattatagtttttcttgtgtagccagaaaagtatacaatatcacaatgttttctaatgaaaaagttgaaaatagaattaacaaacctattgcttgagtaagctatatgcacctaatgtcattaattcgtatgtgtttttgtctatgctaaaagaaaagcatataccctttcagaaaaccaatctaattgaagcaatttctcaccattagttataatatttatttcatttccttgcaagaaacaagataattttaatgctttcaataaacaacaaactttaacaatcatttaaaataactgatgttcaggttgaagttcaaactttgatgagttggttgtattgttatttcttcaaaattcatctccctcatttgattttgctcatgcaattttctcttgtatgtgcagatttattggtcacttatctaagggtggttgctcagtttgctgtacaaaacttcatattttctctgcagatatataagatttatatcacacttacacacatgtaagctggtaagcatctgatttgtcatacttcatgttgatttaatctcaaaccatggctctgcaaatttgtggaagagtggggatggttgtaatttggctctctctcttaccattttactttgacattgtatagaattctttataatagtctcacatagaaatcccttatagtacttctgatgattaattaaatgactgtacagtactcttgtactagcttttgtcagtatgatataaccattggtctacatcttctcaccctatttatgccaatgtttttttcttatgtgatttaagatttgtattacatgcaacatccagatgttgaatccatgtgcagccagcctacaatttcttacagtcctgattacaaaactttcaaatttaatgccaaaaatgagggtatgagggaagctaaggcagttgacaaaaaaggtctggtggagcacgatatctgtgatgtgaggagtgaagattgtggactgactcatgatccaccaccagatgaaaaggagaatggaaatgtaaccagtaaggcattggaagttactcaagacaatctcaatgggaaccacaagggagagcatacttgtgctcctaacaactcggaggatagcaaaagaagaaagagtcagcttacaagaaaaggttctatggagtgtgagttacctgaactggttgttttctttcaagagagcagttacaatttcgtgaaggacatgagtat

SEQ ID NO: 89769 - DNA, 1681 bp, Cannabis sativa
aaaataatgtaatgtttattgtaaattaaaaaagttaatatttattggtataatttattggatttaataaatatttagtattaaaatattcttattatattaataaagtaatagaataataaagaatataatatttggtgtaatttttagtgttgtggttggaattcaaaaaaaaaaattagtgttgaaatagtagtttttggtgttgatttaacaccaaatttggctttctccactggagatgccctaaaggatggaaaataaggccaattgacatcatcaatgcatttttaaatagtgatcttaaagatgaagtatacatgacataacctcctagttttattgatctttaatttccaaataaagttttcaaactcaagaaatatctctatggattaaagcaagctccaagggcttggtttgtcaaactttcaaaagctttaatacagtttggatttcagtcctcaaaaacacatacttcccacttcattagagttcatcctgaacatgtcacctacatattagtttatgttgatgacattcttttaattggaaatagtgatgctcaagtgacaagactcatcacagatcttcactcaacatttgcctaaaaagatttaggagaactcagctatttccttgggattcaagtgacacatacagactctggtatccatctatcacaaaagaaatacctccaagatctcctctgtagaaccaaaatgcaaggtgccaaaacaagctctacctctatgaccaatagcctcaaactatctcagtttggaagtgatcctatccttgatccatctctttacagggggcattgtagtatgctacaataactaggcctaacatagcatattcagtcaataaagtttcctaattcatgcaatctccatttgaatctcattggattgcagtgaagagaatactcgggtatttagttggttctcttgaccatggtattcatctaactaaatgctctagttttgctgtacaagccttttgtgaagcagactgggcctctgatcctgatgacagaaggtctacaagtggctattgtgttcttcttgattccaaccttgtagcatggaaatcaaagaagcagcaaactatctctcgatcatctactgaagttgagtttcacaatctagctgctcttgtaacagatattacctggctttaatatttactctctaaattgtgcatatcatctccctcgattcctaaggtgtggtgtgacaatctcggtacagtaatgatggttgccaatcctattttgcatgctcgaacaaagcacatcgaaatagacatatattatgtgcgtgacaagattcttcaaggccacttacaagtgttacatgtccctgctcaggattaacttgttgattgcttaaccaaggccatttcaagcttcaggtttcctgttacatgtgacaaactcagtgtggtttcagcttctacacttactttgagggagattgttagatgagagagttagttagtcttcgttagttagttatgctttgttattttcagtgtaaataactttacttgtaactaacttttcttgctcaaaggtttgtatataaaagcttctcattcattctgtgtaatgtaaaaaacttcatatcaataaaatctttctttcattctgttttggttctctctctctctctct

SEQ ID NO: 89770 - DNA, 2295 bp, Cannabis sativa
tgtacagaatacactgaaaaataagtgtatatggtttgtcaacagtgaaaaattatatatgataaatgtgattagtgaaaaaatcattggttaaaaaacctgttacgtcacttcatcacttacttatgtttccatactgattgagtgaacgatagttgaagctgaacacttgagtgagactttgcaaatttgggtgaagaaccaacaagttccagtgagaatagttcttagcaaaattcatattagtaatagtgattttcacacgccaatattctctgtaactttgtttcacgtgccaatgaaccctaatggggcacatgtgctctgagcacctcactaaacttgaccttttatcctctttcgtctcacgtgatgagtactctactggaagttgcaatatttcattctcaggcctacaaaatagtcaccaaagaagttagttattcttataaatcaataatgtgattgatttcctaaaatgtatatatataaattttggttggaaaattgaagagaaaataaaataatcattatgattattgttattacgtgagacattttgctccaggcaatccttggcagttgcagctgcattttgggcaagggacaatggtgtcattgtaaaaagcagataaagaaacacaacagtttgggactgttgatgctcgaaactgagagtacatacagttcaatttccatgtctctgtaaaaacaaacacatccatatataactaaaatatgatttttgtcattaattagagtcttaagttgttcttgttctttttccttttttctcagtgtatgtaagtgaggagcactgctatttcaaatcttatttaaatatcacaatttaaatgaaaaatattcttactgaaaaaatcatagatcatttgtaaaaatgtttgtcactaaatgtattatacataaaaatcgtaatttatcgtatctaaatctattttcagtcacggggaattatcaataatatcagtgacaattaattatcatcaaaattagtgacaatttgtgattaattatgactttttaatcacaattaactttttgttataagtaaatgttaaaaaagaaaatcttatattgttattttatgagaaaaattaaaacaaaaatgggataaacaagtaaaataatttcaatacatattttgtattttcctgtaaaatattttttgtttgaaaaataccatatttttgtaaactttgcaaaaaaaaatcagaaatataaatttcccataagcaagatctatattgttactaaaaatattgttattaaataatttttgtagtgtttgacataagatgtccaacactatatattataattagcaatttaatacaaaataatatcaaagtcatatatatttaatttaaaatttcatatgtgaatgttgcatgataaaattgtattattaaactattaaaatattttcagttacaaatatatttatttttttcaatgaataaattcattaaaaaaagaataacgtcatacaggctaagtatgaatactaaacatgttcattaaataaatactaaacatggtatgataatcagtataaaactaaaaatccaacgaaaataagaatattcatatctagccaaacaagctgtttatccatccaaagagcatgcgcaactaatctatgagcaacacagattaaggacactcatggaaataaacttattaaaatatatatttttaattttccatatcaatttatttttctacttattaaaaataaaatatattttcaaatatataatatgaatattcaaaatttagcaaatatataattttatcatgttaattatttttcacattaataaaaatatattataaataaaaattagaaatttcaaataacacaaaaaatagacaaggatttaactaatatgtctacataatttttttttttggtattctataaaaataagggtaaatatcattttggaccttgtgttttgtcaaatttattaattggaccctctgttttgttaaataacataatggaccctatattttgcaaaatggtaaaaataggaccattagctcaattttcaccaattttattttttaatataactaactttaagactatttctaatacgaacagatataaaaaatttaactaattttatcataacatctctagatcaaactattattaaattttattttaataaaaagttaattcaggggatcttatttgtacaattttagaaaatacagggtttattttgtcatttaacaaaacagagaatctaattgataactttt

SEQ ID NO: 89771 - DNA, 739 bp, Cannabis sativa
taagcagcccgagtctccttcgtcttaggctgataaacaccttcttcttcagttaaagtaagaacactctcctcctgaagcctccggcgtctcttagccggaccaagatcagcaagaaggtcatcatcacgatctttcttcttcttcttcaatttctcatccaactccggtggcctccctctgtaaaccctatcaccgaagcttttaggatcaatcttgccccagagagtttcaggttctccggtggattcatcgttggtatcgcgaacgcgagaatcagtggtgagcaccagactggagttggcccgatactcatactgcttgaatcgagcgtgagcctccgcaccaccaccgccgagatcggacattatacaaattgagatacggcaaaaaaaagagtaataatcagacaatgtaaaccttgaaaaaccctaattaggaaaaacagattacagacttacttgtggagacgatgacgaacagagaatgaaagttgagaatgtaaattcagtttctttgtgtttgtttcctaatttataaggtaggtaaattactatattatccttggtctaaatataaaaatttagtagataaagagggttattagtgatattttactcaaaatactataataatcacgtgtattatggagacgaagaaggaggatacagggaaaaaagagtaataaccgaaaaaacgataaatcttgaattaaatatggaggtgccttttgtttctt

SEQ ID NO: 89772 - DNA, 552 bp, Cannabis sativa
ttgaaactgatgcattacgtgttgttgatgctttaaactctacattgaaggatttatctagtttctatgatttaatctcaaatgttcgttgtcatttatccttttttcctgaagctattatttctcatactataaggaatgctaaccatgctgctcatggtttggcaaaacatgctttagagttagatcaagacatgtcttggataggacaaattcctcatcctatttatgctattgttgtaaatgactactaatttataatgatagtttcaacttttcaaaaaaaaaatattttgtaatatgatttttttttcaacttaacaaataaaaaataaattgtgcctatctgttgggatatgtcaaaaagaaaagaaaaaaaatataacaatccacagttgctcataaataaattttcaaaaataaattagatttatctaaactacccaaaatcacttatttgttttgccctaagttgtgaagaataaaacaaaaacagtttacatgggtgttggcaggctgtttataacagcagccagaaacagatactcattt

SEQ ID NO: 89773 - DNA, 4322 bp, Cannabis sativa
  modified_base (1110)..(1115): a, c, t, g, unknown or other
  modified_base (3010)..(3014): a, c, t, g, unknown or other
gaaatattctattattttttcattatgaatagtaaattcttcttacatctttaaataatatttcgttattttttattaaacgatctgttaatatagttgtttatagtcttgttagagcatcttaatcttttctaaattgagtgttcaataaaattgatattcctattgagatacagtcttatcttttagctaatttagtaaattaataaaaattctatatttgtttttttaaaaaattctccttttatgtgaaaacatgagaataatatatttttttaaaatgcttggcctcatccctcggtataattaaaagtatataaaggtgattgctttttaattttattccaaagtatgacctttatagttggaattttgcataaatcacatgagaaatattatattttttttacaagaaaaagaaacccttttaacaaaagtaagaaaatagcaagatagataagaattttgagataagtttattgctttttcttggttggaatttaattttgcataaataccacatgagaaagtttatattttctagaatattaataatagaaaaaaaacctttttcaacaaaattattaagcataaccaagaaaaaagaggaatttgaacaaacactatagaaaaataacctcttgttttcttaaaaataaaataaatatatgaaaaaagttaccatttttctccaacgaccaaaatgcataattttatttgcaccccataaaattataaatacactcaaatattaaaaaaatcaacttaaactaatttttaaaatcactctaactattttttttagttttccttttcatattgttttctcttaatattaataattatttttacatttatctgaaaaatcatatataatgttaattttttaataaaattttataaatttttttattttaactttattgtcttattattttagatatatattatttttaaagtaatttacggtaaaaatacttaattttaacttccgattacaaataaatatttaagtttaatttttatcagtaataatacttaatttatatttttgaaactccgtaggtacctgacttttaaatattaatttattatccacgtgtcattttnnnnnnggtatatttaaactatttttttaataaaaaattataacatagaccaatcagagattgccacgtgataatttgtttaagacttaacagctaggtacgtacaaaaattctaaaattatattttaaatattattacaactaaaacttaaagttaccattttccttaaaaaaaaaaaaaaaacttaaatttaagaatttatttaccattactcttatttatttttattttttatatatattggagtcaaaatcaagttttttaagattgtaaataataatatatttagggttagggttcataattactttgctatttggggctttatatgattattattatttatacttgtgagcttttcttgtgcaagtaaatgcttcaaaatcacattctttctccccaaacaattgttgggtattgggatttatgcggtgggtttgattgattgattgagtttttgcccttttattgaataaatttcagggctttagcgcccctggccgttcatatccatgatcatcagcgttccatggacccatctctagttcaaaacactccttcatttgaggaagaagaagataaagacgagtggggtatgtatatgtaatgtattctttcgatgctttccttacttatctatagtttgaatttatttattttaactttctcatgaaaccccttgtttggtttccgagaaaattactgaaagaaagtaaaataaccgttttttagtaatgggtttgtgttgaagtgtgttaaatcaactcaagtaactcatttggttgaatgtgctcaatttagttcctttatatatatatatatatatatgtatgtatgtattacatcatatacagatttggttttaaccccttgtttggtttccgagaaaataatgtaaaataagagtgaaaagtttggttttttattgatgggtttgtgttgaagtgtgttaaaatcaactcatgtggttgaatgagctcaattttagttcctttatctacatatagattatatatatcttacattatatacagatttgatattctgagtattttctcatttggttgaattgagctcaatttagacttttatatctactgagctatgcctatctgagtttgaatatgaagaaacaatttcttagtttgttcaactctaagatagtaagattctgtgttttttacagtgaaattggtctctaaagttgaaaataaaaatcaagtgaattcccattttcccttaaaatgtctataaaagtaagagtcaatgtagctatagatttagtttctgattaaacaatgttttctctttttttggtgtttatatgttgttttaagctttcctttgtctacacactatccaaatcttatgtctgtacttcattattggcttctttttttctataacaagaaacaaaatgttagattcaactttgaagtggggttcctcaattgggattgttatttatatctactacttgcattatcaacaatgagtggtgatgcataaggattggggatctaggtttgttatgatatgatattagggtgtgtttggttcagtgtaattgaatgataatggattgtaataagaatagtaatgtgaatggtattacgacggtttattttcagaatagtaatgagaatgagtagcatattaacaaaaatatctttactttaaattctttcggtaatagaagcttagaaaataagggtaatagcagcataagtacccaaaattttgagttcgtaagtagtatagacccaatgcttatttttagtggtataagtatccaatgtttgtaaaactgtaatttttctctaattttgtcagtacaaactctgttattgtccaaaaaatagcacgtataagactcagattctagatcattaggtctagnnnnnaaacatgtagtatcagttactttcaactgttcttttaataaattcaaaacggactttatactgacgaaactaaagaaaaattatagttttacaaacattgagtacttatgcagctaaaaataaatattgagtttatgccgcttaaaactttgagtacttatgctgctaattactttatttcttattcatataaatggtgtaatggtgattacgttgtaaagacattactttcaaaaccgaaacaaacaatgaaattgtaatgttgatttcattacgattaaactgaaccaaacatggtcttattattatttggttaaaccatcaaatcagtataatagacctaaacatgtcacaacatacttaggtgcttacacgtggtcactggtctatatctaaagacatactatgtgtctgttatatcaggtgaactagatgccatttcccaatgtgtcatcatctcattaggtggtggacacacacacatggttcttgagtagaatgtcggtccttaaactaatctagctatgtttgatttgatgatttcatcttgattttgagtacaagtaaagtttttttgtctaactatgtttctttctttcttttttaatctacttgcatggttttttatggtgagcaattcaatgttgtttgttttgagttttgtcttgataatctatgacactaatgtatggtttcttttttcttttttgggaaatagacactgatggatttgtaattccaagcttgggaattggagactcaaatcaaagcaatcttgatgatactccaaatgtagaagcctcaaaaccaccttctcctaaggttagctagccacaagtgcttttctttctctttttgcttatcttaatactaaagttgttaatatcaaaagggttactaaaacatgttaatgcaaatcaatttaacacataatatttcggaaactcgggcctcgaataattaataggaccaaatcacatgtctgattatttgagctatcatttgcttgttaataatagaaattgatgaatcttaaaacaagtttttaatatcagttaacttgtaatatttcgggaaacttgaacctcgaataatttataggatcaaatcacatgtctgactatttgagcaattatttgcttgttaataatcgacaatcgatgaatcttaaaacaagttctcaatattagtttattttacaatatttcaagaaacttgaacctcgaataatttataaactcaaatcacatgcctgaccatttgagctatcatttgcttgtgataaatcttaaaacaagttctcaatat

SEQ ID NO: 89774 - DNA, 713 bp, Cannabis sativa
atatctcaaattattattttgagataaataatataaatgatatataattttaattaatttgagagtagccataacatctctaattaattacaattacgtgttattcatctcatattacttttatctttaagtgtgataaattcaactcaaaccaatatttgtaaaataatttggaatgagaataaattaagaacattcatttgcctctatttttagaagcctaatgtatgtctaagagtctacataagactttgcattgtatttgtttcaggattgttaagtagtatcagaataactaaaattaagaccactttatttttcatacaaagtgatgagatttctttaagatactcaatattatattcatacatatttattgagatgaactgatattctagaaatatacttaaccaattagattctaacacttcattggcaataatcaacatttggttatatccttaagattaccagtaagttgtattatagagaaccttaattgttatttatattataaaagtcagatttatttattattttgaggatacatctcgtatggtgtattataaagtttcatactagacctagagtttagaattacattttcatgccatgcgataaatttagctacaatatttatggctaagaattataagagtattgatcgaagctagcatatcaacattaagtatttagccataaaaaggcgtgat

SEQ ID NO: 89775 - DNA, 539 bp, Cannabis sativa
ttcacaattaccataaataactaccatcaaagctataatattaaatttatatttaatatgtaactactattttccacataaagttaccaattagatatttaaaatgatttaaattaatactttgagtttgatttttattaaaataaaatttaataattatctttttttaatggaaaatttatttttattaaccaataacttcaattatcaaataaagtagcaaaacagactccaagttgaaacgacaatcaggatataatatagcagctctagcgaagttatgagccactatattagctgatcgtttcactaaaactaaagaaatatttctcagtaaagtaagcaaatgcgtacaatcatcaattacatgtccaaataaagaaatcatagaaaaagtgccttgcagagcttgcacgactaaaagacaatcggtttcaagagacaccgactgccagtgatggcctttggtccaaaaagtgcttcccggacccccattgcctccgctacctccgattctacttgaccaaccaagaaggtag

SEQ ID NO: 89776 - DNA, 615 bp, Cannabis sativa
aattccgtaaaaaagcaaaaaaaaaaaaaaaaaaaaatcgttttaaggtgtaaaaatgagaaagtcccttaaataaattcaatttttgtatttaaacaaaaaaaaaattgatgtttattataataagaagttggtgataaattggaaaaggaaaataaaaggattgaatctaatattgaatggaaaacatatttgtatagtatattgttttattacggttgtttacaatttaatttagatgttaacaaaattgcttagtccctccttgtttggtctttatcaattacgtcactggaattttaaataattttttttaaagaaatgaaaatgtatattataaatacttttatttttcaatttaaaaataaaaaacaaaaaataaaagtgcataaattaaacaaagatttgcattattaggtgtttagtcaactagaatgtgcataaattctgaaataaattacagattactgtagtggtgttagtagtagtagtaataatatgtgtttttattttgatgatgagagaaatggatgttttagaaaatcaaggatgaaaagagaataataaattatggttttggaacaaagggaattgtttctatgtatagttaataag

SEQ ID NO: 89777 - DNA, 546 bp, Cannabis sativa
gttgttagttaggggttagttgttagttagttgtttccccacttgtatatacaaccacttgtaattcgtaactgataatcattacagaacaactctttctctctttcaatccagttctctttctttctctcgttcgaatctcaaaaatattaagtgtaccaatataaacgtgtcatgtgtacaagagtgtacacttaagcagttcacagtgatagttaagcggattacactttaaatttactactaatttagtaatttggaggattttactgttaaaatttaaacttgaatgattaaatataaatgaaacaacaattaaaaagatttagccgccaaaaaactcataaataataggtttataaaaggtgatataaagcatagaaacttaaatttggttagcaatatcaacattggtagttcatgactaaacatttgttcaaactaaaaaataaataatattagttggaagaaatcactctttcgatatagtgacgttttattataggctaattagtaattttttccccgaactttgacatgtactaa

SEQ ID NO: 89778 - DNA, 648 bp, Cannabis sativa
acaatgatggtactctaagaccatatatttgttccatcctgttgtatgatcttaatttccatatcaaacgatcatatatctgtaattcttgatgcatagaaagtacttaagaacttctatactaatgatcaaactttatacatttaatatttctcaatatacaaaaggaataaaagtttgttctttaattaattaacaactcttcaagagtatcacaacgtataatatacgaatttatattgcatagacaaccatatatatttttcaaacaataatttacttacatgtctttatttcatacaaagatctttatgatatagtgttcgcgactttgaatttatatcacttaagacatgtattaaattctttaatttttagataaggcttatttcaaattcttactatattaggagctccaaataaataaccttttgttgaaacatttgtgtgacacttataaactctcataaaatatattccttgctatcatcaaatcatgattctattttctcaatatttaagccttatttcaatcaatctcatgtctataagaattttgtacaacaactcattatgtacaaatacatatatgcaaatttctcattaaaaatatttatttgcacaccctacaagtcttacttcacttta

SEQ ID NO: 89779 - DNA, 912 bp, Cannabis sativa
  modified_base (596)..(597): a, c, t, g, unknown or other
atatatatatttttataatttttgaataataatattaggcgtaccgaaattttttacataaatatattatataattttatattatttataaaaaaaataaaaaagtattagaattgaaatttcatttgtcactaaaaattaattgttttaatgtaatattcatattattataaactaataataactgtaaaaaatttcttattcattggtggattatgttaaaagcagtttaaaattaataatactaacaataataatatatatatgtaacagtaatatataattagtttattactaaaaataatatataattgataatgaagatgtaatcagtgtgtatagcaggccaactttctttaactcatttcgatcatgacaaaattgacgaaattagactatatattatgcctacgtaagtggtgagaaaattaaccccactctaacctcttaaccatttcttaattaattaattattttctttatattcatttctatgttttcttgtaattaattaatatatatatatatattgatttctcttaaaaattattaatttatttaaaggatttttttattttacactttaaaataatttnnttttttttttgcatttttacgggatttcaagaaactcctataataactaacggaacaacttaaatcacaaccaaaatttgtataacaacccatataaaactacgaaataatccaaaccgttaatttaaaaaatatatataaaaaaataatttccttttatttaattactataaaatattctgtgtgcccactagcttagttggagaaattaattaaactcctttataatacgtattacgtaggtagttcaaacttgatatgatctcctaacgtaaacttggtcataatttttgcattgaaaaggtttggtagaga

SEQ ID NO: 89780 - DNA, 1216 bp, Cannabis sativa
atctggtcgaagtgaagtaaagacaaggagaacctctccgagcctacatcagtagattcatgacggaggcgactaaggttgtacgggtgaccgaagacggaaagttgttcacaatactgggggggagttcttggtgaactttggaaggacatcaggaagaacggacctgttaattcaatgagtgtcttcctttaccgtgcagaaggttttattaagcttgaagaagctattcagtgggcaaaggttgagcaaaaacctaaccggccaaaagctccctctgttgggacatccatctagctcccccaatacccaagcaatttaagcttgggtggtaaacggtccaacaacaacaataggcaaggaaatgggaaaaagggaaagtttgctggtaacaccaaaaaaactcccagggagaatcctaccaagtttactgcattttctatcctgacagaagatatagaaagtgtgtaaatggctactcaatcattagccccatacaagaagcccgcacccatgaaaaaagatgtaagcaagagagacatgaccaagttttgctgttttcatggggattatggcaatcacaccaatgaatgcaacaacctcaagcacgaaattgaatttctgataagaaaaaataatccacatgtactgaagtatgtcaaagccgatcagaatcagaggggcgataacaaccaagatttactaccaccaccagtagatggacatctgtaagtcattattggagggccgcacatagatggacatttaggtaaagcccaggaaaggtatgcccgaacagtatagcatgagcaaaaagaagtagttctggccgtcgaagaaaagaaaccaaaaatacaacgggcaggggagcccaccataacattaaatgatgaagatgctatcaacatcagcttcccgcacaacgacccattggtcgtggaagtccagatagctaacaagatggtggcccgaaccatgatagacaatggagcctcttccaacatcttattcaggacaaggcgtcgcacctctagggaaaatttgcctacccctcactgttgggatggctccaaagagcataactagaattgcacaattcttagtattggacgttccatcagcatttaattgggcctactagctttatatgacttgaaggttgtgttgggttttatgccctaaataaatatctttacaatctggttagtaatcaata

SEQ ID NO: 89781 - DNA, 1955 bp, Cannabis sativa
tacggtgtactgagtgcatgtggtacaacacatgatgtttaagagtataattcggtgttaccaacactagtacagttgggtacgtagtgcatgtggtagaacacttagcagtaatcgagctaaagttcaaaccctaccaacattagtatagtagcagtacgtagtgtatgtggtacaaaggtcgtacctttattgagaatgttcttaatcatctgttaagccttgtggataggcgtatgggcacctaagtaaaagtttgtagtatattgtatgttatatgattttcttaccgaggttgtcgactcatagttatttcttgcatgtgtaggtaaaggaaaagctaaggctgagcagcaatgagtccaaagctctgggatgattgtacatgtctagacagaacgacctggagagttcagtcttgggacaacttgggcttctttttgtagtcattgcgcgacatgtttataaagttcattttggttgtataaataagttaaaaaacgggttcctgcctcttaaaagtatatatatataactacgattataaaagtataatgttttcaaaagtttatatttataagaattttcgataaaaaccccttgattagcaaatgtgtgcactgtaattgaaaagtcactgtagcgtgcctaagcattagggcgttacaattttggtgtcaaagttgccaagttgtctaccgaagatcatcaagacatgtacaatcattgtcagagataagctagactcactgtgcagtaagcctttacttatttagtaagttatgtgattagaaaagcattctaggaagcatgataaccatatgttatttattagaatgcattgccttaaaatctataagtgcggtacttagaacatatataatcattgtctgacctacctaacttatgggttcacaggctaactcctataatatggacgcccagcaaaacatgagaagtcatgataagatggtcgagatcgggggcaattggggtggtcaaaatcctccgaatccccgtggacgcggaagaggccattgaagatttcaaggacatggacatgaaaatccaccaaaagctcctcaagattgggagaaaaggtttgtagagatgcaagctcaaatccaccaacaagacgaagaaatttagaggctaagacagcagggtccctcagcagtgcctccactccaaatgcctgccacattggttccaattgtgccagcagataacctattgttggaaatcgtatggaacctttgtatgagaggttttccttacaggcgcctccaattttttttggaggtctggacataaagaaagtcgaacagtggctaacaataattgagaggatcttgaactttatgcgtgtcactgggaatgatcgggtaacctgcgctacgtttcaattctaggaagatgatcttgtgtggtgggagtcagtatccttcacccgagatgtcaccataatgaccttggaagagtttcaggatctcttcaatgccaaatattataataaggtagtccacagtgctaatcgaaaagagtttattaaactagttcagggagataccatgttattaacagaatatacaatgaagtttgatctacttgctaagttggctttgggaattgtgtccgcagacttcactaagaaaaaaaaatacttgatgagtctaaatgccaagattaggcacgatctagtgattccaaccaatgacacaactagttatgctgagatggttcaaaaggctctccaagataagagcatagtggaattcctttaagagccccgagagactccaaatattggtggaaccaccacccttcctacttcaggttatagtagggatggtgctgtaccaacattgatcaaaagaggaagaatgttccaacccatggtggtttaggacatagcaagaggtttcgtgggaactaaggtagaggtgggggtcaag

SEQ ID NO: 89782 - DNA, 928 bp, Cannabis sativa
tatatgtatgccatacaaaaaaaattaatatacaatctaaatttttttattttatattctgaatggtataccatagtacacaaaatgtatatcataatacaaaaatatatatactaccgaataatttgagtgagaatttggtcattatttgagaacaatcattataatttggagatgtgagaaagccagaagaagaaaaaaatgagtagagctttgtcgccttctattgtgaggaattaggagaaaatgattgtatcgagcaaatgaatcgaataaatagatgaggaaagaatattttatcaccttttgggaggaattacagtaatttaccaatctttttggaaaaaatctaaactaaccgaaaaaatggaggagagagaagtttcgtcatttggattttggaacatagtttctgtttctatttagaaaatgagtataatgtgaataatacctttaattattatataaaggtattctaggtactaaataattataaatgccatttgttatattatttttgaaaagagacattaaacttcaataataaaaaaaaacatgggcgcatttgttactatttccattttattcagtcttcacgtgttcaatattgttatggcctttgaaatagggctgggcatgaaatttagaaaattgaaaaatttatttaaatcgacataccgaacactactggaattgaaactagcggagtcaaaaatcaaaactgaaaaaaccgctaacggttaaaactgccattgaacagtcaatttttgttggtaataaaccgaccgaagaaactgaaaccgactgttatacacatatatatatatatattaatttattaagtttatttttgttttatgtattgtagttactcataatatataataacatattattattttactatattaaagataaaagaataaga

SEQ ID NO: 89783 - DNA, 746 bp, Cannabis sativa
aaaaaatcgtatagaaaccttattgcaactagcgctgcaaccactttagaaacctaaaccgtaaatttaaaaaaaaattaaaaaatagtatttggagtaattccctcaaaaaaatattgaataatttattattttcattgaaaaatatatttttaaaattaaaaaaatcaaactataaaaataaaaatttctagtgttaatatatttttataatttttttatgtattatgtaaaaatttcttaaatttagtaagtatttttgctttctttctatttttacgaatccaatttctatgattagttgaccaaagcataatattttttaataattctcatgcctagcttttaatctcataatttcccctagtcaatcaaaactcgaacaatttgttattacacatgtaacttttgcttcacataattaacagatggtttcaaaataaaaaaaataaaataattaacaaatgatcgaggatttagcgatgtgatactcataattaaatatggatgttacacataattaaaggagtaaaaacgtacccaggaacaagtggatagatggatatgccccaatcatttttcaccatatgtaaatctgaatggcatattccacaatacaacaccttaaacataacatctttctctcctgttttcctgcaatattaattattatacaccaaacatatgtttattaatatttaacttaaataaggagtagtatttaaaaacactcacaataacttcat

SEQ ID NO: 89784 - DNA, 541 bp, Cannabis sativa
  modified_base (500)..(515): a, c, t, g, unknown or other
aagagagtttgattgaggggatgcaacaacttgatcaatctcaaagaaagactacttttgagggaatgaagaaagttgtgattaatcgtacaaaacaaacatatatatacccaataacaaacccttgtattaggaaacaaacgaagagttaattagtttttcacaatgatcagctcaaagactttggtgctagctaggtttagaatatgtatggattgtacgtagtacctagcttaatttggttgaaaaccaatatatatgtatttatatatatatatagaaagtcaaatgagttagacgattgttttttaaattaaagataatattttataatttaaattcaagcccttagaaaaataaatatcgaaaaaaatatcatcacaaataatctaaaattaaaaattttaacttgatcgataaaaatttcaaacgtaatagatatttttttcaaaattatattgggatttaaatttaagtatatatgtaatatatatatatannnnnnnnnnnnnnnntaatgggtattacccatgtatgggta

SEQ ID NO: 89785 - DNA, 1088 bp, Cannabis sativa
tttgtgagtatatgattgtgctataactaggctggtctcacttttttgtttaattaattcattataatcaaggggatcccacaaataaaactggtgcattattaattaagcttacttttgccgcatgtccttatactatataaattttggcaagttatttcctaaattttatttttttgataaattaattcccaaactatatacgttttggcaagtttaatccccaatttttttcaataaattgatcacaaaatttttattttattaacaacattaagtccccactcttatattaatttttttttattattattttacttactttaatttattttttgtgttaaattcaaataattttttttaattttagtactttgataaaataattatattaatatatttatttatttattttaatttttaagttcatataatatttaattttttttacaaaaatagttaaaatatgatttattcatatatattattaataaaaaaaaatatataaacactagcagacccatataatgcttaaaagaaattctagtcccctcctgttaatatattttaacatttatattatattttattactgatttatgaatatgcagtatcataattttaataattttttaattgtatatatatttattaattatttaaattttatatcaaaactggtaaaatttcatcaatttagaatataaattaaaaataaattttataatataatttacttaagtagtttataaaaacaaatatattattttgactacaaaataatattttactacgtatataaatatattttatattaagtcttttcgtatatttaacgtatgatcctcctttaatggtagagaaaataattagagaatcgaaaaatatttatagatttatatatagttcttttttaaattttggtgcatgcacatcaattatttgatgagaaagaatatttacttgaagcgcagaagaattattcgatagcaaaaatattttgtgttagtattattcatcaaaagataaattgttggatcacattatatagttttgtaatgttgaaaatatatcttgatttgattaaa

SEQ ID NO: 89786 - DNA, 675 bp, Cannabis sativa
ttacaattttaatattgttataattttaataataactattttttaatgttatcatttctctcatattatatttatttaataacatttttaaaatgtaatcatataatttttaattacattattattatgttacatgttaagaaatattacattttaatattgctataatttttcaataatagcactttgttaatgttatgtttttgtgtttttttataactatgaaattattaaattttataatgcctattctttgtccaaataatgtaattacaatataacatattttgtataatatcaaaatattcaatacatgtattccaagtacaaaataacatgatcaaagctcatgtaatgtctaatgagtcaaaagtctatttgtaacatttaatatttatggtcgatccacataatattatatgagtttgagatgcgcagtttgcaggtgcggccaagcctttgaggctaaaccaagtggcataaccctctcggcaagcaacaaatttagaattgaccttgtatgaaacaatggaagaactcctgtggtgaacctgacgagggtagttgtttccatacccaaccatgtagcttgtagctctgcggttgtctcccaaaatttaatcaacctaaaaaaagtaacatgtaacataatcaatggttgagacatgaacatgt

SEQ ID NO: 89787 - DNA, 722 bp, Cannabis sativa
  modified_base (72)..(73): a, c, t, g, unknown or other
tgtaaggttttcataaacccttatgtgtttatttcattgttttagaaattcatattagaatgttaatgaaanntacttgttagtaaatctagatccatgataatgatttactttctttaaatatgaattagaacgatgatttgtgttgttttagatggtttcatgttggtttatgtgcttatttgatgaatgtatgtgttgtacaaaattttttcataaaaattattttttctgtttttgaaaatattttatttggattccttgggaaaaattaagcaattttggtttttacagaattcgattccgataaaaattgaggaagttatgaattttggaaactttggatgcatggttgtcgagtgtgtgcatcgagtgcaccaggcactcgcacaaggaagcccatccgcgtgcgtccttcagacaggaattgtctgaagccttggtcacgcacgctgcacacgcccgtgtgaccctgcaatcccgcccaaccagatgctgctagcgccgagttttctcggcgtcaccctcacttccacacccgtaaggccacttttgcagcctcctggggctgcacttgcaacctagctgccaggcgcacccaatttccgaattttgtgggattccttcccaatttcagatttttctaattttcaaaaccccaaaattaaaataaaatattatttttaatatatttgaacttaaatatcattttttaaattaat

SEQ ID NO: 89788 - DNA, 718 bp, Cannabis sativa
  modified_base (386)..(410): a, c, t, g, unknown or other
  modified_base (489)..(489): a, c, t, g, unknown or other
ttgacaaagagtcaatcatgttataatgttaagagttataattttctatttatatgatgtttattagggttagattagaatttaaatatagaataaaaaaagataaaatggatttattttgaacccctttggccgaactcccttgtggcccaatgggtttcaattttgccactttattgaaactttatctttcttttctaaaataccatattttaattctatctctataaatattaattttgtctatttaataattataattaattattaaataaaatttttattaacttatttattaattagaccttccaaagtttcttaattaataaacaaaccttgaaatctcttttcttctcaattaatctcttgcttagtgaaaattcatnnnnnnnnnnnnnnnnnnnnnnnnnttataattgattaattaaaaacaattaagtgagtttacaagctaatattatctcaactagtgcggggaccatgggcctntataatcaagctcccaataagtaattctagaatttacctagtaaattctctatcttattaattcttcttgactccactatagattggaattgtactcctgattatatagaacactctatatgttccaaatatagatacgctataaatttttcattgtttcaatcgaaataatcaatgatcatctattgatgatctacatcgagtaggaataaatttactgttctaccct

SEQ ID NO: 89789 - DNA, 976 bp, Cannabis sativa
ttcgtgtagtttcggttgtctatgtgttgtttatgatatgaactactgaccattttgttccctcaatttggttgtgtggaaattttgcaattgtgttgttgaaacataactactggaaattcacttgagtttttccatgctattcaattaaatagtggattttatcctaaacatgttttaaatatatataattccattccttgtttctcaatttcaggcaagagcttgaaaagtctgttctttattctgaattagacgtggaatactttgttgattcttgtgtagtagggacatcatcctttcatgtttcttatttacaaatccctttttgaaatgaaacattttaacttgggagttaccaattgtattgattcaacccatttgtgtgatttatgggtagtttttttattattattatttaagtatttatatataataatgcataacttaggacttgaactcaagactttcaacacacacctactcttcttttatggtcacttgagctagcctcaagtagctagacaaactagagacttagagagtcatgtgggatgcattaaatatgaaaagcttcacatgaattacatgtgatgtgattattataactgtttcattgcctacactcactcactcaaatcaactcaactcaactcttgatgcatgtatgttttgatatggaaccaacactcttgatgtatgtatgttttgatatggaacttttgagtacatgctttttactccattgcatgagtacatgactattaaatgcagcttattcaaagtttggcaagaactaaaacatttaaacttaattttctttgaaattgatatctctcctctggatatacaaacatgcatggttttctttccccatatcgaggagaaagatatcatttgaatcaatatgcagatcgtaatccttcaggaaaaaaggagttgttcaattattgacattcatctttgagaaatgtca

SEQ ID NO: 89790 - DNA, 1034 bp, Cannabis sativa
aataactaaaccaaacaaagaaagcatttttaaagagctacgaatagcttgaatagcaccgaggcagtcggattccagttgagcattttgccattacatttccttaatccaactaagagcttccttcaatccgatagcttctgcaagaggaagattaaccaagctataattatattatactttgtcatatataaaaataaaaaaagtaataatttttccatatattgaaaaaagaatacatttttattattaggagaaaaataatacgcctacttaaatttgttaatatatatttgtgtgccataaaaaaaagaaattgcccttccaagtatgtaatagtgagtcaaaatcagaagtaaaatcaagttaagttgttaattaaggatctaataattatgagaagaacattaatctagtgtcttatcattgagattgtaaatagttagcaatattatgttaatatagtaataataatagtaatataaattgtggtaaaattataggcacgcaattgtaagattaattctagctagtaaatatttgtgtcggtacaaattttcagtagtcatataataattaagtaacaattgttgttaatttgtccttttcagtaattataaataattaattaatatgcttgattattatactgcatgcatagaaaagtagaaaaatacaaacacaaacaatttgtctagctacctactttctatagatagcctactgcaatatttgatgcttatattatatatataatataggaatataataatagcagtataagtatccaaagttttaagtttgtaagtggcataattttaatgtttatttttagcggcataaatacttaatgtttgtaaaactgtaatttttctctaattttgtcaatacgaactcttttattttcttcagcaggccacatataaagttcagattcttgatcattgggtctaaatagaaacatgtagtattagttacttccaaatattcatttaataaatttaaaacagagttactgacaaaactagaagaaa

SEQ ID NO: 89791 - DNA, 4314 bp, Cannabis sativa
tgaagttaatccgaaaatatagagctttatcattgttactgagagaattaggggttagagaaaagtatatatgcaatttaaaactttgaaaattgaaacttggtacatattttgggtaccatttggcaactgacctgagaatagactgacgaggaagatttgctcatttcattttatgacaccattgttggatagtgatgagaaagttgaagctgcaagcaaaatttttgttgttatgtttaaaaaattataagaagttaattaattataaaagtgtttgtagttatggtgtggtccatgaattttcatactctggcctattcaaagttttcatactattaaaatctagtgtttaatactgaaagctcaaccattaaagcaagcttgtttttatattgtatggaacaatgacaaactttgttgggttattgtgctccttctttatttctggttgtctttttttatgcatattcactacaatagcatactttttttgttagcattctgtaacactaatggatcacatgtatgtttatatataatctgagtaaggttattttttctggtcgagaagtactttaattttgctctggttttgttgatggttattatagcttatcattttggaaactgctttagtgtttgtttcacttatagtagtgatatatgtagatacatgcagaataaagaggaacttctgcatcactaacaagtggactacaggctctcacttcgtcttcccaagaacccggtaaggttattccactctgtcccagttagggctgctgtgtgtcgttgaaaaatatagagatgggaaccaatgattttcagaagaagaagaagaggaaaaataacaagcttattgagctttcccaagaaggtttgtctgcttaacttatgactttttttgttatatttttatttggtgtttgtatgtatcatattagttcttcaaaattgtttttgggtcttattgggaagacacatggttattgaatttaacaagtcacagccatggtttagtatatgcttttaaattgcatttttctagtttgggttctgtcctttgttgcttgagagcatagattttttgttctgcagtacaccagatttctagggtttttagcaaataggatttacaaacttatttagtaaaattttgaatatgagagttaattaaccaaatttgtttagctttttcaaaccaaatgtttaaagcaacgaaggatcaatcaagaatgatatcttttgtatgaattcagtaaagggtgtcaaccttctaactcttatttggcttatgtctagatagaaaattaaatgaaaaggatgtcgaacctaaagcgaaccgacatttggagaagagaaaaaggaagaaggaacataatgtgggtgttggcaaatatgctcaagttccttttgatggtaaatttgtgttttttttttactcgttaaattattttttaattgcctttgtggttgataacttataaccattgtctctaaattgcttcagacgatatttcaataagaaaagagaaaaagaagaaaggggagaaatcaccaaggaagggaaaattgaagaatacagagaacaacaatgctttgattgaaaaaacagaccaaattgattctgagactgctgatggttcaaacgaacaacacggtacacccaactcgtacatttgtttattttcctagaaccctgaattttatgtaggctaggatattctttggtttttccctgtagaagggtagtaaaatctgaagtgtcaagattagaatattgttcttttaagaaatttaataagtcacaacccaaagcaccttgttcgcactaaggaaagtgtcattaaaaccaacaccattttgattgtacctcacctaaaattgtcttttgattaggtatttcttctctagtaggtagatcaaagaaatctttgaagaagaaaaaatatcaaaattcttcgaaggaagatgactccgcagaagatcaaatagaagatactcagaatgaggttttccatgccccttcaacagatgaacccattttgataaggaagaaaggtatttagtcggttttgaacatttactagttttgaataatttgcattctagagacaacaaatactctttttatgttatcattcaacatagagggattactaaacaaaactgtcattgtaggcaagtcaaaggaagcaaagaaaaacaaaaagaaactgaagaaggatcatgattcattaaaagagttgaagtcactagaaaaggaagaagtgattaatgaagatgatgtttatcttatctcttcgggggatgaagactgttccaaaggaatgaaaagtatgtattctcaatttgaaagacttgtttttgatgtgcagtagtacttataatctgtactaacaaacacactccacttgtagtgtagaaatatatgcattttatttagaaaaaagcaagtaatataacgtttgtcgtcaacggaatctgatttttgtgcaattaggccatctctgctaagatctacacatgccttctttatgtagtttggtgggaaatctgctttgttcaaaccgtcttctgtacaacataatattttccgtctttttattgatggggaagacatgaatattttgctcacttataagaattacataaatgcagaatggattacaaagtatcatgaaagtcgaccagggttgaccatacttcaagagagaatagatgagttcataactgttcacgaagcaaaattagaagaggtatatctttcaaagacttttgagtcacattcagtttctcttactcttttcaaccattttcttttaagcaatgtcataatcaacatgcaccataatttcttatatatgcaaacattgatgataattgcatgtttcattctcataatgatgtttccataattcgtatcaatttgaaaaactcggggttgtagggtttggcaggaagataagtgtatttggaaaaagtttattaaataaatcatatttaggaaagaacattagatgtgaaattataattcttatgtttcatggctctggaatatgcaggaaagaaaagaaagagaagctcgtgttgccgaagggggatggacagttgttacccatcataaaggaagaaaaaagacaaccgatgctgaaagtggaatcactgtcggttctgttgcccaagctgttgcagataacaagttggccaagaagaaaaccaatgaagttggtcttgacttctaccgcttccaaagaaaagaatcccagaggaatggtatgttgactcctacaactttaaccttttaaagaaatgttcaaaatctatagtttttatccgaaatcgttggttaaaatgatgcgccaactgaaacacaaatctttgatttgtttcagagattatgttgctccaaagcaaatttgagcaggacaaaaagaaaatacagcagctcagagcagcgaggaagttccggccttactgagttctttcctcgtgtggagagactcgtcaagaattcattgatttttgtggtcttaagtctaaaccagaattttgacatgttgtaagaactctggcctgtagcataacattttttttggatgcaaattgtgtttttctagttaaaatcttcttatttatataaaatatgacaattttcatactatcatgaagattagaatagtatttattagaatttcggataaggtgaataggttctatctcaaaattaattggttatgagaggagtaggtcatttatacaatttattttcacattttagcaatgtgggactaactctaatacattcttctcacgtttgagcttagaaagtgtgggtacaataaacgacctttaagaaactataaggtcgaaacgtgacatttgaagaattcctacaaggccaaattgcaaaatttgtgggtgtacatgttgagaaatatgtggatattgaaacaggttgaaaaccttaacactgaaaattgacacacattaattgaaaacattttaaattgaggttaaaggggagacaacgaagtttttaagtttggctcgtctttttggactggggatactttgggattacaacggatcacaatcggcttgatactttgttagaattcgggataaggtgaatgtgggttttatctcaaaaccaattgactatattaagaggagtaggtcattcatcttatatatgataatttatttccgctaaaaattcaaacattatcatataacttaggtattattaccgctaaattccaacattactattctaattaaatcaaattataattaagaaattagctc

SEQ ID NO: 89792 - DNA, 807 bp, Cannabis sativa
ttagattaatttgataaaataaaacgtatgtaaataattagtttgaatcaataagaagctgctaaattaagggaatttatatagttttgatgttttatattaaaattattaatttaaattgacaatgactctttagttaatttttagtttgtcgtattttaaaaaataatatagtttaaaaatatttgaagagctgcgcgaagcgcgacactgttacctagtttattaataaagtcatcaattatcatctatcaagagtggtcatttagctaatctatgagaccacctccaatgagagatgttaaaattatgctatattatatttagcacaaaaagtaattttgttgtaaatttatactaaattttagttttgtgctccaatatattattgcaaaattttgatgtaaaaattaatatctaattaatgttttattaaaaaaaaaatctaataactttataattaattttattattattttaatatgtaaaataataaaaaaataatataaatgttttataatttaacgtgatagttaaatatactaataaaataatagaaataatttaaatgtaaataaaaaagtagtgcatttattgtggtataaattttacatcatagcaaatgttgtgttaaatttagcacacaatttactatgtgctaaatttatatcactttttggcacactattagagtacattttttgttaaatgagctatattttaactttttactacttatttatatttttattggagatgctctaatatagtattttgtatgagagttttaccttttttttttttttt

SEQ ID NO: 89793 - DNA, 596 bp, Cannabis sativa
tcatgtaacccacgtggcacttaaaaagaaaagaaaaagaagctgtgtctctgtctccctagctccctctttattactcttattattcattcatataaactgccttagtttgaggttttgatgatgagatgagatataatggcaaacacaataagatcattattagtggtagtgggagcggtggtagtggtggtggtggcggtggcggtgtttatgggtcgttgctccgccgagaggaggagggccgacgagaccctgcagcaactgcatcatgacgaccaacaacaggccaaatcagtaccctagtaatgtttattaattcactctctttattttattttaattatttatcatttatatgctaagtattaaaaattgtttgtatatgcaaaaaagtttgtggaaaaaaacatatggaaaaatttctaatgtgtattctgatcactgcgaatttgagaaacagataatataatattaggtgattctacaatgcatacttttaaaagggatgtacgtactgatgcaccttctatttatttcggcattcagacaaaaattttagtctaattttttttatattcatatacgttatagct

SEQ ID NO: 89794 - DNA, 670 bp, Cannabis sativa
accaataatattaactaatatattattttatgcgaacaaaactaaatagctaaatcaatataagaattcaattcataattaaataattatacaaaataataatttatacaaaattactatttgccctcaaaaataatttctcaatgaaattgattctttctcaaataatcaatcttcagattaaatcttcccctttatagtatggtatagaggtgatttggggatgatgaacctatatttcgaagctccaataagctctaatttactattgatctcattaataaaataatctgatatattaattttattattactccactataaatatggaattgtatttataaaattttttctagtagtctattgatataattaagataagtagttcgtcctccaatttattagttcataattagagctagtcaaaattatcgttttacccttctaattatctcttgaatttcttaagtaccattaattcaatgtggacaattaatatataattccaatcatagatttgagcccaactataatcactcctagtattaacactttaaaggaactaatattcgatcctttcgaaaatcttagattccacatattgtataacatgttcccagccactcatgttattaagttcccaaaatagaaattgtaagaatcatcttct

SEQ ID NO: 89795 - DNA, 514 bp, Cannabis sativa
aaataaaaattatttttgaaaacaaaaaatatcatttttaattttttttaaccaatattttagactcggaccttaatttagactttggaaatcgaacctagacccagtcgcagactttgacccgctcccagtctcgacctcggacgctgttaagaacccaacttaaataaaatcaacaaataaaaataaaaataaaaattatagaatatacttttgttttttctttttaaaattgaaaaataaaaatagttatggaacacatttttgttttccaaaaataaaattttacttttatttctgtgagtaaaaaatttaaaaataaaagtgttatcaaacgtcaccttaattttttttttttaattttgtacattttaattatttaaaatttcctaaatttttttaaataatttacataatcaaaaaagaaatttatataatttttttaatgagtaaattttttcaaaaaaaaaatcatatatctttatatattaaaagtgtctatctaacggcattt

SEQ ID NO: 89796 - DNA, 693 bp, Cannabis sativa
tgtctaatttttgcatttagacctaccagatatttctccttcttggtgaagtccgtaggcacaatacccgaaggcaacttggccagacgattacattttgttgtgtactctgttattgacataccctcacttggcatcacctcggtaaattctttccgcttagcactacggactgcctcattgtaatacttggtgttgaataaatctcagaactctccccaggtcattacagtgacgtctcgagtgagggagactaattcccaccacaagagcgcatcttcctggaattgaaaggaagcacaagtaacccgatcatttccaatgaccctcataaaattcagaattctctatcattgtgaggcactgctcaaccttcattacatatggacctcctagaataactggaggagcttgcttgcaaaaccactcatacagtggctccatatggttgccagtaacaagttgttctgccagcactgcatgaattaaagcagcctgaacttgtggtgtagacgctgcaagaggaccctactaccttaatctcagaatttcttcgtcttgttggtaaatatgatctggtatttccgcaaatctctgctccaaatctcgaggagcttgaggtgggttttcatgtcgacctccctaaaaccttccacagcatttaacgcgtccacggggattctagggaatttg

SEQ ID NO: 89797 - DNA, 733 bp, Cannabis sativa
aagtccagagccaactctggagcaagggtcggaatctagctacggtccgggtctccaaccccaaccctctaatacatgctaatacgattcataatttattaaaatttatagtcgtaataattaatacaatataaaatttcatccaaaatataatactacttgttatttaatataataagaatcctatatggtctacccaatgagtcctagacgtgaagaattgtataaatcatggttggaaggtttcatgcaaaccgccaatgttgtattattgatcttttcatgattaattttattatattttatatttatatctgtatttgcatttgaaaggcatagaataataggataacttgtggattttttttttacattcattaattaaaaatagccttatattatatatttcattaaaatatattttataagtgaattgcttaatacatcattactttctccttaaatctagcatataatttacattaacctaaggaatataatgaggatattatctataaaagtgagtatatcttaaagaaaataaaaatatataagataaagtaggtatataatgtaatatttttagaaattccaaaaataaaagaaaccctagctaatgtcctataaaaaagaatatacatccctaattgaaacacgtcctgtatatatttatagaagtatatatacaacaaattaattagtatatacttatatatatacttgattactatat

SEQ ID NO: 89798 - DNA, 567 bp, Cannabis sativa
ccttcttttattttctctcttttgaaggttgtgatcagatatttgaaattttcgtttcataaagctctgtgcacacccgggctttatgcaattttttattgtccttttgatttttcgaagatggatcctttttgatacttacttaatcgtttcaataattcaattgaaaagtttgcggtttaattatttgatgattgaaaagttggtgaattgtgttcccaaaaaattgtagcggaagataaatcaaagattgttttctgtaatgggttctacatttattgaacaatctacaattttcaacaactgtttatttcatagggacattgttcatagatgttctttaatgtctgtggtcgcttactttgattattcatattgagtataaagttagttttacttgaaattcagttttgatagcctgcctctaacttcaaaagatattatgaactctaaaactttggtctaattggatttctccgttttttaaattattttactgacagtgtgaaagatatatgttttgattttattttttctgtcgaaatatcatatgtgattgtggtccca

SEQ ID NO: 89799 - DNA, 777 bp, Cannabis sativa
atcatcactatcttcatacttggtcaaccattctaaaacttattttacactcaattatatagttcattgtttaataaacaacgtctttgtgatccaacattcaccaatcacccaaatacatgtccaatgaattgcatctcaattcataagctttttcccattttgggtgagtatgactttctataattgcttaataaagtaatcttttaccaaaatttcaatggtctccttatatatcatattgactatccagtcaattataaagtactctccatcattactgtattaccttaaataatttaggtaatcttctataccttagtgataccactactcatcctgacattcttttatacgtcaccccaataacgtccccgcttcatctccattgggcctttactcctacagaatgatggctcttatacacgagtgcatcagtctagctgcttcctgcactgatggctggccccacgaaccaatccaagtatttctaacatgttttgctctaactcgcacgcttcatggggaaatttcctaaatgaaatcaccccaagtcaaggaccctcaaccatggagtcccttcatagtgggctaccaaacaagatgcttcttgctaacataggtagtcccacgcctacataatctcaaaattactacacaatccccgcctttaattcacctaggattctagacaatactcatcaattgtgccactgttgctaatgctagatcactccgaaacaaaatattttattatttgaatcaattagatcgatg

SEQ ID NO: 89800 - DNA, 1349 bp, Cannabis sativa
  modified_base (192)..(194): a, c, t, g, unknown or other
  modified_base (598)..(598): a, c, t, g, unknown or other
gggctagtataaatttaatgccgcctttgatattcaaaaagttggatattgatgaagtaaagcccacaaaaatttcgttacaattgggcgtaaaactttgcctcaatttcaggagagacggaatcagtaaatgaatcgttaagagcgtaaaggcccttcacataagtgaccatcttaaaatccctctcatcnnntcctgattgagaacctgatgacatcacctccattggagtgctcctcacatcagccgacccaaaatcaataaaaggcgatttcaatgccggtgcacgctttctcttatccaaaagaggagtatcagaaacagtgtcctcagcttcttcatcagtaggaatgacagctatcttttcaccaacaacacctggattgggttctgggacctaaaaaaacagtatgaaaatcaaaaaaggaacaatttcaaaacaaacattaaactgacaaacaactaaaataaaacataatttacttgcaaacaaattaagatacacttacattgattttacgaacagcctctaaaccagccaacacaacttggtcatcatcaatttcaaactggcttaaaccatcgaaaaaatcatcnccctttaaactagactctttggccttaaggttctcaacatccttagccctctcatcactgcctgcaacagactcagattgattcacatcagcaacatgaacatcattaacaaccttatcatctccagcagcatcaccaccatctttaaccaactcatcaccatcatcagagtcggaatcaatatttcaagatcaggcaactccttgtcatcatcctcagcatcatcatcatcatcagaaccttgtgttactaactaatcagataatttttcctgattcatacaacaaaaatgcaactaaaataaaataggaaaaaactaaaaaaacagaaacaataaagtataattaaatacctcatcagaaggtcaacgatgaatgacattaacgttttgttgaatatccttaattacagttattacagacttgaaattaaggtcaacaaaacacctcaaggaaatgaagtcttcggctaaagattctttattcgaaattaccagctccaacttagatttcaacatatcaatgtcctctcaatcagacttcttagaagatgaaccactctcaaatgtttgcttaaatataccgcggtcgtcaatagattcatctacaaaaaaaccttccaattgaagcttctgtctctcctcatcaatgggataaatgtttttaatctttaactgaaaatcataatcaaaacaaccaaaaattgaaacaaaaacaattaaataaccaaatatcaataaaacagcacaaaa

SEQ ID NO: 89801 - DNA, 574 bp, Cannabis sativa
  modified_base (275)..(278): a, c, t, g, unknown or other
cgaacccattggttctttcccagggcgatgagtagtttcctcagaacgacttccatcgttttgattattatcagccatggatagatttttatttgtaaggagggatttttcttagttttattacgtaggctctaaatgaaagcaacaaacacgattaacatttttgttaaccaataataagccttttcataataaatataacacataaataataagaaaatataaaataaatagtatatgagtaacaccagatatttttacgtagttttgcagtnnnntctgcatactccacgagtctatcttattcaagatgttttctgagtatcagatacagtttacaattgatcgtatatatttttctctctcaaattcttccgtccctttttctgtgggatctgcccctatttatagaaatataggttggcagttattcatatttaattcaaaaataactgtgtaatgaaacgtggtcaattcccacgtttcatttaaaacatatgttggataatacttgataaccgcttaactgcttgttattcttatcattcgatggtcaatactaatttggacaata

SEQ ID NO: 89802 - DNA, 621 bp, Cannabis sativa
gcgagaccacttttggccgcggcgggggactacagaaagctcgtttctccacttttctacaggcgtcgcggcgagaatattggccaccgtggccccgacctcgtacaagtcaaaattaacttcgtcttttttcgtttttgggctaaaaaactctatttaatgaaagggggtcgcaaattatagaggggagaccatatggaaccctagaaacacaagaagaaggctcttggagcgagcatgggcgatccgcgacaatcctccatctagtttctttctcttctcgtgattatttatgtttttatttgtgtttagtttaattatgaatttgattatgagctaaattctgtatttacggatttgatggattttgactgagattattatatggattaatgctatttgattgtcctttctttctctatcattgtgatttattcatatttgtgcttataacatgtgtttgattacccaccttatgcatgatttatgatctcaatacaaaatctgaaaagttactactgagaatgctctaaatgaatagacatgagttttgatgtgaaacgagagtattcacatagcttatgtgacttttagattattgcttaatgctaattgtatgtt

SEQ ID NO: 89803 - DNA, 831 bp, Cannabis sativa
taaattaatgtaactataatacactgttgcctatacaaaatgagggtttaaaatcgatgcttattctcaattataggcatcagtttcaaacagtcacttaattattggcgacggtgagggtcagctctgggcctagcccatgcctaggacccactccaacacaaggtccgaaaacagtcaagtcatataacctcctcaaaaaaaaaaaaaaaaaaaatttaggcccagcctaacatccaattccagccagctcaacctaacaacgtttgaatagtattatggtaggtggtccgaattccaatccatttcccaaaacgtgggaagaaaaaaaaactaaaaagtctctcttgtcttttctctctcaagtctcaatcccaatattccatccattcccaccaagctacaccaacccttccctctttctttaaaagttctctctcttctcaaaactctaaatctctatctctcaaaaaaaaaaaaaaatcacctttataatttacaatttgcaaactatcctcctcaatcctcatcactcatcaactattaatatacaatattataagaaaaaagtaatctttccaatttctatctcattgtattgtaatggtaagctttcaatttttcaaggttaatatttcattaacttttatgatcaattgctatatttatttaaattaaaaattatttacttgttgttatttacttatcaattgctatagtgtatgaattatatgataataatatattatttgtttgttgtatgttcattcatacataaacgtaactctttttttaccattgattcactcatagtcacaaatcaattcacat

SEQ ID NO: 89804 - DNA, 837 bp, Cannabis sativa
gagactcatgctgatcatagttttgtgaatattattgtttcacgacgtagtctctatgtcatcataggtagatcgggtgtatactcatctgtaggtgaaagacctagaatatgtacaggaagttacttgactctaagccctaataatatggtggttattaggcgtgactacccaatttaggatgtcattttgtatgatttgtatccagagctatgggtctagtggacagtgtgatatgcacgagtagcttatctcttatgattattttttctctctattttgtttctacatgattatgagatgtttttttttacagagctaaccatgtagggatttttattaaattactgatcttttgatgatagttgtctttttactgggctttataagctcacccctatatttcccttccaggaactcagtttgattcttgtggatgtgagaaagtcgttgatggagaatgaagagattagcttagtcctactttgattattaattaactcttctttaaagattggatgaaatgtatataattattaatggatggtcagtatcatttatatcgtcatcactggtcagtatcaattatgattgatgctataagtattattttagtattttgtcggattattaattctaactatttggtgattacataactgtaagaatattattattgtatatactgatgagtgatcttattttatgacaattattttctaataattatagtagttattacattattttaattataggtcttatataattttgtaatatatataagggatcatttgtaagtcttattttttgcaagggtcaaagtgtgacttttga

SEQ ID NO: 89805 - DNA, 597 bp, Cannabis sativa
tccagtgaggaagcatgctgcaggacactcccacttcagtcaacctaaaattattgtggacctgccaaacaaagtgtctttcaaagacgacttctttcggacaactggcctttccccaatcggcacaactacctttcgcagaattcgtaagtcattatattcctcatgctcaggtgaactaatctttgtcttttcgcttttagttttataaccaatgttttgtttgttttttttacagccctcttaaaaagacttgtccctactcccgagatggttagtcggcaaaggcgcctattgattcttccctatggtcttaggtcatgccacttcctcttaaacgaggccaatctgagatcggtgggccttcttactgacaaggagtatacttgtgattataaatttcccaagtattcttcttggcagcaagttctcgttctgaaggaggataaggcctgagatggtgtggctcgagcacaataccttcaaaacactatccctcgtgaaagtcggtgaaagagcatcccaaggtaatcaatgtggttggtctcccacagtacttagggctaaacgtaacacattagtcaccttccgagacac

SEQ ID NO: 89806 - DNA, 1098 bp, Cannabis sativa
ctattatactgttagtgatgtttctttgttacaaaaataaagcacttgtaatgctctaactcctaggaacatcatctatgtactttaataacgaagtttataataataatattattaacccatacaaatttttttggtgacatggacataaatatttgacatgtggtatgaaggatgacatcacgaagttagtagactcgagtcatagcagtcaacctgggaggagaccctaactccgcgcccaagttgactctaggatctccgggatagaagtttggacttcaataacttgaacccaactcactatctctcagtattttgtgctatgaagacatgaagaaaaataatataaggtccgagagctgatattacacgaacttgcaacccaaaagccaacctgggcacctagggtttctacctggcgcctaagttgacatccttaactagggtttcagttttcgagatcgtcctagtgcaaagtggccaaaacttgcattgggacaatgactttacatacaaacatgttggaggcattagagttagattcagagcaagttaatttttgagcacccgaggcctagagcaccctgcacctaggtagacaatctgtcaatttgggcaccttccaagtatccgatcgaagatctgacttttgtattgaattcatcttcatcaaaaatagataaataggtcctttcagaggaaaaacaacaagttatgggctcaaataacagggcccattgcctaggttgatacttggggctggccctgcgccgaagttgactatttgtaaacctaggccacaaaaaataaagttttcattgaattcttttgagcatcatctccgtctttagaaaatattaagaatcaactatttctaaggaccaaacggaactatcgaaggggcataagagggacccagggcctaggttgacattttgtcaaccttggttgtttccaattcggatcagcaaaaagtgcactgcttcaacgtcatcaaaaataacaaagaatcaagtaaacttggggagaaaaccacaaactcgagtccttggaaacagggcccaacacgcaggttgaccttgttgggttttatgc

SEQ ID NO: 89807 - DNA, 715 bp, Cannabis sativa
attcggatcccgatctcgggtcccgatcttgttccattttgggtgtcgagtcacgagttggtacctaggttcatgtccgagtcttgtatcgggtcttgggtcctggtcctagttccgttgccgatgtccctatcttgattttgggtctagctccctgttctggtttgggtttgggtccaagtctaggttacggtttgggtcctcgttgcggttcgagtttgggtctctgcctgggttttcatttgggtttggcttcaggtttgggtccttgtcgtggtcgttgtcctattcttagtccggttccagttccaattcctatttcgagttcgagtttcggttcgatgttaggtcaggattggagtcttggttcgagtttgggttcgggtccgaatctcggtctaggtctggatcgagcttttggtgttgattagggggctgggtctgggtccaggttcgggtctgagtcccaggtttttatctcgatttgagttcgggtttagtttcgggtctaagtcctaatttcgatcccggtctgtgttcgagtttggttattggtgcaggactaggtttgcgtcttattctgggtctgggtcttagtttgggccccgcgttttggtctgggtttttgttttgtcttggtatgggttcgtttcaaggttcctgtccttgtctggatcctgtgcaggtttcgggtacggggttgggtccaacttca

SEQ ID NO: 89808 - DNA, 1624 bp, Cannabis sativa
aaataattttttacgtggaccaataaaattgtgccacatgtacactgtgtccagtccaacatgacacttaatacctaaaatagacggaaatgttaaattgttaacggtttactagttttaagggttttactacccaaatttagattttgcgggttaagtgaaactaaaataaaaattttaaggattttaccgctatttaccctttttataaataatggcacgcgaagcttagctatataatgagaaaaagcttttcattttatatttaattactaaataatattatttttaccaaacaacacataaattcgtatagaatacatgaaatttatatataattattagagttagtctcacaataaataaaggtctgatgatttatatatctgttctatatagagtgtgcctatataacagaatgattagtttataaaaaattcatgggtgattttttatttatattaaaaataaaatgatttattattaaaaataaaatagtttattttatttatatataataaaataaataaataaactaccctaaataatatacatatcctcgcacaacccgtttatacatctacaattttgttttctttaattatttatttattgttgtacagctatttttctcttatttccttaattctctcactttttttatttttttattaggtttattaatataaataacaaattttttattttctttatatatattttttaaaaaaaactttaaatatctaacttaaatttaaatgttctccaatttttaaaatacatataaccctaaatctatatatattgttttaatttttttttaaaaaaaattcgattacaggtactttattcaatctatttcctatatattgtttttttttttcttaaaaaaaaattcaattacacatacgtattattcaatctattgcttcttcttcattctatttcttctttttctgcttatatatatataatatgatgatgattttactttgttatagtttagttgatttttattcataatttcatcaaaggattagcattaggatgtggagagagcatgctatgctactgtttcatttattgtatttatttacgtacccatcgagttccattgtctttatatagaacaatagtatttttaatattcactaaatagtattaagaccttaatttttaattggtatgtcaatattcactctattttttctttttctatttatatatataaaaatataaatagatagctagatttaatctctctctcacttagtaaaatatttctcaataattatttggagatatacaattttttttttttggatgtcgacaacttcactatcatcgatgatttcgaattattcacgatttactcattggcatgaattattaggtgtagaaaaaattattttttttaatgataggctattgatattcatgaaaaatgatgaaaaagctattataatttttttttctcattctcatgtgatactcttcattctttattatatttttattgctctctatataattattttttgtaatttttttctcaaaaagatacacataacacacacatatttttgatttttttttatatgagattttaatatacaatcatgat

SEQ ID NO: 89809 - DNA, 604 bp, Cannabis sativa
aaaatagaaagaagatcttctaaatgtagattgctaaaaagtaaaattataataaatataattgatctggtgacaaatagaagagcagtaagtctttaaatatatatatatataataactattgattaataacaaaataaggaatttaaaagaaaattcaatccaagttaatgagacattattcacttatataaataaagagttaacaaaattaattaaccaaaattagctcaatattaaatacattaaaacctaaaattaggaataccataaaagtataacttatttaagacaaaaaaagtcagaaaactgccataaaaataataaaataaaacctgatttaaacaattaattagtagaaaaataaatcattatattattaattatcattaaatgaaaattaaaattaattgctgaaaattttcaaacagcaatcccgcgcgtgaatctcggctcagtcaaccctcaatgctccacctttcctcgtcagattcccctaccggccttactcaggcgacaccacccagtctattctacttaaccttaggagaactaagatctattttctccggttgttatggcaataaacttctgaaagagagat

SEQ ID NO: 89810 - DNA, 722 bp, Cannabis sativa
taacaaaatgacaactgaagacaagaaatcattcagacgatagagattcctctagccaactgaaaaatttatgtgtttgcagttatgaataattaaaaaaaaagtcaggcatcctaaagattccctttctagggaatgatgtaattaaagttttaacattttctattcgtagaggccctatatatatggcctcaaatttttagttgtacacacaagtttagataataaaaatttcatctatctttctaaaaatgtcttttaccgacgcaacaaaatacgtcagtaaaagttccttaaaatgtcaggtcgaagctccttccccttcaccatttttcttcttcttttatcttattctttttcttctttcttcttcttcttctcattctccatcaccaaacacaaccatctttacatcaatctccaccaccaaacaccaccacctttcgttcctttctttctctttctaaatttctctctctctctctcaaaattttgtctctcccatagacactaccatcagtaccaccgcagtcccactgcaccccgatttcagaaaatatttttaattatttttgtatttttaattatttgtaggtataattttgggtatatatgtatataaatatgtatatatataaatttaactctaatttttattattttttattttaaatctatttatatatgtttatgtgtatatgtgtaaatatgtgtatgtatat

SEQ ID NO: 89811 - DNA, 579 bp, Cannabis sativa
ataggcctattattgtttgtaacgacaattatgactataatttgtaaccaccacctacaacctataagtagatgaaccttctctccatttatagggggttgggttgatcataataaaatcacttagcaagagatctctttcaattatgaactaggcagaccgagccctacagaactgctatacttttctgtgtctattttatattatttacatgcagacaaacagttatatactatattctttgagtattgtactcacatattttaatattgtctaaattttttaacaatatttggcattagaaggaggatattctagcaatattcccatgattttggagtagaataattgtggcaaactaaacaataaacacaaaataagctttgttcaagaagactaaaaaaaaaaaatacacaaaatattaaatatgctcgaagaaataagcagccccaaacttgggaaaaatctagaattagcccccaaagtattcgcagatcagaaaaattaaatagacatctccgttcgggattgtccacaaaacttttgaagaaatgaacgacccccaacttggaaaaaatc

SEQ ID NO: 89812 - DNA, 501 bp, Cannabis sativa
atccttcgcacttgaacccaaaaatgtgaggtttggttttgccactgacggggtagagccatttggtaacatgagtaactcttacagtatgtggcatgttatcttagtctcgtataacttacccccttggaactgcattaaagctgagtcgttgatgttatctctattgattcaagggtgcactgcccctgaaaaagacatggatgtttacgtgagaccgttgattgaagagttgagggagttgtgggattcaggtgtccaagttcgagataattacaatgggactgtgtttacaatgcatgctgctattttgtggaccattaatgacttcccagcgtatgcaatgatgtctggttggagcaccaatgggtacaaggcgtgccccacctataatgaacacacattttccattagattgcgcaacaagattggttatgttgggcatagacagtttcatgaaatggacaatccaaggcagagaagtaaaaaatatgatggaaa

SEQ ID NO: 89813 - DNA, 1078 bp, Cannabis sativa
ttgatttcccatgtagctttcatcgtatctgttataacagattgctactgaatggccatatttcccacacacttggcaagtgggttttgagccatttcctcttccaccacggccacggcctctatagcttcctcctcttgagtttcctccagtttgttgctgacctctgccattgctttggttagagttgtaccttctctgacctccattgttgctggatccacttgagcctggtctttgagccatgtttgcagtagcattgttcacaagcttgctattgacagagataccattgagtctttccaatcgactgtcaaagctgaggagagagctttgcagttgctgccatgatggattgccctgtgactcaattaacaccacaatggacaggtattctgcatcaagaccagaaagtacattagatattaagtgtctctcaggatagggttcacctgctagtgccaatgaatctgcccacatccttttcatctttaagtagtcacccatggattgagagcctttttgagtaatctgtatttttgttcttaagtcatccatgttagctcttgagtgtgctccatagagttcttcaagagcattccacaaaccaagggcagattgacaacccatgacctcagaagcaatggattctgtcttagacccatacaaccaacccattaagagttggtcatgtacaagccatgtctcataatatggatttggatccataccagatcctagaactccttcgtctggtgtgcctgtgagaatgaactcggctggggctggtcgagaaccatttataaaaccttccaagcggtgtcctcttatgattgtgtttaccattgttttccacagtggaaaattgtttctgtcgagcttcaaagagaagggctggctcaacgtgttgctgaagggtgttgcaaccggagctgggtttggtatagatgaggtttgaaccatgactgaggttggagtctgatcaccaacgttcgctgcacttgattgatcctggggaatcgacattgcgtaggcaagggcagctctgataccaagtcaattttaagataaatgcaga

SEQ ID NO: 89814 - DNA, 595 bp, Cannabis sativa
catgattatatatttattctggcagagttattaatacttattttgtgttttgcactcactcaaggctggtctataagatatttggatgtcaacaatgctcttctcaaatttgcatgaagaaaaattatatggtgcaaccgcctggttttgttgatccagaattccctgacaaaatttgcaagttgcaaaaggccatttatggtctcaagcaagccctaagggcatggtttgaaaagctctcttctattctacttctcattggtttctcctctgccaaaaaagatcattccccattcattaaagccactcctaacagttgcttatatgttctaatttatgttgatgatatactcattacaaggagtaatgaaactgaagtgatcacttctctcattacatctctcagcaccttatttgctcttaaagacctaggataactcaattatttttaggaattcaagtgctgcaacatacaaatggtattatcctctttcaaaacaaatacctctaagatttattgtgcaaggcacaattgtaaggggccaaaactaacagcgcaccaatgaatgatttccttagatagtctagttctggc

SEQ ID NO: 89815 - DNA, 1197 bp, Cannabis sativa
atctcctaaaaacgacaacaacaaaaaaaacccattcatatatatttttatttgaatttttacacaaaaaatcgcattttttactatttttttacgattttttttttaaaacttttttacggatgttgttctttccctgtttttacttacatttttctcgaaaataatgttgtagttgcaacgttaaaatagcaatgttttgagaacaattgtttgtatttttttaaaaaaaaaaattaatttgtaaaaatattaaaaatacttagattggtatttttatatatatattttgtgatttgtatggatttataaaataatctattttctttaattctttttttttttttttgtcaagaggaaagtcattgtttaaatttgagtgtaatttagaacaattactaagtaaccatacagctagaaataattaaaaaacgtctcaatacacactccaattttacacacccagatgtggtataattatgaaatgtttacttaagtaaaaacatatattttttttttcttttcaagaattgataaattagttacaaagcttcatcaacagggaaaaatcaaaagaaaaacactcaagccaaatacaattatacgttgcaaaagaaaataacaaaatttatgtctctgttaaaaataattaaaaaaaattaaaaatttagactcttcacttctccagaaacttttttaaaagttgtcgtgttgtacccttgaattttaattcaataataataaaaaaaaaaaacttctgaagtgaccaagttagagtatcactaatgcataataatacaagaggtgcttgtcataagtggctctaagtaaaataaggtagaagagaaagaaattcaattttgtttttctatagctagatttgatgccaaaaacttggcatggaaccaacaacaaatataaatatttaaaaaaaataataattagttgttattattggtaggatttgtgacttttcttttagtgctgccattagatatattcttaatattcctcatatgttagagagtttcctaggtagaatattatttattaagatttcaatgttaaagtgttttttttttttttttcattttttttgttgaaaaaggaaaagatcacatggtgcaatctctctctcactcttttgataatttatataattctgaggatcatgtgtcagttataggggtcttagat

SEQ ID NO: 89816 - DNA, 628 bp, Cannabis sativa
cgtataggtctcactcgcatccattccccatacggcttgattatctgaccctctccaacctcaaaccgccttggacaaaagctttcagtatgccccataattacacaaataaagcagaaagtgggaagatgttcatacttaaagttagtccagaactcgatcccgacagtattgcgaagcttcatacgtttctttaatggcttcgtaatattcaaagtcacacgaacacgaagataatcccaccataagcccatgaaattcctttcatccgattgaacaaacttcccaatatagtttgcgacatccttgacaaccgtagcggttttaaatcccaatctaaggtcatgcaattgcacccacatatcaacttcattcaaggtaaccaatcttggatcctccccccgctgcaaccttctaaaattaacaagaacctactaaaagtccaggggcttcaattcatcatactttggatgtcaatttcatgataaaattgaaaaaggtagcgattagtatccaattctttgataaacatccccttccccgactgccacaatgaagccatcatatgttgcatgacctcaaaatcaatttgtctttcagtcaagaaccttccaacaatacaccacct

SEQ ID NO: 89817 - DNA, 555 bp, Cannabis sativa
atcctatatcgaaggtcagtttttcatgatagcagacaccaccacaaagcgatcatattccaaagttaaaagatgtgatgtcggcataattctggcatttacaaaataggcccatgctcttgccactggattgagtttccaccagtatagagacttctgattttgatttccctcaatgtgaaattgggtaccctcttgccccaaaactgttgcaatggctgcatttgtaagtgtgtctctccacagtgccagtattctctcatccatccattcccctactatgctatggttaaagaaagctgttgaaaatactcaatctaatgggcacttgtactcctctaacatacacttcgtctaaaatcgcttttgtagggataattggcaaagaattcatagagaatattatagttctcctcccccaaatactcttcgacacataatttttgccattgtctcctcacaatctcacacctaatatttttcatagccccggtccttggaaaaggtttatcctaaaattcaaatcccctatcccaaagtacacccctctttttg

SEQ ID NO: 89818 - DNA, 937 bp, Cannabis sativa
tcgctatctcgatcataatcgagtcacaaacaatagtaatcactatctcaatcataatagagtcacaaacagtaataatcgctatctcgatcataatcgagtcataaacaatagtaattgtttcttgcttaacatgtattatagtacgtatagcttttgttaccttggaccagaaattaggaatgcgagccgacctgaatggaataaagcttgacgatcccgagtccaatgtcacgacaacaaaatccgataaacaacttaaccatattccaaacaaaccgtagctccataaccgaacaaattctaactctcctctggttcaaaatggctaaaacattactaaaatacccaaatctaggctctaaaaaacaccccgaacgaaacttgtttcgaggctaaaaaccaaagttttcttcccctgttaccaaaaccagttgaccggtttcacagcacctgtaaaatcggttaaccggttttccttgctgcactaacgggaaaacttggtttttgctccaaaactcctccaaacctaatgaaaccttcaggaacataccaataacataaaaacaacatattcaaaccttcaaaacgcaataatacctcaaaataacagaatcaccatgcttgagtggaccttgagttcataaactaaattctttcaaactcaaacctaacaactaacaagaataacacaaatatacttaaacaaccttaaattaaacttataaatatactttgaactcaatcatcaccaacaattcaaattcatataaaaacccaatcaaagcatgacctaaaacctaagaaatcaaagggaaagagtgaagaacttacctccaaaccttggagacccctaaccttgattacctttgctaacaactggttgaattagcaagagaaaccctaatttcttgctggctttccatggctcgagata

SEQ ID NO: 89819 - DNA, 778 bp, Cannabis sativa
  modified_base (210)..(214): a, c, t, g, unknown or other
  modified_base (389)..(390): a, c, t, g, unknown or other
tgtaaaaaattcatacgtcattatttcacactcgaagtatattgtcaaattgtttctcccaaatcatttagaataatattgagatatgcccttactattatcactacaaaattatgttctccatattttgaaaaacagcatacaaaatttaagagcacaatctaatcaaattagtatgaactgcctcctttttttttttctttttttctnnnnnttttttttttaataaaatttcataacaatatcatattctgtactagtaaagacaatggatggagttagacactatctctcaaagaatgccaaaatgttaaaaatgattttaggggtcaattgtaatatattgaaaggaaataagggagcataactatttattattattattattnntattattattattattttaagagttaatactattttgaattttgtgttttataaaagttatggattaaattatttattttataaaatgataaattagatctgacaaattggatcatatattttttttttaaaaaaaaattagtactaaatagtaccttgaattaatttttttgtaaaataaaacttaataataactcgatatagaggtattatgacaaagctgactacgttcttatatatgttcgtgctagaattattttcaagttgattatattaaaaaaaaattattaaaaatgaaacttagagtcctatttgtactattttaaaaaatacataattcattatatcatttaacaaaatagatagtccaattaataacttttacaaa

SEQ ID NO: 89820 - DNA, 743 bp, Cannabis sativa
tgttttactattcttgtttgaagactttatcaagttctgaaggtcaaagatgcatgctaaacaacattgaaaaacaaccataacaatacttaggttatcatttttctttttaaaatatgaaattgattttctcaaaatgaacatagaaagatgctctctttcatgtaaatgtggcagaagttatgatgggtttaccattcagagcgagcgctatatattagtttccttgttcccatttcaaggttctttggctttcctttgttttgttttcagggatcataaaaatgaaaattttaaagctttgagctgatggactcttgttagttggaaatttatgatgtttctagtgcctatttaataattttttatgcacagctagtcactgatggaaaaaaaaaagaaaaaaaacaagtcaattggaaatcgccattgtgtgcttctatttttttcttgaaattactagatgcatacttgcattctgttttcaagctttagtgtaagaaaaaggttgaattcttgcagtgtcatcggggatgtccagtggcagacatcagcctacagatttcagggattcataacatcctcaattccttaggggtgagtgatttgtaacccttttgttggtaaataacctcaggaatactttggcattttagaatattgagtttgtaaaatctgtgtttgattaaatactcaagattttattcttcctaagggtaagcttaagatgtaatgatcatctg

SEQ ID NO: 89821 - DNA, 665 bp, Cannabis sativa
atgggaattaaacttttgaacatataatcatgattatattccacagtgttaacaacactataatcatgaatagctatatgatctggttttaatagaagttatacattaatcatataatcatgaaataaatcatgtgaactgtttacagagtttttcaataactaaatatttttagagcttaaaaagtaataatggagtaaatagtgaaatagaaattaagagatttttacatggttcaggcattaactatccttagtctaagtccaattttattattaggctcatcggtcggtaactgtttatacaaatcgagatataatggattagaactcctttccaccgtgttcctcttgaaaagagaaagcctagtaggaatagtctagagttatcagtagggttatgagaatgtgttcttcttaggatggagaatagttctttgatcccaaagagaaggtcctcctttcttgcgcttttttggggtatttataggccaatcctcgtgtatacgctaccttggatggatcttcattggggcaagatctagtcgttgtattggtaggtggcatttttcccatatggcatttaaggatgtcggatcgtactgattaaacaagttgggccttgaacgcatgtcacttcaaggcttctcttatttgaattcccct

SEQ ID NO: 89822 - DNA, 1525 bp, Cannabis sativa
ttttgccaaaatttgaggatgtatatattacaaaataatatacctcaaattatacaatccaactagggaaacaatcaaaagcaataaaaaaaaaaaaggaattccaaaaatgtaattcttaacaacctgtagacaaacatttaaaacattatacaaagttgtttgatcagaatatacaacaacaaatttggagaataattaagaaagtttttatttcaaaaatatgtgaataaatcatatttaatgatcctgaaatcacaaccggttagttagttgataatatatgatattaatttcattaaattaagaagaaattttagaataaaaagtaacataccatatactgtatataaataacatgttaattaatttgatatatactaaatatatttaaattaattaaaaagataattatctattagatcaaaatataatttacattaccaaatttaaaaataaataataaaatgtggtgcgaaaaagagtggctcctctagggttttcttctcctagcatcgcctgggggtttttatttgtcttaaagctttttctcggttgggatcgttggtactagttctttatgcgcctattcagacctggccgagagcagccttcatttttctttgtgattgcctttgtagttttaggggtgggtttcgagattgggtgttctttttcctctgctagtggtcagatttggtttggggtttctcttaaggatgcgtcggttgtggctaatggacttgtagcagctttatcgcaaacaagagtttgggtgagttatgaaatcgttctcccgtcatgggtttgttgggacatcgacagggagacattttcatgaagtttggatttctatgtagtaggggaagggctctggtgtgacggtgggttctgagatggcgactgtgtcttgatgggaagtggtagttggactggttgtgggtgggcaaagaggaacactggtcttccaagtcttctttgttgtttgtaatatttttttttattttattgttgtatttgtttcattgtcaaaataagagtagaatttttctattatcctgttagtttagttggttttattgtgaggaataatgatggtgacttctgcggtatgctatttggctatgggggcacgcaaactcttatagtcgatccatcgctacatgatggtcgaagggaaattgtacaggagaggtaattccatgtctattttgcaatgtatgttactagcagaagttaatgaaataatcagagaaattcatgaaggtttctatgggtatcatgcaggttggcagagcctatctaaaaagataatcagtcaaggatactattggccaactatcaataaagacatatacaaatttgttaagagatgcgacaaatgccaaaggtttttacatataccttgagtaccaccaaccgagttgaggatgatgacctcgccatatccatttgtaatatggggaattgacctgattagggctttacccacaaggtgaggtggagtaggggtgagcaacggtcg

SEQ ID NO: 89823 - DNA, 696 bp, Cannabis sativa
tttgcataatttcaataaaaagaattttttttttcaggtttatggtggtggcgtgcggttgggttcgagaataacgagttaagtgttgtgcattagtttaaatctgtgtattctgggtttgaatgatggtgcgatggttcaaatttttttaaaatttcttttaaatcgaagaaaaaaattaatttgtgtcggtacactactatttgcttcagttatgaacagaagcaaaagctttttttcataaccaaagaaaaagaaaaaaaattagttccagttcataaccaaagcaaaaaattttagtatttgtgtttacggctatagcatcggttacactaactgaagaaaattctttatatgtcacttagaaactgaagtaaaaaactcttttggtagtagcgataaatcaatttttttcttattgtttgttcccactattttaactctcgaaccaagttgatcttttccttatgtccaacaatcctagttgattatataaacttacacatctaagagtcatgtatgtatctaatttttttaaaaaaattaaaaaaatacatataatataatttttttaaaaatgattatataatcatattttttatcgtttctaaaataaatatgatgaagagttttaattatatcaattataataaaaatacatatcacaaaatgttcaatttgattctatgatatcaa

SEQ ID NO: 89824 - DNA, 660 bp, Cannabis sativa
gagtagcagataaatacttaagtcttatttttggcggtaaaaataccttccgtcactactctggaacttccgtaggtacctctccgttacgtgccaggttagtgttcatgtgtcactcgttcattggtccacgtcattaatttttttttatttattatttaaatgtttaaaaatgatttaaaaaattataaaaaataaacaaaaataaatataatataattctgtgtatatttaaaaattaaataaaaattatttttaaaataaaaaattacaaaattatcaaacccatcaacttaaaatctaatcatatgttaataaaaaattcaaaagaagagaattcgtttgttaaacacaaaaatttaaaatcaaattaaattcaaaacctaaaaaatcagagaacataaatctctaacccctaatatcacgttcttctaccccttcacttctgcaaaccagaaccggtttcaggttcttctctcttctgcaattcgagggtcctgcaaagactcctcagcgttcttctctctcatcgtcgtcggcctgcgaagactcctcggcgttgttctctctcatcggcgtcggcctgcgaagactcctcatcgacgtcttcttcctcctcaccactggagcagtcccctttcaccatagttcatcctcctt

SEQ ID NO: 89825 - DNA, 533 bp, Cannabis sativa
  modified_base (319)..(320): a, c, t, g, unknown or other
aatttttattcattgaataagtccaatactaattggacctaaataaaactatcatgtgtgatattttattttagcaacctagtctatttaactatctagaaataaataggcaacctatatgtatctaagccttaaaacaatcatataggctcacacaattcaaaataatttagatgggtgctatcatgtttctagctttgtacatatgaaagaaatataagatttacctattaaaaattatttataagatctattcacaatgtgaatatgattaaaatcagatcattggatctttcaacaagttaatcatagcaatttnnatcaaataaataatagatttgttaaaaaaaattccataaacaatttaaataaaacaaacacaatttccatgtaacaaattgtgaagtaagatattaatataattaaattaattttgactaactaactattttgaaaatttagggttgttaaaaaaaataacctaaaatgtcttttcaaaaattcaaaatttaaactacttttaaaatatctag

SEQ ID NO: 89826 - DNA, 616 bp, Cannabis sativa
atggggtaaagaaacgacaatctgctagaaaattataaaagaataaggaaaaaaaaaagggacctcatttgtgtgcacttttgttcagctactattaattatttatggaaggcatatataggtctactatagtagtggaccacttgatcatatcatatacgtacatatatagctacaattatgtgtacttctcttatagttaaagctttgaaccatgttaagttaggcaaaatttatcttaaatttagggcattagtctagtaatacaacttaataaaaataatgcatttaacaatgttatagaactctctagattttgttctgcttcctttagggttttgtcctgtattttcttcggcgtgttctagatccctctcacccttaagctaattatctcaaatttttctcaggacccataattctcgccttaattgtattttgagcttccatttattgttttgattttactgtttcccctagcatttattactccacaggttttccttggtgctcgtctcttactcaatcttttccctccctctctctgccgtcgtttccattcccaaaaatattttggtgatgatgagcctagcatgtgaagatattgcctacagaa

SEQ ID NO: 89827 - DNA, 1390 bp, Cannabis sativa
  modified_base (621)..(627): a, c, t, g, unknown or other
acttattttacatcttgtgtattgaagcataattttaaatagcgagcaccaattttacatattgcattggaaatagtcaaataattaaactagtaaaaaacagtacatttaaaagttcatatatttttttttatttttacactttaaagtagtttttttttttttacaaaaatatatattaactaacgaagtaacttaaatcgcaattaaaattcacatagcaactcacatagaaattaaccgtaaatttttttttaaaaaatagcatataaagtaatttctttatttttttattaattttaaatattgttttaaaaagattataattggaagctctaataataagtatgatctgaccctccctaatccgaatttgacattttaatttttatttgttttccttgtattagcaatttatatgagtaattagttagttttttcttttctttaatttcttttgtttcatatcgaagatttgatatattcaacatatcactcaaacaaaaagatgaaaaattatacttttcaaaaacaataataacagttaaaagaaaaaaaatgaaaaaggtgatataataaaatggaggtggtccaacgtacaacatatatatatatatatannnnnnnatatatatatatttatatgatcgtacatatctaaacaactaatgtgaaaagggacaatatccattgccgatataaggtagtcgcgtctgtgacagcaaatttaagctatatattttatgcacatatataatcatggagaaccatttatacttatacttatatttatatttatatttatattacttcttcttttctgtattccaaataataataaggatcccgtcgtgaaaaacgtttaatatgtatacatgacaaaatgaatgttattaatcttattaattattaatttgttcaaaaaagtattaagtattcaagtacttgatgatcactatataggagtggaagttagcccaaaacttttgttttcttttaggttgcataatgcatgatgagtatatactttattgattatgaattagctaaactcaattatatctattaaattataaattgtttgagagaggtgataatgaattctatcaataataatatatatggtagtgtaattcatattcttgttaactcgccttaaataaatattattgggttgatcgaagtaaaataataatgtaatgcatgcatgtaattagtatatatatatatatatatatatatatataattacaactttaggttgtacgtcctgtttagacacgtttagttcctagataagtgggatttgatcaattgatcaagtatgagaatgagatattattatatatataagaaagagaaagggatttaattaggtttccgctcaaac

SEQ ID NO: 89828 - DNA, 893 bp, Cannabis sativa
tctcctctcagatcaactgcaacaacaagaaaggggataaggaagagtcagtagcacttcaactaaacctggcttaagaactagctaaaatcaaacacaaccaagataaattaatatgaaaataattgtacattcaagcttggagacgtataaacaattgaaattctaaccaattaacaagagaattttaaatttctcaaaaagaaaaagaagatattaaaaaaaaattcatttgcatcttattttgtatttatagacctctactatttgagcttgtggtatcaaagtaaacttcaagttttaaaccatattcttttatcgaagtagacaagagtgaactttgtagctattgcgttctttgataagattaatcacacatgaagctctgcagggaaagaaacggtcccaagttatgtctccaagttgatatgagtgttgtaaaatcaagcgaatcccaggattacttgtttgtacactgtccattttcaaactagctacaagagtttggtacagattgctggtgttaatgaatattcaagaagtctatcatagttcataggaatctatttcaagtggggtaagggaccattacagaattggtacgtgaaagaaacacgaaataaggaacttcgcatgtatgaacatgagttagacaatatggtctaaaagaaataagacaatgttcgaggtgcttaagaagatttctaaatatttacaggatttgaactattggatggctttttgatacaaaaggatttagcagtatgttgtttcaagggatcagatttctattctgtaatctacattggggaacctcgtcccctagcaattgcattttgcatactttattattataaactgattatgaattatgacaaagattctcttatttt

SEQ ID NO: 89829 - DNA, 612 bp, Cannabis sativa
agaccaagtgcgacttccaaggccgagagaaccaactccttatacccctccttaagcatccagaaattgcaaaaccgaaacggtttgataccacacttactaacctttagaagctttacaagacagtaactgtgatctgagatagcaccccatctaaagcttgcctctgtgtttgggtaacaatctagccaaccctcattggtgaacactctatccaacttagaataaactcgactcttctcatcatggttgttagaccaagtaaagaaggagcctgaggttttcagctcatcaacctgaccatgagcgagccaatcttgattgtcctggaattctagatctttaactcttctacccccgattctgtctttatgagcaaacatagcattaaaatctcctagaatgatccaaggagagttcaaatgacccaagttagcaagcttactccataactcccttctttcaatcaaagaattgcttccatagaccgctgtaagaaagaagtcttctttgtaacccaccattttgattttacaatgaacaaattgcttatcttccatcaaaatatccaccttaacaagtttgtcaatccaaacaagaacaattctatac

SEQ ID NO: 89830 - DNA, 667 bp, Cannabis sativa
aaccgaactaggactaggaccaggaccaggaccaagacctagactcgaacccaaacccaaataaaaaaccagaccgagatccaaactcgaatcgcgactaggacccaaacctgaatttacacagggacacaaacctagactagaatcgggacctggaactagaatcgggactgggacctgggcaacggaactaggactaggacccaagactttaccccagacccggacttgaacctaggacccagctcgtgacctggcaccaaaaatggaaccaggccagcatgcgagatcagggtccggatcaggacccggggcgtggaccgaacccatagtcggtgtctggatctgggacccagccccaaacccgaacccagaccaagatgcaaacccagacccggacctgaactcattcccaaacccaaaccttgatccaaagccataccctgtgacctggaattggaacaaaaattggaagtaggccgagacccgagaacgggaccagaaccaggacttggacctggacctagactcgaaactgtaaccgaactaggacccagttttccacccagacctagatccgaactgggacccagacctgaatcctaataaagacctagacttggtgccgaaccttgacccaaactcagacccaaacatggaaccagac

SEQ ID NO: 89831 - DNA, 1123 bp, Cannabis sativa
gttgtgggatgacctacagggtcgaccagtgaggaacattaatgaatttaatgaaagagcgcaagtatttatgcacaaagaagaagctagaaacgagatgaagttgctgaagactgactcgggtagtaaacctcgcaagagtactgcaacagtagtggttcaaacacgaaaagaaaagatgattcaatggaatcatctaaaaataaaaaagaaacagaaaaagtacgacaagtatgtcttgatttattcaatatacactgagttgaatgaaactcgtgaaaatatatttctcgcaaatgaaaacaagattgcattttgcaagcctgagcccatgagacatgtgagacatgagcgagactcaacaaaatattggtgatttcacaaagacatagggcatactatcgaagaatatcggtaactgaaagacgagatagagagtctaatctcgcgtggatatttcaaacaatatgtaagaaatcaaggaaacaagccaaactagcccaacaaccctaataacccaaataaccagagaatacaacctccccctattgagggcaaagttatattggtcattttgggagggggcatctcgctggaaaaagtaataatgcccaaaaagatatatcaatgaaataaagaatggacaatcggcattttctccagaaccactgaaaagagaaaaattagatgaacctccgattatcttctcggaggaagacacaaaacatgtgtagtatccacatgttgattctctcgtcgttacagtttagctcgccaacaaaagagtgaagagagtattggtggacaacgggagctcagtcaacattctttacagggatacattaaagaaaatggggttacaagatgcgaagtttaagccttacatggtaagttgttgtgaccgaaagtggtatgttttacatttatcaacttgcaagcgcacgaatctttattgtagtatggagactatgaagaacgaggtcggacccatgagaattgcgtgaaattgaagaaaattcatatttaatctaagctaatcaaactctaacctagttctgaaaatggtgagatttttggtaacaaaataaaataaagtgtttaagcgataaaaatgacagtaaca

SEQ ID NO: 89832 - DNA, 546 bp, Cannabis sativa
gttgtcttttcttttgacttgttcccccccaaaaaaagttaatagaatattttaaaaaaacaatcatgtaaaagataagaagaggtaataattggttatactgttattggtataattaaatatcgaatcttatataatttaagaaaatagttttgagaaaatatcattaaacaatcataaatattagacgtcacttataaaaagtactaagtaccagcacaataacaatacatggatgtctaacaccacgatgaaatattaccttataattagttagtaatatatattaaataaataaataggactcaatattaagttacactaatagcgatattacacaatacgaaagtactagataccataaatactttttagtatttgtcataagataataaaaacgagcattgttattgagtattagtagtgtctagcacacttctagacatgtcgtcttgtgattagctagtgatatctcctaaaaattatattatattaaactatatgagactcaatatttaattggattaataacaatattgacacata

SEQ ID NO: 89833 - DNA, 559 bp, Cannabis sativa
  modified_base (344)..(345): a, c, t, g, unknown or other
atgacggctagaagaagccatttttccagaacccgatcgataaaaatagacaaagaccaaccagtatacttcacacgatccacttcaacagcaacaagacaacaccttacactcaatatctcactgaaaacaaaagaataaaactcaccaagcaccagacaagacaaaacgataaaccatgtcaatagacatgaacaccactagtatgtttttttaaaaaaactttccaggcaaagacgaaaggtgggttgcctcaattatgagaatgttagaacatataataaataaataaacttaaatgttccatttttaaaattattatgatattttaataaataaattanntttattatcataataaacatactagattaataataacattataaatagtaataatactaattaaatgcttaataaacatatgtatatgcattgtttataaatttataaatgtgtttgtatattctttttttaatttaatattaaattttagtaatatatcaaaatataaatattaacttttatatttacatatttagctttatacgtttttttt

SEQ ID NO: 89834 - DNA, 882 bp, Cannabis sativa
aaccaaaataccccaattattatatattgtttctctactactggattatagttgtggtaatttaaaataatttgatgatatgaaatattatgattttagaatattattatagggaaatatgtaaattgtgtttgattgtgtagagtaatatgtaattatattttctttaattaaatgaaattatttggttgagtacaaaatttttatatattattttaaaaaattaataagatgaaaaatatttttttattatagttatttaatgttagttatacataaaaataaaataattattcattaaaaaaaatatatttatcaattaataaatattagattttattgtattttttaggagaattactctatatactgtttttttaacattttttttttcaaatttagatttgggttttaaagtggttgcagcgctagttgtaataagggtttctatacaattttttgttgcaatttaggctgcagcgctagttgcaataggggtttctacgtagaattttataaaaatacaagaaaaaaaataaaaactgttttcaagtgtaaaaatgaaaaggtgcctattttttattagttaatatgaatatttccattttttgctatgtgatttatgtacaccatcacccgcataaaattaaaatttatgtataatgtatatatattattgctaattacataaaaataattcaatctaaaagaaattgatctaacaaactaaatatatatatcataatatttataatgaatcataatattaatgttatttaaatttatttattaattaaaaaataaagaaattatttcatatactattttttttttaatttacggttcgggttgctccagtaatttatatgtgagttgctatgt

SEQ ID NO: 89835 - DNA, 644 bp, Cannabis sativa
aaaagaaacctaaaactgaacctcggtctcatctctctcttctcgtaggtttcatctctgacgcacctccgcccgaccccggtgaggcattctaccacaaccgatggacgagatttccaccacaaggatcccaagcatcaaagcacaccgaagcttgttctccctctcgatctcgcttgagttctctccactctctcagtccctctcttactcatagccagacggagcaactccgaccgtccatggcccaaacagactttaccgcacctagtggagatacgggtgaggcatcgacaagatacttggtcttggttgagatcagggcatcaacgacatctattgtttgtttattgcatcccaatttgagtgaagcttgttctccctctcgatttggaaagcttgaatgctggggttacaaacgcacaagaggatgacgatgatgtttcttggtagactgttgaagcagtgtagaagagaaggtttctaggtatttttttaccttttttattttcttttgtttattgcatccctatatgagtccactaaattctttttcaagatattatagatgagaatttttgtgggagaagattactggatttatttttttttttttaggatatttgagtagagttttgtttgtt

SEQ ID NO: 89836 - DNA, 586 bp, Cannabis sativa
gagaaaagagatcttccacaacctccttgttccaagctcgacaacccacctgaaataagttgctaagtagaaaattatcaagtctaagagtgattggtactggtactgactgtgtatccaaaggcagccaaggatccctagtgatctggatagagtcaccactccccaccctcttccttaaaccttctaacaggacccctttagcctccaaaatactacaccaaataaaatttgggttcgagccaattttagcagccaagaaatcctcccaagagtaatattgggccttgaaagtcttactaactaatgaattaggatgaaccaacaatcttcacccctgttttccaagcatagctatgttgaaatcacaaatattatggaaacccataccaccaacatgcttatgctttgaaagtctatcccaactcatcaaatttatactcctccctcgactattcttagaggcaggcttccactaaaaattagccataagattctcaatagcatggcaaagatttgagaaaatactcatagcatacgaaggtaaggcttgaacaatcgttttaataagcacctcttttcccgc

SEQ ID NO: 89837 - DNA, 1008 bp, Cannabis sativa
tcccccattctattggaacaaaacaaatctacaagagatggcaggaaaagtttctaaagtttatgagcttcctcggcatatcgaaaaaaactttgaaaggggttcttttggcatggggactttaagattcagagccacagtcgagctatccaaacctctgttctctggtttctttctctggagaacagggattaaggacttatggcttcaatatcaatatgagaaactcccaagaatatgctacaagtgtggcctaatgacacatgaacacaaattttgcttcaagactccggcagtgattaaaaacactaaaggcgaattctttccaatgtttggaaattggatggccaaagatgctattgaacggtctcccttcactttacctctgccaaaatggttcagtgagtggattgtgaatcaaaaggcggcaaaggatgaaaagatgagacaattgttgaagaatcagagacttagtttgcagatcgaatgcgcggattcaagagagcttcgaacgcagtacccagggaagagaaggcaagtggagacggtggtggagacaagagttagctccggtgaactggtcattaaccgatacccagcggtcactttgccggggattggagaagttaccccatttgagaacacagcaaacctgattgttgaaaagatactcccagaccttcctcctttggaggtgataaggacaatgcaaaagaaaaaggatgtacccagctgtagtggtacgaaaattgtgtctgcaaagactggaaccaggcacgcgataccacattccccatctgatcatcaagacgcagagtcttcgggtgatgctactggagacgagtcgattatagaagcccctaatttgatagccgttggaacccaggtggcaaaagatgacaatgacaaactaaaaagggctaaagatgtcatagcccaagtggaacaaaacaacactctgaaaagcccaaggaagttgggctcggatccaaaaagcccatttggtac

SEQ ID NO: 89838 - DNA, 9122 bp, Cannabis sativa
tttgttatgtgtgagtagatgttagacttagggttaaaaatggccatatctaagttttgggcaaaaaattagtatttttgtcaggcccgatagtagtctgaggccttcttgttgttaaaatgagtaaatattgaagacgaagatccgatggtagtccgatagtagtccgatgatggggtccgatagtggtctgatggtggcccgataccttcttgacgagcttagtgaatggagcttaacatctataaatgtagatatggtccaatggtcacctaatgctactttttttatgcataaaataatgctactatcgaattccatcggacaccattaatatagatgaaaatagggagtatggatgacgaagttaaaagaaaatagaagagagaaatgtataatagatatgaatataaagtaccaatttttttaattttaataaatttgtgtttaaaaatttaatatacagtaaacatatgcatataaattcaaatttctatgatcatcctcgtgacaaaaattaaactaaaaaattttaatgtacgctgaaagacgtgtgaaagtgcacgtagacttagtttaaactcaaatcactagttagactttacctgatatcattggacagaaagaattacttgggtcaaaccaatttaagtgagaattaaaaaggaaaaaaaaatagcaatggaatataccatttccagttcttacctaaaattactgtgtgaaaatatagttggaagctataaatggccattataccccacaaaaaaaaagctctcacctttctcaaaagtcttaccttcttccataggttcaaagctccaaactttgtttcatcgatacacactgttgaaaaaagtgatattattatgtcataattaataatatgtaaaaagtttgttgcttttaaactcgtctttatttattcaattcaattctatacatagatagatatagatagataaatacagctttggcttctccaattcgatctctctctctctctcttaaaacccgagagaagagaggaaaacgtgtagccaacattctgctcacctacctctcacaagtcatcttcgtctaacaattgaagtacttgttgattctttctccaactttgaaaaggccaagatttcttttttacttcgaccattgtataatctgcatatataaaagtttggtggggtccaaaatccaccgccattctcgtctaccttgacaatgtgctactgggtttcctcagaattcaacaacaatatccataggaaccacaatctctctcgcatgaatctgaattctcctaagggtgtttgctgatctgggttcaaagaaatttgggctcattaatggctttaatgggttcacccatctgggtttctgctaaagctccttgttctcaactgggtgtgtcagatttggggtctagtcgtcgttttggatttgctttgaatttgaggtatgatcttgagagattacgcaaatgggaatgttgttgcttgagcgctttaactcagaaagccatcacttctgttgaagatgagaaaccacaggtacctgttgctgatactcctgccgataatgaagagaccgagaacaatgagtctaggggatttcacaaggatttgaaccttcttcccagtgagtggtttgttatgttattatttaactattctattggggtatgcaatctgcttattattgaactatagagtacaattttgatctttgaagaacttattagctgcctaaaattaatatgtagactagtcatgtagttagtcagaaatgtggactacactactgaattttggctgctgtagaaaactttatgggtgtactaattgattggtaggacacgcattaagaaaatttgattaagaagtttggatagtggtatcaataagatatgttttgtcttgttatctcttaatctggtttgattagagtgaaagtgtatcacacagttaacaatttacagtgatttacattgtgtgaaaaaaaaaacagagagaaaaacagaacaaggactgttctctattttctaatccaagttgtcattaaacaaaccaataactgcctccaagattgtctctaaaacttaaacgccatccctaattttgaaatactaacaagttgtatttcaatctaatggatcctttaaacttggaacccaaaaactagtatgactagttagacaggttgaatgtaacacataccaataccatatcatgtctggtgacttccctttatttttcccataaatacatttatttatatgtagagagaaaaagagggagagattaatctagagacaattttagtttctttttttgctgaatgacaattctagtttcttccattctatgctccctttatttccattcttcctgtcctggaattctatctttcttcatgataaggattctccctaaactaatttttcttcaatttcagaaccactgactgcaaatgacctttcttccactcctaatgatggttcaaaagtgcgagtagcttaccaggtatattgtcttatcatatgttgttcttgatgtctgtagtttctttattttcttatggtagctgtgttaaatctttataggggctaccaggagcatatagtgaggctgctgcattaaaagcatacccaaagtgtgaaactgtcccttgtgaccagtttgaagctgctttcaaggtttgaaaggtttattataatcctggtaatcatcaaatatcttttgtatttcagcgtttcctgattcttataaaatctgatttaacaggcagttgaactatggttggtagataaggcagttcttcccattgagaactctgttggtggaagcattcaccgtaattacgatttactccttcgtcataggctgcatatagttggagaggtgcagttgcaagtgaaccactgcctgcttggattacctggagtggaaaaggaggacataaaacgtgttttcagtcatcctcaggttggttttgtatctcaaaagctatattggaccttccaaaagtgacatagagatgctcataacgttttacatcatgtcaaccctgttgtagctggcttatctcgctgatctcatattaaatttgccctgatgattagtctcgcaggctcacagtatctagcacttggttttggttgtttacatttctatcacacggttgctttagattgaaacttttgcactaaaagtagaagtaggttatgagtagagattatggaattttaggattgactgatgtaaaaatgtgtgggttacttcccctgcatttatacatatacaaactacatggaaatttaattacatgtaataacatatataacagcacctatctgtgtacattttttcctgattcctctgaagattcgtcgctaaagttcttaattgcaggctcttgctcaatgtgagatgatgctaagtaaattaggcattatgagaatcagtgctgatgacactgctggtgctgcacaggttagctagtttttctgttaacacatgctgtaaagtacatgcaattagagtctaaagattcaacctttatgcagatggtggcctcaattggcgttagagatactggtgctattgcaagtgctcgatctgcaaagatttatgggctcgacattctttcagacaaaatacaggtaagacttctcttcatatttcttactaaggatatatgagtaaacatgacaaatttagccattgtggtttgcatttccagagtttatgttcatgtttaatgaatgtttgacatgcatagaacaatacaaactaaacacggtatttaaaatattgacctgttttacatgttgatttcacaagttataatgagaattataaacgcaacaatattaagatctttctttccagtttccactataaatacaaaatgtattttcttttttgccatttccagtttccactatgagtacaatcagatatgtaatgcaggttgaattgatttgtttcttcattgctttttccaggatgatgacgataacattactcgttttctgattctcgcaagagaacccataattccaggaactgacagaccatttaaggtttatttcccatgtttttcttgtttggttgtcgtgaatgattttgtcttgtatataatttgatcaagattaacattattctattttccagacaagtgttgttttcactttagaggaaggtcccggtgtactatttaaggccttggcagtatttgctctgagggacattaacttgacgaaggtatattcgtgcaagaatttgatttgttctcaggagttcagccagtgtgtcaattggttgtgatttttaacctcgcttttcaacaatttcagatcgagagtcgcccgcaaaaacagcgtccatttagagttgttgatgattctaatgaagggagtgccaagtgagtcataatttcatgttgccctctttttttttttccaaaaagttcttactcatgagtgtgggtgtgtgcctttctgtgacttgtggaagcattttattttaaaatgaagtttggagttagactagaccaagagaatcgaagagtaaagctactgaatggggagaaaactatgttgaaacttgtagaataaacataagctcattgtacattttagatgattcaaatcaagtaaagcttgctcccacatgatttagacgtactaaattggataatttgtcccaataaacatgatttagattttccatgcttcacaaattgaacaatttactgtgacaggtacttcgactacctcttttacatagactttgaagcatctatggcggagccccgagctcaatatgctttgggacatttgcaggtcagtctgccctactcttattattctccaattccttctgtaataactcataacaagcttttaacttccatgaaaacgtaaagttctatagcttgttgcttattcatgaacttttctacgagttaaatattctcagcgcgatcaaagaacaaggaaaattaagaaaattgaaagagttgcctatctgttgttatcatgcaggaattcgcaagattccttcgggtcctaggttcctatccaatggacacatctccataaagagggcaaaatgtttttgggttttgtcacagctgttggggatgaatgtaaaagacatggttggaccttctaggttttgtaaatacatgtgataatattttgagggctggaagataataaccttggagcactgatttttcaataaattaggaggaaaagttccattcattttgtaaggcttcttattttatttatttttaatgtaaatcattctttttgttggttgaaatctaatggaggtttatggggacaatacgccataaaattggagaagcgcaagctttacgttcatggatttgtttgtgtaatcagagcacatcgtatgagatagttttacaactccttttctaattcttttctattgttgttgttaactttgttgctggcaattattggatttaatttaattttcttgcatagaataaaagacatatatttcaacaaaagcataggcaacgcaactacattaattacactcaaacatcaaatacttccattggatccatttgacattttagttgatacacatcatgaaaaggaaggaggcagagtaacatggaggcaaccatattaaaacagtcgacactggttgccctcccaaatgcactcacttattcaaaggtgaagatgcctcgtccttattgctaccgagcttggcagttacccatggagttccttgagaaaatctttattgtcaaccaaaacctacaaataccagacaaagcaaacatgagccaaacttaacaacaatcgaaatagattgataattttatatcagaaatgtgtctgagcgctaaattatcagaagtatcttttgcacatttcaaaaccccatctattcatgcatcagatttcgctgatttttagtacttgatatagaagaatttcagcttaatatttactttaacatagttgatacacttagtttagttatcttacttgatttgagtattaaaattagcttgtctcaaacttaacttatctacatcgttaatcaaactaaaataacataagaggctaagttagtgcaaactcacagtcttccagccatctgggtccagaaaagaggtaatcttggtgttgagcccaggaattggtcctggttgtcgggtaatctttcctccaagctcttgtataacagtgttcacaacctcagcactcttgtatacatcatctgtaccaatagcgatctggtatgatgcaagcaaaagcagattcaggataatgacattaatttcctaaatttgggggaaagcaaagatgcaaaatagtaaacagatatttagcgacctgtgcatatgcatttccctttgtgtattcagtcacaccataattataagtcaactccacaacagttgtcttctcctcttcttcataccccatcatggcaatggagtactgcaaaccacaagaaacaaaacacaagaggatccataagtttcaatcaacatagcttaaggatagaatagatcatcctatccatctcacaattctgataattaaaattatgtcaccgaccttgtactctggcctatcaaccctttttacaacacgcatacccaaagcctgcataacatgaaaagcaagaaaacagttggttaagtgctaatcgtattaagaatgacataagagtatagacctcataatcatattgcaataactcctgaaaactattaatagcatgagttatattcccaatcgcaatccaacagtgaaaagttaatatacttcggtaacaggagtgcaaacttggtaaataatcaaattaacaaattacacaaccatggtggataaacatattaacacgtcaccttttcataaaacttgacggcacgttccaagtcaccaacacgaagcataacttgacaaaatggctcaggggttgactcccgttgaataagctcaaaaatataaccatcagggtccttcacaaatgcaatgacagtctttccacctttaacagggcctggctcccgggtgacaatgccacccttggccttaacatgttcaaccagtttgtaaacctggtggtacatggagattataattcattctatcaccatgaaaaacccaaatatgaaaactttgtaatattaaaataacttacatccggagttgctatagcaaaatgtccaaatccagttccaatatcatatgaagacaccccataatctgtgatcaaaacaagatgataacccctcagaaaatatatcaatgaaatagttcaacatttacgcctcgataaaatgatacggaaacagaggttggatgcaagttccaaaaacgaattactacatctttgtcgctcttttccatattctatcaatgaaacagaaaaagaccaagactccaattttcaaaattcaaaggaaaccacaagcaccattgaaaaactgaaatatacacaccaaggaagtaactgttagtaggccttaggctaataaataaagagggtaattgggtaattgtaataggagggactggtgctatatatatgagtgagtagggaaggtaaggggggagtgaatcattttagttaagtgagctttagctcttgggagagagctgggtctctcgaatacccagcaacttgttctcttttcattctgatatcaatatatcagcaatattatttctattttgctactgtttgtaccgaaatgataggaaattctaatcagtaaccaggtccctaataatttctaacgtaacaacaacttcagttattattattttcttaggtgatctgaagtaggactgaaaacagagctataaaagtaggaaaaaagtaggaaaaagtaggaaaaaagcattactgtaagttaattccacagcaaagtttgattcttcagggccaaagccaagaaaggcattcgagtatttctcctctggaatatctctttgcctcaacaacttcattccaaaagcttcagtatagaacctgaatttaaattgaatattgaaataagaacttaaacagaaatctctcacatgcaaataaataacaaaatttaactttgataacaacttacttgatagtgcgctcaagatcacccacacgataaacagcatgaagcattcggcgcttatctttcttcggccattctaacaactcagcgttgggagcaacagcagctgcagaagcctccgccatatccagcaaatgaaataataattcactgtaaaaaaaaaaattataaatatataattatattacactaatttccatattcaaaaatatatttaacccaaacgcagtctaggttctggaatttcaccaaaaaaaaaaaagagtaacgagatcggcagattaaaattcccaaatctaattaagaatacaacgctatttcactaaaattgatccttacacaaaaatgcacgtgttctacgatcatgaaataatttagtctaattatccaaaaaaaataaaattgaagccataaaaaaactaagagaaatcgagagagagagctaaccagataagagagaataagagagtggaatctgtaatggaatgccctagaagtagaaggggaagttatcgcagcatttatataaggttagctgctatgatatttgctaaaccgacagtgacagcttgatcggttgttcctaaccttgtttatggtcactatgcacaaaaaaggagcagctgaaaatgttgcattttagtccttaaaatgctattaatattgttaattttacttaacaacccatcattttttatttatgtatttgtatttattttttgtggcaacaacagataaagcttttgaattgcactcctcaaaataaaataaaaaacttttgaattgccgcttttacagaaagataaaataaattataaaagaacacgtgttccatgtggaggaagacaagaaattgtggtccggaaaaaaatagaatttatgacaatggaatcaaaaggacagatggcatgcatggcttttctcacttttcttttttatttactttgttaaggagacagaaaaaaatatcttaattatttcccttacag

SEQ ID NO: 89839 - DNA, 1995 bp, Cannabis sativa
gtattttgggcgaattctggagcaacagtatcaattttccttaaactgacacaacttttaaatttccaaatcactaacagttaatcaccgttataaagggaattattgtaacctatacgatagaggcaatatttctcataccgggcatccataactaaactagaaatactcatttcttgaattctcaactgataacaactaatcagagttcattccttgatctccaatattgccaaacccttatctaatcttcttgctaatggagtatcttttgagtttgggaaggattgccttaaagcctttcaaattctcaaggagaagttaatttcaccgctgattgtcactacaccagattgggagctacctttcaaaaacatgtgtgatgccaatgattatgctattggtacagtattgggacaaagggttgacaaggtatttcggactatctacaacgcaagcagaatcttgaatgatgcccaactgaattatgctactacagaaaaggagatgttggccatagtgtttgcatgtgacgaattttgaccttacttgattggaaataaagtgatagtgtacactgacaattcagtaatcaagtatttgatgaccaaaacggatgcaaagctgagactgattcgatgggttcttcttctacaagaatttgatttagaaataaaagataagaagggcatagagaatttggtagcagatcatctgtcaaggttggagcttgaagagagccagaacacaaaagaagtccaaattaatgaggacttttctaatgagcagttgtttcaattagatttaacagtacctcggttcgcagattatgtgaacttcttagccaccaacattacaccaccagatttgacaaggcaataatagaaaaaaaatttactcagaagtcaaacattactactaggaagagcctatcctctataagcattgtgctgaccaaattatcagaagatgtgtgctagaaaaggagatgttctctatattaacccattgccatagcttataatgtggaggacattttggtgcgacaaaggtactccaaagtagatttttttggcctactctatttaaagatgctcatcaatttgtcaaagcgtgtgatcgttgtcaaagaacaggaaatatctcaagaaggaatgagatgcctttgacatgtattttagagttgaggatctgctttctctatgtggaggatgaaccccgatgctccagatcacttctcgcaaccactgacatggtatccatagcaaccaccaccactgccatactgatgtggcgctcaggtaagttccccatcctttttctttaatgtcaaattggggacaatgtgtcactttagtttgggggtgaacttaaatttttatttttagttttttgttgttaagttcttaatttagtttttagttgtttcgttgtttaatgtgagtcaatttgaaagtaggtaatagcatgatttgaaaagttcatttatttatttttttcgaaaaatttgtgtgcttggtgatattacattcttgattaattttaattttgtgatttaaaagaacatggaatcatattaggtaattttttagtaattgaattagtttatgtatgctaattgtacaatgtcgaaagttgtttggaaaaaattctagaacttgcttgcttgctatttgagaaaataataaattatgcatgactaggaaagtgatttaggcattctttggatcgattgtgcctttcaagtcatccctataattttaccatagttatcctttttgagccttaacttattctttgcttctacacatattgagcctagaaaaaataaacccatgaatatccaaaaatttaatcctaattataccataagtagatctttagtttggagaaatttggatgggaagtttgtgacatgtgtgtgggaaaaggggtaaaaattgagagagtgtgaaagaaaaaaattgactgatagcaacttgaaaaaaaaaaaaa

SEQ ID NO: 89840 - DNA, 1465 bp, Cannabis sativa
tgatttcggcagtatgagagttgcagaaactcataaaccaaccaggaaaatgaagccatccatcctggcaaaagttactcagaaccttagacaaacagagtttagtgaaagagcattcgataagcaatgaaaagtagtctctaggccaccgttacacacttgacatgtttctaagaggggcacatgcctttgttccaatttgatatatgtgggtagacagtgtgtaagaacacgccacaattttttattttttattttttactttttgtggtatcttcaagtgccagaatttcctccaaaagcttaagttgtcaccaccctcccatctaccctgcaattcttgaataaacttatagtaacttttaacagaatagcttccagatgactcattgtaccaataccatgaatctgggatcgtgtaagacatttgacacgtcggatgtgtctagggtagtaaatggccccggacatgatcccgcaaaatttgggatgttgtcctctctacgagcctgcaaagggcattcggcaagaggtatgatcaccttggggataaaagctaccactactctgatgattaaggaactagagcttgcgtcccatagaagattgatgtataatcaagagaccaaccacattctcctagaagaatcacttgatgaaattgaagaaaaaagagacttagcaaatttaaagctacatgctgatcaacaaaaagtagctcagtacttcaataagcaagtaaaggaaagaaaattctttgtggaagatatggttctcaaaagagtgttccttaacactaaagatagtgcagtcagtgtgctcggacctaattaggaagagacataccaagtaaccgaagttacaaaagctggagcatacaagcttggtcagtatggtgaaaatatgaggttagttatggtactacggtattggaatggcaaacatctaagaaaatactaccagtgaatgcaaaaggttcggggaccacaaaattgtttgctgctcaaacattactcttaagtgatggccttctgagtggaccttgctcaatggtttagagaaatggttgatgctaaggtctgatgaccacctctaaagcacaattcatcttaacaatcatttctcttcagtaatgtcttttgggtggaatatactgtttagaagtattttctattttaattagctaaagatcataatagataatgtaatagctttttataattcaataaatgtacattacttcagtaacaacgcataccaaacaataaatgaataaagattattatcgttcaaattgtgtcaattttatatttttatttgcaaattatagcaagtcataaaactaccaattatgtgtgcaaaaaggtctgcctagacttaagagctgaacagataaataagaaacttgttaaatcacaagtaacaaagagttaaaagtttacttggtcacttaggggcacctaca

SEQ ID NO: 89841 - DNA, 957 bp, Cannabis sativa
tggtcatgaccaaattgcccctagggcctaaataaagcataagcacaaatcaaggacaaggatgtcatttttcatcacatacacactcaaataaatttcaaattattcatgtatcaataacatgccaatatgaaatctcaaaaatgtattttggccccgaactcaattcggcctgaaatatccaactgtgactatgctgcgccgacttatcagaaaatacctgcagaaggacaaaataaatatactatataataatataatccataagcacacaattaaatttacagttttacctttctcgggtcaaaattacaaaaatgggtcttaacatgtcatttatcaaagtaattcacatataataaattatataataattccataataaatatacatttaactagttagggttcactaatccgttttcttaatcttaggatattacagataatctcattgttgagcaatcaattcatagccctctctcaatgttatcttactttaggagtgttattgctgaatgtaaatccttattagaggagttgaatgatgtttctattctttttattaggggatttgtggatagtgttgctcattatttggctagagcatcttattttgttgcttatcatattagcagaagtaacgatgtttgttctcactttagtaatgtaatcttgaatgattattgttaataaaattaatgaatgatttttcaaaaaataaataaaaaatacacacttagaatcttacatttacgtttgaacttgatagtactttaaaaaaaaattggaaaaataaataaaatagttatctcaataaaaaaataaataaaaataaaacaattatatacaaaaaaaaatatatgtatgagattttagttactttatttatgagattatttcacaaatacacaaaaacaacaaaatattacataaatacgattttatggaattttaa

SEQ ID NO: 89842 - DNA, 2519 bp, Cannabis sativa
tataccacatcttattagtgtgtccgtccctgattattataataatataccaacaaaccaataagaaacaaaacttgtatctctcacagacaataacaaccctattaatctaataaggtggtgaataatcactgctcttaggaaaaataaaataaccaccaaattaaacataataatgaaaatcaaaacaataaaaaaaaaataaaacaccatcgcacaaacaaaagcccaacaaacccaatttatcccccactaattcgacactaataatcaaccgaaactaacattttgtctcaaaaccccactgcaacattagtgtaattaaatagtgaattaatttcatactagttttaaattcaatcacacatttgaaaatgagttggaagcttcttatattaaagcattaatctttatcatcccacactaattatctaatatttttatttttcagtgaactcacaatatgagtagacaatcgtgatctctatatatataataattaattactataaaaaaatgtgtataataaattaatatatattatactatttaatatattatcaaatcacatgatggaaatatatatttgcgaatatacatgcattaaggcagaatccaagtttattgaatatatgacattaatgtcaagattttggactagtttacattcgtagctaattaagttcatcacaagtgaactacaatgtctactatatctatcaagtcaagcctttatatatataaatatatttatacacacacacatgatatatcattacatctcatcaatataatgaactgccagttaagccctctgtacatagtaatattcgagcattgtcactgaaaatacaaacccaaatggaccccacattgtttcattaattaaagtgattgatgaaatcaaatcaaagttactaaattcatgcaacgaaccctacaatttggtaactgcattatttatttttttaaaggaaatttgacatggaatattacatatatgtaccaagaaataatactaatagtaacacacttcatcttattccttcttcttctgataattacggtacttacaaaatggaagaaaacaaccagtgatcaacaacatcgctacctatatatatacatagcttagctataatttcatatatatagcttatgctcagtcattttcaccaaatcatcaccaacccattcgtttgaatatatataccataaatcaatcaaaaatcacatctttccatcaaaataaaaatgggtttttttttttcattattataattatttaaaaaaattgaagtctaagccgtcaaataatacggtcactcttttcaatatttatatatttttattgcatatggacaaaactgaagtagagagagttgtttgatatggctttattattagtagtagtagtcactcacttgtcaatattgtaggccaaaatcccaaaactaatactatgcaaagaaaaagaattaatgatgaaattgtatatgaaattttactgacatgtactatacatatatatatattttgctcccacgtatatatttgtggtggcgttttaactttctgcaacaaaaaagaggacatatatatatcccccacaccaccactaccatatttgtgtatttatgtatatatagtactatatatatatatcatactcatgctacatgtatggcatatcaacaatttccctcgtgcataataataatttaaataagaaacaaaaagcttagctaattactatattattttatatatattagaaaaaacctatcaactttttcaacaaacacataaaataataacttatttccatttaatgaccaaatttattattatatcttaaacaagttatactcaaaacataagataagattgtagttagtatatatatagttctgataagtgacaagtgcttttaatctgaaactcaataaacccctcattaatttttaaaccctaaccctaaataataaaaacccacttttgaatcttcaagttcaatctaatcaacccatcatcaagaaattaaagattgtcaacacaagattaatatactgaaaaaacataaaaattatcataaaggggtaaagaaaccaatatcagaaattaataataaggtaccaaaatcaaagaacaagttatactatatgagggttagaacatgatcagtagagccctatatataactctaactatataactatatataactagcttttttcgttcacaagtgaagagaaaggtcaaggtttacgaggtcatgatgatggtgatgatgatgatgagcaggagcagcagaaccgccatcgccggtggttgtgggagagagagattccggcgtagaaccaccgtgaaaacccagaggatattgatcagcatgatgaaaagaagaagaactcgatccaaaatagtgaccgccgccatgaacggccgaagagggtattgggttgtgaccgtggccgtggccgtagtcgagccaataacggtcgagaagtactcctccc

SEQ ID NO: 89843 - DNA, 738 bp, Cannabis sativa
tagtatattatatgttatgttattataagaactattacttatgttaacctctaacttaacaaatattattattgcatgttattattgttaaatagtgtcgaattcgaatagttagtatgatccaagcacttatttatatatattgatcacaatcctattcctatcatgaattataaaagatattatttatccttaaagaagattacgtgtatatatattatttttttcttaacaaaaatgagagaaatttatacattacacttaaaaatagatattttttatataaatatttttacacattttttattaatatttttatgaattctatttttttacatgttttaaattgttttttctaaagaaaaacattgatttcttaaaagcaatgttgttatgagataacaaaaaaaaaaaaaacataaacttcgtattgttgtaaaataaattgccttgttttcctatagcagtaatgttaaaataatgttttttttttaaaaaaataataatatgtttttttgttaaaaaatacttaaaaatgtaaaaagaaaataacaacaaaaaaaaaaaataaaggaagaaataatattaggttgggttggactatgagtgtttgcaggataatctgtcctatttatagaaatataggttgacagttaccctttgttgagactgattcaaatacaaccgttcataaaacgtggataatccccatgttttatttaatcacatatgggataa

SEQ ID NO: 89844 - DNA, 517 bp, Cannabis sativa
aattaaaaatattgtgaattataggttataaattgtaaagcataagaatttgtctagagttgagaaagattatttattcaggttacaaatgtaattagggagcattttttgtggtttgctttctggtttggagccttgaggtttttattttgtatgttcttgattgtatctagttattgattaatgaattcttattccttcttgataaaaaaaatagcaattacaccatctaatgtaagaagcattacattgtaatctcaatacaataataaaaatgaaaaggaaaacatgacaatggctctaataaggacttttattatattacaaagtctattacattcaaccaaacactttattaatacacttttaaagaattattctgaacatattttatctgttttcacatcttagagagtgttttagtcagaattttatttaaaagtgtgcatggtgtaatcattttattaccattggtatttttttttttttaaaaaaaaataatttatagtattaaaaa

SEQ ID NO: 89845 - DNA, 1549 bp, Cannabis sativa
taggcaccactggtgccctttagtatttctctgggatactaacgtgtctagtatcactatgaagtgatgctttataattggttagcggttctctataatctttattaaagtaaaatatatgaaactcgatatattaaattgcactaataataatattacacatcaaaaatgtgtagacaccatgggtgggtgccctttagtatttctcaatgtgaaagagcattgctacgaaacactgaggtatctaactccactatgaaataacactttataattaattatcaactttttataatatttattaaaataaaatatacgagactcaatatcaaattacattatagatttaccctatctcgaagaaaatctataacctatgaaactaggggcatgaaaggaaaaacataaggccacataagaaatgaacccatagagttacattcaatttctctgttcccctgtaacgttaatagggttctgagaatcttgaggaaagtgcctataatatttcttattttctctctctctcatatggtgaaattaagggcacaattttccaagtaatgttgttaattattattataattataataaagttagagaaaaaccaatacatgtcatgcaagtgtcctaactataaagctacctatccatctattaatttatacacaaatacaaatccaaactaaacaaacaaaagaaaaagttgtgtctatatataatgccactcatcttcaccccaaatatactccatcatcatatatctcaccacttctactacaaatctttttctctctctctttctctctgtttttataagtacttgtccaaatcttgacagcttaggttattagtttcattaaattttgtctttattatatagtcatcatcatctctctcaaatatatattactataaacttcatagttttgcttcatcattttctaaatttcccaacaatggtttctcctgatgctctaagaactatagttggtatcctaggttagtatatataatttacattttatataataaatatatatatgtgtttttaatttctaaaaaaaaaatcttatttgggttgtgttgatctgattttgttttctttatttcaggaaatattatttcattcatcttgttcttgtctccaatgtaagtttcttcacttttcatgcaaattcttacaaatttttccaaccacaaaaaaaaaaaaaaggacaaccaatcactatcaaaattaattattatttcttctccaatcttaagatgggattttccattttaacactataattattggtatatccactattattattatgtcaaatgaataaataaaaaggtggttaataatgtagttaattattattattaattacaggccaacatttattcaaatatggaaaagaaaatcagtggagcaatattcagctgtgccatacttggctacgcttataaattgtcttgtttggacactttatgggctcccttttattcatccaggaagtattttggttgtgactataaatgggtctggtcttgtaattga

SEQ ID NO: 89846 - DNA, 755 bp, Cannabis sativa
aacctaattatgtgaaggttttatatattatgggttaattaggtagtaaggagtaggattatgatcctgctagcctaatttagtataaattataaattttaccataagtggataaataagcataatttattaattatggaaatttatttggaatatgtgaatatattgtaagctatttgtgaaataaaaatatttttaggttcgcgcgaccctcgagacccgatcagagatcaaaaatatcacaacaactttagttagtaatattgttaggattactgagattagttgattatagaattgccaacgtattttaggatactcggggttgactaaatatcctaaggtttagaaattttttagtggctaaaaaatgtcaaaaaaacttttattaataaaattttaatattattattaatcaatcttatatatattaaaggtttgaaaaaaaaaacaaaaaaaaaaagaaacgaaaccctctcccttgctcttcatgcgacaaaacctcccattaccatcaccaattttctttgaatttcttagccaaacctagtgtttctagccctgttagcagctaggtagtgaatcattaaagatgaagaacttgaggtaagaattggttctctttttaaattgaaaatttaaattttatatgttgacttagtgttttagaacggttgtggaatctatgatctcgtggctttgtttctgggttgctacgagactgattttaatgcatacttgctggatttgaggta

SEQ ID NO: 89847 - DNA, 1440 bp, Cannabis sativa
ttctatttcaatgatggtttcaggtttctctgaaatctggcctttgacgacaatacctctagtgtgttacttattgagtatttttacattccttcatcctttggctcacccttgtatttcttggtaactttaggctccttttgtttgaataagggtgcatcaaagcaccactcgaagagcttatccaacaccttttgcatgttttccacactctcttccaactgtaagttattcatttttagctcattcatttcttctttgtgcatgtggctgcgggagcttgacgtgatagagtaaacttgcttttcctttcctattctaggacgcaaggttttgggatcttttggtgtcggtggtggaggatgtttgatcggtgaagggactctttgtatttgtgacgtgccttctcctgtagtggttattaaagtggttgctccgtcatgttgatcaccagccagggcctcctcatagtggttgccttctcattcttcttgagatatgtggatgttcacatcctctgccaatagtagcggtctatgatcatccgcaccctcctctctggtgatgggggatggtgggtctcgtcctatggtgaccaactgattgttgtcaaggtaaatctcaatgtcttagaggtggcatgagaatctaggctttttgtaaccattgtgtgtaaagaaatgacttttccaaagcttgttgttcccacacacggtgccaaattattgacagtgagaactcatcaactaatctagtggccaaaaaatacaaagtgaccggaaaattagatgacgattaagatgaagatgaaaagatgtcttaaagttgttttctctctatggaattcaaggaccaagtgattttccaaccccctctcacatctgagaatggggtatttataggctataatggcctagaatacaaagtggtcccaaagggaccaaatgttgcttttgcactgtagactgcaggtgctggaggtggctcttctcctcatacttttttctggtgttatatggttcccagttacaggcatgtggtccacaattgtaggggagttatccccaattgtaggttgtaggagaatggttgcaacgcgtggtccccgattataagttgtaggagagtggttacagcgtacccttggccgggtccttagaccttgtaggtccattgtcgctgctactcgtacctccttgcttttaggtttctcagaaggtgcggttgtacgctttctccttacatgccttgtcccttgattcctcctctaacgtcactcttgtcgatgtgcattcacctcacaccttatatgtacaatcaccaaaacacatttacgcagcacacacaaaggctcgcatgcgagggcccacatgggctcacgtgtgagcccccaacactcaatacaaacacaccatgtccccccattacacacacaactcg

SEQ ID NO: 89848 - DNA, 3276 bp, Cannabis sativa
cccgatccttcaggagccgccggagtctgcatttgaagctgagcctccgcctcttcatccaacggcaacctttcataagccacgttagtaaaagacgaagcaataacgataactggtccagccgccgtgagttcaccgacgacgtttccaccgacgacctgtccttgccctccggccaagaaaatagtcaagctagttgccccgggtggagccggaggcggtagaaaagaacctgaaagagagagtatctcgaatcttccgtggagtgttacgacggctccggctgcagccggttgacggagagttacattggttacagtaccgcttccgcttaaaatacagatccctctttgacggcggcgggcgtaggtggcgactgagtcgaatacatcgcagccgttggttatttccaagatgtgggccctaagagtgttggcactctctcgtgttattatgactggtggtttgggcttgtttttggacccaggtggtcttcctctgggcctgcggcccactaagtcatgatctgggtttccagtaatgagttctaatccacctcctcctccaactccaccgcttcctccgtcgtcttggtggtggtcggaagagaattgatcggtgtggagattcaagtgtcgttgtaattgttgtggttgattattattattattattattattgtgatgatgatgatgatgatggtgttggtgttgaacgtagcgagaagctgtgcctaaatccaaaccagccatggatatagatattacataaaaaaaaaaaaaaaaagacaaaacagaaaacaaggaaaaaatatatatttatatatatatgtatataataaaaaagattgttattttatggaagtagtgggggattagaatagagggttttctttttgggttataaaaatgaaaagaggaaaggaagatgaagaagaggggtttgagttcagagaaaaggaaagagaagagagaaaagaatggtgagaagaagagagagagaggagacaagactcaaaacgcagtcatttctctcacacgaaaagtttaaataatataagttttttttaattataatttattattattatcattatttgtttagagtattgttattgggaatcaatgtgtattattttttataggtgacgtctcacgattggttagtaatatttcttataaaatatttttttaagttgtattggactgaatatttaattacaccaataacaatataaaaccagacaccattaatacttttttaccaaatatttattttttaatatttgatttcttgatatgaggaagaactagtgagaaagaaaggccaatggtttgaactttgaatgagaatgaatgaatactcaatttggagcgtgaacttaacgcgacttaggttttcttatttattaaattatgataatatatttatgtctttcttgtaactcttatattatgttttttttttttaaatttaatgttgttatatttatataattattttagtgtcataagaatcagtaatgtctattcatgtttgtgtgtatatatactatattttagtgtatgaaatgcattatgtttccaagaaaatttacattttaatttgaatatatatttatttcttttggtgcatatatgacaacccacaagattttcctaattttaatattaataattaagtttaaaagaaagagagggaaacttttaaaacggttataagtgtgctagtaataatatagtaatgaatctaatatagtcttacctcaacttatccaaaatacacttaagctataaataaataattaattatataattatatatatttttgttctggccttttcatcttaattaatgctgaaaatgtaatttatgatttatgattagatgtgagcatagatttttagttagttaaattaatcatgttacatgggtgtaagaccaaattaataaagaatggctaaaattcccaaagtttatagaagcttaacctatataaactaataaattaatgaactaatataattaatttttgagtaactattttttccttctcactacttatcattattgatggaaccccacaataaaggttattagtctttatgcttaattattatgaaatatgtaagcaaagtaggaaccttattggtagtggaaaaaacaatttgtaattgtaattaacagtactaattgaatttaatggaacaaaattagcataggaatagatttagcaatatgaaaaatgttacctttattagtgataattttttaatgatagcatgaattttttgtgacttaaaatgtttagtcacacaataaacattacttgtcactaaaaagtaatttttaaatacaagttattactaatttaattttaatagcaaaaagtattgtgtttaaaaacacatttagtgacaataaattataatttttttgactaatacttttagtcacaaactttttaataataatatataaatgatcattcatgttcagtcaaaacttgcgacttaattaagatctttcgtagtgtggaaataaaaattaagggtgatttatgtttagttaagccttcattgagcctttccttacgagtttatgacatgacacaatgttcgttggtaaatactaattttcagccctaatttatttgtaataaagatgatgaactactaaaaaaagtaaattttttaacagtttaaaatagtcggctaaggtattgtcattaatctttataaccattacttatttgactgtcgcaaaattgagtagaataagcaataattttgaaacagtcggctataatatagccgacagttttaaaccgtcacattataaaaaacctaactagattgcgtaatcaaaccctttccaatcacacaacgcctcttcagcttaattaaccttaagcttcataaaacaacagtccaccaccgaacacgaaataccaaacagacaaatggatatgtaagcattaacattaatttagataaaagaaaatgggcctaaaaatcaatactatgtacaaaaacaaattcaaagcacgtattgaaattaaaaaaagaagacaaatatgaatatactaaaataaaaatcaaaactagacaataaaaataaatccagctctggcgagcttgatacgcaaatggtttgggttttcgaccgtaaaaaatgagtcatgcgaccatggcagcaacacagagagagagagagagagagagagagagagagagagagagagagagagagagagagagagagagagagagagag

SEQ ID NO: 89849 - DNA, 520 bp, Cannabis sativa
aagtccaaatatatgcaatacgtgtcacctatgcgaaatttgggataacaatcttatttctagtctactcatttcaagctacgttattgacttgaccgttagtgtccctttggctggtaccacccagtgtcccaaagattttatggtttacttctcctttgttgcgtgcaacttgtcggtgcctacatctacaaataatatactaagtattaggaggtgtataatatatatagaatatttttaatagatattataatgattattaaataatttaactataattaattttaaaaaaaatattaaatcattaaattttgaaattttatacttaatttaggtaattaattaaaaaaaatcaaagagtatatttttttacactatataaaattatataaaaaaaaaatatatatttatactatagggtggctattcaatggttacattttttttttgacttgtaatagcatgttactaataggtaaacattcctttttttaaattaattaattataattaacta

SEQ ID NO: 89850 - DNA, 571 bp, Cannabis sativa
ttatgtttgttttttttttttaaaaggaagaggagaccacttatcattatgtttattttcaatttaaggtgtggaaaataaagttgaaaataatttgttacatttgtctatttgactctagaacatctgtttgttggttttttgggaatagcattgtattcggtttgtgttgctctgaagccgaagagactagtgggctgcacagaagtacttagtccgtaaattgtgggagttgtgaacgtggttgctggaggataaatagccgaagcagtcatctgggaagtttgagtagttgtggtattagcaataggtgttggaagtactccataagtttgaatgtgagcatcttcaaggtttatgaatctttgggttctttataagaactcagataaaaaatctactctttttctgtgaagttctcctcatagcaaggatctagtggttattcctgatgtcaaagccaccatcttcatatcatcagtaactttggtctttgatgccgcatccatcatgcgctatatgtactttttgaggcttttccctggttgttgtttaattttcgtcaaagaac

SEQ ID NO: 89851 - DNA, 741 bp, Cannabis sativa
  modified_base (26)..(52): a, c, t, g, unknown or other
ctctttctctcttcatcttcttcttnnnnnnnnnnnnnnnnnnnnnnnnnnnttatattattttataataaaaatatatatatatatacgtcaaaaataatttttgaataaatataggtacctacctagctaagacatttatgtcattgtggtttgttgaaagagtttctcaacaaacttataataaattgcatttaatattcttgttttacagaaaaaggaaaaaattatcgaaaaaaggatatataagtctcagttgagaaaaaaattatacagattcatttgacacagatttttgtcctatataatagtgcttcatagcttgggccaaattttgggaaatctataaagaaatattatatatataattttgaaatgggatattattattattatatatatatattcattaaattaatctcttcttatatcttatatttaagatcaatggataatataaatataagttgtatagcatctattttcttttaatttcttgaacagctttagtgtttttaatatattctcataatttttcaagtaacaaaggtgtgagaataagctaagatgatctttggcatgttagttaaatttaaatggctataactaaaatgatctcgctttggttagatatattcttttaataattgtttcaattgttaggtagaatctgttggaaattagaattatttttcaaattttatttgttcaagagaatactagcttattcggattaatttt

SEQ ID NO: 89852 - DNA, 1292 bp, Cannabis sativa
aaataattgacaaatcacgtaacttaaataacctaacaaaagataaattgtcctactaatacgtttagcgggttgaatattatttaatcaacccaataataatttgaataaatcgatttataatttattttgaaatgtatataatgtattagataaattatgttctatggttaactaaactattttttatatacaatttggactttatgtaccaattaattttatactttggattttatagttactgatttggtttaggtatgaatgttgaagttaaaataattttaagtttggactaaatatattaatatttttttttattattttaaagataaatgtttgtttactttaatgtgatccattaatgtttgtctcatctcaatttttttaaacttttaatttagacaatattttttcttaaagattatatatatatatatatttttcatatttaattatttcaacaactaaaattaaccataataataataaaaaaaaaaattatgaagattgatttaagcaagtgaatccgacattaggcagactatttttttttaattggacatattataattaaatatttttaatttgatatttacattaaattaattggcatatgttacaattaaatattttcttcttttgtttgcttgtatttctaaaatattgtaatatcattatggaatgactagtcatgggattaaaagaaaagatcattttaatacaaaatgatatttttttaagagtaatttccagcttgaatacttaagtttaatttctgattacagataaatattcaagtttactttttgacggtaataatacctaagttatatttttgaaactttagtaggtacatgatcattaagtgtcagtcaatggctacgtggcagtttctgattggtctaggttaataaatttttatttttttattaaaaattaatttaaatatactaataagaaaatgacacgtagataataacttgacacttaacagttaagtacctataggtattattattgttaaaaattaaacttaggtatttatctgcaaccgagagataaacttaaatattttaggccgcaattacgctttttttaataataatatactttaacttttttattccattctactcttatatatcgaaagtcaatataatattttattttatcaattagttaataagatcaacctcctcaatttattttattttataaaaaatatgtaaactccttttaaaattatcttttaccttttggcccctctcctaaagataaattcctacctt

SEQ ID NO: 89853 - DNA, 1238 bp, Cannabis sativa
aaatcgaattgaggaagaaatgaatggatgaatgaacctgtcaccagactcgccgctagcagcaacgagcttgtgtgagtcaaggaccatgatcttgtcctcgttggatttgtgaacgagaatgctgttcaccgccgatgtgtcggccaccaccacggcgaagccgttcccaaccagtccgaatacgcactccatcttagtcttcctcgatctagcgactcttcttcggcttggagtggttttaaaagcgacttgagcaacaagtttgaatctttatgaaatgagaccctcgaaaagatgaaactcacctcacagcacttcctctttattttatttcaatttataaaatcaataaattagcaaaataataataaaaaataaatagcaaaattaaaattttgactataaacaaaaacaggatgagtctgttcaaaaatagaagtgtacacttgcaataaattggcaataagattttaaaataggaaaaatgttgtataatgtttataattacactgaataattttttttttcaattgttgtgaactttattttcatttagggcttttataagtataattataacacttatttgataactatattaatagtataacttaatattctttttggatgtaataatatgattgtatgacacataagaaaatgttactaataagatctaaagggatattgtgttggtacacccatattacaattaattagattggatcggattgagttacgaagtagattactttctttaaaacttttgcggtactactcaaaaatatgcaagcagtcgaaaaatacatgtcgtccccaaagtaaaactacctatttaaaatacaattgtatcaaagctctactgcacaataaaaaattgtcgaaacaccacacaaaaactactactcgaactacttatataatacaattgtaaatataaattctaaatattttttctgtgtgagaaatattatttctcacgttgattctaatgcgttatacaagaaataacagaagatagtaaaaaaaaaaaaaagatgttaatcatgggaatgttaagtgaatcgtgagaacgatatggaaaataaaaatgagaaaccgtcttcctttaaaaattaattaaacacatttaaaaattattataattaattaaataaatataaattttctccaaaaaaaaaaagtgtcacaccacaccagatcggtcgaaggacatgtgcgtgtggtgtagtgta

SEQ ID NO: 89854 - DNA, 954 bp, Cannabis sativa
ttaatatctatatactaatgtttatttttggcgtccctatagaatagggtgtaacaaccatacaatatgactccaaaatgttgaaagactgaaaccctccaggctacactgccgtgatatgtacaatcactgccaagctccaactcactgatccttcagcttagctttgcccttacctactcaaggtagcaaactgatgagtcgacaaactcagtaagatatgcataacatatataaaggtaatgctgcactgactttatgtttaagccatcctgagttcaacaactgagctcactagatggataagaatgttctcaatgattggtgctattaaccatgatatcacccactatcagcactgtgatcgcactgcaggatcgacactatgtttgtacagctatgataacatcaatagcaccccaagagtataattgaccatgatatcactcttaaccagtactgtgcccgtactgccgaaccgacacaatggttgtgccactattatagcgccaattaatactttctgaggtgaatatcactcttaactagtacgatgcatgtactgccgaaccaacacaatggttgtgccaccatgatagcaccaaaaacatatacaatcataacataacatgcatccattcgcgtatatatatattatgctatcctatctcagttttgtgctaaagtgtgtcagtcagcctgagtggaattgcagctcgacgcttttcaaggccctaaaccataatatttaaaactcgatgagagatacgctaaaacacttctcagggactttaaaatcaaactaggaataaccctatcaatgaaagacatgaccataccctaaaaatcaataatttggggaaaactagggttcttggaaaaccccaaccggtaaaccagttgaccgattctctgggtttcctaaggggataaaactggtttactaatttctca

SEQ ID NO: 89855 - DNA, 545 bp, Cannabis sativa
aatggcatagagaatcctcttctgtacataattccctctactatgatataccgtgctgccttcctcctcatctttcgagcttcatttcaataatctgtgagttccccagcgttgaggtaggctgctattggtgtgattcagtttggggaagtatcaatcatttcgatctcttccgtgccagtgatgctaggatcttcgaggaactggataggaaccaagttcactttgtcattcacattgctgcttgccaatcgagctaacgcgtccgcagttgtttttttttccttggaatttgtctgagactgtagcttttgaattgtgcgagcaagtcatgtatttttctcagatatgctatcatcttttccccgagtctcgtattctccagatacatgatttaccaccagctgtgaatcactgtagatttcaatgtgctcggctttcatctaccgggctaattttaggccagcgattaaaacttcatactcagcttcgttattagatgcttggaatccaaatttgaatacaacgtgcaggtgttgcccccc

SEQ ID NO: 89856 - DNA, 627 bp, Cannabis sativa
ggcgaggcgcaagctgagggaggctaaggaggccgttgaagatttgtcctgcaggctgaagtctatggaagagcttcatcaggctgacttgaaaacgacggccaacttgaccgttgaggtgaaggaactcagggatttcaaagatcaggccctgaagaaggctaaaagagacgagctcctagcccctgttgtctgcaatcattgcactaagtgctttgatgatggcgtttttatggcctgccagactaatggccaaaacctcaaactcgacttctatccaaagcctaaggaagttcttatccacttctgggagaaaaagaagcgacttgatgccctgctggaggagcgcagggggcctcgtcttccacctcgcgttgattaagccaaccatcacccattactgcttttattactatctctcctttttttctgtttacatttatagtcttttttcccctttctcagacaatctatctttttccttaaggggagacaatttaaggcacgtcccgaagcctttaatatctttttagagcttattgttgggtttgaacatcttatttttatgcttaaatacatactttactttttaacttcgttaaaatttttggcctgttttacatttgt

SEQ ID NO: 89857 - DNA, 624 bp, Cannabis sativa
tgtgccaagagaattctctcacaataagagagaaaataaaacctgtcaagagcaattacctcattttaatttagcacgagtatatacccaactcccaaaatcaatccaactaaggatatcatgttcttccagacacaagcagctactttggaccactatatgaagagagaagcaagatcaattcatatataagtaagctagttttttacctatatgaactactcgtagccgccgctggcatggaaggtttaacactagacgaggcgtccttcactggttttgagcaacccaagcaacaaatttccattaggctcaaaaggcatactaagaaaaatacaagatatattgggatacacagaggagagatagagagaatagtagtggtactactttggcagaaaaaacatataatgtgttgagacataatttacccagtaacagtacaaaagataagagaatgaacaattcccttcattacttcctgtctggtgtgtaaactatgtcaaaactatattataatacactcaaaaagaacatcattagctatccagtaataataatcagaattcagcccttgcttgttgagcaaccccttaaaaactacaaaccaatattccattccaa

SEQ ID NO: 89858 - DNA, 550 bp, Cannabis sativa
  modified_base (60)..(68): a, c, t, g, unknown or other
tgtttaatttttcatcgttttagaagttcatatttgggttgttaaatcaacatacttgtnnnnnnnnntaagatcatggtaaaataattccaacaatgtacccctatatggcgtcggttcctattccacccttaattcttgatccaacttaaaacttctctaacactaatagcctcaactatttctgcctaaacatcccctgtataacttcgtgtcattcctttcaataaaaaacctttatttacgagtattaatacttctcactcactcaattgatttaatatatataattaaaagtaattattgataatgtatacttacatttttctcttcacaatgatcaattattgcacgctttaattataagagtgtaaatgggtcgggaagattctgatccggctatgatccaatctaattcagatcatgtaaggatctgccccgtcccgttccgctatattagatactcagaccggatccgatctgaaccaacttattcgaatcgaatctgatctgacccaacccctttttttaagaattttaatattaactt

SEQ ID NO: 89859 - DNA, 768 bp, Cannabis sativa
agcgtgccactgcactaatataacatgccactagtcttatgatgatgccatcttatcttaggtctatataatatagatactacgtgttacactcatacgtctatttattaaataagggcttattagggtcgatctctgttttgattatcaagtttaaactagttatgccttgatggcacaactctcaacatagattaaactaattatgccgccttactcgcgcatctacatatactcaattaattcatgtattgcatgcatagatatagaaactttagcgtaatagtcttaattcacatttttaactataaatacaaaatatacaagtgtgccaccaagctatactctatgtgcaaggttcactttcttatctgaaatccaaagtatgaggagaattccaatccacaagtaatctcgagtaagtgttgtcgatcctagtcacaatcatgggtttaaaacataatagggttaatcccaaaataaaatttaaaaaatattcatagttaggaatctaactctggaccaagtaatagaactcatcacaagctttccaacgatataaagaacgtctaaaatagagttcaaagtcaaaagttatggtcaaaactagtttaaaaaaatccatgaccaaaaagggaattagccctgtcaaggcgttgcgggacgcccttaaagaggagatcccctaattctttgggctcatgggcactgcgacgcctgggtttaaaaatcctgaaaactcaatttttttaccatttcaaaaataca

SEQ ID NO: 89860 - DNA, 2113 bp, Cannabis sativa
aaaaataggggatcaggtggtggctaagatagatgaagaggaagctgaaattgaagcatcctactggagaaattcgattgtgtgtatagtgtttagggcaaacccccctttcaaattttttgagggcttcattaacaggatctggggaagtttgggtgtggataggattgtaagaatgcattctgggtttactcttgttagttttaaggatgaagtcactaggaatatcattctggaaactggggtaattcagtttgataaaaggccagttatacttaggccttgggcggaagatatggatactgctcgcatggttaaatcggtcccagttttggtgagattgaatggattaggattgcaatattggggaaagaggaacttgagtgctcttgttagcacaataggaaagcctataatggctgacaaagttactcttgagagaaccatggtcaaatatgcaagagtattggtagatgtggaaatcaaagatgagccgccaagaacaattacgtttgttaatgagaagaagcagtttattgaacagcatgtggaatacgagtggttaccaaccaaatgtgcggcttgtgatatgcttggtaatacgcttgccaactgtaacaaagggaaacctatagcttggaagaaaaatcagcaaggcagtaagtctaaaccagatgggaaagttgctgatagtatggttcagcaagaaggggttcgggatgaatctttagaattgactcgagatgtggagggtgtcattactgagggaaaattgattaatgaagagacagcaatggatacagtcgcctcttccattcccaacaaggatgaaacatgggttactcctaaaaagaaagggttcaagccgggtcttaagccacaaccaaaagctttgactagtaatggttatgatgcattggtggatgctgagggaggagtggtcacagattcttcaactcaacctaatggatagtcttaatatcttaggttggaatgtgagggggctgaataatgttgagaagcagcgtgaggttcttgatctttgtaaaataaataaagtgggttttggggctctttttgagactaaaatccacaatgatagagttaattccctagtttcgaataacccgaactggaagttctattccagtcaagttatctcgttcagaattctgttagtttggattgacaagcttgtcaaggtggaagttttattggaggataggcagttcattcattgtaaactgaaaatgatggggtataaagatgagttctatctcactgcagtttatggaagtaactctttacttgatagaaaggagctatggaataaacttgccaactttgggcatttgaatgcgccttggataatccttggtgattttaacgctatgtttgctcacaaagatagaagtgggggtagaagagtaaaagatagtgagatcatggatagccaaaattggcttgcattgggatgggatagattgattcttccaaagcatagatttattgggtggcaaattgtgaatgaccaactgcttaccagagacaatattagtaaaatcatgcccatcccttcagatagttgtccggtttgctgtatggaaaaggaattcatcaacacctttttgttaattgttgttttacccgaagtgttattactgaggtaactacttggtgtggcaatttctcttggccttctaacatcaggaaatggttttcgagctccaccaacagttttcagggaaaagttcttaattcaattgtgttggtgactttgtacaatgtttgcatgaatagaaactgttgtatctttgatatgaagtgtaaaacagttagagctatgagtaaggagataaagttttgtgttaaaactagattttaatgggttgtaatgggggaaaagggaagcttgatagacatattctcaatgtaattgctaggtggccgtgagggctgggtttgcggctgcctgttgtggctgctctgttcttgtggttgttgctatagtttttttgcttgtttgaataaagatcttctttcttgttcaaaaaaaaaattatctaaccacatttattttaaaattggtttattttattattttatttttatt

SEQ ID NO: 89861 - DNA, 2009 bp, Cannabis sativa
gttagagatgtgtggaattgctttgattattttgggcattcggtttgaccttgaccattccacatctcactctcttaactctcatcaagttagcattccactcttctcaatctatcttccatttcaatttacatatatatatgatacacatgcattggctaactatcttttatagttgcagcaactgggttttgatattgatgatcttgaagccgctttacgtagaagaggtcctgatagcctgggtacccggaagctctttcttcaacaaaggatttcgtcttcggaaaaccctgaaatcgtatcttttattgacggagaagagcagtgtggggacgacgaaggatttagctttgacttggctaatggtcgaacggagaagcagcaaagtggtttcacagttgggcacgattcttttgcagagttacacttctttggtgccactttgcaactcaggggagtaagtcccatcgttcagcccttgatagattcatctggaaatatcctcgtttacaacggtatattcgtatacatttgtatatatgcatatttgttgagcttgttctttactttgaatttgagtttgactctgtttctttggtggacatgaaaggtgagatatttggtggggtgcacattggtagcgacgagaatgatgcggcagttctaatgcaagctttggagaaatgctgctcctgcaatacccatttggataaaaaagtatgctattgcgatcaaagggggaaatcttctgtcaaagacgttctatcaacaattaggggaccttgggctcttatctactggcaggtaactctaagaattggtaagtttttctgcttattttgattagaatccgatacagcattcgtcttgctgttttctgaaatgtgctgtatgtaatttgacgtataggatagttcaaggactctgtggtttggtcgagatgcatttggtagacggagtctgcttgttcactggccgacagtggaggattctcggtttatgctttcttctgtgtcacccctttcttctgctgaaaagaattctggtatttattgcttgattttttttatataagaagtagaactgtagaagtagttgtttggatgacaattaaaagttgaccaattttcttaggaaaatgtgttgaattatttcaatatgcattgatgttagcatactaaagtcgtcttgaacaagtatagtacttatatgataacctgaaggccttggaaattttgcagttcattctgacaaattattattttcgtctccctttgcaaatttgtggaacgtggaaggagggataaaaatattacataaaggcggattgtttagtcatgggtctgtttgtgagtgtgtactagttcgatatcttttacagcttgactgaaaattttgtaattaatccaccacagatttagacattgaccatgggactactagtcttagattctgggaagaacttccatgcggtatctatagcttgagtgtagatgcttctaatatttacagttgcctggttgctgaagttaaaaagcatgaatggactgatgcactactcgagcagttgttaaaatgggagagaacatgtgttgaacctgtacctatggagccacatacttctcattgtaagactgttgtgatgcaagatagcacgcattcagcctactcaaatatatttccacctgaatcaggttggtaatttaatcataacaacaattattaaaatattatttaagtataggttctttcgcatgatgcatcatgtttataactttcatttttgtttggtaggacctatacaagtttcaatttcggttccagcagagactgtgctttgttctttaagagaatcagttaggagacgttcttctttgcacacaatatttcaggtatattaaaatgctattaaagaatgttttttgctttaggtacacataatgaactagcaatatagtggctttgcatgtggtgaacagtgaattgatgatcattgagatttactt

SEQ ID NO: 89862 - DNA, 656 bp, Cannabis sativa
cattgatttgtcattctttggccgacacaataatgtcccgaccagctgctatctggaacgcaatctacaatcaatggacactagcatcatatgggatctgccaggcacatttctgcccgaaagttcctagatcatgccacgtgtaagtaccacgttagatgtaaaagttttgggctaacaatactaattccaaatttgtgaggggttgtaaatggagtttgtttaaattagttaagaagttagttaagggtgtcagatttctattatggttgttatgttttcggtctgcgacagctgtctttgataagcagtctgttattgtatttcatcttgtataaaaattatgtttaaatagacaattcttttatctcaatctctctgactctttctttctactcttttctcacttctcttattcttcctttcttgtctttactcttatcatgttagaaaggtacaatgtatctaataatattctacactataatattacaatagtttttaagtaatatgagactatttataatccaattcaatttatttccgcacttgagcagattggattggattgaaaaatttaaaattcgctcttgtgtggattgaatgttgattgacatgtaaaagtaactgatacaatccaatccacacatatttat

SEQ ID NO: 89863 - DNA, 755 bp, Cannabis sativa
  modified_base (712)..(714): a, c, t, g, unknown or other
atagtcagaacaaaagtttgctttcttgagtaagtttttgttctaacatcttaaaaaatcttagtgtttttttttgaaaggttaaaaattcttacttaataatgatagaaatttgcaatcttcttaattggcaacaataattagttatagtttttcatctatctatacattaatataaaagaaagcatataagagatatatgtgactttctataagtttttttttatatgtatattttttataattttattattcaactaactttatttttttgtaataaacctacatgatttttttttaaaaaaaagtacagtaaaacattacatatacactataaataaatcttctcttttatcatttttgttttgaatggaaaatcataatgtgttaaataaccatcttagtcaccaaacaaggtaacagattagttggaagagactccaaactaaaaatacaattaggaaacaatacaaaggctctaaaaaacttatgagctgccatatttactgatcgtctaacaaaacaaataaaaatatttttttaaaacattgagcccttacaattactaaccacttgaccaaaggtgaaaatcataacaatagagcttcataaggcctgaacaaccgaaagacagtcggtttccagtaccactggctgccaatgacgtgccttgatccaacttaatgcttcacgtgttgggttttatgccctnnntaaaactcatttcaatataatgagatttacttattaatata

SEQ ID NO: 89864 - DNA, 712 bp, Cannabis sativa
  modified_base (246)..(251): a, c, t, g, unknown or other
ggagggccacatattgcaggagagagcaataatgcccaaaagaggtacgtgaagaaagtgaagaacgagcagtctgcaatttctccaaaaccttccaagaaagtaaagactgaagaatctccgattatattttcagaggagggtgaaatagatgtgaggtaccctcacgtcgaaccattgataatcaccatgcagcttgctaataagaggataaaaatggtgctggtggacaacgaaagttcagtnnnnnncctttacagggaaacactgaagaagatggggcttgagaaagctaaattaagaccttgaatggtaaatctttgaggatttattggtgacagtgtctccagtcaaggaataatcgagctcccattaactttggacgaggcacctctatccaccacaataatgcaagactttttggttgtcgacctgccgtcgacttataatatattgctgggttgactagcattaatcggactaggggcagttagttcgattaagcacttatccctgatactaaaatgaatcaacaatttttgtggacagataaatgtgaaacaaaattttaagagcttaggcatcggtcaattacagctccggtgttagccttaccatctaataaagagaagttcatggtttactatgatgcatccaaacagggtatagggtatgtgttgatgcaagttgattgggtcatcgcttatgcctc

SEQ ID NO: 89865 - DNA, 899 bp, Cannabis sativa
atactcattttacatatatagtctgagcattttaattgtttctatagataaatgtatttttactctgataaaatttatttatatgatgatgtttattatagataggttaattaggctttttttaactatgctttttgaattttttagaagattaacaacctctaattgttaaaattgttaaggattttcgtcacatttcttttaattttactaacgtaaaatgacaattgtcaggattcgaaaaattttaaaggtctaaaaaatttaaaagtatgatttgatatatgtcataatttaggacacaaatctaaattaaataactcatcaatttttgataaattctaagtaatttaaaatataaaaaatgatatttgaaaaaatagttacacatgtactaagtaaataaaacgacacacttgcaacaaactaattataaaatatctgcattatatgctaatgtgttcactttcatttatatatatatatatatatttatattattaaatttgaatctgtgtatgtattaatttattattttgtctattaattaagaatattatttgaaatagaagattagcattactcatctagctagtactacatttaattcatatataaaaaatagaaaataaaaagtataagtgagtcatagtcaataatgtgagtgaagaaaccaagagaaaaatgtcaaattcttagtcgttgggatcaatacaaaattcaatttttgaccacaaattcctaccatatgaccaccccttaaattgaattattattatataatttctctttcaaattgaacatgttgactacatataacttattcaattggaaaattcaaattaaagtacaacctcataaatacatatagaaatctccttaaaccaaactacattgta

SEQ ID NO: 89866 - DNA, 525 bp, Cannabis sativa
tgatttcattctctgagtgtggccccgtggactagtaatgtttgaaagaacactaataccacgtataattctcttgtgtcaatttttaaatttacactgttatttttgtttttttcctttactgtttattaaagaaaattattggcatttgcaaaatataatttttcaccttggcaaagctttatgtagtagttcagtttggtggtcaaggagttcaatttgtattcaagatgtgttgacagcggatatttattgctcttagtgcttagtggttgagacattttcctaaaaaaaataaataaaagggttttactgtgcaccttcatcaatgaaagaatcactgtacatataaagttaaaaaaaatgtaacgttaaaagaaaaacctaacggaaagagcataattatgtaactgttatattttagggagaatttttaacaagtagtatattttcgggggcaagatcaggtaatgtcaaaaattcagatggtaaaaatactattttttctctttatttactagctcg

SEQ ID NO: 89867 - DNA, 571 bp, Cannabis sativa
agctgccaaagagaaagtttctcaccaaacagcagaaaggtgtgactgctgaagcgttaacagtagttaaaactgctcctgaagaaaatatatcagctgccattgttcatgaagttcataatgaagaccaaagcaacaaaggtttatctaaaggaaaccttaaaggggcagcagactagaactgtgaatttacagggaaggaaaatgatggggattggaaagctccaaaaaaccgaaatcccaagggcttgggctcaacaagaagagtcttggactctagcgagaaggttcttaggaattcttttgcgattctaacgggggaacaaattgaagaaataggggaagtaagtttatacagtttgtgattgatggatttttgcaatataagttgttggaatgttaggggtatgaataaataagagaaacaagataaagttgcggaagtgttgagaagaaataaaataggagtatgggctttggttgaaactaaagttaaaggggagaggcttcaagcaatgatggtgaatagcttttctaattgggatttctattctagtaataaaatggaagg

SEQ ID NO: 89868 - DNA, 1745 bp, Cannabis sativa
  modified_base (67)..(83): a, c, t, g, unknown or other
  modified_base (611)..(616): a, c, t, g, unknown or other
  modified_base (715)..(718): a, c, t, g, unknown or other
  modified_base (1714)..(1716): a, c, t, g, unknown or other
gggtcatgatgagggaaacgcactatcttagcgtcctcttctatgaatgtaatgggctgatccattnnnnnnnnnnnnnnnnntgggagttgagtaacctcccaaacatcactgtgctttacgacccctgcctaacatttcagttcctttcgggtggttcctccgatgtggggtcctccggagatcatggctacccttttgttgggtctcggcggcaggccaggaatttgctgggcttctcctgggggagcgactggggctaatgctccggctgcaccccctggtactccttggggcaaaggtcctcctgcctgaaccagattgaggtgaggcaaccggttcttgatccattcgtaaagatgtcccaatcggatcgagtttttgatctcgtccttgaggtttttgcatgcattggtgctatgtccaatgtcgttgtgatactcgcatcttttgttgggatccctccgggagctatccctgtacaggggaggcggtctccggtagtgcgtattctgtatggtagcaaaatacacacgctcttgggagtccattagctccgtgtactgggtatactggggggtgtacccccttttctgccgcttatcctccgnnnnnntgctgccttttgaggacctcttgctctgagagccttgagagggacttgctaagcttgcggtcggagcggagtgcgacgggacttgtccactcatccctnnnngattcccaaagtgagaagatgcaggggctaaggactggccctgactatatcttggggtagcgaaaaattgtatgccgctcatcggtagagcagctgctggtaaagttcctgggagctcagctccgggtacatatcccgctatcccggtagggtagtatcccccataggccactatttgagcctcttctaggttgatgtacttttggactcttttctggaaatcttgaaggttggaggctccttcttgctatcactcattccataatggagtccctgtacggatccctgcttgaagaagggcaagctgttgtccgtcatcaactttcttggtctttggggcttcttccttgaacctctttatgaaattctttaatgtttctgtaggcagctgcttgatgttagtcaaggcgctgacctctagattaactttccccgcggcgacaaactgtctccggaagctggtttgcagcttattccagcagtccacggatcctggctccattttcttgaacaattcttcggcagacccgctcaatgttagcgggaagcatagacacttggtgtcattgttgactctcatgactgtcatgactcggttgaaccgcgacaggtgatcgctagggtccgagttcccggtataagctgccattttgggcatcttgaaatttttggggagctccgcttccaggatgtgcctggcacatggttcccggtcttcaccgtcagagtttgagtcatcacctttttgtctcagggagactcgagcaatgtccttccggagtatggcaagctcagccatgattccttcgtttaacgttcccgcagggagtgcgggcacgtgcttcttttggtctaggtgatcccggaggtcactatgttttccgttaatctgatgccttagatcgacaggagggtatttttggcctctcttcctctctcttcgggttcctggtgcacaaaaatgctctttcgatcctctcgatcctgagggccaannntccctttttggagtttgcccctctgcgga

SEQ ID NO: 89869 - DNA, 657 bp, Cannabis sativa
tgtgttattctttggagctagtgttatttgagatcttgaggtagttttcatctctttttgcttttaatctgttgctgaaattgtagtaattcaagcaggttttatatgattatgatcttgagatgcatgttggtgtttgttgggatgtttttgttgttttgagcatgctttgtgcttggatcttttgagtatattttgggataggtttggacagaattcaaaggattttacttgtgtttttattatgttattcagctctaaaattagttgtttgaggcatgagttcttggcttgattatgtttaaggtaggattatgtggaatttagctttgtgttggagcttaatctttgtgttatttaatctgagtttcgagagttttattgatggatttgatgcataaaatttgtatttttaactctctaatatttattgacaactctactttgtaattatagagtttgattaagctttgggttggttttggtgtgtttaaacatggagattcgttgctggtttttgagattttttgggtttggaacccagggaccgcggcccgcccccttatttttgggcaaattcgaaggcaactttgaatatcataattttatgattcggactccgattagggagttctatataccgttggaaagctcgtt

SEQ ID NO: 89870 - DNA, 1142 bp, Cannabis sativa
aaatcatgttgtgcctcttcctcttactagccataaggtggaaatacttactattgcgatcaccatctttgagccaaagttgtttcgacctttgtcatcaaaaagtttccttctgatcaagaacattggccaaaagcactttaacttcttcatacctactaaccaattgggcatctcttttatttttcaaaacactcaactcattcttgcactgttgaattcttcttttaaaattcccagttaaatcttttccccaccgagagagattagtagcacacaagttaatcttccccataaccgattcctcaccgtgagcttcccaactatctttaacaatttgaatacacattggttccttaagccatgcattttcgaaccgaaatagatggtatgggatatgattacttcgtatgatgggctcaagataaatgggagaatggtctgcatatgaatactcaaggttagaaagaatcgcacctgggaaaagttgaagccaagaattggaaacgagtgcactgtctaatcgagcttcaacccaggagcttgttcctctacacttctcccacgtgtactggtaaccaacaaggtccaagttgaccaaaccgcaatcagaaacacaagattgaaagccttccaacagccacctaggatatggtctaccgcccttcttatcttgttgggacataacattgttaacatcacctattatacaccaaggagagtcataccttcttgcaagctctctaaaaagcgcccatgtatgttgtcttctgcccctgttaggttccccgtatagccccgtgagcctccaagaagagatgccatcaatggtaatgctaagatcaatatggttcgaagagaaccccaacaaaaattcttcatccttatttttccacaacagggccaagcccccactaaaaccctaggcctgcaccacaaaaataccttcaaagaccaattggttacctacccactccactctactcttgttacactttgtctcacatagaaaaacatagtcgggtttcttatgagacacaatctcttttaggaactgaaaagcccgttggttcccaaacccccagccattccagcttagagcattcataatgactggcgggtctgtgaaccagaacccgccc

SEQ ID NO: 89871 - DNA, 948 bp, Cannabis sativa
aacttatcaagtgagttctagtctgattgtctttcaacccccaaagaaaactcctacataatttctcaatctcttttatcacactttgaggaagaaggaagacttttatccaataattccttaatccaatcaatgtagattggattaattgaattcggccagcataagaaagatgcttattagcccaagaatggagtctatgtttcctttttttcaagatcagcccacaatcatctagcctccattttgttggtcttagagggattcctaggtacttaagagggaactcaccaatagaaagatttatcttttgagcaagaggaatcagttgaaaaactccaccaaagtaaacttgagattaagcaaaatagatggaaagaaccgaagtcttgctaaactcatcaagcataaccttgatagcacttaaagagccctcattccctttacggaagatgactaaatcacctgcgaaacaaagattagtaagtttcatttttttgcataagggatggtaccttaaatccttttctctggctgcttgttggatccttcgagaaagatactccatgacaagaacaaagagaaggggagagatgggatccccttgtttaagcccctgctctcctttaaaagacccttgaattctaccatttagtagtaaatatgaagtatttctcacacaattcatgatccagttgacaaacttggcaaggaaacaataggccaccagaagcttttcaagaaagtcccaattaaccatatcataagctttactgatatcgattttgatagtgcatctaggggagaaattcttccttctgtagttcttcaaaatgtcttgaagaattagaatgttgtaagcaatggatcggcccttgacaaaagctccctggttctgactcactaaagcaggaagcacattaccaagccgggaacaaatcagtttag

SEQ ID NO: 89872 - DNA, 709 bp, Cannabis sativa
ttttttaaaaatttagagacaatcctaaataactacaaaatacatgatcatgacaaaaaaaaaaaataataaactaaaaaatccttctaaatactgaaatagataagaatctacaaaaatacttaagaaagtgtactataatctgacccaattatgtataccatataaaagaacatattaatttacatacgtattacataagtaaaaatttgattttgatcttcaatattgacaacacatccaaaaaaaaaaaataataaagccaaaaaatactaccttttgaagaacaagtatccattttcattggctaaaccatccataaccaagctcaattttgttcatattggtaacattttcatttttggtacatttttttttaaaaaaatatctcaattattttgtttgatacgtttaaataatttattttacctacttataaaaaaaaacatatttaatcatttaaatttcatttttttagcaccgtaaattattcgaaaaattttataataataacaaaatatatgttataataacaatatacctcatctaatatgaatgtcacaatggagactgattgtttaagaggtataaatattacgaagctctattaatatgatttctttacttgattttattattcaagattgtaaaaattacttgctagtttgagtaatgtttttgtttaatttatggctaattagcaattttt

SEQ ID NO: 89873 - DNA, 872 bp, Cannabis sativa
attggcacctgaaaaaaatatttcgcgagtcaggttagctgacaacagtgagaaacaaaaaatgcttaacagtcattgtgtaatcggtcaaaatatttagcatatttaagctgttgctatctattatgtgtgctaacacagattatatttaaaaagtaggatttgaaaaaatttataatgtaattttgcaataaaatttggagaggatattaaaaaaataattccaacaagctaattaatcaccctagtacgagacaacttaatcaaattgaaaaacttctgatgattttatcctattcaatccttcctttttcacgtacctcaataataaaaagaaaatacttattttcttatagtttattgttgacaaattattgaactcatttattcttctatagttttctctattttttcttaatcaaatcttatccaatctaattctccttaaggtatttcagttggaagaagcaaaatatgggtcccaactcctaagcttaaggtcccaatagtggtaaaaagttgaatgacaagaaaacaatgagttaactgaaagagcctcatgcatcagaggtgtaagccactcaattgacccgatgaactctaagctttgaaagtaaagttgtatgcctcatacctcagggcatacatacaccacaaaggagtttaaaattcatgttctttcttatcataatagtacaatattcaagttggtaaagggaaaatgagtgaaaatttgataggacattggatgagtggaaaaactgtttttttttttttttttcctgaaactaggatcccggcctagccctataatatttgggagacaaaaaaattatagcaactgcaatgtaggtactcaggagggacttgaa

SEQ ID NO: 89874 - DNA, 896 bp, Cannabis sativa
aaataagagattaataaaaattaatcaattattatttattggtaaaataaataataaatcttatttataaaaaattgagaaattaattttggaccttagaatatggttcacgtgtgtagggtgatatataaatgcccatgaataatttagtttaattattttattagttaaaataatttaaattaaattaagctaattatcttttaattattaattaaatgaattattggataattatttaattaaaaaaataataattaaaataaaagtcctaactaatatttgttattcggttattagatatttatatttgaattcaaattctaattcaaattaaattaaatattttcttttattttaaataaatgattaaaatggttcatttataacactatatatgggatatatagtatcataaattaacagaaagtaggcaactaaaaaagcagagaaaaataataataaaaaaaatcactcttattctttctcccacacatacacacacactctctctctaggtgtcacacacctacactataacatgtgtgtgtgagattaaacaaccctatctcaattacagtgttcatgagttgagaacacactgtaatacctaaattaattcatctaaagcttattcttgagtgttgaggctggcttagaagatcaaggtgtagattcttcatcagaagttcttggattggatgatcgttaattatactaaaagaaacaagggtaccctgataggcttcaagaggtatgaattttcttttagtagtttagatttaatctatatatatattatattgagatctttgggcttatggtacatattagataaaaactattttttttcaaaaccgcttccgcttttataactctgatatggaccataaaaa

SEQ ID NO: 89875 - DNA, 534 bp, Cannabis sativa
ggctgagtcttcagtagtgttggattgagatgtaatggattgaaatgttttataatcttgcaataaattccaaatgtagctttctgcatcaaggagattgttagaactgttattgaaaagtgtgttatttctcttgttccacatctgccgagacaatcccggtagcaaaataaatttatccttactaagaacttcaagacctcttaagtaaaattctttgatgtcacaattgtgattattagaataaaactctttcagtgaagattgtttccagacagacttagctaaaggacattgaaggatggcatgggtgacagtttcgaccttgttattacagttggggcagtgagggtggggaagggtttttttatggtagaagttaagggaataaggaaggatgtggttgaaagctttccaggttaaatgtttcattttgggaattatttttgcattccagactgcttttcatcgggttttatagcaattaggattggaagaggaaggcaaagtagggaggggttggaggtggctagg

SEQ ID NO: 89876 - DNA, 677 bp, Cannabis sativa
accttctgccttactgagactttccaacatatcaacataacttatgggggcatccactaagttaatggcgttcatcatagacccagtactgcccttccccaaatttagagaaggaaagccactatctgtatccattgctgtagaaccttctatattgctattgtcttccctccaggaaccacttctcttgcaattgatatttccagcctcaaccttctccttcatattttccctactgttagcctgcacttctttattgtcaagaattattcctttcaaaccaataagatccaaacatgcattcaagtccaacttagtccaaggatacgaagtggactctaagagatcaccaagtcccaaaccagttaccttgacagcagaggaggatgaatcttcctgtaaatggactgggcagttggccttcttcaccgagggaacatgagcatcaaacatcgagtatatattggcatctcttttttcatcaacttttaaccagggtccatagctcggcttccaatttccaagaccatcatcaaacatcttgggaggttctgcacaaacccgagtatcatgccccaaaaaaccacaattgaaacacatgaagggaagacgatcatacctgaacgggagccatttctttctttctttcgaaggaaagagaaggcctgggaagatcg

SEQ ID NO: 89877 - DNA, 584 bp, Cannabis sativa
aaaaaaaaaaacaattctaaacatatataacactacaaaataaataaaataataataatatattctaaacatacactttaaaaaataggtgtatatatattttatatatatatcatgtcttgtaaattatagttaatatttaaataagataatttttaagaaaattagaattatttacaatacaatacagaaaataatattcaaacaatttattttacatacgtataaaattaaggacaagtgtgttaaatattctaaaaaatcttacttttaatcacaacaaaacttgtaactaaaagtaaaataattgtgactaattataaatcactattgttatggtccgtggctaaatgtattagtactcacaaaaattaatttgttgtaattaaatgtatttttagtcacaatacttgttgtgattaggggtgttcatctaatccaatctgcactattttgctcatagtgcacccgatccgcactattaagtgcatattttattttttggatccaatccaattcgcacaatagctcaaattcaatccgcgaaagtgcaaattggatcagttattttttaatattaaatt

SEQ ID NO: 89878 - DNA, 596 bp, Cannabis sativa
ctcaatgttttatctaagttaaataaattgcatgcttcgtggatttactacttaggtaaaagaattagttattgagcgcttcgccttgattacatacaatatagagattcaaataattgactgcttcagttttatttgcgggattaatagtttgattgaaaactgaaaattacattctttagtaggaattaggaatgattgtatagggtggcgaataacttttaattagtttctcatattatagtctctctttaaatttgttttacttttatttttatttttattattgccattttattataatcatcaaaactccccttttctaacttttgacactaatttctaaataattaaataaacatagtcctcgcgggattgacccttacttacaattatactaaaataattggaggtattggaaataaatattagtaaatttgttgtggcttacgacacgcatcatgtggacagcaagtcaaaccacgaattgggcttgaacagcccacgaaaatagaggaaaaatattaacaacttttctatttttgaggggcgatttagtcatttgtattttattaattaggaaatatttgcacccc

SEQ ID NO: 89879 - DNA, 800 bp, Cannabis sativa
  modified_base (510)..(528): a, c, t, g, unknown or other
  modified_base (620)..(633): a, c, t, g, unknown or other
ttttgctgccaaaatttaaattttgaaagttaattactagtgaagtaaaattattggagattttgctacaatttacttatatttaaaacaacctcacgaatgcatgacaactacgttactaaagatgacacttttatttattctctccttactcttattttctaattttttattctactttatttaattatatatcttcatcaacttagaatggccaaattagctaaaaaaacaaagcatttttggagactacaggtaaaataagaaattaaaaaattataactttattataaataaacaccgcaaacaaaacaataaaccacattattatagcagatcgcttgacaaaacaaaaattaacataaaatatcattacaaaattttttacttttagtcacaacattgttgtgactaaaagtaaaaaaattgtgattaattataaattatcatttttactttgtgactaaaaagttcgtagttaaaaaatgtattagtcacaaaaattacaannnnnnnnnnnnnnnnnnntttttagtcacaatacttgttacgactaaaattaaattagtaacaacttgtaactaaataatatgttttagtcacaagtaaatttttgttgnnnnnnnnnnnnnnatttagtcacaaaaaatttatataataactaaaaaatagtcactaaaagtaacagttttttttgtaatgtattattatctagttaataaaatgttttctacatgaagcaataataatcaagtacataaaatataattaactaataattaagacattttatgaaaaag

SEQ ID NO: 89880 - DNA, 784 bp, Cannabis sativa
gactccctctttgaatttgccgcatctgttgtgatctattcttctaatcaaatttcagaacttccgagaccttgaactctcttcaattcgcagcacttgcacacttcatcccgaatagtgtctcacaggaaatcttcctcatgaagagtgtcaaacttgcaatcttcctcccgaagagtgcctcacttgcaatcttcctcccaaagagtgactaacttgcaatcttcctcctgaagagtgactaacttgcaatattcctcccaaagagtgactcacatgaacctttttctctcgaaaaggtgactcatgaacaagacttcttccaaagcttcattaacaatatctaaggtgtttaacctacacaatttcaacaagaaacaatacagattaacataataataaaatactaagaacttgttggacccaagttcttcacacaataaagaaaacactctataattttgaaaagtaatatagaattgatacaccaagagagctaaccaaaaccaacgaccttaggatgaatatgtacagtttagaaaccccctaggtcatggtcaagcaaccatgaaacaattaggtcagtaaatgaaaatattgccaaaaaggaaagtcaaattcagtttaaacagatagtcagtccgttcaaacagatattgaaaacctagactgttattcagcaaagtttccttaaataaataaggcaactttgacaacattaaatcccaaagttgtacacggtttcttggtcaagaaatcagatcaaaaggaataaaatatgaat

SEQ ID NO: 89881 - DNA, 805 bp, Cannabis sativa
aggtgaaagacctagaatctgtacagaaagtgaattgaatctgagtcctggtattatggtggttatcaggtgcaactacctggttttagatgtcgttttctatgaatggtattgaaaggtaggggtctagtggacggtgtgatatgcatttgatgtttgattttgtgattatatgtggtctctctactttgttatacattttgacaatggtgataagatatgttattatttttttaaaagctaactagaaatttttattaaagtaaggatcctttgatattagttatttttctactaaatttataagctctcccctttttctcctattctaggaactcagtttgatgctagtggatgaagatggtattgttgaggaagaaagtcattattagtttagtcttattctacttattaaactttcaatgaaactaattttgtatttaagctggaatggatggtctgaatgacttaaattacctatgtactagttagaaatgaggaatgatggatattagatattattttggtattttattgacttattaaatgaatctattcggttactacattactgtgaggatattattgttcttttatattagtgagatcttgattttgttactaatatattcttatcgatataagagttaaactattatttttaaataagtattttgtgatataaattaaaggatcatttgtaagtgttatcttcctaaaaaagtcaaagtgttgacctttgaccatccaagttataaattacatatctctcatctcatttttttttttgccttattttattata

SEQ ID NO: 89882 - DNA, 680 bp, Cannabis sativa
cactcaaggtaatacacactgtggataaaaatgtttgatagcagtttatccacctctttctccagggcatcagacttcaccaaatctagcgggcgccttttttgttgtatcggaggcatgtctgggttgacattcagaacatgagtaatgacatggggacttatcccggtcatgtctccatgacaccatgcaaacacgtccgccgatactttgatggtatcaatgattttgcttcgctcctccagatcgagaccctttcctaagcggatgaccttagttgggttcggatcacatattcttacctcttcaatatcctccactggttctaatgcagttttggagccaatgcaaggatccaactcatcttgtcctgatgaggataccgcctgtaaagaccgcatatgtttaataccttggattattaaataattagggtttaagtaagagattttattatatttataaaagtacatattatgggaaatttatttgagttcgtatatgtttattatgctatttatgtaaatttctcaatttctgtgattgtgtttggaagctgtggaaatcgacgttgggcctttagagagtcgtattttatattatctagagttatatcgggatttgaaatgaccaaattatccttaggttgtttaatctttgattttaattgaatgggtaaa

SEQ ID NO: 89883 - DNA, 619 bp, Cannabis sativa
caatttttctttcgattggaatataaaaaatcaacttgtccttttaacaagtcagcaaagaaaaaactacattggaaaaaaaggaaaaagaaaagaaagatgaaaataataggttggtcgaaagggataaacctaggagaagcaatcagcttaaggaagtactaggggcctttaatttggaagagaatagataaggacaagacgattttggcaggttcgtcctttgcaaaattattgaaaatgccatcaatgcttcttttccgtagcattagaatcaaaacatccttaaaaacaagtttcagccaaccaagcaaaaccaccatcttacaacttgaccagaatgagaaacatattcatatcaaaccaacactgatcaagtatctcactctcttcagactaaaagccccacctacttaaataattgagctaaaaacaatatacacaacagttatgctcaatgctcatccatggcttattatacaatgccaaatgtgtcgtagaaaagtaggacaatttcttgttaagtaaattgcttgaaatatacgaaatggtaaatctgtggtgtgcaatcttccaagtatcagagtttgttaaatagtttatatgcatgttgaaattc

SEQ ID NO: 89884 - DNA, 625 bp, Cannabis sativa
caacactaccaagtaataaaataatattataaaaataaatacacaaaacaactaattgttacaaatttaacaaaaaaaaaagcaaccactataaaaaatcaaaatatataatatttttttttttttttaatatttcttataatatataaataaatgtaaacaatctttttttttgaatatatataaatgtaattagatttgatcagtgtttaattggattttgggactgacatccaataaccgatccaatccaattagaattcaacttttgacatctaatccaattgtaattagatatctaatttttcgtaattagattaggttcaattggattggattagatgtttctcaccaaagatggaaaaaagtgcaagacaatatcattaatcataaaaatctgtctgcaaagcaacatttgcagaagcaatacattctggatagccaggccaccaaacatattgatatttaaggaaaaagctaatttagctaaagtggagccacactattagccgtcctaggacaatataataaaatagttaccataaacaagaatatctctaacaatgtaacttagataagactgatcaaccttgttatgaataacaacattgataacaaaaagaca

SEQ ID NO: 89885 - DNA, 862 bp, Cannabis sativa
cacaatgtgcattaacataatcatccagattattggcagcatagtaaaaaagttgtgtggaagaaaacacccttttgttatgaaaaagattattacgttgattccatatagcccaaataaaacaaaacagtagaaccaaactatgcttttcatacaggttaaaagaactagcaataaacatactaatttcactatccttatgtgtgttgtattaagtgaaaaatatggagtgtttctaagctattttagcataacgacattcaaggatagcgtgttcaacagtctccgttctcagttggtaaatgggacaaatcggagaggtaatgatatgacaaaagaatagagaagaggcaacatgtatagaatgggagagagcctgccacatcaagtgtttgaccttaggtggggcaccatatgaccataaatcttagactagaaatgcttacaatcatcaaacgaggaagaagaaggcatatccctagatttaagagctaaatggtaagcagttttgacattaaaattcccagtaggatttgagccccaaatcaaattatcagtacaattatgaccaaaaattggaacacaaaagatttcctggatgagtgagttatcgaaataagcttacctaaatcccaatcgccagaaggggaaatgaaaaaagataagctgggattaggaggggaagacgagaaaaatgttttgaaatgaaagccagggagccaatgatcatctacagtattaatatccttaccattctccactttccaaattaacccttgtttgagtaagtcacgaccccaaagaatactcctccaagagaaagaggacctatggccagaaataacctcaagaatggaggaat

SEQ ID NO: 89886 - DNA, 663 bp, Cannabis sativa
gagctaaagaaggataatgaagatgataacattgttgattatgattcgtgtgaagattatgaggctgtgtttgacgataaggtgggaactgggagatggatgatggactcaggcagagggaggaagataaaaggagagaattcatggtacaaaatctgagtacactgtatataactataaaggtctatctggtttagaatgagtaactgcagcagttttctagctcaaaataaatgaaaatatatatgaaccaaaactttgactaatgacctcttctgaattgttacaataaccacttattcttctccatgtagattaaatttttcatataccccaagtatatgtccctgcaaaacaaagcacaagttttttatccttctaaaaggaaaaagaaaataacaataataaaagaacagtttagtgtttacatagcagcaaaactttcagtatataagagcttaaaagttctatttttatatcagttatttgttgtaacctaaacttacaggtactttaataaatccacatagttcacagatggtaaaacctaaaaacaaattgaatcccctactgctatggcgaacatgagcattcaactaattcaggaatttgaaatcaaaagcagacccataagcaaactaagcctacagcccagaatctaaa

SEQ ID NO: 89887 - DNA, 520 bp, Cannabis sativa
ctaaatgttacatgttttattatctatctcataacactagaattgtggaataagattaacttgatcagtggcggcaatcgatctagaaacctagtttcttaaaaagatcatttattttttcaaactcccacctcaagtattagattaattataattcataacaactattaattttaacagttattaacaatccataattaatcattaataatcaataagtcattggtacaactctaataagtcatgcttacaattttttaaataacattcatgttaaactattttctcttaaaagagtttgtggtctattcttaaaatgactataagaacaataagattaatattttctagcgatcacattttgtacaataagagttcaactataatattaattttgagacacaaattaaaactttggaatgaaaataattgaaattgtggtacaatatgccatgaataaataaataaatatcctaaagagcaatgaaatctatctttagtaaagttgcctaatagggtg

SEQ ID NO: 89888 - DNA, 782 bp, Cannabis sativa
agagttgtaacattattttatcaatattattgttcttgtacttttcattttgagttgtattttgactttggtttttttattgaagcacctataaatttcacatattatatagcaaatttggttactgaagaatgagtgagttgatgacaaattagctattggattaatcttgcatagtgcctattagaaatttaacaaaccatctcagaagcttctcaagacattgataatctaataatgctttctagtattattgtggtatattctttattaattgaagaattagagaacacacactcacagcatactacataattgaactccacatctgcagaatttcaaaattaaaattaagttgagatatatattacttccatttcttatttttctttcttttttttggaaatgaccccaaacttgtattaacaatacagaattaatacaaaacaagtgaaaagcacaaattaaacagaaaacaacaagaaattacttccagttaactactataaataatacaaacagccttcacatataatcagatcaaaaccaaaagttacgttctttaactgataatccttacaatgatccacaagcaacattagaaattcagaaatccccagaatgacatttcactgtctcccagcaattaacctccaataacgttaatacatcataacataattacactatatatagtttcgatttatcattacaaaaaaataaagagtagaacagaaacataagtacagttgttgctctagaaataggaacaaaaaaccaaa

SEQ ID NO: 89889 - DNA, 1086 bp, Cannabis sativa
atgcattttttcaaaatatttcatatttaatacatgcatgagttcaaaaaattaaaacatatttaatacatacattatatgattaacttaagagtcccttactaattaataaatatttaataaattaaccctacttatttaaatttgaaaaaacatgcataatgatacttcattttccttccggtttgacattcactggttcgccatcgtccttcactggttccccatcatccttgtcgtccttgacaatctctgcagtattgtcgtttttttctttattcaccatctccacaaccttttcaaaataacatttcgtataatcgtgcattttctatattgcattagagattttggtgagatcgtctagactaactccaacagcatcgtttattttcttttagttgtggatcggtactgatcttcgtcttcatttttttagtacatttgacagcatcaacctcttccggtggtggaagattcaaacatgggattggagtacggttagtgttcttctccaacttcacttttttaagaggagactcggcttcctcttcagacgctacttgagactttgtaacttcttcgtgttcttcaaaagtatcgtctgatatgactattacagacatatttagttgtgtattgtaaaaaggagatttgaagtttgtttaaattttacgtgaaatcggattggtatggatttggcaatacattttgtgtatttatagtgtgtgtacattgtatgactaccaaaggattacaacttttcaaaatcaattaattaaataaaagatatcattttcaaaaaaatatattaagttcccaataaagctctttaacctcgctcttaagttttcttcctctaaaaaaaaaaaaaaacctcttaagtttcacataatatattatttaattatgctcaactaatataataaaattcatttttcgaaaaatcttaataaaataacttaataattgttgacatttaatgtagtcattaagcgtgaactttttacattaatatttttaaaatggtaacccaatataaatgactgtcacaataaatgctatgttttatgaataatagaatat

SEQ ID NO: 89890 - DNA, 668 bp, Cannabis sativa
  modified_base (442)..(444): a, c, t, g, unknown or other
agttaacgacgaggtacctacggaagttccacactagtgacgaaaggtatttttaccgccaaaaatacgactttggtatttatttgctactagagataaaacttaagtatttatgccgcaaattactctattaagtataccatatatacaaaagcaataataaattaaaccaaagtagtaattctagttttctgtacaaattaagctcatgactttataattacaaacgagaatggattaatcatatatatggctgctttgcttatgccttgtacagaaaattagattgaaaacttcatatcaatacaacttaaaatttgaattaattaattcaataacttgtacttattaatcttgttattttaagatttttattattattattatgttttgaccaatgacacttcattttttttttttatttttttgatttttttttttnnntttttttttttttaatatttgtatggacttatattttttcaaggggaaacaatattatttttatgttgtcgcaatattatattatattttcgcaaaaaagaaaaagaaatgtataagcaatgtattttatttaccaactttaaaatgattctataagataatttatttttttattatttaaaaaaaataatgttctgttaaaatgtaaatttttgttattttta

SEQ ID NO: 89891 - DNA, 1307 bp, Cannabis sativa
tgctacacacgcgcgtggagggtctgggagacaagctcctgctggggccacggcatgcgaatggaggctggccacgtgtcgtggttgttgagttatgatggctgctgggccgattgggcctgatttcttgggcaatattttggctcttcaaaaatattttcgtcaatattttcgtcattttatatttcttttcacaaatactactttctcattttcaacacaaacaatattaaatccaaacaaaatattttcaacataaaatatatcataacaatttcaatgaaaatatttatttaaaaatataattaatttgtatttctttaaataaaaacaatgcattttctttttatctttttatttctttctttctcttattcctgtcataaaatgttatttttcatacaaaattaactcaaaactacaatattttctaataaaaagatattacattaatttcataaaaatattatatagaattaattttattttgtattttacactaataaatatgcgtttttgactacttaacactagtgcaattgtcttatttctcaagattttctcccttctatcaagtacttgcaccgattgttcctcgtatgataaatatggttgtagttccaatgcttcataactcagaatatgggacgcatctgagacatactttcgaagcatcgaaacatggaacacatcttgtacagctgccaccactggggtcatagccaacttctacactacttgccctatcctctcaaggatttcaaaagatccaatcaacctcgggctaagattccctttcttaccaaagtgtttgatgcctttcatcaggaatatccggtgcaataatatgtcctcgatctgaaaatcaatgtctcttcgctttggattagcataactcttctgtctattctgagctacgagcattcgcgctcaaattttatccactgcctcacttgttctctgaacagcttcagggcctaagaacttcctttcacccacttcatcccaccgaataggtgatcttcatttccttccatataaaagttcataaggggccatcccaattgttacctgataactatttttgtatgagaactcgattaggggaaggtactttaccaatgatcgttcaaagtcaagcacacatgctcgaagcatgtcttctaagatctgaatagtcctctcagactgtctgtccgtctaaggatgaaatgttgtgctaaacttcaaccgagtacccatagctcgatgtagactttcccaaaatcttgatgtgaattttagatctctattcgaaacaatggact

SEQ ID NO: 89892 - DNA, 1140 bp, Cannabis sativa
caatattttggctcaattaaacacatgaaacttaaacaaaaactaaactaaacaaaacataaacatgaaaattttaaatccatccccccaaactaaagatgcacattgtccccaatgtgatataatattctaggtgagagagacttacctaaactcccatcagaaggggtttggtggaggtggctggtcataaggataaaaaaggggtggattcgccaagtaattaggctcctcaatcccgacattcatccttgtgataagtgaattcagctactgcacttgattttcgtcaaagacactcctttgcgccatgtaagtttgcatgtgaatgttctgctgaataagataattcaactggtcatgtgtgtactgcatggctggatcaagagggccagcaatacgttgtggtacttcttcaacatgctcatcttcgcgttcaggaggaggccttggggctccttgctgtggtggaggaggtggttggccatgtggatgtggagctttaagtctaagcaccgttcccatatcaatcatgtgttgtggaggaaccttcgtatcataggagtattgcaacaccccatatgcctcacacatgtcagtgacaatatcagctagaccaagcccacccccacaggatccttcgatcatcaagttaaacctatgcctaataatatcccccacattcaaattaaatcccttcataatggcatagacatattttagcctatccaattgagcattagaaaagtgcttgttgggtatcaacctagcactcacaaatacaaccaagctttagccaccgggtttaactcacaacggtacaactgatagggtttctgattatactcatgaaaccttaatctggggaaacccaaagtctcaaccatatccacataatgtaactccccttcttcttcaagcatcttcaggcgttgttgttcacgggtaaaaggtaaaagttttctggtcaaaggtcaaagatggcatggatagctctagtagaggccgaaacatcaactcccctaaccttcactaagtcattcttcctttcgggccaattagcaaacatttctaaggctaaggtttggttgactctctcattaacaaacacaaatttcgcccatccccggtttataacct

SEQ ID NO: 89893 - DNA, 1207 bp, Cannabis sativa
gacaagtgtgcaactcagaatctaaactatgtggcatgctagattaggccacattggtgaacaaggtttagtggaattatcgaaacagggcctattgcataactatactcattctaacttaccattttgtgaaatttgtgtgcagggaaagcaacaacggattaagttctcaactagcaattacagagcaaaatcagttttagaatacattcatgctgatctgtggggagcaagcagggtgaaaactcaaggaggtaaacaatattttctatccattgtagatgattttagcaagaaagtttgggtgtttttgttaagacacaagaatgattgtcttgaagaatttaaaaattggaaaactcttgtagaaaaccaaactaattctaaaatcaaagtattaagaactgacaatggcttagaatttgttaatgacgagttcactgaattgtgtttaaaatttggaatccaaagacataaaactgtaattaaaacaccacaacaaaatggtatagctgaacgaatgaatagaacattgcttaataaagttatatgtttattcatagaatcaaaattaaagaaatatttttggggagaacctctatataccgcttgttatctaattaacagaagtccaaacagaaaaatagagttgaaaaatcctgaagaactgtggtctggtaagccaccatctctgtcacacttgaaaatttttggttgtacagcatatatatgcacacaatgtacaagacaaacttgagaaaatatcaattaaatgtatatttctaggctatccaaatggagtaaaaagttatagactctattcacttgaaaccaataaaattgtaactagtagagatgtgatttttaatgaaaatgattttccatttaaaagaaatgaggaaggtgtggtttctgatgtttcaggtaagcaaggaatgatcaaatcagcactcaaattgagctggaaagagctgaatctgatatttatgtgtttttcttattgtatggttgccttttctactttaaatgttatacatttgttgaatattcaccagggtctctttattaaagggtggtgatgcgttttctcttgtgcacccaatattgatttattgaattatatgctgttgtgtccttttctgttattgttgaatattcatttgtgtctctttgttcagaggagctccgaggtcagggagagatgtat

SEQ ID NO: 89894 - DNA, 511 bp, Cannabis sativa
tttttattctgttttgcagattatatcattttaaagagttctcctgcttttaattattattattatttagttttatattgaatgtataattttttaaatccctttggttagcggccgccaaaaaaacatggaatgttgaagctgagttagggaatagttcttcatatacgagcagtacttcaaatgaagcaattgataaattttataactttacaaattaaagactttataattgttgactgactatttatacgtataatttctattaagaaaccatttttaatgaataacatgtatatatatgttactccataattaagtagaaaaaaagaataagaaatccgttaattaaacaactgcaaaaagcaaaaaaaaaaaaaaaaaaaacaagtacgactctagcttcaatgtgtttacattaccttccatagcctaaacaaacaagtacgactctagcttatcggcaaaatttgctctgtcacaaaagttctttctttactttttggctact

SEQ ID NO: 89895 - DNA, 716 bp, Cannabis sativa
gcacaatcacaaactcttatagttaaaccatgaaaattctcctcattagaaatctcttctcgccattctcccgctcgaaaattctactgtaaggaaatggttattttccaagatgaaagtgaacgtaatctcacgaaatggtaaagaagtaatcaagggtggccttgagctcaataactctgtaagttcatttttatttttttttttttgtatattttttgaaaaaataaaaattgagtttataaggaaatagaagaaatatgaatcttttccattatttacttgttgagttttgggtgaaatgataaaaagagaaggatttagtatgaaagattcaatctttctgttacttgaaatttgcctagacactttaattttgtgttaatttaatttttatgttgttttttcaggccattgtagatctacaggaggcgattcataagaaaagcatgtaattgttaatatttatttgtgtggtcaatattaattttcacttgtaacaattgttaattatataatttttaattagtttggtatattagttatagaattttgagaggtttacctattaagaagtgaacttttatttaacttttagttcattttcagtttatcattaccatgaattttgttattttattaattggtacataattaagtatttgtaataagttttttctttatggagtggcagagcttctttagcatccatactc

SEQ ID NO: 89896 - DNA, 1831 bp, Cannabis sativa
aatataattaattattttttttattttatattttgttggagcataattagactttgtaggtctaattaataaatatatttaaattatattttatgtataattattaaaatagaattggtatttaaataattagaagagataagtggtaaaattaaaaaatatattttttgtttcattagttgaaatatagtggcgaaatctaactctaaagcccatatgtatattcagccctaagagtaagattcagcccaagtatatatttcaagcccatctaatctaaatctaaccctatgtgactaccaatataaagaaagagaagaaaattgaaaaacctaatgtcacttcttcctcttctcttaattttttttgaaattcactaagtttctctctcaaaaatattattccaaaggtgtttgagtatcactccactctattcaaggtgacactcagacctttgtggaagactgtgatgaacacaattgaaggaagagaagatccagattcagatcttgataatgctcgactacagtcaagaatcaaatgctagagatctaaagagaaggagtcttattattctgctgccatcaatgtaaggttttctatacctttatgtgtttaatttatcgttttaagaatttcatatttaggatgttagattatagaaataatcaacatacatgttattaaatttaggttctggtaaaatatatttccaacaactagcctcatagccatggtaataattttcttttgtgaaatatggatttataataattttgggttgatgatttggaggtttcatgttgtgtttttacatgactttgatgattatttgtgaaaatataaaaacttccatgataaataattttaattttcttctaaaattattttagaatgaatacttgtaaaattttaagtaagtttgttttctacgaaactctatttcgataaaaacgaagcagatgtgaggttttgaatttttgaagccatggctaccgagaaaccatgcacgcaccctctttgagcgctgcaattctcggagaccagccttgtacccgcgcgtgttttgtctaaacaaacacacggtgatgcattttgcccgaatcaataggctgcagcctcctgcgcgcgcagttgactggcaattcagacaagggtgtttttcacccaaattttacattcttgggattttttcagtcaaattcgaatttttctatttcaaaatcctaaaattcagtatcaaatattatttttaatatttgaacctaaatatcaaatttaaaattgtaataatatttaattattaatttttgatattttgaagtttgaattagaaatttgttattttatgatggaattatggttaattttttttttaaaaaaaattaatctcctaattttacaaattatttaataataagattagaaattttaatataagatatattttgaaattaaaagatttatttatccttttaatttaaaatattatattataaattatcttatatagttaatcaaataacaataaatttaaaattaacttacatattttttatagatatcttaactataatattttaaattcctatattggttactttatgatataatttattatttaaaaataataagttagaaaaataatatttattataatattatatcattttactcataatttttttaaaataatatatatttgaatagcgtagatattttgtagaaatttaaaaaagacttaaaatgagatgtagcatataatttcaaaaattgttatttatttattattttatgaataaaatattactttcttaaccatatctatttt

SEQ ID NO: 89897 - DNA, 589 bp, Cannabis sativa
taagagtatctccaactatatttactatatacattcttttagctaaaataaggagtaagcttaaaaacaaatgacctccaatcatacaaaaaaaaaataacttaaaaataaataatgagctctctacatttttacttaaattttttaataatattttaatcaaaattattactactttaactttttaactattttagttaaaatttagctaaaaaataaagagtgtagtgggaaatgcttagggagttccctactttttttactaatttttttaatattattttaataaaaaatattattacttttttcattattttgtcaaattaatttatatttaataaatttcaattacaaaatattattataataatcaaatgttaaaataagaaatataattggagcaaaaataataaaaatagttttctactttaattttttagcaaaatttagataagaaatagaaaacaccattagagatattgcttagttagtaataaggtgaaattgttaatatattttccgttcaaacttttataatacacatttcagttggacctaattaacattttttttctcaataaattaattt

SEQ ID NO: 89898 - DNA, 749 bp, Cannabis sativa
acgtaggctaaaaatatcctaacaggcagtacttaagtgaagtttagttcctaaggcttgttacaaggccttccaaaccttgatgtaaatcgaggatctccatcagaattaatgcttgaaggcactccatatattcgaactatattgtctacataaagtcgagctagcctggtaagcttgtaatcctttttgatttgaataaaatgggcagacttagtcaaacaatcaacaatcacccaaacaacattatgcttcaaaggtgtcaatggaaatccagtaacaaagcccattataattttgtcccacttccattttgctataggtaaaggttgacgtaaaccggaaggtctctgatgcttagcctcaatttctcgacaaaccatacacttagctacaaagttagctaaatctcttttcatacctttccacgaatattgtcttttcaaatcttggtacacctttgtacttctaggatgtacaacaaacttggacctattggcctcaatcaaaatggacttcctaagatcagtgatatctgtaacaactagtcttcctatatggtatatgtacccttcaccattaactagtctacccatctagttgctccatcttggattcggttctcaataagtcttagcttatcatcttgtcactgacgttgcttaacttgttgaagtagcactggtgtagccactatgttagagatgcaagctacttcttctccatcatattattgcaagttataatca

SEQ ID NO: 89899 - DNA, 764 bp, Cannabis sativa
agaaattacaacagaattaactaactattcttactcaatcttagcatgttttcacattgttatgcctataatgtaatacaagaaacttaaacttactagttagtatctttgatagtgatccaatttggaattggtccactgagtaagttacttgttaagtacctattcagtatgcaacataagaaaaatatgaggaagcaagaattttatgaaatgaagttttcaaaaagaactcattgtaaggccctttcttgatgatttcttcctacttaaaccgatttgtaggatcgattctagaacttaaccgattgtcctaactcatttttgcagtacttacacttttcccaattgcattacattttcgaaatttggaacctccccttctagtttattgaagctaagatctctgcgaaatcgaaatcttgaatgtcagttatgtcatggataagtgtttaaacttgaaactccaacacaatgtttcacaaaagtagaagaattacaagatagttagctttgtcaaattactaatataactaggaatgtttcctcttaatttacagctcctcatcatcctgcaatttcaaacatggacactttcaaatattgagttgatcttaatcacaaatgtttatacatatatagatatatagctcacactttaagtatatttgtcatgtttctcaagtctggaaaatctgagctctccccatttaaatcagtaatccttctgcaattaaagtcttattagaaaatgaagttagtga

SEQ ID NO: 89900 - DNA, 691 bp, Cannabis sativa
tgcctatgcacgagaattgcgattttttattatcattttttttggatttttattgtagttgtgttccaattacatcttatatagatttataaatcaatccttgtcattgtaaatacggtcatcggataggttgttcctcctgcactggtggtgcatcatttggagtcactctagctacagccatttctcgttctaacttctcgttcctttggttggattctatgagcctccgacagagttgtcgattttctaactccacaatagggatgtatctcgtgggattgtaggcatcaaactctcttctcttgggaaattcttcctctgggtcacttctgttggagttcttctcagtaggaccctttccttagttcaatctagtttgagtttgtgatccctggggttcttttctcgattgatatactgtctcttcttccatgactggttcatcatgttgagtattctccataataatatggtctagttaaacaagggaaaatgtgtttcgagtttttttttacaaaggctctcaatgaaagtaccaatctgttaacttatatttttgttaacaataaatgaagcattgtaaataaaaattaactatttataattaataaatatatatgaaacaccaagaacttttacgtaattttatagttaaaatcttcatactccatgagtcagtattattttt

SEQ ID NO: 89901 - DNA, 4344 bp, Cannabis sativa
  modified_base (30)..(52): a, c, t, g, unknown or other
agaattcatattaggatgttaaacaacatnnnnnnnnnnnnnnnnnnnnnnnggtaaaatatttccaacaataagaagtacttaaatgcacattagatggatgcaatgaggaattgactcgagaagaggcagtgaaaggatgagttgatgatggaagagacagcttgtagagaccttgattaagagtttcttgtagaaggacctgcttcgcgatcttatcaatgacaaaatagtgattaatatcgaatttaatgacaacattgttgtcagcatagaattgttaaatactaataagatttttatgtatagcagggacatgtaagacactttttagaatcaagattttagaacatgaaagaaagctattgcaaatagtagaaatggtgaaaatctagtcagctagagctctagaaaacaaaaagttgtagctaaatcatcagcagagtctgagtacagagctcttgcctctgcaaccactgagctcgtgtggattaattctctcttgactgaacttggcacaactctccataaaacaccccctgttttatggtgtaataatcagagtgcccaatctcttgccttgaatcttatttttcacacaagaacgaagaacattgagcttgatgtccactactttacagatcaagttgctaagaaaaagctagaagtttgctatatacctacaaaggatcaaatagtagacttgtttactaaacctttgtcttctcctcgatttcagtttttatgtaacaagctttacttggaacattccaagtatagcttgaggggggtgttagtgaagatagttagttaggacaagtggctctttctcagttaattgttagttagtgagttgtgcgattagaaaagagttgttactctttcacagctcctttatttaacagaattcaattagtattgtagtggcttgttctatctataaatatcacagagcttgtgtattcaaacacagctcatttcatcaatctcaactcagattacatcacaatgttgttttttatgttcataaacaatttttagttttttgtctaactttttcttttttatattttcgctcatatactcagaccccagacttggacccaaacccagacctgttcccaaaccctaaatctcagaccgcgacccgaacctgaaccccgatcctagacccagacctagaccccgacccgaacaccgaacctagaccccagaccccgaacctgaacctaagaccctaaccttagaccccgacctagaacacagacccgaacctggaccccaaactcaaaccccaacctcgaacttgaaccctgacccaaactcagatctcgggccccaatcccaactccaaccatgatccagacctccgacactagacccggtccaagtttgatgtccaagtctggggtctaggttgtggtctaggtctggggtctagggttcgaggttcgggtctggagtcaagcttaaggtcagctaagttcatgttgtagtatggttattgaagtttttttctagtaaaaaaaaataataataattttcaataatgagtcaaacaccatcaaattttaaaatgacaaaaatttattttctatttttatttttgaaaatactattctgaaaacacgatcaaacaacctctaagtaaaaccttgtactttggtggtattttccttaaaacccatatttatcccgctaagacaatttatattcttgtaaaaagataatccgactaggcaattgttatgaggaatgaaaggcttcccaaacaacaaggaatgcttctaataattttgcctcttagaaagtacagcttggagctatccttcatgtccatgacataacatggacaatttggtgtttgaggatccttacaagtccatggtagctgaagcgttaactatttgtcgtggtttcggatatcgccagaaattttgttatttgtaattattaatttcctaaaactgatcatattatatagtggtttgactatcctttttatattaatttcttaaacaagggaaatgaccatcaataatatttcttttagcactctctgtttaacttctctttctcccttcaaggtttacacaaacaagattgaagctaaaattaagcaagaaaaaaccaagaaaaaaattgacaacaaatagacttaatcgaatctaatttttatattgtgaatgtatactgtaataattctagacagaatgaatagatgaatacatgtaaatttttcccatggacaaacaagagtaaataatagcaagagaaatttacatctacaaaaagaatctacccaattagctacatatgcttgcctgctaagaactcgaatatcaatttttttttttttttttttgagataaacttgaataacaattggacacagaaaaaaagtgtttaaaaaaacaatggcagttgtatatgtattcaagggaactggaatgagcccccaatttggtcattgttggatggaggattaatggccacccaaagaagagaaatagtgattgccacaagaccagaccatacaaaaacaatagttggtgtcctacctcttcttcccatgagcccttttgcaaaggggtaaagatgagccaagacccaaaagctaaagaaaacacctccaagcaagctgctccactctggtatgacactatatattgttctgcaaactgcaacagctattccaatcaagtttatcatcatgatggtgattggcggtaccatcagggacgaccatttgaagatgtaaagatcagcatactcatcgttcaagtcatctccaccagatttcgatgttaaagtgaatgaaatttcgataccagctatcaccttgagaaggccttggagcactgctgcaagatgagcacttgttcctccgatcaaccaaaattgctcgttcctccaccaatcttctagttcaattccagaccattttatctcaagcacagcaagggcaatgagagtcagcgtgatacccaaaaggtataccaggaaggttatgttgagtgactgaacaataaactcgccagaaaacaatgaaagggcaggaaggaagcagtagacaatgagaaaaatggatgtaaaagggtatattccgacgtttaaataggcaatcctttggagaaacttcatcttagagctggccagaagagcattgttccgagagaagaaaatttcaacagagccagtagcccaccggaggacctggtgaagccgatcggtgagattaatgggggcagatccacgaaaggcatctcttttggttacacagtagacagatttccatcctctgttgtgcattctgtatcctgtgacaacatcttctgtaactgagccataaatccatccaactcttagaccccattcagtcttatcctcataccagcatgaaatgacacttattgcctcggcaactgtggatgcatcaagaagatcacgaggaagggtgagagcacctggcggtcgcccatatttaacagaagggtgatctgcaagaggtcggccttggaattcagccacccgaatagaatcaaccagtaagcttgagtttccaaatgtcttgggaataagagcaatgttcatctcttcatcatcagagtctactgattttccttctatggaggcaccatcaggaacagaagcaacagaagactttctacggcgggtaaagaaacagtcgcaacaactgcttggttcttttgttcgaggaggatcaaaagcatacagagcagtacggcgaaagaggcatcctgttcctacataaactggaccctgaatcccatcgagggcacgcatgttgacatcaaagaaaacggtgttgtgattagcataacgatcagaagggtcaattccttcaaatctctgaggaaactgaacataacaaattcggtcgccaccacggtccatcatgaagcacatgccttctctcagggcttgtgagttgaaaatgtagtgatcacaatcaaggttaagaatgaaagggccgttagacatgatggcggaagctcgaaccaaggcattcattgcaccagctttcttgttgtgatcatagccaggtcgcttctcacgagaaacataaacaagcataggaagacgaatgtcaatatccgttaaatccatggagcttgaatctgtttctgtgcctgtcaaaggttcatcactgggaggtttcaccatcacctacaatgatattaataagtcaatatagatcaaacatatttctaaaacgcaattaatcacatgatttacatttccaagatcaataactaagtgacgatcaataactaagtgacatggttcacgcagaaatggctcgaatgaacaacgcggcta

SEQ ID NO: 89902 - DNA, 563 bp, Cannabis sativa
aggtgattattttctttattctatttttattttttttattttattttattttttgaattcaatattgtttctttgtcgttttttttatataggccttacgatgtttacgaggatggtgcgaagaaaatttccccggggttcagataaggtgtagattatgttgaagataaaacctggtttcatcatttgtcttgactcgataatatttctttttccttttaaattttttatagttattttatagctgttttatgattgtttttaagtttagctactgttattgagcttttgtaatatttgttcactttatcttttatctttatttattgagttgtttcagcatatgaacactatcttctattaccttaggaaaaaagggaaatattctttctgctgttacagtgaatttcgcaagaactgtctgccttttcaacaattccatttaatccttatactacaaattctgcaaatccaaggcaataaaaacaaagatgtctcacatccatgctgctcacccaataacgcattatataagaggcttgtgaattccttgttctaagcct

SEQ ID NO: 89903 - DNA, 915 bp, Cannabis sativa
aaaccaataaaagttaatgtaagcccaaataaaaagtctaacatgaaataattaaacacatatttattgaaattttgcccgattaatacaatagagtacttcgtcttttcgagcatgcctcaaaatagggcctgattccttcactaattggttaggtgtagctgcttggtggtgatcctattatgatgacttgtatttcaacactatatttggtgtaaaaataactttatgatatatttgtattaatttttagcgtgtgacttaaatgcacaattgtaaaacttagatcaaaatttttagttaatatttttattaaaattattaaaaaataataataatagcttattattaatttattatgtaaaacaataaaaaaaatataaataatctttaatttaatgttgtaactatatatattaataaaataatataaatgacacaaaagtgttgacccaaatttcgatcaactgactcggagtcacaaaatcgacataaaaaatagataataagtaaacgacagcaaatacagtaacaatgttgacaccaaattgttatagaggtttgatcccaactttagtggcagtagtctacttcccttttagctgtattttcttaggtatactgaactcaagatcacaagaataactcaagtgagtttctcgagaatagagagaattacaataatttctgcagagtttctgctacaaattatatgtcaaaccccttttccagttgatggaaagcttatatttatagtaaaaagaaaataaattagcattaattacaaaaatctgcaccccattcaaaatttattagatgaatccacaccaaaattagcttccttaattggtgggatttagataagcttgaatctttgacgttgtttctctataccctgactgtatgcctcacagg

SEQ ID NO: 89904 - DNA, 898 bp, Cannabis sativa
aggttgaatactcgcatttatcatctttcaaataattctatcttttaccaactaaattacacttcttggtgttgtgaaattctagtaacaacagccatttcttaactttttttaaaaattgaacatttactaacttagtttccaaatttaagatcattttacttagccaaaaaaaaaaaaacaagccttcctaataattggtatacatatatatatatatactaggtagaaattacgtgccgaggcacgtaaatattagttttatttaaagtttggttatttatttcttatctttttctttgttcgtgtgtggttttcagatcaaaacaaagtttggattttagagacaatattaaaatttcacaatagtgtatttcttatcttttctttgtttgtgtgtggttttcagataaaattaaagtttgaattttagagacaacattaaaatttcacaatgtaatgaaaatgagaaggaaataatggctgactaaagatatttattgtatataaacatcctcatcatccatttaggtattagagcactcacaagaaaagatgtaaattgtcaaaaatgaagacaatttagctaattgtaaaaaatgaattccaatagataatgtataatttatctatgacagctaagctggtctaagaaaaattgtaactacatttaactaagaaaagtgagagagtgagctaaacactatttaattattttttttatatatttatttatttgtttttctcttcttttttacttgatataaatttttttttgtattctttatcaccattttattattatttaattaataaaaatatttttaaaaaattattatttaatgatgtagaagacctatagagaagttcataaataaagtagtattttggtaatcta

SEQ ID NO: 89905 - DNA, 1051 bp, Cannabis sativa
tgtgttaattaacacatggtcaggaggaggaggttgccaggatcttttggggcgaatattctgctcaggccgactctgcatcactgccccaaattgctcgtgcagaaactcctgcgcccaattcacccaagcatggtcctcttgaactttatgttggaagaggaacttattgcggcgatgccataggagccatgaaaagccaataaagtaaagcatttcagacttggatagtttgttccactgaaaaaaaattacatcaggagccgtgggataaccttcacaaaccaaataatgggccccgaacaatttccataaccttttagtctttggacacacccaaagagcatgacaaatatcttccttttccttcttacaccaagcacaaatagggtcaatagtcatacctcgctttgtgagttccactttcgttgggagccattgattaaagactctccaaataaaattcttcattttaggagatagcttggatccccaaacaaacttccaccaagccttcagcgttgatttgttcgagcattcagcaatgtccggatttgagaatcttagtttataaccacttgcaactgtgtattgaccatgattggttagactccaagtgagccaatcgggtcttgatgtgattggggtaataccaagcacccaagggatatcatcaacatgaaaccagctgcaaaattcagcagttttccaagttccatcttcagtgagcagtttgtctatggtgactcctttgggaagagaggctttagatcggagagagaagggagtacctctagggagccaagggtcttcattaattctaatagaagagccatcaccaacacaccaccgcgatcctttcattaaaacctccctaccccaaagaatgcttctccaaaccgatgaaccaaaatggcctatatttgcttccaaaaaggtgccatgagaaaagtaaagggcttttaatattctagccattaggaaatccggcatagtcaataacttccacccttgtttagccaacatagcttggttaaaatcttctaaatca

SEQ ID NO: 89906 - DNA, 1213 bp, Cannabis sativa
acgcttggaagtaaacccagcactatctcaacaaagactgaaaacctaggtggctctaacaccaagagaaaagataactttagggaatcagccaaagataaaacgaaatagaaaaagcacgataagtatgtgccgatttacactgtttataccttgaaactcaagaaaatatttttctcgcaaatgagcacagggttgcatttcgcaagcctgagccaatgagacatgcgagacacaaaagggattcattatagttctatcaatttcataaagacatagggcatacaccaaaagaatgtcgttagttgaaagttgagatagagagccttatctcgcgtggttattttcaatagtatgtaagacgacaaggttatggacaaaactagccaaatctgccttataacctgagcaaccaaagattacaatctcctcttgtagaaggagaggacatattggtaatctcgggagggccacatctcgctggagaaagcagtaatgcccagaagagatatgttaaagaaatcaaaatgagcaatcagtttttgctccgaaatcatctacgaaattcaagactgaagaacctccaattgtattttcggagaaagacacaaagcaagtgaggtatccgcacgttgatcctctcgtgattgctattcagctcaccaacaaaggagtaaaaagggtgttggtggataacgaaagctcagtaaatattctttacaaggatacactaaggaaaattggattgcaaaatacaaaattaaaaccttgtatggtgaagttgtgcagatttactggagatagtgtcgccacttaaggcattattgaactcccattgaccgtaggcgagccaccattatccacaacattgatgcaagattttctagttgttgacctaccatcagtttataacatactgataggtcgtcctgcactgattggactaggggcagttagttcaatcaaacacctatctttaaagtttcaaacaccggcaggtgtaggtgtagtgctaggtgaccaactattgctcgcgaatgctatcgtgtagaattgtagaatagggccaaccatcagtcaatggtggtcataacggaggaaggcgagaagcaagaagaggatctagatcctcaaattcaagacgaaaggaaccaattgaggaactagatgaagttgttttagatccagaaaatcccactaaatgtgtgtttat

SEQ ID NO: 89907 - DNA, 800 bp, Cannabis sativa
tcacatattatacgttgttcttaactctttttcgaattcaagtgagttggacgacctgaatagaaagtcccgtgctagattgatgccctaatcacataataaaaactgggaatatcacaccgaaaccctaatttgagaaacccgaacctccaactcaaggttctgctattactaactggaactacgatatcctaaaaaattgggaatcacccaaacgaggctttgaaatggacacgaatggaggaaatgagttgtttggggaatctgccaaaaccggttaactggttttacaggtcctagcaaactggttaaccggtttgcaccaggtttccccaaataattcacaacctgctcaaaacatgtccaattgccaccaaactttccaaaacacctataatgagcttacacaaccatttccaatcaatagaaaccagaaaaactcacaagctcaaaatatgccatggatgaaccaagcttgagttttcaaactcaagcttgtgcatccatcacccaaaacaaccaaactagcggcaagaagctacttccaactcaaattaaacataaaattcaaaccacacataattcaaaccctaacatcccctaaatcaccaatttacatacttaaccaaaataaagcttcaaaaacacaagactataagttctaaggttaccttattagcttcaagatcacttgaatcccttgctgaattctagaaaaatgaagaaaaaggttggtttccttctggattgggttggccgaacaaggagagagagaaaggaggatgagttctctatttttt

SEQ ID NO: 89908 - DNA, 1022 bp, Cannabis sativa
aatggtggtttggtggctgcctaggtgagtgacacatggccatttaattttagccaaggattaatgtagaaatccatttttcatttagagaaaattaaaggtaaataaggaaaaaagaccaaaaatcaaagaacctctctttcccttctctctctcttcgaactagccataaactagggaattggtggctgatttttggtgttttcagcaaggacttcaaggggaactcaagttaaggtaaccctagaacctacggttgttgtattttgaagcttttacttggtttgagtttatggttttgaaaagtatgagctgttagggtttgattgttgtataatttgaattctaagtttgatttgagttgattatagcttctagcagctggtttggttttattgtgatgaaattatgcaagtttgaaccttggaactcaagtttaggtctttaatagcattttttaatttagtgtgttttcttggaattattggttggaatatattgtgtataccctaattaggtacttggaaggtttggttgcatttggtggagtttcaagcaaaatgtgggatttttgggtgaactggtataaatcggctagccggttttaccggtacctgtaaaaccgattagccaatttttacagggttccccgaatgttccattttctcaattctcgtccatttcagtgccttagttgggtgtttccttatttcctgatttagtgtaatccctagagagtataacagaacctagagttgtgggttcgagtttctcggattagggttttgatcatgtgatttacccagtttcattatgtgattaggggatccattggtaagaactgtgtataatatgtaatatgaatatctgagtgtatatatatgttaagtatatatgcatgcttatatgttaattgcattataaacacttgtacggttatggtacaaagtacattggtatagtgaatattgtttaagagtactgtacagtgataccagcacaagtacaggaaagtacagggt

SEQ ID NO: 89909 - DNA, 739 bp, Cannabis sativa
ttttttttattaggggcctaaaatttaagattggaacagggcctccaaaatgtttaagacggtcctggttatttagttatcttgataatagaaaaattaataatatgtttagattttttatcatgagtatatatgtattaaaatctttcaaattctcaaattaaatcatttgccacttaatgacaatatgtttggttcacaactttagtgacaagtttaagtttaaggtcatcatattatattccacatgttatatttagttaatcacaaaaatacaaatacagataacaattttgtgataaatcgccacctcataattatagataaatatatgattttatgggaaagaaaagtgaagctagttactgaggtctttttttgtgactgcatgtgtgtgaaaggaaaaaaatgtaaattttctccctatgaaacattgaattgcaaaatgaactattggtgagtgtactgtatagagttatgttgtacctacatttattcgcgttaaattatgtgtgcacgaactccacatttaaaaataaaataaaattaatcattttaaaatagaaataatctgcattaatattcgttgttggcttattggttataataacactcaactaagtggggatgcttgttcgaaatgcatccaataaggctgctcacaagtgagtgaggcctcagtatttttataattagtaaacttataaatagtatttttgtaaatattaaatagtataaa

SEQ ID NO: 89910 - DNA, 1273 bp, Cannabis sativa
aacctaaaattccaaccaatcatgaaaaaacatcacgaaaacctaaaatcccaaccgatcatggaaaaaacgtcacgaaaaatccaaaaaaaaaaaaaaacaacaaacaacatcaaataaaaaactataatcactaaactaaagaaattacaacaaaaatatgaagaaaatgaacaaatacctcagttaaccaagcaatgtagctcgaaaatgatcacacaccaagaacccacacacacggcagtaggagtcaaagcttgcttcgatcatcaatggcaacccacacacaccgaagaagaagaaaaagaagaagaggaagaaaagaatgaaaccctaagctgagagaaaaatgaaatgaaaaagaagatggattgacaaaatgtgtgattgattgaagcatatgcaatggcggtaagcaatgagtactaagcttctccatgcgaaaagtaagctactgtagttgtagcttcaaaaaataaaaataaaaaaaataaaatatgggaattgggctaaagataacaaaaatatggctttcataaaactcataaaaggaaaaaaaaaaaaatcccatatacaaaatgccataaaaaagtaaagagtaaaaaaaattccataaataaattaattttactatatattaattatatacaaatatatctttttagtaattattacatttaattattaatgatgtgaataatatttttttttagtaaatatattatgttgaataatattaaatataaatatgggtttaacacattttttataatactagttattgctccacgtgttacgcatctgaagtataaattccataatactaatagaattgtgttcattaaatttaaaatattaaaagtttttgaactataaaatttgtaaagttgtattctctaactttttggtacgatctctcttgaactatagcaactataacaaatgtgtccttttattatatttaatttattttttaaaaagtatttattaatatagcacttatgtggcgttaatatagtgtgattcaggagttttggtgaaaaatacaaacatagatagtgctttagaaaaaaataaaaataattaaagagttaattttagtatgtttaacatcaataaattaaattttagatatgtttatcggttagttaaatagataataatgtaattatatttgtaatacatgaccacattcaggaacatagacaaagagttaccataagaaggactaaaatataaaactaaaatttaagtgggttattttaaaaaaaaa

SEQ ID NO: 89911 - DNA, 529 bp, Cannabis sativa
  modified_base (150)..(152): a, c, t, g, unknown or other
  modified_base (496)..(503): a, c, t, g, unknown or other
atataaattattatttttttaattctagtagttccccctaacatattggtgatataaaatataattaccgaaaaaaattgaatataaaattagtttcccaaaaatcaatttctgtcctatctgataggaaaggaaaatcaaaagttatannngagatataactcataactcgcgtataaagctgaatattaacggcttgtgcgagcccgcaaagtactaaacgagacgtcgagatgtcttgataaagtacttaaacctagtaaatagatagataatctaacttttcatacaagaaatcaaaaatatacaaagtgaaaaaatgattaaaagtatatttaagtttgcttaaggtagattataacggccatagcgaggcagaattgacaactgctcgaaaatcaaaaagtttggtagataactaactacttaaacaggaagattacgagcaatggaaaaacctaatagtattttgtcggaaatattttaccaggatctnnnnnnnntaccatgtatgtttcattaacatcct

SEQ ID NO: 89912 - DNA, 685 bp, Cannabis sativa
cagtttttcgttttctgtcaacctcatatatagtagtatataagcacattgtttacattcctttagtgtataggtttattcttttcaagtgttataaagttcaatattttgaaatgtagaatatacctttaggctttagcagcccttagttaattttattttatttttatgaaaaatatctataaaagaatgctgggctttctcaaggcattacagcgagaatcaagctaatcgtaatattattgttacattattcagcaaaaaaaagtactattacattaattaatcttttatttaattctccaccaaactcaccaaacgcgtctctttgtattactagcaaagaaataacaaaaaccaggatatatattttccaaaaaatttcccattaaaaagttgaaaataaaaattaaagtcaaataggacggagagcacgaggaaaaacacaaaaaaaaaatagaaagtttccctgtctttgtttgtttttgttagaaaaatactaaaaaaaaaatatttatgggttaatattatgagtatcgtataatttaataaaatagtttttaaagaatattattagtcaattggcgacatgtaaaaaatattaggaaccactaatacttaatataagcatgtttttttgttattatttatctactagtagattattttaataatttatattatt

SEQ ID NO: 89913 - DNA, 1114 bp, Cannabis sativa
attcttcccagaatcgttctaattaggttcctgttcatgttcttgttcgaacagaaccttcccaaaagacatgattttcccacctcagactccttttcttcatcgatttcccatccgtcttcatcctttacttgcagttttccagttcgatcaaggagatcttccatggctagatcaggcattggatgcattcctacaggaaaggctcttctcagggagagagcaaaaaaggttatttcttttaattgtttttattaaagttaattttatggcttacacaattccctttatccaaaatgtaaagcctaaaaacatggttgaagttgggtaatattgaattatgagattagatgtatttgcacacaacattgagactattaaacgcatccaacgagtgctaagatgctttcatctcttttatagagttttaatacttattatttgattttgatttatctttggagagagaaatagagagggtagagaacaataagaacaaacggtatttataaaaacaaatatataaaaatatcttctatatttgaggaatatactcttttctctgtcaacatatttttgtatgatttatatagcttaaataagtgttcaaataatttttttagttggtgggtttttttcaagagcgacctcatatgaagagaaggtattgagtttatctgcatatagtcgtatattttgaataagtatgtgtctattgacttgtaattctaatttttagattcttatgtttatggattgaatgtcatattctaattttctattttgtgatcagatactttttatctactttagttacaaaaatagtgttgcttatacaaagggagagattgaacatatttacatgaaaattagaatgaacaaatttaaatctcaaataaaaaatataatatgctataaaaataaattaaatatatgtgcaatgcacttaactttaatctactacggatatctattctatataaaatgtggctatgtaacggaattcttagtttaacaatgttatttggttttctacgttaaccttaacagaatattctttattaattttataataatattattatatatatttaaaaataaaaattatataaat

SEQ ID NO: 89914 - DNA, 2789 bp, Cannabis sativa
tcccgtctcggattccgggcctcactcacatcagaagaccagttcgcctcaccgtgcacaaaaagctcgccgctagaatccgtagcaaccaccaccgggaaatccgaacacgttccgtacgcggccgaggccccaacagagcagcaccggcgggttccgctccgatcgctgcttcgaccggaaacagacctcgacccacgcctgcgccgcttcctagcgatcaatcggtagcttcctctggcggaaacgggcctatcgtcgtcgatcaagctcagtctagacatgtcgatagctgggtcgatagagaaggaagtggcgcggtcggagaggcagggacgcttggtgtaggcagcattggaggagcagtagggtctggggttggcggtgggaagtaggggttcgtggggtagggttttggtgggtgtggtgtgtggaagatgaaagggtctccagctatggagttgaaaagcacatgaatctatagagtgacgagaatctagaggcttgttgggagacatggatagggatagataggactggataatcggcgaggaaagagacaaggttgtagctttattagtttagcttagctcgaaccttggaactcaatcatcggattctccatttttcctttgattttaatatttttcagcaagaaattgtttgtggaataaacaacctatgacaaaaaattctactcttggcccacaccacccacgtttccatttttacaactctattcaaatctcctgaaaaactttattattgatagcattgttattacttaggtcaattatgattttttgccttttaacatatattaaataataaatatactctctcaatttttatggtggttaaattttttttttaaaagaaagtctaacataaattgaaagtttagagattttaataaatgttaaagtttgagagtaatgatttagtagatattaaaatttaaagaatatgatatttttttagtgtagcgtaatggtattttacaatctattaattgcttaatagcttaaaggtcttgggttcgaacccatgacctctctctttttcccatccctccctcacttaatggctaaagaacatgatttagtacatatataatttagaattagtaaaatttaatgaaattatacaaatgtccttaaattcaataattcaagagattttttaatagagaaaaaaattcaaaggacatgattggtagatatcaaagttcaggtgataaaaattttaattaacctattacttattagtaagtaatataaatatcacatcacgaaataccacgactcacacgaaaaaaaattaggttgagtgttacaatattgaaaaagacaaaattgttaaaagatattatttatgtctaacatatttttcgttgtcatattactatacaatttaagaaaataatttttaaaaaatattgctaacaaattttaaaatatcatttatagaaaatattaactattaagtattactagtagctaataataataatactcaatatcattttagcactacctatttaattataaaatatagtttattattattattgagcgattcgctttgattacatgtaatatggagattggaataattgcatgcttcagctttatctacgggattaatagtttgattgaaaattgaaattacattcattaataggaattatgaatgattgttgagagcggtgaataacttttaactaatttctcatatattagtctcaattttaaattatttttatttttatttatggtattttactctcaatctcaaaaccctctttttctgacttttgacactaatttctgactaattaaataaacatagtcctcgtgggatcgacccttacttgcaattatacttaaataattgtaggtattggaattagaatattagtaaatttgttgtggtttacgacactcatcaaatttttggcgccgttgtcggggactattattttattttattattcatatttaatttttattactaacttgttcttctagttgtggtttttattttcagatctttctttagaaatatggcgatgtacaatcgacaatactatgatccatattatacctcgctacaagtgtaccaatatgatccccactacggtacttacacatacaatcaacaatggggagattattttagcacttcttatagtgggatcaaaaaatatgttcaaccaacttcttactatcctcctaaagcaccacaagattaagatcattctcttattgatatgctcaacactttagagccttctactattcagatggaacagaataatgcacaattttacacaacctactcatgttgcaccatatagtgaaaaactaactaatgttgagttgattgaaatgttagcagctaattccttgcagtttcagcaaagtaaaaactaactaatgtagagttgattgaaatgttagcagttaattccttgcagtttcagcaaagttgtcatgaaactatgtagagtcttcaacaatctctacaaaagttaaagaatcttgtggagtcaatgaaaatatctatgagtgggaacaaaattcaacgttcaaatactttacctgcacaaatagaaagtaacccaatggggaatgtcaaggtcataacactccaaagtggtacataacttgaattaccaccacgccaagaagttaatgatttgattctaactaacggagtcaacaattcatccctcgaagagtcatctccaccaaaagttgaatctataagaatatttctatattagg

SEQ ID NO: 89915 - DNA, 733 bp, Cannabis sativa
tctttctgctcttccttttaaggtgtgattcaccttgttcccctatagggcttgtgtgagttcctttcttatgaacttgaagagagggttagcgatttctgtccgatgttccgcatatcccaggctgcgtctctagattttcctcaatttcctcaagtttcatctcttcagagttctgagtatatctctaggttatctcttgcccttggtttgagagttgcgaggtttgcctcatgaaactcttcttccaaggtcaggttgatttcggtaactattctcatgcgtcgcccttactgcggctatttcacgctctaatttggcattatgccggtttgcttcctccaatcgatgcctaagatggcaattttctagctcgatgattggtatgtacctggttgggtcgtaggcaccatctttgtcaacctggttgggaattgaccgatcgttgtttagccaaggtccgtcaagccagggaccccaatactgggttttccttgggcttgcagtatgttcaagtaatgactcaatagatccctgaggactcaatggctcttttcaaggatgatgacttgttccttcatgaggattattttcttcggcgtcatccattacttttatgtgaggaggctctttcagagctttttcacagaggctttcaataaaagcaccaaactattaatgctgattttcgttaaccaaatatgagcctaatcgtgaaaatctcacatagaaa

SEQ ID NO: 89916 - DNA, 915 bp, Cannabis sativa
tgtgttaaacgctaaatctatataggtgtgaagatattctcaattaaaaatttaatatagtgtctcactacatttaataattaaaaaaattgatatagtaggaggaggatgtaattttattaattgattatactataataaaatccaatgaaacaaatgttttcttacttgggtgttatgatgtcatcaactttatttttgtagcagaagtacttgtgatgtgtatccttgtttgcatgtcaaaggtggaaaaataaaaataagattttgtgtaaaaggtggaaataaaattatacagttgagatttattactttaagaggagatatatggtgtactggtatttttgtgtgtaaaaaatagagctattatattaattttgattattattaccaagtttgtaaaatattttgttaaaagtaaatatccacatttattggaatagaaaaataaaatgtgtcgccagcaaagcaagtgtcaccctaaaaacagttttaaaacacatttgcgaaaatcaaaacaatcctgaaattacaattctccaggcatgcatgcaccttaccctattggctcgtcaacccacccctctcacgtgtcacacaccacctcattctcatttctttcaacacaacacaattatttcacgttttttaacaattctacccttctctaccaaatccattttcagtttcccctttcctttttcacaattataaacatacccattatcgtcatttcaagcaaccacccgtggtcatagacgaactatttgaaatcttttcggaccatatacctattttccataggaaaatttgattttttatgcttacatttggttaatttttttttttagacaaataataactaatatttgtaaaatatgacaatttttatgatatccctaaaatacccccatt

SEQ ID NO: 89917 - DNA, 655 bp, Cannabis sativa
acgagccactttgtctccaacctaacccagctcccggccaagagatatgcagcctgcgcttccacgaactcaatttaacagattgaggatattaacactgctaggactgttgtaagtctatctgttagtgttctcgggccttgctttatggcgcctgatcttccgtacttactcatttttcttgtatcgccagattgctgcagagaccggtcgcctctcaaagactttaatcgatcatgggtacatcatgtctgaattcaggggcatggatgaggccatgaagagtctaagagacttggcaactgagaagaaagctttctgggaggaggcccagcagtgggagactcagatggagcggaggcaccaggaggcgtgaaaggccaaggctgaggagttagaggcaaaggatgatgccctgaagacccgggatgaggtcgtgaccaaggcgaggcgtgagcttagtgaggccaaggaggcgcttgaagatctgactgccaaactgaagtccttagaagagctgcaccaggctaatctaaaaaagacagccaacctgaccgttgaggtgaaggagcttcgtgacttcaaggagcaggctaaaaagaaagcaaaaagagatgccctcctggcccttgttacctgccagcactgcaacaaa

SEQ ID NO: 89918 - DNA, 1276 bp, Cannabis sativa
  modified_base (933)..(935): a, c, t, g, unknown or other
tgggaataacagttctgcacccaaccagggcattcataacacagtcgttccgctcgttgccaacactcaaacaaccattggagatgctactgagttacaaaatctttgtgacgttattggactcatgcagggtcataacaataccctatatcatgatcaggaagatctttacgctgcgggaaatctcgcgttcgaagaacaaaggcgcatgtttaccgagtggagagacagagagatggaggcattaagagttcaccatacagagattgaaaatcatagtcggcaagctaccatgctgatacgaaaggcctaccaaactgtaggtcagcaacctccaaattgtgatccccttgggtgagacaaatgaagatccaacgatgaatacttcgtagactacaaatggtcagccgcccaatccccgatcacgagtcccgcttgtgggccaagcggtaggctggcagactttgtctagtaattcatcgggagagatcatacctaatggttccatccagattaacggtgccattccacctgtcaaccaaacaaatcaatcgctaaggcagccaggcgcttctgtgttcgaaaggttggggacaactcacgacctaaggaatgattttaatagaaggagaagactagacaatcagaatgtcataacgatcgtgcaacctaaagctcttgctcaaattctcgctcagaaagatgcagacatgattaaaattgactagaatgccaagcaagttagcccaaccgtacatgcacagctagactaactgaaaaatatgttccaaggcatggctggacaaagatacaatgatctcgagctggactgagcacacaaaactcctttttctccagagatcaatcttctggcattgccccacaagtttaaaatgccaacatggaacatgtacacaggaagagaagatcctnnntcccacctcaagtatttcaaaatgcaaatggatttacaaggggtacgaggggatgtgtgctgcaaaatctttcctgctaccctgtcagaagccgcccagcaattgtattcaagttggcccctagaaagttcagttcatggaaagccttctcttcggaattccatgcacagttctcctcctctcgccaacttccgttgtatctgagagacctggttgaagtcaaacaaagaccaggcgaacccctccgcgcatacattagcagattcatgacggaggcaaccaaagtttcacgggtaactgaagatggaaagttatccgcgatactaggggcattgaagtcc

SEQ ID NO: 89919 - DNA, 1447 bp, Cannabis sativa
atattgtaaaaaaagggagctaagcgtggaaacttactaatttctttagatggaagatcaatatactgttgtatattacttagaggcacaaagttgtaagtagacatcaacagatcattataattttcttgaagttctttaattttagcttttccagttatgacccattggagatctccatttttttgtagtccagtttgcaatctttgacattggcattagaaattgcgtatgcttttgtcatgtgcaatgtctaatgcagggcttgaatatcatcttggtaaatagttgcttcgatatggttccctacaaaaattatatataatataggtcaataaatattaatagaactaaaataaaaatatattaattgatttttacctgtggatcaattagaagcaaattatgatatttgatagaatttctggataggcgtggaggagtttttttaactacaattactttggctgtccaattagtttgaccccttgtgatattaggtattagttggtatttgaggttattgctctgtggcctaaattttcaaaagagttaaaatattatatgatgaaagtaattattatgagatgaaaaaaaaaaaaaatgcagagcatgcaaaataaatgtgggtgtaaaatttacttggctgaaattattagtgagaacttagcaacctgtgagaaatttttaaaagtgtatataatttttgtaatttttatatcttgttaagaatgatacactaaataagaaaatagaaaatactcccaaataatcaaggttggaatctatgaactaaaacagacaaatattataaatattaaatggtgaaagtaaaagacagctaaaattgtgactgttgaaaaataaagatgaacgattagatctttaagtgttcaagcatcaattcatcaatgaaaatagaaaaatactcaaaaccacattaaagtaaactataccatctttactgccttgcctttcattcataattcatctcattctattagattggacacacatttaaaatactatatgaacggattagtaaagaatttaacttacattgtcgtcatgttgaagtagcttagatgaaagtttgttcactttaatggtgtccagaagtgtggagttctttttttttttttctttttacctaagcaaatcagaaatttagattaaacaatagtatttatatgtatatgtgttatttaaaaactaaaaaaaaaaacatattatttgtcatttgaatatgctataagtacatgcatgttgccaagttttagtttataatagttttgtattacatgctggctcacaaatgtatattttgtaatacatgtgaattgacaaatgtcaatttaagaaagagagagaaaatgagaaatgtagtgagcatttaattttttcattaatttaattagatattatgtgtaaataaattgatctttaa

SEQ ID NO: 89920 - DNA, 1074 bp, Cannabis sativa
agcacacatcaatatgttgcaccatgtagaacataaaaaaacagatattataaacacacaaaaaaactcaaaacaaacagaataaataaatttaattaatatatcataaaaaagtactatccgagcatgataaattcctcttcggggttctcaaatcgtaaaaccacattttatcgtcaatcttcacaataacaaaatctaacgccaccttcaatattcgatactcttgtttgaacttcttcaatttgcttttatcattgaaaccaacattaaaccattgctcaaatgatttaaattgaagttcatctggcatgagcatcagtccaccagaaaacgaaaaacaatccatacacttcaccctttcgtttaccactgctggtcgaacaaaaatctgttgtgtaaggactcttcattatagatctaggcttcacagcccttttaacaaccttaggcgtaaaatccttcataccactcaaaccctaacaacaaacacaacaaacacaattacaaaaaaaaaaaataataagaaaataaactaaaaagttataagaagaagtacataaacaaaatgacatattaaacatttataacatggaacctttgcattattcttctcatggggaaccattttctcattgttcaacaccttaccctataaaaaaaataataaaatagtttaaaaaaattaataaaacacaactaaaagaaaaatactttaataatccatgacaattacaaaaaacaaacataaaaataccttagcaatggtttcctcaatatcattgatcttctctagagcagatagtgttatactatcattcataccttgactatcacccaacttttcagttacagcaacagtagactctttagtttcatcaaataagaccttatcatcagcaaccttctcatttacacccccaccaactacctccttgccttctttgacaactgactcaccagaacctcacactccaccaccagatgcaccaacattacctccacctttaacttccttggcaccaaccccatcacctgttgggttttatgccctaaataaaactccaattcaat

SEQ ID NO: 89921 - DNA, 564 bp, Cannabis sativa
cttcatctcaccaagcctcagtcgttcgagttaacagccttttgtgatgccgattgggcatcggatccagatgataggaagtctacctctggctttgctatcttctttggctcgaacttggttgcctggaaaagaaagaaacagcagacaatttctcgttccagcactgaggcagagtataggagcgttgctaatgttacggccgagcttacttggctacattatctgtttactgagctgaacattcaaatgccccatccacctacggtctggtgtgataatctcagtaccgtcatgcttactcaaaaccctgttctgcatgcaagaacaaagcacatcgagcttgatttgtactttgttcgagagaaggtcctaaacaaaaccatagagatcaagcacgtttctgcacatgatcaaattgccgatggactaactaaggctatatcaagttagcggttccttgatttcaggtccaaactcaaaattgaaaatcattcaattatgagtttgaaggggggtgttaagacagagagttagttatgagttagttattgttgtaactaa

SEQ ID NO: 89922 - DNA, 826 bp, Cannabis sativa
ttgtagaaaatattattttagttgctatgtgtaattacttgcctaaagattgtagttatatatattagttcacattccatgaagtaagttaatattaaatgtgtatattttatttttttcccaagggtaaaatttaaatatatgtatttatttattttttcgggcatgaattaatatatattttttgaaaaatttatttgcatatcaccttgctagctctgttttctgtttctgtttcaggttccccttcctcttatagtcttacgtgcatgactgtttaaagccttggtggaagtcagtttggactatcgaaatcctcctaagatcaaacacttcatctggaaggcttttatcatgttttgtcatgtgctttcaatttgttgaggagggtattcttgatagccctaattgctccttctgtagaagcaaagaggagactgtttctcatgccctaataggtttttctagagttaaatttgtgtggaaaaaaacttcattttaccatttttatactgcaattaagaaatatcttcttaggggctttgattcttttagtggggatgaatttagtctgttccttggcgttagttggatgatatggtcacaaagaaatgcttcccttttcagcaataaaactaacccctgtacagatatagaagatcttgttaaaaatattttgtaggaatacaaagatgctcaatctctttaatccaataacacttccaaagtaaggacagggacagtgtccaccaatagaaacacttcagctagaattccaccagtcccccctcaactacatccgggtgcttttatactgaatgtagat

SEQ ID NO: 89923 - DNA, 654 bp, Cannabis sativa
atcatcatgtatgcctataaaataacaaactaattagtctatttttaaaatatcaaatgattagctgtatcggtaacattaaagatacttatacttttaaaatatcaaaatcatcatttgtatttataaaaaaaaaaaagaacttaaaagtgaaaaacattatagagagaagaaattattaattcatactcatggaacatataaaagaaaaaaaaaagtaataaagagaaaaataaattctcactctagacctttatttattatgtagtgatgctcaacttgattgacgtgatggattttgaaaaaaacaaaagaaaaaacctgattgacgtaaacaaatgacattagcttgcaacacataaattaaaagtaaattaattaaattaaaaacggtacaaataaaacaataatattgataattttaaaagccactttatttatgaaaattagatacaatataaggctctagatgtaaatttcccaatgttttatttatgtatatataataggaaaaaagagacaaaaataagcattttgtttcaaaaaaaaaattgggcctttaaaaaatggaggccttgtgcaatggcccaagttgcctaatgcttgggtcggccctgcttatgtgtatagtcttgtacatgtgacacatttata

SEQ ID NO: 89924 - DNA, 630 bp, Cannabis sativa
ttgcaattgctttaggattttttttggacaattggatattgatcgaattgtcacaattcctctaagcttctttccttctggtaatggactaatttggcatcacaccaccacaaccatatatacagtaaagtcaggattccacttagcttcgaacatagaagaacaacaccattcttcatcatcaaacttacacagggattggtggaaaaccttttggagcttgaaactagggctgtacaaaaaatttcataaaccgcccaacccgaataacccgcccaaaggaaatcgacaaaaccgataaaaaatacaaaccaacataactcgacaaaattctaaaccgcccaatcagttaattgggcaggttgaaaattgacccaaaccgcccaattaaaccgcccaacccgatttaacccgatttttactttttatttttattattttatatatatatattatataatatataatatatattacaaaaaaagtcctaaatcctaaaattctttctcaacctctgaataaaattcattctcacatatattgtgtatttatgtggttactttttattttagttgaaactaaaaaaaaaaaaatctctcttatttcggtttgggctggttaacccgatca

SEQ ID NO: 89925 - DNA, 709 bp, Cannabis sativa
  modified_base (345)..(353): a, c, t, g, unknown or other
aatacatatatgtaatgatagtcaaagatagttttatgaaggaccgcataactttttaaatatatacatcaaatttctacgtgtatatatattatatagattactagtcttaaatatatatatgtatatatatttttaataggtatattattaattaggaaaatttaagattttatacttatttttttatttaattaacaaaatctcttatttttatatgatagagttgtttcattaattaaaaaaaaaactccattaaaaaaattgaatttgacttaaatttatttagtatccattaaaaaagtattctatataatattaattttaaagccactaaggctagcnnnnnnnnnagggagggatgggaaaaagggaaaggtcataggtttgaacctaggaccttaaagctattaagctattaaataattgtgaaataccattacgttacactcaaaaaaaaaaatataatattaatgctaagtaaataataatctgcaattttttacataggatgactttcttactaataatcatagctaagaattgcagattgaggccaccacttttatacctttaaattttaatttataattttctcaatttatattttgaccacttggatattatatgtatcatggaatgggtcacgtttatttcaattaattgtttactttattatgttttattttttgaaaaaagttatgaattg

SEQ ID NO: 89926 - DNA, 799 bp, Cannabis sativa
  modified_base (749)..(749): a, c, t, g, unknown or other
tcagcatagacctaaccatttctaaaagtgtgcgatttcttctctgtgcaactccattttaccgtggattgccaggggcagtatattgtgattcaattccaagtccaattaaattgtctttgaactgtatatccatataatctgcacccctatcagttccaagatctttaatgttttacctagttggttttgagccaaagcatgaaattcctaaaacttctcaaacgtttcagatttcttttgcattaggtaaaggaaactatatctagagtaatcatcaatgaaagtgacaaagtactcataacctcctccgggttatacatttagaggtccacagacatttgaatgtactaacccttaaggttctttggcacactctccctttgtagagaaagaacgctagtcattttaccttctaggcaagattcactaactggtaattcacctaaggtgacattttttaatggaccacctttggttaacctgtgagttctatcatagcctatatgacctagtcgtaaatgccaaagatatgtttcatcattactatcaatctctttccttttaaggttttttttttttttttttaaaagtccttttaaggtttttaggtttagctatgttgaaaagtttgttattaagcgctattggtatatccggtgttaaaacataaagcacttgttccatgtgagcaacacataattgaatgccatttcgataaatagtgcaaatagaactcgaaaaattcnattgataaaattgtgtttgtaaacatgagggagtctgtgacagtcagtag

SEQ ID NO: 89927 - DNA, 1362 bp, Cannabis sativa
cgttggataacatctccttgaggggaggtaaggacgattcctaggccactccccttgctattgcttgatccatctactgctagcatccatgttgagtttgtttgctcatttaaacataataattccttttctggttgtacctatccaacacaagaaaatttagcaataaaatctaccagtacctatgacttgatggctgtcctcaattgatatgttatgtcgtattcactgagctcaacagcccacttggtcatgcgtccaaaaagttctgatttgtgtagaatgctacagagtgggtattgggttagcaccgctataggatgacactagaaataggacctgagcttgcgccctgctgtgacaagcgctaaggccaatttttccagctgagtgtatcttgtttcagcatctagcaatgtctttaaaacatagtaaatcagttgttgcttcccttcatcttctcgaactagtgcagcgctaatcgctacttctaaaattgccaaatacatacacattgtttctccatcctttggctttgctaggagtggaggggaggtgagatagctcttgatttgtcttagcgcttctttgcattcctccgtccacacgaagtctttggtctttataagagttgaaaagaataagtggcaacagtcagacaattttgaaatgaaacagctgagcgctgctatccttccgttgagacgttgaatgtctttgattgactttggagattgtatattttggattgatcttatctagtctggatttgcttcagttcctctttttgtgatgaggtaacctaagaattttcctgaagagacaccaaaagagcatttagtaggattaagtttcatattgtatttttctaatacctggaatgcttgcttgaggtcattgaggtaggtcattgaggtgattctctgctactaaagatttctactaaagatttgacaagcatgtcgtcgatgtaaacttccatcgtctttccaagcatattagcaaacattcgattgaccagcctttggtacgtggcacctgcattctttagtacgaacggcatgactttgtagcaaaaagtcacttgctcagttatgaatgatgtcttttcttgatcattgggatgcattaagatttggttataactggagaaggcatccatgaaactcaacaattcatgtccagctattgcgtttaccatcatgtcaatgtgaggaattggaaatgaatccttcggacataccttgttgagatcagtaaagtcaatacataccctccattttccattcttcttcttcacaactactacgtttgctaaccagtctggatagtcaacctctctgactgatcccacgtcgatta

SEQ ID NO: 89928 - DNA, 1010 bp, Cannabis sativa
  modified_base (32)..(33): a, c, t, g, unknown or other
  modified_base (982)..(985): a, c, t, g, unknown or other
taacctacataaatatttgtacaaaaatatanntggcactcagtgccccagaacagtgtagaaaaatatgcatatttaagatttcatttttttttcaaacaatttgcaaactgtaaaaaaatagaatatgtctaatgttatacaacatatataaaaatcaagtccaataatcaagtagggtccctacctctcccaaatcgttaaactttgtccaaaaactgatcttaagctcttagtcccaagttctaattgtttagtctaatcttagatattactctcacctataccaccaaagggctaaataattatcatcattgcattcttcattcataattgaccccaacgacatataatataattatatttacagtttggagttttaaaacctcacctaagcagtgcacattaataattggcgacggtaaaaattagtgtagtggaaaaatgtcatcgaaaatagaagtagtatatatcaaaacggccacctcgacgagtagatcacaccaatgccaaccgttaattattaaaacagtacacgatattaccgaaaatttgccggaaaggagcggagctacaaaaacattaccagaaaaagtagcaagttgggcaaaataacttagtgtagggtgttctcctcgtcgagttgagtctagtggtgaagacggctcgtcaaacggacaccggaggtggctgaaaaatccgttcaaagtttgaaccgccaaactttgacttgcgattctgggctaacgacggtaaaaggagtggcgccgcttaaggggctgaggtctccgacacctgggggtttgaatggtccagcgtgtggggctggacggtggctggagatgggtcgccaaagtcacgccggtgatggagttgtgggttttcttttggtggtttgaagagagagaaaaagagagattgagtgagaaagaggacgatatgggggtctgattgttgtttgcttgttttttttttttttttnnnnttatatatatacatatatattttat

SEQ ID NO: 89929 - DNA, 2091 bp, Cannabis sativa
atttgatagatatcaaagtacgaggagcatgatttagttcatggacaatcactgaattagttaaattgaatgaaattagacaaaagtccttaaattcaacaacagtcacaatagtttagggagatttttaactatcagaaaagttcaagaggcataatttagtacatgtcaaagttcaggacaaaaatcctaattagcttattaaaaataaacttgatggataatattataatataaaaaatttgttaataaagtaaaattttgataatgtattagagaagagaagtcatactaatcacttaaaaatttgctcatcaaatgaattgttttctaaaagcttttttcttaagaaaaacaaaaaccatattatttattcacattttatataaactaaagatatgatataataatgatcacctgcaagcagtccatttatagggaattcgagtagtattagcatgcatggctcgttgaacatccttcctattataatacttttcggcatagccttctgtgcatggatcgtaccccgaaaacctccgccgaagaagactgtttttcagccttattaaatgttgattattattattattagaagaagaagagttggcgcaagtgggtgtgtatatgttgtactggtcgatgtcgccgaactcgtggttcatggcgtagtaaacgacgtcgtcgcatgcgtttgaggccgtatcggagctgaaattgcagtggtggagaatggagttgtatgttttatctgatatcatggcgtgactccaccaatatgtaactgttccaatgctatcgtagtaattgtctgtaactgcatttcctacctaagttttaaattattgaaaagaattgttaacaataataaattgaatttcttaatgcacaagattatagtaattttttttgatttaagcgtttatatattacatcatgttttacctaggactcgaacccaggacctccaacactcacacatccacctatggccacttgagctagccccaagtggttacacaagattatagtaaggagattatttttgtttctataagaatatattttttttctttttagtatatgtggaaaaaattaatccaaaattttctatataatgacatattataattatagtatccatcccatcagattttaaaaaatgtaaggtattgaaaataaggttcatataagcaattgcaggtgtgctaatttttaattttttttatgggtactaaataccattttgaaccttatgttttgtaaaagctattaattggacgctctgttgtacttaaatgacaaaatggaccctgtattttttaaaattgtacatataggatagtgaactaatttttcgtcaaaataaaatttaataataatccgatctagagatgttatgacaaaactgattatattttctgtattagaaattatcttaaagttagttatatttaaaaataaaattgttaaaaattgagcttaaagtcctatttttaccattttaaaaaatataagatatatctattttatcatttaacaaaagagaacgtctaaaataatattcatccttttttttatatgcacgcagttgataattttgggctataattttgacatagtaaaagtagaatgtgtaatattatattgtaatcatgtacattaaaatataaaaaaaaaaaaaaattataatttgtttatatactgaaaacagaaacgtttctaccaatgaatacaaaaatgatggttaattttaaaattttccaatatataccatttatatactataatacaaaatttttacttttagtagcattaataaaatttattactaaaaagcacccgattaaaagtgttataatctattaattaggttgtgtagtgatgatttgtagaaattaatattgaaaagccttttcaaaaatagaaataattgaaaagtgaaagaaaaaagaaaaagacacttacgatgaagcctttaagattaatgatggagttagagtgtgctttattgtaatcgacgatcatctttgccaactgcggaacataatgccctgcatgcatgtgtacacatttttataagtgaataat

SEQ ID NO: 89930 - DNA, 533 bp, Cannabis sativa
  modified_base (478)..(483): a, c, t, g, unknown or other
atcaagacattatatcgatagaatgtcagcactctgtcgatttatcccactgttcgaaatcatgacacttcttatcgatgggatgtcgataggttgtcgattatgttagattttttctatttttagttttttatattttttgtactttttcctaactaactttttttgtttaaaattacaagatcgactgtgtttttttatattgtacgatggtgtttggtgtgttgagggttttaattgagtttataaagccgaaggcagtttggcgttgatagttagagctaacacaactatacaacaattgcaccatattttatatgaagagttggaggttgatcctttggggtatgatttaaaattagaaatttgtttcttgtacatgaagggacaaatggttccgtcagagattattaagaaagaacgctattacgaattttatgtttactatgcaagtatacgcaatcaagtagtatctcannnnnntgaggtcgaaccacagggaattagattaagtactactaaactatacttat

SEQ ID NO: 89931 - DNA, 836 bp, Cannabis sativa
agtcatggaattgaaaaacctttcttctagaaaggaaaaaagtcaaaaagtagcaattgtaaatgagatcaactcataaaacaacattaagctacatccaaagttgaatacttcacgactcgcattattctggcttatattaaaaacgaggcacaagaatgccttgaaaaataatacttaagataaaatatgaattgaagacctaactattcatacgagcaatcaaaaaatatacaaaatagttcccaaagtgaattttttaaagtatttttaagttttctataaaaatatatatataacgatgttatatatggcagattaaagctgctcatacaatatttggtagattataaactactcgcgtataacaaggcaaactggaactactcgtataaaataaagcagatgaaaaatgctcgcaaatcgaaactagacaaattataactgctcgcgcacatacatagtagactaataactactgaaacacatcaaaggaaaaaatagaaacaatggaaatatttcctagagtatcaataagttgaatcagatataattgtttaaaattgtgaaataaaatgcaatgaacatatatattcaattcaaatataagatacaaggcattaaaagtaaagataaatgcataaaaaataatgttggccatccaacaatgcaaaattctttacaatataaataatgcaactaggggcaaccattgcctcggccaaaatgtcattttcctaaataataaaaagaagaagaaaacataaaaagaccaagcctacatagtaggggatttggttggctcttctttgtcttcttcaacctcatctacatct

SEQ ID NO: 89932 - DNA, 593 bp, Cannabis sativa
tggattaggacacgctacaaaacgtatctcgttgagacgtctcgcctagtacaagaacaacttgatttattcataagtcttccaggaatggcatgagcaccagtgtactgagcaaacttaagaactgctctttgaccataaggctttgcagactggacaatcatgtccttcaagttattacacttagttattataatatatattatgcgctaagtgttataataactgactcgcctcgtcaatgccttcttatacatagcgagatagatttctcgctatgcgttatctatgtcctcagtaggattatgccttcggacctgaaatagtttctcgtcaatacgtgaatcaatagtttgtacatccttatctcacttaagactgtgcagtcaacgagttacaaatatactctataattccgtatttaatgagctattccattctatatttaatgataaaaatatcaatatatttgttgatttatattccctgagattgacacgtgtctccttctgaagtacagctaaattttgggtataacaatttggcatttataggattgaattagaaaatatggtattattgaaagaagaata

SEQ ID NO: 89933 - DNA, 650 bp, Cannabis sativa
agaccgggacctagatacagaccaaaaccaagacccaaaaaccagggccgaaccaaggacccaagaacttgactcagacctaggacccgaaacccggaccggactgggactgggacccaaacacggacccgaacccaaacaaagatttggactcggactggacacgtacccaaacccgaaaatgaacttggactcggactgggacctaggaaccgaacatagatgggggacccagacctgggaattgggcccccaaactaggaccagaacttggatagggatctgtgacccgaccccagacccaaacctggacctaggaccaacctcgagacttgggattccgaactcaatgcttggacccgaccagtagtcggtgtatagatctaggacttagaccagaacccgaacccaaactcgaactcaaacaaggacttggacacataccaagtcccagacccacactcgggaaccaaaacaatatcttgaactggaactggattgggatcttggaacaggaccgggacctggacctagggccgaacccggaactggaccaaccttcagatcctaactgagaccgaaacccgaacctcaaccacgccccagacccaaatcaggacccaaacccagactcggaccaaaactcaacc

SEQ ID NO: 89934 - DNA, 516 bp, Cannabis sativa
gacttggcaaattttcctatgacgatgacttttccgacagtaaaaacttttccaacgacttttcggtgataattattattagaagttttatcaaatttatttattgcttttttttactttcccatattttaaacttcaattattttttaattttatatctttttgcattatttatttatgccatataaaaataaactcatttaaattttcctaagaaaattcccctaatattaagtcatactcagtggtgcaaggaggactatataactatggttgggacattctaattaaaagatgacaattacatatcatctatcatttcacttattataagagtccttttgtaaagataatttggggaagagctccttatttttttaaaaaaagaaaaatacacaacccctaaacaaaacttttaacagcaaaacctaattttcctactgtttcagtacaactgttaatatttgactgttgaacacactactacaacacttgatgatgtgcaaaaataagtta

SEQ ID NO: 89935 - DNA, 640 bp, Cannabis sativa
ttttatatataatatatatattttaacaaatcctttatcaggcgaaagttctagattatgttggcatattttatgaatcagtgataatagttggcatattttgatatgttgagtattttttttttttttttactgaaagagattatattaaatattattgacaactttatgtgaaaatttattaatggactaccatcaaggtgatataattttggttattaattatgtaattgtaattatagttttgtttgtttttttctttttttttgtgattttgaagcttattttaattaaaataatttatttgtgctttaaaattaaaaattaatttaatacaaaaaaaaaaagcaattttttataagcccgtttaggggccatttaataaatatgggttaactatttcataaaaaaatggactggcccatttaagcctagcacaggtccggcccaatataagtaatatgtgcttatgggtcagactgggcttacttcaaaaatataggtcaggcccagcccgacccgttttataatatgggtcgtgccgagtctacataaaaaaatgagcttttataaaaaaacgagttgggccgcctgaatgtacaacttaaaccaagtggaaattacatgtgaatttatattg

SEQ ID NO: 89936 - DNA, 1329 bp, Cannabis sativa
agcttcatccagaatttctttctttagctcaatgttttctggaacacacactcgtgctttgaaccgtaacattccactatcagagattgaaaagtccttagctttgcctgctatgacatcttctcgaatcctaagtagttcaggatcttctaattgtgccactttgattctttccaacaagtcggactgaagtgttatattatgcagtctctcactgacaaattcaatgtttgctctagacatctctgaggctaattgaggagaaatcattaccatattgaaaatatgatcaggtcctttgcgactcgatccatctgccacaacatttgcctttccaggatgatacatgatttcacagtcatagtctttcactaattctaaccacctcctttgtctcatgttcagatccttctaagtaaaaaagtatttgagacttttgtggtcaatatcgatctcacaccgctaaccatacaagaagtgtcgccaaatttttagggtaaacaccactgctgcaagctccagatcatgagttggatagctctgctcataatctttcaattgtcgtgaagcataagctatgactttatctgcctgcattagcacacaacacaaaccctgccttgatgcatgcaatacaccacaaacttctcttgatcagatggcaaggctaaaacaggggctgtaatcaatcgttgtttcaactcttgaaaacttccctcacacttatctgaccatataaatagttagttcttcctagttaactcggataacgacattgcaatcttggaaaaaccttccacaaaacatcgataataacccgctaaaccgagaaaacttcgaacatcagtgactgttttgggtctaggccaattcttcactgcttcaatcttccctggatctaccataatcccgtcttttccgacaatatgcccatggaaggatacttgtgacagccaaaactcacactttttgaacttcgtagagagtttatgatctctgagtagttgcagaaccattcgaagattctgctcgtgttctgcttctattaccggagcatttgttaacccaaatgacataactaggaactcataatgaccatacatagtacgaaaggctgtcttcagaatatcttcttctcagattctcagctgatgatatccagacctcaagtcaatcttagagaataccgtcttccccttaagttgttcaaacagatcgtcaattgtagacaaaggatatttgattttaatagttaacttgttcagctcccgatagtcgatacacatccgtagagtcccctccttcttctttacaaatagaactggagct

SEQ ID NO: 89937 - DNA, 531 bp, Cannabis sativa
ctcatttttatagatcatggtttgtttcttttatatttttcatcttattttgttttacttttttactgttctaataatttttacaaaggtttggtttaatggtgattaatgaatttcactggcataagttaatgattaggtgtattgtaaggaaaaaaaataattattggagaaaattttatttggttgggtaatggagcttcatcccaattagtagtgttatgattcagcaaatgaaccttatttggattttaaattttcttctacgaaattcacatcacattcagattgtataggtttgtggactgttttggcttgatataagataccaaaactatctgaacaactagatttaaaatgcatatatgacatatcattactccttttgctcatgttcattcccttttgaaaagaaaacttgaataaggtcataataaactcataattaattaccccaagtacaagaatggataatgtaagttttaagctttaattttttgagttatcatcaaaggattttcctttctgctt

SEQ ID NO: 89938 - DNA, 763 bp, Cannabis sativa
actgttttttttgatccctttctcctctcaaaaggtttgatcaaggcgttataacaattcgtccccttttccgtcgaaacggtttggtcagggagttatagcagttcgacccctcttccgtcaaaaaggtttggtcgaggcccttttaaaaagttttcaattttttttgaaactatgtatgggtttgcattgtgctacgtatttccagataaattctggttaatcatacatatatgtgcctcaagtaattttaaagaatttacgctttgtaattacttgtttgaaagaaatgattattttattcacaactggaataaaatatttcatcagtaatgtgatttacaatgattattctcaaaagaacttccccagttcaattgcttattttatcaatctttcaggagcatctggttttgatgtctcgggtcaatcccaaacattctcccacaattttttcaattctcaagtttgaaccctgacatataccagggttctaggtagagtaatcctagttttagttctttgtcttcgagtgctactggttgacgtctagctttccatgtgacagcttgatatggcaaccacagtgggccgatatctactcacgtcgcaattctttttatagaattactttaccggagtaactgccttttgattcttgtgacccgctccctctcgaaataaccgaagtatcctttcttctcacggaagagggttataatcttcagttgctcgagttattgggcagatcgaactgatcata

SEQ ID NO: 89939 - DNA, 542 bp, Cannabis sativa
gttatattatttatgaataatataatatataaattaaatatatgtaataaataaattatatgtaacatatgataatatatattagttgtcattattttatagcatgtggggagttacttgttgctattagtaacctccacacacgaccgactttgaaatatagtgggtcataggaaaaaaaataattttgagaccttatttagaaaaaataatgtggtatttttcaaaattagtaaaatatatgtatatatatataattttaaaagaggaaaaaaaattgggcccatggattaggtgggccctacgcacatgtttagcccgcctatgcccaaggctgggtctctttccataattatcactaatattaagagtttaaaattcggtgttacacgtcatagtttggaattcttaaaagttataggagttacaattgttggagaatgaattttatacttatttattgagtctataacctccatgggaggttatgagttagaatttcaaatggttttatcataaatactatataaaaaggtctaaga

SEQ ID NO: 89940 - DNA, 731 bp, Cannabis sativa
gaacctgctcattacacctgacatttatagtatctggtttaaaaccagatagattagcttgctcatactccaataaataactcacagcctgttcgtaaagatgctcaggtggcagcaacttcttattatgaaaaaggttatttctgtggttccaaagtaaccagatgaaacaaaaaaatatggcacaatcatatttatccaaaagatcaacagctaaagtaataaaatcataaatacttaatcttttattagtaagataaaagtcaaaatatggagaatgtttccaagccttcttaacattcacacactccaggaaagcatgctccacagtttcccattttaatttacaaaggggacagataggagattgtattatatgtctaaggaacaaaagggaagctactgggatggaattagataacacacgccacaccagatgtttaacttttgaagggaccaaagaagaccagattttcgaccaaaaacgcttactctgatcaaaagatgaagaagaaggaatatccctagaggtgactgctaaatgatacgcagacttaaccgtgaacagaccagaaggattccttccccaaataagatcatcactacaaccaagaccagatatgggaacagtgagaatatggtcaacaagctggtcatcaaaaaactgatgaagtttcataggatcccaagcaccagatggggagaggaaaaaagaaagagtagaatcagag

SEQ ID NO: 89941 - DNA, 547 bp, Cannabis sativa
cattgaccgactgtaagtggttataggagcttttgatagtgaaaaaaccaattggatccttgatccaaaaccaactatcactcgcaagattaacactcaaaggcatcagtttgataagctcaacatcacgggtatcaaataaatcctcgataagctccaagtcctattgtctactatctggcttcatgagttgagacactttacaattggtcagtgtcggatgattagataccacacacaggttagcttcaaataaaagcgaaggagtgttaagcacctcagtagatgaaccagttcctattcgtctacgggcaccatctctgagtagcttttgtgactcaaagacactgcgccatataaagctcggattgcaacccaactctgcctccaagaataaacagtttggaaaatatcgagccttataaatcctacccacaagggagtcctggtacagaattaactgccaaccttgcttacccaacaaagatagcttatactcacgcaaactctaaaaacccatcccaccagatttcttatttttgcatag

SEQ ID NO: 89942 - DNA, 722 bp, Cannabis sativa
ttgattttctaagtatagaaaatcaaatttcccttcattaatttgaaacattgtatatcttcgttttgtatgtcatgtatttgggtccttgtatgccaatgtttaaggtgtcataataattcttcttctcctctttagtgatacaaatattttttacttatccaggttaagattaaactttagtaaaacatttagtaattaaaatattgaaaataaatagaaaatatcataatttagcattcaattttattttatgtaaattggaagatcatccaaggcagcattcaatgtagtcttacaaaaataattattcaataaaagttttatcaaatttaacgcaacattgttaaatttaatacgcagtaaatatgtttttttttttttaattattatttgtttacaatagtgttgataaacaataatgagacgtcaatgtacatttttcaatttcaatattatcattaaaatattttgtttatatcaatttatcaatttattaattatctgatagttacttttaatatgaatttgtatcctcaattctattgtgttttagagcttaactgtaaaaaattgtaatatttgttcatatttttgtgtaaaatttaaactttctttttcaaataaaaaaaataaattatgcattgaaagtggtctaatgaaaacaataaaatcctcttaaaaaaaaagtaaaaatgtcacccattaattatgagcattat

SEQ ID NO: 89943 - DNA, 1826 bp, Cannabis sativa
atcatggtgataaatgtggggctaagccaagcccaccatctggatcgaaaatgaagaaagaaacaaacttaatcagtcagcctcttctggaaggaacatttaaagctgtacctaaaatggtgacacaccactagagacgaattactactgtatatgactcttccctttcatttttattagccctcttgtctttagctaattaactttaaggaacactccctaactaaaccacctaatcaaacattgcttacaacttaaaaacttaaattttcttaatactactctcatatctataaaaatatatatattaataaatcttatatgagatgcaagtaggccaacaaaataaattgctagcattatggaatgttaattgaaggaaaggtgacaagaggcactacttttatgtgggccttcttcactttttgttgggacaatattaagtacttttatccctgatcagtcaaaacgtgaaggaatattttttatataatctataaaatataagatacttttcggtgctaattgcccaagaaatatgcttaaactaggtaattgttattagcaaaccctttaaaatatatatgatgggatatttgattgatttgtagagtacatacttaatagtcattgaataatggccaaaagtttaagaatcaccactcttcccatttaaagctgtgttgaagatataatgcaaatgttttgatcagttgtccttttcaattcatttaagtcttttcttttgctgtaattaatagaatatatatctaaagaaaaaaaattaatagaatatatatcatttcttttaacagcatagaatatatatcattgaagtaggaaaatgaatattgttggcacttggagttggggttttctaaatagaaaagtgtagatgatttttattaaaaacaaaatagtgaataattgaagtgcaaatttaataaaaacaatttcaaaagagaaaagagtgcaaaaaatatcattattcatgatcatcttccataattaaaacaaaatcaatctgttgagcatatatattatccacagtggcaacaacaactaatctgttgagcttaccatctcaccattagcaaagttcgttatattgatccattagtgcttaatttcatttttttcatacttcaatcaaataaagtttcgcaatagtaaaatatttatgtgaaaacaaagaagaaagtcaaatttaagtaaaccctcccctaaagaaaatgggtctttttgtgaatattatataactttttggtagtgttttttcaaatttctttttattccgaaaactaagtaattattctaaatatgaatcttaataaattagaatcaaaaaaataaatcaatgaatacagaatttacaagctttctctgtattggaaacacatttcaactgagtagtacttgggtccccaagaaccgagtaaagtaacctcgactataaaatcaatcagaatatattttccaattttgatttacaaattaacaatattgttgacctcaaaaagtggccaacccatagcgaaatcgtattaatttgatgtttgccacgtgttgtacaacatgaacaataaagtaaacaagacaagaatttttatagaggttcgacctccttagttagcaggtaatgacctactctccttttagttgtattaatacctagaggtaatactattcagatcactataagaagaatatgatatagctctctataaggttacacagtatggatcaagtaagcaagtctctaatgagagagaggtacatacagccttagaggcgtgtgagacagaggaagagagagccacttgggc

SEQ ID NO: 89944 - DNA, 593 bp, Cannabis sativa
aatggatcagagaccctaacatcaaatgaaccattctaatggccaaaggcaaacccgggcaaattcttcttccaccaccgaatggagtgagctcaaagtgtcgacctttcacatcaatatctgattccaaaaacctctctggaatgaactcattgggattttcccatatattggggtctctggaaatggcccatgcattgactaggacttgtgctcctttaggaaccacatagccacatagttccacatctgtttcagctctacggggaagcaacaatggagctggtgggtgcaaacgaaaggtctctttgataatagcttgtaagtaagggagtctcgatatatctgattctttcatttgatttcccttgccaataacttggttaagctcagcttgggctttggacatggcttctgggttcttcagtagctcagtcattgaccactctaacgtggatgaagttgtgtcagttccagctgcaaataaatcctgtacgtaaatagtacatatacattaaatacgagaaacaagaactactcaataacaacatatatattaaactcaccaataagagatgttcaatggtggtttt

SEQ ID NO: 89945 - DNA, 624 bp, Cannabis sativa
cccctaattttttttttttttttataaatttgaggcgtcaattaaatatcactgttaaatgctaactacactagtgtacacgtgaaagtaaaacttcgaagctaatataataataattcaattgatatataacggtgatatctaattgacacttcaaatttgtaaagagaaagtaaacataagggattttttttcacaaaaaaaataagaaggttaagtgtaaataattaaaacgaattttgccataaataaactgccctttagtttttggaagatttttttgggaagactcgagaccatttaggaacaatgtgaatccatcctaacaaaatatatattaatagtgattttttgctaatgtttgtacagtttctcctttggacccttgagtttatatggtttgtttattatttttttttttaaatgagtttttagggaaatgataaggttaatattatttttgactgttgtgcaaaaattattgattaaattcactgttttgtaagatgacattgtatttttttaaaatggtataaaatagtacctgagctcaattttttgatattttttttaatataaccaacttaaaaaataacattcacccaaaataatattactattcta

SEQ ID NO: 89946 - DNA, 771 bp, Cannabis sativa
cataaaatatatatttttaattattagtgactactcaatgattacatttttattgtaaccataagttaaatttttttacctaataggtcatttttttttagaattacttaattataattaattaaatattgaacaacgcctcttttagtaattaatatttataaataatttatttttctatataaatccttactataattattttaacagttaagttatttaattataatacttataatgaaatttttagttttatttttttacaaaaattagatttctttttacatagattagatacatagagtgagggttggagtatctttcctggcatgactaataagactaccgagattcatagtgtttgtaacgccctaatgaaagccacgctacgatcaaccattaaacatcacctaatctcgctaaactgagattactaagaataagagaaaaatttaaactttaaatttattacagagtaaaaacataacttgtaactatttaattttataaatatttcaaaagatacacaagtttcgggatcctgtaaaaacctttgcaaaacattacaagttatttttacatgccgaccaaaacggcaaaactgagaatacaaaatacatcaactagtacacccaacccctgtggtttagtgtggcccgaacatgtacaatacaccgcaaaactctcgaactcatggctaatcacaaactaatttatcctttttctgcatagtagagcacctgtgaaccaagtccaacaagatagtataaa

SEQ ID NO: 89947 - DNA, 749 bp, Cannabis sativa
aaatgaggaagtggaagtggaaaagggttttttgcatatttgatcctctggacatgattaaaagcgaaagtggaaaaaacggtaatttaattatgatgtatctcgaaaccgcaaaaccgccaaaatcagaggatatgtgtcttttcaaaaaagaggaatatgacggcaatagtgatgagacatttaaatttccttcaagattttatgtgcattttttgaacaaatgatatacaaacactttcaaaataacttttcatttaaaaaaaaaaattaatacaatatttatcgaaactgtaaaaatatgacaaagttagaagcttagccggaacgattaataaatttatcagtgtgcacgttatattcgaggaacgataacaagaagttatcattataaataagttctcgtgaattttccacttcttttctcatccaatagctccgtccctcctcaatcgcttcaatgtattttttaccatattctcgttgaagatcacgaacttctagaatctctggagatggatgcttccaatttggacagaaagaattacgagtaaccacctctttcattgcaaacaagtctcgatcaattgctctaagccgatgtcctatttcatcctgtagaacttccatctctccacttaagtatttttcttttttgtttgagaacatagatctcgcacgaattacttcttcaatcttcgatattttggcaaaaataacatgaagatttgaaaaattggttagtttag

SEQ ID NO: 89948 - DNA, 1365 bp, Cannabis sativa
agtctctttcttataatccacaacgatccattacttcgattgattgtgtacttttctaaaaaagaaaaaatgaacgatctgttcttttttctgatataaagcagatacgttaaagtcagctagaaacggatccgatcatcacacacattatacgaatatcaacagaacaagattcagaaagccagaactaagaaaaactcgcaaacttaacaattgaacgatcaaaaggagtagagagtatgaatcaacgtacgatccaaaaaatacgatcaagatcaaaaccaaaatcaccaaatctcaaaatgacaaaatataaaactgcaataacaaatgtaaagtaaattaaagaccttcaaaagctttgcggagttgctcagcgtcctcaacaggagaaggaaccacagatggtacagtaagagtcgccattgtcacctcttcctttttttctctctctactgtaatttagagtctttctttctctcccttatatttgaagtaatggaatgaaaaaattgtgtgaagatttggcctttaatagccaaactaatacagttttattaccaaaataagatcttaaaatacggtaattgtttaattacaatttcatatattatatattttttaattatttccttcttctttgttttcttgctaaagtaatgattgtgtatttggatctcaaacagattacattctatgcttgacacgaacaacgacaattcgtatgccacgtggcagagtatgacagctcatgatttcatgtacaatttgccgcgttcatcataagatcgagaacaccctgaaattattttattttttatatttctgaatattctagaatttacttagtgaaaagcatacaggctagctttatcttactttcgaaggatgaattattttttattaaatcgatgaaggaacaatatataaatattaagtaaaagtaaaaatattttaattttctttttgatcaaagtaaaaatattacaaattattgtaagataacataacttaaaaatacctacaaaacaaattaaaaataacgttacttttatatatagtcccaataacatataaataaataagatttatggtgtcaccactccattcacctcattgaagatcatttactatatttagatggtagatagggagaataataatagaccaatcattaaatttagtgtattcagatctatcaaaaaaaaaaaaaaagtgtattcaagaaaagtaaaaaataaaaagtcattttgtgtatactttttttaatttagaaaaagagcattctaatgaggacgaggcaaatcaggtacttttagaaaatactttgctattataaattaaaatagtatatcaattaaaatt

SEQ ID NO: 89949 - DNA, 679 bp, Cannabis sativa
aaaatattaatttataattaatagtcataatattttaaattttgtgactaaaagtaatattttttgtagtggagaaaaaatattgtactaacacgtggcacccttatatatggagcttagaatatattttgtaaattacaagattaaatgtacgatcatataatcaatattgtgaacatttttagactcaatacctaaaaacaataaaaaaaaaatatataatttcagaaaaaaaaatataaaaataataaaaaatacaaaatacggtatgtgtgaaatttttaacattcttatagtttttttagattttatgtaaatattttggtgtatatttatattgtattttttgttatctttatattatattttatgtttttgatattatattcttattattttcatgttatttttataaaatgctgtaaaaatataaatttacaaaaaattatattttatataattatttaaaaaaatacgtgttatttgttccacatttgagtaattttaaacttgttatgtttaattagtatattatacttaatagttactaagtcttaattttatgataaaatttgaataattagataattgttatattaggtgtgattaaatttatcaaattaaaaaattaattaatgtatattttgtcccatatcttaacttttttttttttttgaaa

SEQ ID NO: 89950 - DNA, 950 bp, Cannabis sativa
aacaaggtgtgaagattctaatttggtgttgaactgggaaaaatgccatttcatggttacggaaggtgtgataatcgactaaatatgtagagatatataattaaaaaatataatagtggttgtatgacaacaattattgaaagtagatgattaccttaaggaatgagtaatttggtagttagggctttgaggtttgagattaactctaaggcctattgtgttgttgggcctaggtaagttatattaaaatcgttggtgccaattctttttattataggcataggtcagatgtatgaaataaggtgattacatgataaggttattttaattattagcccattataagtttaagcttattttattataattatgtgaataagctagtaagggttagaatattctttaagtttgattgtgtacttcagccgttgagatatagtaagaaagtatcacaaggaatttaaattatgatagagaaagatcttatagttgttaatataaaaatatatgtaggtagttaacataattataatttaattttctctaagtatttagagaaaagaaatagagtacaagtaaggagataaactattaaatgcatgcaaattatgagataatcttatgatactaagatggtttaaatttatttagttagtttggtttatgatacacatgtagaatagggactaagggtgagaatttgtctaattatatatataatggatgttgcattgattttgtgtgtgtgtgacgtgttgataggttttaaaagtaaaagtttgggtaggttttgaaatttaaacaaagatagaaaatatatttttattattatcatcattagttaaatatctaataaatgtttgttccactttttgaggatttaggtgtagtcgaatctagggtctgttgagtgatatgaattggcgtaggatatatgtatatatatatat

SEQ ID NO: 89951 - DNA, 1232 bp, Cannabis sativa
cattttatttaccaaaagggtattatttagtaaaccccaatatttttttttcaaattattaaaataagaaaatccctcaaaaaaagggaagattcggttctcttagttcaccaaagaattattaaaagtcatcccattcaaaaaaaaaaaaaatcattaaaagttatcttgctattgtggtgaacctgactgtagaaagcaatttatttggtctaccattattagtatttctaaacatagacttagtatttgggtcacactctacagttttgacaatcccaggacagttgtggacttgatttcttggaggtaggagctaaaatgagaagatcaaattcacccaatttgcaagtactctctgttggatggcaaaggaacaagtctatgaaggtgtagtgtggaattgtgcttttaccatatattagttatatttatgtttttccttgttctaagaatagaatttaagcatgaggatgagatagatatttggagagtatgtatcacaattgaattcatcgttcttgtctcctctaaacgtttttttttttttttttctaagaagagaactagtttctatctattttccccacttgttttcatcttcattgttgcccaacctttcctttccataattacagacataaaaaaaaaaataggtaaagaagatggaagaaaatgtgaactgtgaagaataactttactatttttttccattaaaaaacagaaataatggcaatatacaccgccggttgcccaattttagaattcttttacccttagtttactgtggtgaaatcataatggtttgattctaaaaagtaacatttttgtagcatcctgtcgctcacatcaatttgtagtgttcaaaacctcaaacagaagtgaggtactacataattagccaactaataatattgaaacataatatttttattcttctaatgtgatacaaagaataatgtcttagaagttttttgcaaataacatcttcaaaacatttttcatctttgttgttaaacaatacttggttctccaaatccttaaaaataattaacagtctagttaattgaaaattaaaactaaaaaatattttatggagtatctaaattaatagtctcttgtgttgctacttctttcccaactaagtcacgaaatactctcattcgtacttcataaggagtttgccatccttctgcacatgaatagtggtacctaacccaattagtagcaac

SEQ ID NO: 89952 - DNA, 1604 bp, Cannabis sativa
tcattctctttcaatctctctctccagaagctaaaatagtatcggagccaaccgattggtgagctcttgcttttgcttttcttcttcttttttgttctctctgctcctccatggctcgaggaggaggaactcaaacttgaagtaacaacaatggagcagctgaacactctaatctttttgcagctctcgatgaaagtaacaaatttcccaccattaatccacgtagcccttacttcctctccagtggtgacaatgcttcttcatctctggttcctaagatacgtattggtgcggataattacagttcatggcgaaggtgaatgatggtggcattggcgaaaaacaagatcaagtttattaatagaaagattttccagaacctgataaagatgatgaggactatgactcatggatcatatgcaacagtttggtaatatcatgaattttcccttacaattgctgatagtatcacgtacatgaaaaatgcctcacgaatctgatttaaattgcaagaaagattccaccgaaagaatgctcctagaatttttaaagtgaaaagatcaatgcagaagttgactcagggatctaatgatgtgacatcatactacactcgacttaaaggattgtgggatttgctgcaaaaatacaggccacaacctgtttgtacctgtgaagcaatgaaaatcattcaagagtaccaatatgaagacaaggttcttgattggactcaatgaatcttatctcaagactagatctcagatcctacttcaagatctttttcctaatgtcaataaggcttttgcttccataatcctggagaaaaaacagagaggaatcatcattctttaagctgaaaacaaccaaccttcaaatgacaattccaatcaatttgctggaagtacacatgacaatcgtggcaacaacagatctgatagtcacgttcacaatcgttgtgatcgatctgacaatcgacctacttgttctcattgtggtattcctagctacaccattgcgaaatgctgtagaattcatgaatattccttggtcatcatttaaatggcagatttccaagggaaactcttaatcaacctatcaatcagcaaggctgatcctcttgacaatttcacaacagggagtgaaatgaaggaaggcactaatgaagaacatgacctggctgcacagtgtcaaaggttgatggcaatgctagcacagaaaatacaaggaacatcttcccaaactcagcaatctgatcagcctattgtatcaaatgtatctagtaaggcatctcttattctcaaatctagtaggatcatcgacactagtgccacatatcatgtgtgctccaatctttccttattttattccatatagaataaccacaaaattacatcagtaagtttgccaaatgaaactaacactaaagtttcttttgttggaaatgttaagtttcgtaatatcatacttactaatgttctgtgtgtacctgacttccaacataatttaatttctgtgtgtgccttgtctaattcaggtaactactcttttctttctcttcctcacaaatacattgttcaggatatcaccaagaatcaagtgattgggat

SEQ ID NO: 89953 - DNA, 527 bp, Cannabis sativa
aagtttttttaatatgtcttgctgagttttcgggcttgttgtatgtcgtgcttttcgagctagtctatttgtgcttacgtatcgtgcttctcgtattgtgttgtgcttaaggacatatttttggtgtcgtgtcgtgccaatttataccatcgtgttgtgtcgtgcctaagcccatattttttcgtgtctagtcgtgctcatgctttttggactcataccgatttcgtgtcgtgtcaaaaagctaattaactcgtatttacagcactagttgcaatgatcatccacaaaatttttttgtgtattaaagaaagaatgaatcatcaaatatatatatagtaaaatttatagtacggtttttacatgaaccttcaataaatatataaatggattttttcataaatatgagaaaatgtagtagagtttacttttatatggcataaataaataatgtaaaaaatgtaaaattaaaaaataatttaagtttagaatataggaaaagaataaataaatttaataaaacttgtaat

SEQ ID NO: 89954 - DNA, 519 bp, Cannabis sativa
  modified_base (225)..(240): a, c, t, g, unknown or other
aaaaaaaaaaaaaaaaaatgtagttttaaaagaaaacaaaatatttttgggcttctaagctagatgggctttaggtacagacttaacccacatatgcttagagccacctgtatactatctttaagggaaatttacatgatgtactaatttttgttatttttttacaaaaatactgctaggcaatatttttttactttttgactgtgtttttttataagtttcatnnnnnnnnnnnnnnnnttaagttttcactggtgttttttagttgtcttactggtgttttgagttgttctgttttgtgttctactggtgttttattaaaacgtagtatttttgaaaaaaattccgtgtgacagtttgtaagagttaatccaaattttaatatttttgtaagtttcccgtctttaattgtaattacaaaaataaaaactatttttagacgtcaatttctaaaacacttacagaaactatcgcgcaaaaaaataattgttgtaaagaaacaagatatttaaaaattaa

SEQ ID NO: 89955 - DNA, 1225 bp, Cannabis sativa
attaagtgtaacaaaataaactaactacataagaatttttaccaatttttttgccgtaaaaatccttagaataataataatgataataataaaactggcatttcccggtcactttgatatttccgttaaaacctttcgtttattaaagcgtacattaatgacaaacccacgcgacagaacgaacgaaataactctgagagaaagaacgaaagaaagaaagaaagaacgaaaagctttagacctatctgtctaataattaagctcagtactgcaaagaaaactcaataaccgtatccatggcggaccaagacccagagatgaccacccatggagatccggaatctttcggggatggtagaaccaatacccacttcgccaactcccgctgctcctgtttcttccttccctgtttcgggtcacgccgttcctccaccggtagattggtctggtgggagcgaatccgggccgtcgaaaacgatcatcactggtggtaccggggaatccgagctttcaagaagctccgagagtggtcagagattgtcgccggacccaagtggaagacttttattcggcggttaaataggaacaaaagtaacagcggtaacggtggaggagctcggcatgggaaattccaatacgaccccttgagttactccctcaacttcgacgatggtccggggcataattgtaatttggaggaagaggaatacgatggatttcgggatttctcgacccggtacgctgcaggtgcgggttcgggtcaggttaagtcggttgcgccaatagaattgggtaaagacgtggcggtgtatgcgtaagataaaataaagcgctgtttatgctaacatgcgcgcgatggcgaacaaaacggctgaatgagctgagaagtctactgtatgagctgtatggtttgactcgagtgacggcgcgttctttaacggtagacttttttttttctttctttaataatttttttgttcaaaaaagtaaataattatagtttgtacaaagatagtggaagtaaacaatataaaaaaaaaaaaaatgttgatgatgatgatgaggattgagtaatgttgaagaagaagatttgtattttttatttcaagcttgtgtattattcatttatgtgggtaaatgaatatggacacgtaataatgtttagtgtcgttttgttgaaaatattcttttttttttaatacagaaatacaaaaagttattaatg

SEQ ID NO: 89956 - DNA, 948 bp, Cannabis sativa
  modified_base (158)..(160): a, c, t, g, unknown or other
acattttacttctccaaattaattttagtgagatttttacttctagtgagacctttcacttctcctaacataagtgaagcgaaccaagggtctaacaatgacacgaaaagaaatgggaagattctctatctatttttataatattattactttttttnnnaaaaaaaaaaattatttttattaactaaaaaaaaacaaatatacatttttaaaatctataaataaaaaataaatgtaaatagcgaataagtacctaaaattttaagtttgtaagcggcataaacccaatatttatatttagcagcataagtgcccaatgtttgtaaaactgtaacttttctcgagtttcgtcagtacaaacttcattttgaatcaattaaaataatatttgaaagtaactgaaagtacatgtttctgtttagacacaatgatctagaatctgagccttatatgtgccctgttttagacaataacaaagtctgtactgacaaaattagagaaaaattacagttttacaaatatagatacttataccgctaaaaataaatattaagtttatgtcacttataaacttaaaacattgagtatttataccgctatttatctaaaaactaattacattctttaacaatagcaattcagttaattaaaccattctgattaccttctagttatgtaaataaaataaaattattctaattttcttttcagtcagatcagtaaataatataatgaaatatttttgtttagtaaattttaattttttttttctaattttagtttagtaaacatgcattaaatgtatttctttccataaaaaaaaatgcatttcttcaattttttccacaaaaagttttacatacatatcttatttgattgaaactaacataatttatggatattaaattagagagttttgtgtcctttttaatttaatttaaaggttag

SEQ ID NO: 89957 - DNA, 630 bp, Cannabis sativa
aaaaaataaatataatcaatttttatctttaattatgtatacattaaaaaattgaacaaaaattatttttaaaataaaaaattacaaaattatcaaaaacaccttaaaatttaatcccatgttaatagaaaaaatccaataaaagagaattcgttttgttaaacacaaaaatttaaaattaaattaaataaaaaattaaattcaaaacctaaaaattttgagaacataaatccctaacccctaaattcacattcttctccaccttcactttgcaaaccagaagtggtttcatgttcttctctcttctgtgattcaaggggtcagcttcatcccttatcgtcttcttggaaccaggagtcatcgttcttctccctcatcggcgtcggcctgtgagcactcctcatcgacgtcttcttcctcctcaccatcggagtagtcctatttcaccatagtgcatcctccttttcccctcttctcgacagcctacaaaccaaaggcatgctttgatcttctttatgtctcttcttgttcccaaatcgtaggaagaccaccaatccctcattagagtttgtggtttgtgcttttatttctaagtttgattttttatttatgtttctagatttgtggttt

SEQ ID NO: 89958 - DNA, 626 bp, Cannabis sativa
tatacaaaagagtttcaatactgcaaaataagaaatagtattgattgaagaaaagaaagaaaaggtcaatttgatcattctattgagcttaaaagtttcaccctttaggagtagctcaaatgacaaaaagttttgaggtaggattccctttcgatacccgattcttctattacattacgttacattacagagaagtccattctctacatgatcaaattcaaattcctataatttattggttctagaatatcttgtagagttaggcgaagatcttaagtttcatgaaacgaaattccacccttcggtggaatcttggtcatgggtttggatcctggtaggggcaccgaatcggtatttccttatagtttaattgaagatcttagtttcatgaaacaaaattccaccctttggtggaatcttggtcaagggttcggaccctggtaagggcactgaaccagtgtccaaaccggggcatcctatagttttcagttggatacgaaaaccagctaagataagacaattaattaatattaaaagttgatatgggggaccagcctaaaccagtcaagctaactccaaatacagcttagagagatgacattgatagcaactggtcttgacttgcc

SEQ ID NO: 89959 - DNA, 557 bp, Cannabis sativa
tcctacatgaaaggaaatacaatatactccgagtaaaacttgctccaaaatactatgtagaaatttgtacttgccacctgcatgtatataatatttatacattatcaaattatattcatgcactttaaggtgtgttctctaaaatttttgttttattattttttaaatgtttatagaatttgaaacacaatttctatttttatttttaaaaataaaaatgagttttggtaataatttaaaaaaatgaataaaaaaagaaacagacaaccatttggtaacttttatttctcttttttttttcctttcgtttttaacttatttttgttttgaaaattttaaatgtatttaaaaaattaaaaataaaaaccaaacacaatataaccctttaattttatggatgctgatgctctgttattgggataattaatatcacttttttagttattgagtagtgttaagcattcccattatccatatgctggattttacatacctttatctttgtgtgctctaatatccaatcctgaaattaagcacatatttgaagaagaaaaaaa

SEQ ID NO: 89960 - DNA, 936 bp, Cannabis sativa
gctgaaccgctcttccgatcttcgagacttctcaactctgggatattttttttttcttcccacgtgccaaatattgatgtccacgtcaccggggtcaatttctaggttaacagaaagtttatttgaattgtaaatatctttcatattcaagggagtgtaagcggtgctatgggaatataaatagtgtgcacaatcattagtaacaaagactaaaaaatcacttgggaagagacacttttgtagaacataactctggagaacttttcttaagtattgagaataataaaactacgaagtggattaacctattaccgtgaaaagatggtgaaccactataaatattgtttactcgaaatttgataattctgtgttcaatatgcgttttacaatttttttagattcgttaaaaaaaaaccacatcaagaagcttgtttgatctctattatctcatcaaaccaacaaaacatctccattcaatgcttctttcaattttgaatttttttttcttcattcattagacattattgtattatgtttcttcaagggttaaagaattacagtgtacaaaatattataaatgtttggtgaaagagaatttggaacaatgatagtttggtccttgctgtaaaaattaatgtgtaagtacatatagtaacaatagtaataaagtgtgacaagtaaatcgtctccactaaggttacaaattataataaatataaatatttaattaatacaatttttagaattaaagaaattaattgattggtttttgtaaacttaaaactgaaataaaagaaattaaaatatgcttaataataaccacaattagtaaagagaggacatgaagaaaaagttatcaatggaaaatggacttccctattttgaaaacgtaacaatagcattacttttagcattacttaggtgccgtttggtaac

SEQ ID NO: 89961 - DNA, 1529 bp, Cannabis sativa
gatggcaaaatctggccgacctggcccccatttaagcaaatgttaagggtggtagtggagatacattgggaaatccaagaacgcattttcagagggaagcccatgcaatccagagcatggtcaatgaaactccagctcaatctgtcataagctttaaccaaatcaattttaattgcaaaaaaaccttctctacctttcttccgtttgaaggaatgaatgatctcctgcactataacattattatcttgaatgttcctaccaggaacaaacgctgcttgggtagggcagattaaagtaggcagaaacggttttattctattcgcgactatttttgaaataactttatagatgacgttgcaaagggaaattgggcgaaactgaccaggtctctttgggttcggaaccttaggaatcagaactacatttgtagcatttattcctttgtgcatctggccatttctgaaaaaatccgaaactgcatcacaaaagtcattacccacagaatcccaataatgtttgaagaagagtactgacattccatccggccccggagtcttatgactattcatagcaaacaaagtactcttgatttcctcccgcgaagggcattgaagggtttcctgaaggtcctgagaagacaacctctcaatgaacaatcgcctacaattcatattcaggtcaagatcagatccttcaaagatacttttgaaaaagtcgataaattcacgaccaatagagtctctatcagtgagccagacattatccttactcaagatactttcaatggcgtttctccttcctctaatcgcagccgaaaggaaaaagaacttagagcacttatctccttccttgagccaagagattctggctcgttgtttccaatagagggcttttctggattgcatttcgttcagcgacttgcggagttcacactcccggttccaatcccgagcacccacagggagtctttggatgctatccagtttctgctccaggtctttaataacccaatcaattttaccatactgcgttctgttccattgcaaaagcgcaagcctggtagcccccagctttttaaagaaacgagctggagcccaagagtgaatcaccgaatcccaggcattggccacgaccaatttacttctatcatccctcgtccagccttcttcaaacttgaaaaatcttttaaaaggagggggattaccactagtgtttagaaaaagggggcgatgatccgaattacaagtatgggaagagcatagaatagctttagggaatagctggagccacgcgtcattcacaattcctttatcgagagccaacttcacatggcgacttccagacctatggttgtcccaagtcaacttatcaccttggatgcttaggttgatcaaccctctcggctctattagattagaaataacagggataaaagggtctcttcctgaagaaccttctctttcagagttgctaagcacaaagttggtgtaacgccctaatctatagggacgccacgtgtgtgattttat

SEQ ID NO: 89962 - DNA, 800 bp, Cannabis sativa
actccacacttgaaaactctacaccaccttctttgttatttaaaaggatcgccaggccaaggtattctctactccacctcctctttacttcacctgcgtggtttctctaactctgactggacatcttgtcccataactcgtcactctaccactagtttttgcatattccttagcgactgcctcatttcttggaagacaaaaaagaaaccaactgtatctaaaagttctgatgaagcagaatatcgtgctttagcagctacaactagtgatgtcacatggatacaataccttcttatggaccttcacataacacaaccaacaccagcattcatctattgtgataatcaatccgctatccacattgctaacaatcctacttttcatgaacggacaaacacattgaattggactgccactttatcaaagaaaaaattgccaattctactatttgccgcatccctgttagcaacaatctctaattagctgatgtctttaccaagcctcttccttccactactcttactactcacctttccaagatagccatacacaatatatatggtccatcttgagaggggaaggggggtaacaaatttagtggttattttagttaggttcgtttatgtattgttacttgtcagtagggcagttatatcagttaagttagttaaccgttttctgttattatgtttctgaatcttttacttcagatggttgtactctgctttggcctatataaggcttgttttgtactgatagtaattcattcctaataataaaaatatttctctattacttcg

SEQ ID NO: 89963 - DNA, 561 bp, Cannabis sativa
atttaagtttatatttttttaatattggggtgtatttatcattttatggagtgcaaataaaactcccctacacactattttggtcaataatcttttcatatggccaaatttaccctctattttcaattagttaaattatgttgtttgttttccatatttgaaaaagaattaatattatttaaagtaaaaaaaaaattgcattaaaatagatgtaaaataataaatgaaaatatatatgtgtgcattttcgtctctcacaaggtatagacccaaggggagtgagtgcttctaacagagaggacaaaaataattaaagaaagccatctgagttcgtggaggacatcatcggacactacactcacacctcattgtattgtagcattagtcgtcttcaggtgtgttttttttttttctttcattctttttaacatattattttttgatgttttcttatcagttacattataatggggcaaatgaaaatgctttattttcttacaataagtaactaactgtatatcatattaaaattattgaaatatatataattgaatatccaaa

SEQ ID NO: 89964 - DNA, 2011 bp, Cannabis sativa
cgggatcggttacatgggccatataaggcctaacccaatttcgacccatataagtcagcccacgatttttttaacccatctctatttggcctactatttttacaaccttttcggcccagtttcaagttgggttggcctagctcccttaactcattattcacacttataattctctctataagataagagtttctctctcttcatactttctttttctaaaaattatgaaataaagctaaacttaattattttcttaagttatcttgtaacacaattagcttttgtgataatataaaatcgattgttttttagttacaacagttaggatttgattaaaagagtattgaccgtaagattttggggattaattaaatattttttattatgacaagtttaaattttattttattgttcttattttcaaaaaaattaatttttttttgagaaattaaaaaaaaaataaaactaaaatgtgaaagtatcattccattaaaaatagtattttccaagaaaaagttagttagtactaatttcaaataatttaatttaaacttgctgaagattttttttttttaaaatttaaaacaattattttgagataataataaataaaaaaaaagtgagtatattatagatatttgtttgatattctaaattccaatttagactatccaattgattcctttttttttttcgctcgaatggattaattcctgctggggaaagcggtgtgggaccctgtaaagtggacccgaaggcaaagacgcgaaagagcacgctgccgtggactttactttcttcttcttcggtttcattacttctccttccaacccaccaacaactgaaacacttggatcacccaaccaaccaaaaccaaaactaaagaaaatagccaacaaaaatggcgtccacggagggtcttgtacctataacgagaactttcctttcatcttactacgacaaataccctttcgctcctttatccgacgacgtctctcgtctctcctctcaaattcgttccatggctaatgatttactccgtgaccttcccccctctcaaggtatttttcgaaatttgtgtgatagattttcagggtattttgatgatccttttgttgttagggctataaaattttggttttttctcaatatagcacagttatttttctgttttcttaggaggctctctcccattataggttagaaagtctttacatttaaatctttttttttttttttttggctaaagataattgtattgaaacgctttgatgtgatactgctctcatcatgatttttagcttttagtgtaacttaggaagcaatgtatgcaatgattgcattgtgtattgtatgtccccgaatgtgatgcttttaaggtaccaagtatctcaaactcatattcagcaagagaaaaaaataaaatcaaactaaaatcaccttttcttttgttcttatttattttttactttttgtcgtttatttgttatctgggttttcctggttttttatatgtttttttttttaggtgaaagcttattattaaatgaatctgactctccaccaccccataaaatcgatgagaacatgtggaagaatcgagaacatattgaagagattctcttcttacttgatacatctcattggcctcccacggtaagaataagataaaatcttgctttgaaaactacctgaagagctattatgatgtctacttgtataccttgggtcttatggttgttttacattaatttttaatcatggagtttttcatgactgaatgcagctccaacagcactctactcctgatgatgctgaacttgctgttattttggggcagatcaaatctaaatttcagaacactttgaaagctttagaaacattccaagctacaaattctgaacgcgtgttcaatacaggttgattttataggcatgtcaattaatgcttgcatttcactaacctgaattttataatcttctaatttgttttttgaaactaaatacttgac

SEQ ID NO: 89965 - DNA, 537 bp, Cannabis sativa
ttggtttcggggagaaatttatccaccttataatgaaatgtgtgagttctgtctctttctcgatcctcttgaatggaggacccctcaagcaattcaatcctacaagaggacttcgccaaggtgatccgctctcgccatacttgttcatcctttgtagcgaagttttgtctcgtctcttgatgcgggaggaaggtcggggtcatatcacggggtttaaggttagccgatgcagtcctcctatatctcatttaatgtatgctgatgatacgtttattttctgtaaagcgaatacagaggaagttgagacagtgcaaaattgcatccgaacctattgttcttggtctgggcagagtctgaatgtgaggaagtcggcctatgttttttctaagaatgtggaggagcagagtaaggttgagatcgttagtatgctgggattcaggtgtatgaatagagatgataagttcctgggaaacccgattctttggtcaaaaagcaaggtgaaggattttaagttcattaaagagcgactctgtgcta

SEQ ID NO: 89966 - DNA, 1158 bp, Cannabis sativa
cgcaactatcgaagtcggacatttgccgttcatattccgagtaacacgaactcatgagtttttatcgatgtgtgaacctgttagggtttttaatagacgcctgtgactgtaccgatcgtgtattgagcattcatgctgacaaataaaactcgcgggttcaaagtgagtcgtcgcacacattaatcattgggacaagaaactcgtaaagatgcagtctttacataaggtgtatgggagaaatatttcatcacatataattgatatatgtgactatgctaacttctccctgtcctatacttttattattactatgctatgcatagtgtacaactagatcttgtgtcgatcgtacctttccgcaacttgtaatcatgcgatgataactctacccgggtaattcacacgttaaccttttccaatcaagaattgagtccacatgttaattatatataagactgtgatcatatttctgaatgaaaaattcatccaaaaacaaaaaatcacccttaaaagttcgaaaaggagagataattacaagaaaaagttgtaataacggatattatagtagatgtatataaagtccaaaaagtactctacacgatgtatatagaattgcatatgcagaagagtagagcatcatgatatattggtatagattcttaatgagaacaaaattctagtcgatctaacaacataaagtataagacaagaattaattatcattccagcacacgtattatgtatacacatatttaataatgaactctaaacaatatatacagtgagtagagagaacatatttatcgtttgaccctatatatatattatatatatacagtactgtatgtatcgcgatcgcactagctaacaatgatcaatatacacatacatatatatctaaccctagcatattatatgttgccctaatttactttattatttattgtttctgatataaattagagctatgtaacgagaggtaaataagcaatccgcgtgctataattgcttcacaattaatgtaccgaaactatacacaattattatatttagcattatatatatgcatagattatgatcaattatttgttgcatctaggtcgtcactccattaacacttgagaccaacttacgcttcgaagtactatatctatatat

SEQ ID NO: 89967 - DNA, 598 bp, Cannabis sativa
ataaaatactcaaatagtaatcacattaaaatatgctaaaaatatattcctatcatcaaacattctttaaaacattctattaaaaatgttcttataaagtgacaccctccaaattagtagcagacccaaaatttaattgtaagggacataaacaaatttctaataaaaatatcacagtaccaaaaaaaaaaatgtgtattaacaaaatataaatattaaataccaactcattctatttgatatttaaaaaaatatatactcaatatcttaaaatatttaacaaagtaaatcagctattcaactcataaatttaaagttgtcctctacaagttttcatattttgaaaacgataaatgatagacttattggtaatagtattgaatacattcttttctagacacagtctagctatcatttaactattaatcttctattttgttgcacatttaatttttttacaatgtttatagctaaaaatgctatttctatcgaagctgttgcaactggcagtgttaatgttaatttaataagtaaaaataccaatagctatacttcatattttcttatctccactagtcttattaaaatatcattaatt

SEQ ID NO: 89968 - DNA, 596 bp, Cannabis sativa
tctctctctctctctcttgtggacctacttaatggctctttttcttgaggggtgttgaatttattcttctagaacaaatgagacgaccgggtatcaatgcgctttgcgtatccgatataatcttgtcaataatacttctcattctattagcaagcaccttagaagccaccttataactcacattgcaaagagcaatagggcagagatcactcatagaagagaagttattttttttattgggaatcaagacaagattggtattgttggagccagttgggaagatccttgtattgaaaaaaaaatcactgaaaaactgaataatatctctgccaacaatatcccaatgagtttgaaaaaaacctggccccataccatcaggtccaggagctttgtcggggtacatttgaaataagacttgcttgacttcttcttcttgaattggctttaacaaatctttattttgagagtgatcaactgaatatttaactccattagcaaccatactcagtcgtgagccaccaacagaaaataaggaagtaaaagagttatttacgacgtaaatacttaaattcaactcccggttgtaaataaatacc

SEQ ID NO: 89969 - DNA, 904 bp, Cannabis sativa
gaatcttgttgttgttgaaacttttgaaactttaagaaactttaagtactttaagtgctcgaactcccttcgatctccttgaagagtgcttgcttcctcccgaggcaagagttgaaaaacaatctcttaaaagctcgtagaaccatctcccaaaggtagcactgttgttcttcttcttttgtagacttgattacagactcaagacaatacaaaatacataaacacggagaaagaggtgaacaaactcttctctacaaaacaaagactctcttttctaaagatatgaatacaattcaaagtgtatgaaagagatacatgacctagctacgataaggtgtatttataatcaatatacaccttattgacaactcatacacagtctgaacaagaccacaactcacttggaaactttcttaaaataattcttcgaccaacttagaaatttcatgttctatacctacataatcgtgagcagtaagtgcgactttcattttatagaaaagaaaagacttgctgtgattttcttcacaagaaaactgatcaaacagtttaggaaaataattaaggatcagataaacacagctggatagatagaagttagttgagtcatcaaacttacctttcatgccttactttccataaatagaaaactagtcatatttcctaccttatataattcaatcaatataaaaacacaatcaaggaaacaacctaaacaactacgtcgaaaataaataattaaattataaaatatatttttttaattgaaagataccaaaaatagaattaacaatcttaccatttggcactttgattgacaaaataatctataagaaaaaaacctacatcaagagttagaaataaaaataatagaatataaaaaatactcctcctgcatgaaagc

SEQ ID NO: 89970 - DNA, 820 bp, Cannabis sativa
  modified_base (724)..(727): a, c, t, g, unknown or other
ttttcaaacatttcagatttcttttgcattaggtaaataaaataatatctagagaaatcgtcgatgaaagtgacaaaatactcataacctcctttggcttttacatttagaggtccatagacatctgaatgcactaaaccaagaggttctttggcacgcactccctttgcaaagaaagaacgcttagtcattttttcttttaggcaagatttacaaactggtaattcactcaagacgacatttttcaatggaccatctttggttgacctgtgaagtctgtcatagcctatatgacctaatcgtaaatgccatagatatgtttcatcattattatcgatctcttttcttttatggtttctaggtctagccaccttgaaaagttcattattaagcaaaatttgaatttccggtctcaaagcataaaacccttgttccatgtaagcaacacataattgaaatccattatgagaaatagtgcaaatagaactcaaaaacttcaattgataaaattgtgtctgtaaacatgaaacactaatcaagtttctactaaaattcagaataaacaaaacattgtctaaaactaaaaatttcttctgagacttgaggcgggctttgcctttagcttggaccgatactaattcgccatttccaactttgagctttaactcccctggatttaaataattccaagtttcaagttgctgcaatgaagaacaaacatggnnnntagatccagaatcaacaatccataaggatttctcattctctaaaacacatgattcaaaaacaaaagcactaccttcattcgaattgtttagaa

SEQ ID NO: 89971 - DNA, 1105 bp, Cannabis sativa
  modified_base (431)..(433): a, c, t, g, unknown or other
ctcaaaccaagtaagaacttaaaaactaaagaagggttctactagggcttaccttagcttaattctcccaagctttccttgctgaaaccaccacaaatcatcaacaatccccccttgttcttactggtttcgaagagagagagagaaagaaagagagagcttctcttgatttttggtatttcttttaatttcactaaatgaaatgaaggtaagggaaaatcaatttcccttgctgaaattactttgctaggtgtcaaataacaaggtagccacctaactttacttagcaaaaagtctaaattgcactttgacttaaacttagggtttttttaaagctaggggtaaaatggtaaaattctataaccccgcttaacctcgacattttattttctctaaaatattttctactaagaaataaggttctaaacttnnncatgtgatcaaactagccatctatcgcattttccgttgtcgccgaggaaaaattacaaaaattacataattcacatataggacaaataatacccctagagtttaataaaatctccgaaattgagaaattataactctaatactcactaataataatggggtccacaaataattgatttcataaataattataaaaataacagaaattagtgttaattgcctttactaattcaaattactaaagcggtcattacacctttgctcccaatcttgcataattcgtgaaatatattaacacaaaaaattcatgagacacattataaggaaaaaatccctatttaacctaaattgataaaaaaaaaaaattactggttcagtgttaaatttaagtaaatttacaataatatacatattttgtatctaatttacaataataatattactatcgacggctaaatatgttttatcttaagtttcactacttgaatttctattttttttttcttttttagttacttatgttgttgataagaaaccaattaattacatttttattagttacttttaaaagtatatggtcattttaaaatatatttgttgtttaagatatatttaagttcttatcataatataaatatatacttttaataaatcatatattttattagcaaaa

SEQ ID NO: 89972 - DNA, 1616 bp, Cannabis sativa
actagaagagaataaaacttagctcgagaatgaatgaattatgaatctttattgatagaatagatagtagtacacatgggatatgtccaagattacaactcaatacagtgaacacttacaaagaaatgtctcacattgagagaaattacttcaagagtcatactcccattacatccctccacacacagacttcctgcgatctttggactctctctctcaaaacttgagtctgaaatatgaagtatgagccttcaagttgtgttgagagagtagaggcacatgtgtattttaaattggtgtcaatgccaactgttataactaacaataattttcttcagattcatctaatgaatgttaagatacatctactgacttgacatagttaaatgagttttaatcccaacagttataataactgattggtttgttgggtatatagattggttgattaataaaattattttcttcctgtagtgataaaccaagctaataatgacatttgggaaagcaatactgtggtctgccactctttttttgcagctgaaggagaattacttgctcttattatctgatgctcaagtcattgtttaggcccttaattaaaaagtgttacacgttctaaccataatattagtattggaatatgtctttaataattacaatatacattattattgtataatcatatatttagattaaaattatcaaaataacaaagagagtgtattgatgcatctatttttgagagatgtatcatagaattttatcaatagtaatataaacacgtagaaagatattaagcaccactagtacttttagtatttttttagactaaaatatattgtgccaacaaataacaatatgatatcccatgactatggtgataatactagacactatttgtgcctatttctcaataaaatatcttcacaacatttgcatattcattaagatgtctagtaaatatgtgtaactaccaataatagcaacaacaacccctaataatatcataacaacaacaacaacaacaatcatttcaaaattaattgtacggtaattaataccaaaaatcttcaagtagcataaagatgacattatgacagaagctgtgactctcaaaactgctcccaccaatgacattagggacgcgaaaaatggcacaacaagacctacctaccataccatcacactgctcattaccaaacttgtgccaattattataccaatcaatctttggttgtctaagaaacaaggacagtcacaattagagcatattttgcaatgggattcactaaagttgtgtatatggctatctttgagctgagtttctcaattggaagatccaaagtgatctgtgattgtactcctgaccccaacattaaatacccaaaaacagttatggatgcatagctagccacaaccacaactttagcttgatgaaacagagcagcaatacctgtaatcaccaacaaccacagctttagcttcaagtaatatttgcataaaataaggcatatgtacttgcttacattgggaaatttgattttttatggttacatttggttaatttttttttttctaaacaaataataactaatatttgtaagatatgacaa

SEQ ID NO: 89973 - DNA, 527 bp, Cannabis sativa
acactcatgtcctgaatttggtacatgggattggcagaagcacaagctgcatatctcttgatgggaagttgggtcagatcggcagcaaagtggctcatcatctctgaggcaaaaggagctaggttaggccccacgaagcgcttaaccagtctgtcaagggatctaaattcaaatcccatacatcactggcatactcacctcaaaaaggcccatcttgagtgtccctgagccatttctttagagcttctacctcaacatccccctttgtaagctcccccaaggcatagttatgtttggcgatgcggagctgaaccttttcctcgtcaaggtgaacggaagtcaaaataatacctggaggtgcaagatattcatccacttctgaaggaattcccgagtcaacactaggaccaggagtgtccgccctccttggcttcttagaaggctctggctcaaccattttacctttgcgcttgcagtcgaggggaagaacgatctctccttcttcttcttcctcgtcaatcaagaca

SEQ ID NO: 89974 - DNA, 710 bp, Cannabis sativa
gaaccatattctaaggtccaaaatcaatttctcaattttttcataaataagatttattatttattttaccaataaataataattgattaatttttattaatctcttattttataaggattaaaataaatattatcttctctaaaataatataattctctctttaatattatctaaaaataatatcatatttaattgattaatatagttacattttataaaattaaatagttaaatactagtaattatacaattcataattgtcataattaatcaatacaataatttcataaattactattttatccttaagaattatttcttatagaaattaattctcacttaaaattattcatcaaataaaactttttcctgtacagtgaggtgacccggagaccatggacctatattttgaagctccaacaaacacttcattattatcgatctcatcaatagaataatctagtttattaattttattattaccgcactaaaaatatggaagtacacactttatcaatataaaattacattttcagaattcttacttatagtccatttatgagtgtggccctgacctcggtgagtccttgcctgctttgttatgtatttgtttgcttctttatcttgttaatcccttgtgttcaattttgaccaaatcgttattgaagttggccgcttatgcaagaccttaacagatcaaggatatact

SEQ ID NO: 89975 - DNA, 579 bp, Cannabis sativa
ttattattgctttatcatatatatctgttactacatatcgtttatcgcttataaaatagactcattgttgttagctaaaagcgaagtcaacacttgtatttttagtataggaatgcattgtagttagacattgggaatgtcgagattagttgagaatttagaattgacaaaaatacccctaagtgaccttttattatttgtagtgtgggaagggaaaaatagtaattttgctttttggtgttttgtcctttagtggacatatgttaagttaataaatctaattttatatatgttaaaaattaactaaaacaatttttatagttatctcattttacaaaaaatcaaatatcatcaaagatcactttttctatcaagctctctctctccttcgaacctcatggaactagctagggttctgatttttcttcaacaattctagtattttcagcaagcttttggtgtttccaaacgcaaggtaagtctctagcaacttcctcgcaaaattcttccttccgggtcttctcgcaataggcaagcatggtttcggccttatcacccaaaaaactaaagtccaactcg

SEQ ID NO: 89976 - DNA, 507 bp, Cannabis sativa
ttaaatatttcttatttctttctacatattacatataatatatttttttttcttcttttgaatttattatattatttattttaatatattgttagagacataaaacaactataatttatcttattttgttgttagctatgtaaaacaagatatattttttaataaatattaaataatttaaaaataaaaagtaactaatctaaaataaccgatccaatccgtactattacgaattgaactggattggctttgggctatatgacgcagattgaattggatccaaaatataaaattctcacttaatgcggatcggatgcactattaacaaaataatgcgaattggatgaacacccctaatttgaattcgtaattgctctaattttcttttaagtaaatgtttattcttttgataattttttaaattttaataagtttataaaacataaataacaatgaaaaaatattattaaaacaatattaaattaataataatataatattgaagtt

SEQ ID NO: 89977 - DNA, 939 bp, Cannabis sativa
ggctctcttaacaggtacaagtctcgtcttatagcaaagggatatcttcaagaagctggcatagactatgacgaaacctttagtccagttgttaaaccaataacggttcggacttttctatctctagctgtctctaacagttggaatgtctcccaacttgatgttactaatgtgtttctaaatggtcctctgactgagccagtctacatgagcgagcctcctgggtttgaagataaagatcatcccacttatgtatgccaattgaaaaaggcactttacaacctcaaacaggcacctcgtgcctggaacgacaaattaaaacaaacacttgtatcatggggatttcagggatcaagagctgatagctctctgtttacatatgggtctggcgacaatatagtcattttcctggtgtacgttgatgaaattcttgtcacagggcctaactctttgcttattaaaaagcttattgctgacttaaacaagagttttgccttaaaagatcttcggcaggttcactatttcttaggggtggagatttactgtgaccatacaggtatgtacttgtctcaaatcaagtacattactgatcttttagtgaagttaaacatggaaggagcaaaagcctgtcctaatccagctagtgctaccatcaagctgtcactacatgagggagaacccttttctgatataaccttgtatcgaagcacaatcagtgccttacagtatttgtccttgactcgtcttgatgttgcctttattgtgaaaaagttgagtcaatttttacaagccccaacttcggttcactgggatgcatgcaaaaagctcctaagatatctcaaaggcaccataaaagatggtattcatcttcggcctgcctctagtttacatctatgtgcttactctgatgctgactgggcatcctctattgatgatcgt

SEQ ID NO: 89978 - DNA, 637 bp, Cannabis sativa
ggcagtgggttttgtggctgttcttcatgttcttcattgaagaacattgaagaagaaggaggcatttagtttctctgctagggtttattttagggctgccgtgtgtgtgtgctgagtgaaataaaagagataaagataatatatatatatgttatagactagggtttcttttgctttaaaattgaaatgaccaaaagtaaattaaaggggctgtcgtttccctatttttgaggattcaaatcagagagtcaaaaggagcttttgactgggagagaaaggtcttaattgaccttgcttttgattagatttttgctgtgtgtaggggtaaagaaggaataaaatattcctacaataaattattttgaatttattaaatatttattataatgtatacaaacatgaaaaaaaaaacttatcttttttttaatgaaaattagtaaactctattttaagatgtaatatagtgttacaaaaattaggaacaatacgcaagtgtacgtaatcaagtagtaaactcacagtgaggtcgaaccacaggaaattgaactgaataccactaaactagattcatgattctatttggcaaataaaaataattttaataaagtttgaaataaagataatcaagaaaattaaa

SEQ ID NO: 89979 - DNA, 765 bp, Cannabis sativa
cctttgaggacctacttcgcaagcctgattgcaaaaattaggatcgcccctttccaactaatcccttcatcatataggctcttgggtggtatgttttttgcaagatgaacaagttggaagtaccttctctggaagaggtcctttattttatagcgtgaaagctaaccccatgagggaaaataagaagaagttgggcttttttagactggataagtgttcagactcttactgccctattagccatatgaatggtacccacgacttctgcaagtactagttcttctcttttacattccctacaaaaagggtgccttctcttcgcctaaaattccatcttccaggtaccattgccacccaactttaatcttgattgttctatagtttcttgtgtttttaatgacttgctaatgtatgactttttccagaacttcctccttgaagtaccaaagccgccatgataacaaaaaaaaaagtctcaatatagggccttctctgaggcgcagttgaaggttgagaacttggtgactactaaacttctctataggtccgatttggccaaaaattttcaaaatattgaccatgttaaccttagagggtagcgccaagcttctaaggaggtgaaggaggccatttccaccgaactggtcgtcgtcattactaaggaagctaaaaatgacaagctcctagagcctgactggctggcacgtcaccctaatcctttgtctgaagaagaggatatcttagagaggtttgctaccgtgtacc

SEQ ID NO: 89980 - DNA, 2010 bp, Cannabis sativa
  modified_base (834)..(837): a, c, t, g, unknown or other
tcctttgagttatatttgttaagtctttaattttactgattctttataattcatgctgtgaggagaatcttgatgcttagaaattaagatgcaacatttgaggcttctattaaacaagtgcagccaacagcaatccattcttatcaggagttattagaacagtttcaacggcttgttgtttcttgtgatgatgaagaaaaagagaaaaaagcatctcatgaacactcgagtagatcaaattggcttcctatgcggtaaacttgttttatttcatgcttcgttgcggctttatcataatctgcaaactacctctcacagtcttttttcactacttgataatacaggagtctcatgaaatcaatagctttgtttgttcgttgtcggctgcctggagtcttgttcgggtagttgcaatgttggtagcagattgttgttctatcttcctaactatgtatagctggaatgtgtctttttgattagggaagttacacacacatccatcatatcaaaggatcaagccaatacaacacaacacaacacaagttagtgatgacaaagaatgatgtgtttcgtaagccacaacaaatttactatttttttttaattccaatacttccaattattttagtataatcgtaagggtcgatcccatgaagactatgtttattaattattcacaaattaataacaagaattagaaaaaggagattttgaagattagaataaaaattgcaataattaaaattaaagaaaagaacaaatctaaataaagaatacgatacgagaaactagctaaaggttattcgccaccctcaacaatcattcctaattccnnnnaaagaatgtaattttcaatttctaatcaaactattaatcccgcagataacgttgaaccaatcaattattttaatctccctatggtatgtaatcaaggcgaagcgctcaataattaactcttttacctaaatcagtaaatccatgaagcatgcaatttatttaatttagataaaacattgagttttatggagatagactaatctaggcaacaaatcaatgaagcatataattcatttaacctaggttctattcatcacaaataaaaattgtaatttgtcacaaacacttagaatcttagactattaggtgaatagtaatcctaagatgacggtagattaaagtaaaacctaatttagcggccctctaaacaagattaaaacaataatcataacattgaacatagaagaatagaagcaatttgatataatggacattaaaaattaacattcaataatgaaattaagaattcatgttttgggttttgaaataacccttaactaaaagaaaactactcaaaattagacattataatgataatcataataaatagtaagagtttctctctctaatttgtaactttttagacttccctttaatttgtagtctaagaggttctatttatagtgcttcaagatagatgaatcctattagaaaaaaatcgcaactcttcttgaaaatttatcttttttttcgctattttttttcagaaatttcctgctgtgacgacggatagtattttgaccataactctctggatattactcagaattagacgattcaagatgttctggaaagctaagaacgagatctaaaacttttatgttgagctccaagtccaattctacctctaagattgtctgaattcgcaattaagtttcgcctcgtacaatcgagctcgtcgacttccactattttctaccaaaatgtgctaaaatctctccaaaagactctaaatgcatgaatagtctttaaaatagcctaacaaattaaactcatattaatcaataatttaaagaatcaaattaagaatattaatacataaattgatcatatttataagataaatatagacttatcaaagaagtatggattactttcatattcttgtaagatgtggtccaatgtctgagataagtgttgagaatcatggggctccatctcaaaaccaattgg

SEQ ID NO: 89981 - DNA, 608 bp, Cannabis sativa
  modified_base (196)..(199): a, c, t, g, unknown or other
ttagcggtaaaaccctccaaactattaaactagtagcacatttaaggtatcattcgattaacggtcactatgggctgcttatgtgtatacgcttgtagacatgtcacgtttatattggtacacctaatattattatttaaaatttattttgaaattaaataaaattataaaaataaaaaaaatttaaaaaataaannnnattataaattttgaaataatttatatacttttaaaaaataatagtaagtgtaccaatataaatttgacacatgtacaaaagtatatacataaacaatttatattggcaattaatggtaaaaaaatagatatcaccttaaatttgcaagctttggagagttttatcgtcaaaatttaaacttaaagatcgttaaatgcaagtagagtgatagttaaaagggttagccgtaaaacttataaaacttatatatattattactgctaaaacttaaacttaagtatttatttatagttaaaaagaaaacttaagtatttatatcgcgaattaatctttattactatcataactaaagagtttcttaacattgaattttaatatttcaagtaattatcgttttgttttatgcatt

SEQ ID NO: 89982 - DNA, 787 bp, Cannabis sativa
tgatcaaaattagccaacaacataagaatgagttatacagctataaaaacagatttttttaaaaaataaaaaaaataaaaacatcatatatatatgtgtatttcttaatttattaattaaatccaaacataaaaaaaaaaaaaaaaaagatttaatgttttttggtcgtacgtcataatttatttactgattcatactggatatgtattatatattattttcattttagatactcaacactatttcatgaataatccatgtaggcttgtagctatacttaaatttcacttttttttgaatggaaaatttcacttaattgttattattattgtaaattttcttagaacatctttaatggaatgctaaaaaagtagtgtattgttatattttagtattttcaatagtgttctaaaaagtgttaaatttagcgcatgttaaaacttgcacaagatatagtattgtgtaatagatcgaatgagcttgaacaagagaaaagtaaaacagagagaacagagagaaattggacaattgtattgaatcaatcaaattgtgtacaaacaccaatgctttgctacttatactaagcaacaaggaaaacaaaataatgcagcaaaaataacagaatgtacagctgggctaccaactaacctaactaattcccaactaactcaaaactaatataactgtctcaacagttcttgaaactccccctctaaatggagaaaatatgttcttcaatcccatcttgtctttaaagttgttgaattggttgggaaaaaggggctta

SEQ ID NO: 89983 - DNA, 1242 bp, Cannabis sativa
tgccttggacaatcattataatcattaaaataaaatttaatttatgactaattttttttatttcagaaatttatattttaagtagttgttaatatttctactaaataagtgaaataatcttataattcatgatcattgactattttctaattatttttaaataaaaattaaataattttttaattcctattccattaccttatttttacttattgcttcatttaattattattaattactataaataaagcgattacctattatttggtttctatatatcattatatttattttattgttgcatatagtttttcttttgggtaaaatatcacttaaaagataaataattaaaaaaattagaaaaaacaaaatagaaaaaatagaatcctaaaataataaaatgctgcctcatatttttttaatttttttagtttattaatatatagatatattagataaatatatagattttatttgataaataaataaaaattataacaaatcgggcaagatcaacttatcaatcaataatatatttcgataaattgaagcgaatttaagaataccttatttatatagttggaagtatacgggtcatgtaatttttaaggggtttttacatttggtgcctaatttggttttttttttttttttacatttatgttttaatacggttatttaaattttttaaaaaaatttgtttttcagttgtaaattttaaaaagtttattaattaaaaattaacctatgcatgctaatgtcatgctttttttccaccattacacgccatattttccttcttcttctctttctttctttttcgttttttttctctctgtccataacccacgaactgcaaaccgtcctctcaactcttctaccctaaaacccactattttccaacctcccatttcagtcacgatcccctctcttccataactgcatttcgtttttcctctatcattttttttctataaatggccaccactaggtcaggttccaagtcccctcacctgctcaaaatatttcaaaaaatcctatgaaatctccttcgaaatcctctaaaggtggtcctaaaatgggtttgaaaggcattgcgaagaagagaatgactgatgttgcagagccttctcattctaaaaaaaaacctcttccaactaaggttgaagctcgtaaggtaaagagaaccaaatcttcgaaatctgttaaggatgtaagttgtctactattgttttttgattt

SEQ ID NO: 89984 - DNA, 968 bp, Cannabis sativa
ttattatttatatcccaaattatgtttcgcaaattttaatatctactaaattataccccgaagttcttaaatctaataaactcaataatttatgagaatttttaataattttaaaagttcagtaaatataatttagtatatgaaattttgagataaaaattctaattcatctttataaaatgatgagataacataaataataattaaatgagttatattatatgtaatatcataataaaatttttgtgtgacactagttaagagatcatgtagtcatatcaaataatttttattttctttaattatatcctatatatatataagagattaaattaattaatgaaaaagaaaagtccataaaagttaaaaaagatagagaaaagaagatttaagaaaagaaaaaaaaaacatttgcatgtgatgattgatgaggcgttttgttatgattaattatgagtggtctataaatccttaagctaaatactctatttatataaaataatatatttaacaaaactatttatatgaaataataataagaatagttagaagagagtgaattacaaattcttattacaatttttcacttaaattttacatccgaaatcacatgtcgaatttttttttaattttttttttactgtaatattcgttatagttacaatattattcttgtaaatttttaaaaaatttcgactaatttacagtaatgaagttcttgatatttcaatttattatgtgtgttcaaaaaatttcaaatttattttcggtacggtaaactattcaaatttttttacaaaaacttacaagaataatgttgtaactataacgaatactactataaaaaaaattaaaaagaatatttcgacatatatttttaaatacaaaaattaactaagaaattataatatatataaacttattaagggaataataaagaaagtgagaaagagacatatttggagact

SEQ ID NO: 89985 - DNA, 838 bp, Cannabis sativa
tatgactactgctctacatatatgacaaattatgagtgaaatgttagaaaaagattaggctatatatatataccttcttctagaaatgatcctgtggactttgaaacttaaatcaaatattattaatccatttgagaagtttctataagggggacacttacttttctttctttcttttttgccaaaggtaaaaatcaaaaacaacaattgtaaacatttatacttgttgaagttctcattccctcccaccatttttgtcgagctcaaaagtaacagagtaaaaaagaagaagagaaacagagtaaagagaaaagagagaagagagaagagagaagaaagagaaaaaaaagagaaagatgagaagacttaaatcttattcagtaatgagcacaataacaagattatatacaagcaaaatcgagcaaagaagctaacaatcaatccaactaactcctaacaaccatacaacacaaaacaaatatttgtaacagaaaaacaattagttaactgttaactgtcttcatagtccccctcaaacttgaaattggtgctaccaacaatgccaagtttggtactgaattgagtgaaccttgaactggaaatggcctttgtaaggccatcagcaatttgagctgcagtaggaacatgatgaacttgaacaattttctctcttgtagtttctcacgaacaaagtataggtcaagttcaatatgcttagtgcgagcgtgtaaaacataattggtagtgagtaaaattgtgctcatattgtcacaccaaattgtaggtgctcgagataattgaacatggagttcagaaaacaatgaattaatgcagccaa

SEQ ID NO: 89986 - DNA, 605 bp, Cannabis sativa
ggaacccagacaccgagagatccaaaacaaggacctagacccaaactcagacctggacttgaactcggacctgggacccagaattcggaactcgtcactcaggacacggactagaactcagacccatactagaattcaaaccttgacccaaactcagaactgaacttagactaggaccgagacctgaacccagactgggactaagaccgagacccgagacacgagactcaagactcaaacctgggactcgggaaccggaccgggaccaagagccataccaagctaagaccctagaccaagacttacaccaaaacacgaattggaacctgcacttagactgggacaagaattggaactaggacctaggacccttacttaaattgaggaccgatacccggacccgaacctggacctagacctagacccaagactcgagacccaagatttgaccccaaacccaaaaccagacaagtgatctataataagaccaaggacatgaactagaaccgaagcaggatttggatctcgacttgagacccgagacccacggcttggactcgacccatagttggtttctgaatctaggactcagacccaaacccaga

SEQ ID NO: 89987 - DNA, 932 bp, Cannabis sativa
ctatcacaacagatggactagcattagcgctagcctgagttaccgtgaacaagcatcctatattctgattgttgcttttcttcggttcctctttattagcatgaggacagtccctgataaagtggcccaccataccacactggaagcatgtttttgttcggcactcaccttgatggttcttcttatattttggacactctgggtaagatttgaatggatcaccacggccttgacggctgcctttacttccctaaaacctcttgtttggtctggatgatctgaatgtcttagtttttctcttctaatcaaaattacaaccaccagtccccttactaaaattaccaccagcacttggaattgatgtcgtaccggcatccttagtagtatgcttcttaatttgttgttcagcctctttggcaatcagtgctctctctaccactttcttatactaagtgtcgtgattagtggtaatcttcaagtcccgactgatcgtggcatccaacccattaatataatcggttctcaggtgaaatttgttggtaccaaatcattggcaaacttatacaagcgatcaaactccagtgtatattcagccactaacttatcaccttaaactagtttcacaaaatcctccatctgtactgaggtcttgagactgacctactaaatcccaccaggtgcgggcatgctcttgaaacataaaagcagcacaatttactcgctcagttcctactacccccatattatccaggagacgagtaataatactcatccattgttccgcctttataatatcaatacaacccaagaatgttgaaggttaaaacttaacaaaccgctcaaacactgaatcttggtgtggctgtagggccaatctaaggttggctaccacgggagcaggaactagaggaatcccttgctctaccggagct

SEQ ID NO: 89988 - DNA, 601 bp, Cannabis sativa
accttaataatttcagtgtcaaaactaccattaacaaaaaaaaaggcagtagaacccatagcttaaaaacagtccaacttatcattagagctgaatgctcaataccttgtcattccaagtaacataagggttgaagtgagctcccacaccaacattgtcagcaatgtcagtgatctaacacagtcatagatatatagtgttagaatcagcaataagtaaaagtgtgaataaagactaaaaaattacagtagcacctccttgtaatgaatgattcagtaagtgtgaatgattcactgttctgcttggtaaccaaagatgatttgtcatcttttgtaattatccttccatgactaataaaacccaatatgtttctcatttttcttttctttgtttttagaaaacgaaaaaaaaaaaaaaagttaacttcattaaaaaggtaacataacttaccagagaatggggtcccatgtaacatcaagataatcttagctagttagttacaagttttatacatgttctgaaagtttttatattcgtaatttatttcctatattttgtgttcgcgtccccataagcaaggctcgctaataaatttgggagg

SEQ ID NO: 89989 - DNA, 900 bp, Cannabis sativa
taattaatattctaaataaataaaaaatttataaaaatttggaattttccttttttttttttgaaaattactgccccgaaaacgacatgttgtttttagctatatgcaaaatgatatgtcactttttctacaaagaaggttgcccacaacgacgtaaaacgacacatcgttttccgcagtgtggaaaaacaacacgtcgttttcatgaaagctgcctggttaaaacgacaaaaaacgacacgtcgttttcatgaaggctggctgcttaaaacgacaaaaaacgacacgtaatttttccacaatgtggaaaacgacacgtcattttcatgaagtctggctgcttaaaaatgacaaaaaatgacgtgtcgttttcatgaaggctgcctcacacatggaaaaacgacacgtcgtttggggtcgtcttccttagccaactgggttgtttttgacccgtttttcagccacatgggttcaatggacccgacccaaacccgaacaggaaaacaaattccgacgataaaaattaaacgaattccgacgataaaaatttatggaattccgacgataaaaatttatggaatcaatcccatttgaatctccatgcataaataaagagattcatgtaggttttaggctattaaaacacgtaaaaattggactttaattttaataaaaaagttctagtccgtatgagttcttaaaaataaattttcagatttcaatggttttttacatgtttagatcgatctataatactatatgaatatagtgatgtatatagagttcgaaataaacaccgtaaaagaaaaacaaaataaaacaatcaacggaccaaaaactccaatttttcatgtttatatatacacatatataatgtatataccgcataaaaatatcata

SEQ ID NO: 89990 - DNA, 1354 bp, Cannabis sativa
agccaaggcacgagccacatttaaaatttgttgatgttttctctcaactactgaattttactaaggtccttcaacacatgaattataaacttgaatgcatttttgaacataaaatgttttaatataaagcacctttgcattatcacatcttactagcattgtgtagacaaggtaataaaactgtggaattaaatgttgcacaacttctaataagatgattttattataatcatctagatgctttctcaatttctttgactcatccattcgaagtgtgtacaactttttcttgagatataacttgtttgtaagagatttcttcatataaattgatgccagtttgttcgagagacccaaggccttgtcttcatctaaaacttcccttaaaacctcatcaccaagactgaggaggatgacactatgtgctttagcttcaatttcaagtttcttcttgttgtctttaattaattttatgtcttcatcattaagtgtctcatagatcctttagtgaactagaaagaccttccttttaattctccataagctgaaatcattcgaaccattgaacttgtccacctcaaaccttgttgaagccattcaaaccagttcttgattgcttgaatctggttcttgaaagttcgagtttaattcttggaatgttgaagatgagtcttgattggttgaatgtgattcttgaactctaaaccctgagctctgataccatttgtggtgaatgctcaccctcaaaataggttgttagaatagtaacaatattaaagaatacacaaacaaaactaaaaccaatcataaaattaaaattagaacttaattaaaattagataagaaaacttagctcgagaatgatcaatgaatcatagatctttattgcttgaatagtaagtagtacacaattgaatatgcccaagaataaaactcaacacagggaataattacaaagaaatatctcacattgagaaaaatcacttcaagaatgatactcctattacatccatccacacacactaactatatgatattggattctctctccaaacttgaatctaagcctaaaagattaaagatcataactcagaacttagaaatctctttgagaatagaggaacacatatttatagttgttggtgggatctcttttaagttggtattaaagccaaatattataactaataatagttttcttcaaattcatctgatgagcatatagatgaacctactgacttgacatgttaagtgatgagtttaatcccaacatatatacattactataataaatcaacactaatatatagttagtgcatcataactagccagaggacatttaattattgattca

SEQ ID NO: 89991 - DNA, 894 bp, Cannabis sativa
tctaattttaattttaatatatgtgtttaaatttatattgtttttaatgtgtaattttttttcaaaaaaaatataataaaattttacttaaattataattaaaaataaaaataatttatggtattcacatttaaatttacataacaaaatattataagatatttttacaatgcacccctctaaataaaagagttacgtgataaaaagtttaaattttattttcggcgtgttagatttttttaaattttttgaaactttacaagatgtcttaaataactataatgtacacaaccatgaaaaaaaaagagtaaacaagtctttcgaatgccgaatcaggtaggagtatatcaatgcgccacttttaaataaatacattgttttcggcgtgttaaatttttttaaatttctcaaaactttataggatgttttaaataactataatatacacaactatataaaaaagtagactagaaaaatttgttgggtgccaaaataaataagagtaaattcgtacattacttttaaaaatgtgtattgtaaaattttttaaaaataaattcttaattttataaatacaataatataaatatataaatattaattaaatatataaataaaaaatatatggcgtgactatagtgcacggcatatataccgtgcactgtagacaaaatttcaaaatagtgtaacttttagtgcatcgttggagagaaatcacaccatatataaatatatggagtgtcgttggacttactcttatttgagtcttcactcatttttttagtatctatcttaaaattggaaacttaagctaattcaaagtacttaacacatacatattatttattacatatacgtaatagtttttttttcttacgaaactaatctaataat

SEQ ID NO: 89992 - DNA, 808 bp, Cannabis sativa
tttgtggtggaggcccgggggcatagtggtggcttagcaatgttgtggagtaaggaggaggagggtaaattactaagcttcagtcataaccatattgatttggaggtcaccattgaaggctatcctcaatttcgagcaactggattctatggagagccccaaaggagtcttcggccaaattcatggcaagctattcgacaactttcgggtgagtcttctttgccttggtgtttgttaggagacttgaataatacattgaaccatagtgataagaggggtggccgcccttacccgaattggttacttactggcttccaagatgttgtttcggaatgccatctaattgacatggagcttcgtggtcatccctacacttgggagaaagggagaggtacggatcaatgggtcgaggtaaggttggatcgagctcttatttctcatgattggcaaacattatttccttcggcttttcttgaaaatttggaagttacagtgtcggatcattgtcctatatgggttaatctttccaagtcaaaaccggtgcaagttcataaaaaattccgttatgagaacgcgtggtctcgtgaaccgatgtgcagacagattgtacaagctaattgggaggatagttcacttcagtctttacatgtcaagttgaatttgtgtagtagtgctcttgctgagtggggtagagacatcacagggaattttaataaacaaattcgacaatgcaataagtctatgaagctcttgaaagggagaagagatcctgtgtctgtatcgtgctacaaggaaattcaagctcagt

SEQ ID NO: 89993 - DNA, 523 bp, Cannabis sativa
ttttatgttgttttcatgttgattttatgttgtttttcagctattttttagaaaaccgtaaaaatgtaaaaaaacattctttgaacgtaaaaatgtaaatatttcacaaaaaatagtgccttatgtaattattgttaaattcatgtaataggggccctagtattgtggatgattatctctcttgtattcaggatttgttatctatctccccaaatctaagcttggtccatgtaaaaagagagtctaactctctagctcataggatagctaagtggggtcttgggcttgataactgataacgagtttttgtggaatggttctttactaatctttaggtgtgttttgttttggttcctttgtaatacacaagactttatttcaaaagcaaaaaaaaaaaaaaaacataaacaataagagagaacaccagacactttcttctatcttagttgtacggattccattgactttaaactactaagtcgtgacctttttataatatgaacaaaaactgtttccttgacct

SEQ ID NO: 89994 - DNA, 3091 bp, Cannabis sativa
attttcctggaaaatgacaacttttgaaagaaaataggaaagaggtagcagtagaccaccgacaccctcttaccaactatgaaatttcactcttaccaaaaatttgtagtgtaatatatcatagtaaatgtgaaaatttggttgacatttttctgtaatgacaataatgatgacaaagggtgaaaattttgggttttgtttcacagggaaattcacaacagtactgagaggagaaaacttggattcttctcatgtggaactgggaacccaattgatgactgttggcgttgtgaccccaattggcaaaagaacaggaagcgtttagctgattgtggtattggttttggtagaaacgctgttggtggtcgtgatggtcggttctatgtggtcactgatcctaaagatgatgaccctgttaacccaagacccggaactcttcgccatgctgttatccaagaagagcctctttggattgtgttcaagagagacatggttatccaattaaagcaagaactcatcatgaacagtttcaaaactattgatggtcgtggtgtcaatgtccacattgctaatggagcttgtatcaccgttcaatttgttaccaacatcattattcatggtctccatatccatgactgtaaacccactggaaacgccatggttaggagctcaccctctcattttgggtggagaacaatgtctgatggtgatgctgtctcaatttttggatcaagccacatttgggttgatcacaactcactttctaactgtgctgatggtcttgttgatgctgtcatgggctcaacagccattaccatttccaacaaccacttcacccaccacaatgaggtgtgtgtgtttattatgcacaatttcacatcacactttttttcttgacattgacattgacatttcttttgtgtgtgaaatggtaaataggttatgctattgggacacagtgattcatacacaaaagacaagatgatgcaagttaccattgcctacaaccattttggagaaggtcttatccaaagaatgccaaggtattaattaattaattcccaaagaaaatttttaacagaagataatgaatgttttcaatgttcttttgctaataaactgagttttcaaataatgacaacacagatgtagacatggatatttccatgtggtgaacaatgactacactcattgggagatgtatgccattggtggtagtgctaatcccaccattaatagccagggtaacagatatgctgctccaaccaatcgttttgcaaaagaggtaaaataaataaataaataaataaaaatacaaaatcccaatattctgtttctgtttcttcataataattaattatattctggacaggtaactaagagggtagagacatctgctggtgtctggaaaaactggaattggaggtcagagggtgatctcctattgaatggtgcctacttcaccccatctggtgcaggagcctcagcaagctatgctagagcctcaagcttgggagccaaatcttcttctatggttggaaccattacttccaatgctggtgcacttccttgccgtagaggtcatcaatgctagtagtagtagtaatagtataatgataatttgagtcttctccttcctattaaaatggccaaaaaaagaaaagggcatttttttctttctttctttctttttccttataatttttacaattatatacccccattctccatatctcttaccttttgaaacccaaaaaaagaaagcatttttatccatattttgacaaggtgtacattattatgtaacacatgtcaatatcatcaaaaaatattatatccccccatttgtattgccagtttgtgtatctgtgtactactactgctactacctccccaacctcggcctacttcaacccgaaaaaattacaaccccgaatttaggagtaggcgcggaagcgttgttccctttgttttttctttctttctttctttcttcccaagtccaaaacctacaaaaacttgtgtgtccatttctatcccaattcaaaaacccatctctctttttttttttacttttctggttttataggatttgaatgattttgtgatatcttttttttgggtcttgtttgtccaagtcatacaagcaatagtatgaatgtcaaagttgagtcgtacaagcttttgttacagaatgatgcatagcaatagcaagtgttttttttttttcttttttactaaagacttttattttctttggcaatgaatgaaaagtaatatttttttttgttataacctttttatgattactctcatttgtcaatgtttgttgtcccaagcacatgtcatcgattcatttactcattttaacttacttaacaacaacaccatcattatcataccaaagttgtgtgtctactaattgacttttgggttcttggttaatgagatcattagtaaaaaaaataaagagaaaagggtggaaatggtctcataattagagcatgagaaaaaaagagggctatggcagagaagcagagaagggccataacattaacaactcaactctgtatatgaacaaagtattaaatgatgctcacgtctctgcctcccaacccaacacctcctttggcatttatgttaagtgaatggccaccaaatatatatatttgttttaataaaagaaaacccaatattggatagtctttgttattattctttcacatgtgacaaccccaccatccaattcatcaacattgaacaaattcaattcttgatgtaattacaaccaaccttgtgtgataataatgtcataacatataactgtaataatggtaatcataatcataattagtattgttgtatttattaagaagagaatgaatcttaacttgactcattttcaaagtaaccataataacttgtttcttatattgctcttttttattcacgtgagaaaggaccccattatgggatttccattgccatgtgaggaagagttgcatgtattcattggggaccattcttttcgtctctctttctccaacttgcatcaatgtatatgtttatatacatatatgtataattgtat

SEQ ID NO: 89995 - DNA, 649 bp, Cannabis sativa
tccaaactctccttaatcgaaatggtcactttcttttttcctattttttttatttgaaattatatatatatatatattaatggtgattactcgttcttcttcgtctccttatttccctaaaaaacttctaaaataggtgttaaatttatagcaaataaattcaaagacaaacacccagtcgtagaagacgacaactcggacttcggtccgcccattatcaaacgaaatcgtggacctacgaagaagaaacctaaagttttcgtttctcaaaaaaattctccatctaagaataggaaagggaagattgaagttgctcatggttaggaggtttgtttatagttttcttttaattttttctaaactttgatattttgtgtttttattttgtgggttgtgtatattgttttgatttacttttagtacttttagggtttagatttttttgtattgttttttagttgattttaacttagtgtaatcattttgttccttgaaattggtttttattgggattgttgcttctcattttttgtgagtattattttttgatttttctattttttttatgtttttatatgctttatcatttttattaggcttgttttaatttgtgttgatggttttatttttgatagtagtgtgtttatta

SEQ ID NO: 89996 - DNA, 1478 bp, Cannabis sativa
agggggcatgtgggtacacctgtggtattaaattttgagagaaatatactgtgaataaaacgtaactcaaaagactgaggctgttgcatatcaattcatttatagtatgcatgggagaaatacagggaagaaaagagaggcctatgaaaggcttacatgcagcaaaactaacaagaatatattctcaaaagttatacaaggaggcaaaaagaaataacagagacctcaggattgtctcattcatatgtactgctgtcgttgttatgatgtcaccattatcatcaataggaactaatccattttctttaactccaccccccaaatgaaatggggaggcagcaacattgagtttgttgatcagggaagggattggaacctggttggtgtgagtcccttcgttaaacattcaacaacttgatcatgcgaaggtacatattgaatttcgagcttcttctccaacaccttgtcttgaacaaagtgaacattgagttctatgtgtttggtccttgcgtggtatacaaggttggtggctaaagcacttgcacctaagttacgcacccgataacatgaatacttggtaatttaaacttcatctgagtcaataatccatgtaaccaagctaatttagcaacaagatgagccaaagctctatattttgactcggtgcttgagcgagccacaatagattgtttcttagaggattaagaaattaaggactcaccaaagtacacacaatatcctgtaacatactttttatcgtcgggacaacaagcttagtcaacattagaaaatcgaatcaaggatagcctttcactaggagcaatatgaagactggtgcatactctagattttgaaatagttatgaggttatttcccaagttgtctcaactgtgatgaattcttgcagacaagctttttgaccattaagacagccttccaatatgtgaccacgaatgatggtaaacatcatagtcttccatagagagaagttttttcgatcaagcttgagtgaaaagagatggctcagagtgttactgaaaggagttgccgctgaggtagctgtaacaacatgatggtcagcttgagaggtctaactctgttcagtcaacattggtgagggcctgaatgctcaaataccaaattaaattttgataaaaaatatactgtgaataaaactcagctcaaaagactaaggctgcatatcccttcatttatagcaggggagaaatacatggaagaaaaaagaggcttatgaaaggcttacacgtagcaaaactaacaagaaaatattctcaaaagttaaacgacgaggcaaaaagaaataacataagaaatcttctagggattgtctcattggtgatgacaagctatccttgtcatcaatgatatcaccattatcatcaataggaatgagaaatttgattttttatgcttacatttggttaaattttttttcctaaacacataataactaatat

SEQ ID NO: 89997 - DNA, 791 bp, Cannabis sativa
aaaaaaaaaaaaaaggagagttgtttaagaggatgtgtgtgtttgatcacatctctctcaagtgagttgatttgtaaggtataggacaccattattgatgacaatgatgagctcaactcttgtattctcctctgtattcttccattactaaagatcaaataaaagtttagccaaatggcagttcctctcggggattaatcaccacaaaaagagcaatgaaccttattagataattttttgataatttagttgtcaaaatattatcaaatttatttgtgaattaaatggtattttcttatgttaatttcgtagctatggttaccttttttcttttatgaaacttttatttacagctgttatcttttgtttagaaaacttgtcttacaagagaagtaattctctatatggaaaattgcttatttttagaaaacttaacttttcttttttctaattaattattaattttagttttactatgtatatagaagataaaataatctttatttggcaggtatagaaaaccaaatcgtgatcttggtcctatttagaaagtttctcatttggtcatgatctgctgcagcataatctaattttgatgctacaaattaggaatttttttaggaaagttttgtataactttgaaaatgtatttgtgactgtctctaaggtttctatattctataaataggacctagagagcagctaaacgtttcttacctcttgtagtttcattttgcatatttttatatttatgagaagagagttctttctgtgaaaacctagagtgttca

SEQ ID NO: 89998 - DNA, 1385 bp, Cannabis sativa
tgttaccttataaatgtataatcttatgagctcaaaatttgttattatgtaaaggtattcacaacaatctcgtccatcaactataaccatataagatcaaagtggttttcgtcatatcattcatgactaaacccattaatggtcacgtatacaaatatagccaaatgacatagatcaatcatggatttgtagcataaaaattaaatgtaatgtgaaccgaacatgcgtatttcaaattgaccctccttaaactaaagtaaggtcagacttaaacataacaaaacagagtaaataaactgaaaactttatttctgattagaaaataaccaaataggggtgttcataaaaatcaataaactgaaaccgaccatcaaaccgtaaccaaattttcagttccacgtcatcaccaaatttggcagtcggttttggtttcagtttttttgacatagcgatcggtttcggtttttgaaatacaaaattggttaaattaaaaaatgccaaaaactgtaataaacctcccaaaactgccaaaaaccacccaaaaccacaaaaaactgtccaaaactgccaaaccgaaaaatcactaaaaattgccaaaaaccgtacgatggttttatacgattataatttctaaacggtcagttataaaattgtaaaaaccgaccataactgactgatttttacccctataaccaaatacataaatatcataaataaacataaagcaaataaaataaaaactcccactatatcatgatatcctcaagcaatactatacccatatgagcagtgtgcccatgaaagaccttgggtgataatccttttgtaagcagatctgctattgtaatagcttgagattaaggaaatggattagtgaaccctaactagttaaatgtgtattattatagaattatattattatataatttattatatgtgaactaatttgataaatgatatatgaaggccccgttggttagctaagggtattttcgtaatttttactcgagaagggtaaaactgtaaatttaatttaattgtgtgcttgtggactatattattatatagtgtacatgttttgtcttttttcaggtgtgttctgacaagtcagtgcggtatagtcacaactgagtatttcgggactttatattggcattttattgttatatgaatattttgaaaattaattgaaatagtgtgtgtgatataaatgacattgttactcttatgtcatgcatatgttatatgtaagccttaagggcattttggtcttttgatccattgaattattatcaacaaaagagattgttcttgtcaaatttgaaggaaatttctggttattttttcagccttggccaaacccctattctctctctctctctctc

SEQ ID NO: 89999 - DNA, 882 bp, Cannabis sativa
tcatttaaaataactttttccaacagttataaactctcttataaagttctgcatttttatgacacccacataaccaacggcttgaggagccgtggcaaatagtataaaagacagttataaactattgggaaaatcaaattttgtagtagtattccaaacctacaaattatgtttttaatgacaaatttgagaactttcttgcaggttatggaaaccagaggttcagcctctgtccactttgtaaagaagtcggcagctaccactgcatactttgctcctccttgccctgtggagagtgccccgatcaaatgggtaagtcgaggtcatcatccttagctttgttggtggtacgcgaggtatatgtaaaaatctttgacatttatcgcattttttgacaaattcgtgtgtgtctttatttatagttggccagtagtatccttgtcaaattattttctttgacacgctttgccaacctacatgatctccacaaaagccttcctggatttctttgatgatctcgcttgaatctgcggggtgaacacaccgtaggagaggcattaaataacccctacgatataatttgccttttactatcatgtagcaaggcacaaagtacaaaagtttttgtgcctcatttttgtcttctggaagtttcccgttgagaagatagttcactataggcatcatccaagtaggcgagttatctatcatctcaacctcttccttttcacatatactcgactcatccaaaacttccaccggtaccaggttcaattcatcaagtttgttttgcgaggtcagtttcgctagggcgttggcattagagttttgttctcttagaatttgttcgattttaaaataatcaaacttttccaagttctt

SEQ ID NO: 90000 - DNA, 689 bp, Cannabis sativa
actgtagcgtgccttagcattagggcgttacattaagagtgttcttttttagctgcctagcgataaggcccttgggcctgatggcattaaccccctcttctaacaaaaaaattggtccgttgctggtactgatctttgccatgctgttcttgatgttttgaatcatgatgccaatcttgctcccatcaacgagaccttcgttgtccttattcctaagaaaactcacacttgtcaagttcgtgatttcagacctatcagtctatgctcgaccatctataaagttgttgctaaatcccttgcttatagattgaaggttgttctcactgatctcatttcccacaatcgaggggcttttcttagcaatcattttattcatgataacatcattattgctaacaaaatcattattgctatcaccgccaggaaaaaaggtaaagtgggttgggctgctctgaagttggagatagaaaaagctttcgataaggtggagtgaattttattcatcgaattctctctctcatcttggcttacctgccaattttgtttccctcatttctaactgtatcttaactatttctttcaaactctacattaataatagcctctcttctctcattattccttctaggggaattaggcaaggtgatcatctctctctctatctgttcctccttgttgctgaagggttg

SEQ ID NO: 90001 - DNA, 705 bp, Cannabis sativa
  modified_base (647)..(655): a, c, t, g, unknown or other
tcgatttttgcaaaggggcagctaagaattttgagttttcaattttttatcaagaattcaagctgaattctaaggtttcaacccaaggtatctctttttagcaatcctcttttgtttctctcaagtctaggttggatttaatgagttaatttgaggattttgtgcctgtttgtttaagaattgtttgaattagtattttgaagtttaattgaggtgtttgctgctagtttgggctaagttaggtgattatttaattgcttgagtcaaattggagtttatgaactccaacttggtgctctaatggtggattgagtttttgtgtcaattgttgtgttcttttgcttgaatttggttcattatagtgcatacaggtattctggaagttattgggaagtttggatttgaattgagttgtggggagaaatttttgggttcccagcacagaaccggtcgaccggttctggggaaccatttgaaccgtcgaccggttggaacccaggaaccgggcttccggttgggaaccggtctaccagttgaggctttttcctgaaccctatttttctcctttttgtgttgtttaaggtgttagcatcctattaatcgatagggtcatccttaggttcaattttaaatccccgataagtgtnnnnnnnnntctctcattgaattttgaacgttatggtttagggccctgtaaagcgtcaa

SEQ ID NO: 90002 - DNA, 610 bp, Cannabis sativa
aatgttgatatcttgaagttgtattggaattaataacaattttaataaaattgtgagttttcgggtgattaattatgtaaaatatactttcgtaatatgataatacttaaaaatattatttacaatttatatattttttttctggttaagggcctatttttaaaattagaacatgacttctaaaatatttgagacggcattgctaatcttcattatattttttatcatgtcatattgatgatatcttttaaaagattgtactatgaccaacccaacattattttgtaaagattatgtgtcacaatacctatatatatattttttttttctgaaacaaatacctaatatttatggttgcagatgatatgtaccataatattagttgttgacttgaataacttgtgtcactttgtaattggtccagctcaattttatttaaaaattaatttaatagaactggtctgaaaacaacataacatattttaactttgttagaattttgacttggtttatgtacaaactcaaaatcattgtaagaaagagtaaggtaacttgataaagaagaaataacatttcatttcaatcatcaaatattataaatattctataa

SEQ ID NO: 90003 - DNA, 501 bp, Cannabis sativa
ccacactttattttcaccataccaccacactttttttttttctttccaaatcttaaaaatataaattcaaatcaaaagtaagaataataagatgataatcaataatttaatacaatattattattattatgaatttttcatttttttaaaaatacaacactattattattattattattattagtagtagtattagtattatattttgttattgcgattcaatttttttttattgcggttagtttatttctgtgatataattttgagtattttaatcttatctatgtgacatgattttgagagatttagtcttgtttgtgtgacatagttttattttgttttgtttttggttcttctttatatcgctattagtggttggtaataacaagttttttgtgactgaagatgttgttagtagtgtaattatatacctttcacaatagttgagtgctcaagctacaaggttcaataaacctacaacaatttatattgttgtgtctt

SEQ ID NO: 90004 - DNA, 528 bp, Cannabis sativa
tggttagtgcaggaattgagtttgcagttggaaagttgcacaacttgacacttcaatgtgatctgttagaaagaatcagaaaggcacaactaaaagattccgagctagtcaggattcaagatgaggtattggctagtcggcctaaagacttttcaatctcgaatagttaaatgtgattgtacaaagcttgagtttgtgttccttgtgttgatgagcttaagaaagaaatccttgatgaagcttacaccacaccttattcactgcagccgggaaccaccaagatgtatcaggatttaaaaccctacttctggtggtacaagatgaaagaagatgtggtggactatgtgtccaaatgcttaacctgccagcaaatcaaggctaaacatcaaaggccggcaaggttgctgcaacctttaatccttcctgagtggaagtgggaggacattgcaatggattttgtaacttgattgcctagaaccacaagaatgtatgattcggtatggttcatagtggacagattcacaaaat

SEQ ID NO: 90005 - DNA, 1203 bp, Cannabis sativa
tgtaggagagagtgaatgagacatttataagtctgattcctaatactgctaatgctgctacattagatcagtttagacccatgagcctctgcaattttggctataaaatcatctctcgtatcttgacggaccgagatgcgtcccagactgaagcacttctgctagaggttactcagtgacttactccctactagaagcaacctcggttttctgcaggctgatcaacaattctgtgaatttttccattttgaagtggagatggcttttcactggttttgtcaatgtaactgcatgtgggcattatggttctggattggcattaggattcaagagtgcaacaaggacaatctgatagagtttggaatatggtggtgtaatctgaatgagctgaacttgcaggtgatgattgtggttctgtgtgaatcaatttggaattggcgtaacgatcgtgtgtttaaaggacaagaatatgatatgggggtaatttttaggaaaattatacaccgaacacgggattttatctcaaagacaatctagtttgaactaggtgacaaacatagaatggagtctcatcaaatggggaatgctgggctaggtttcagtgatccgaatgtgccttggtgctgcaaggttgatgcttccatctctgatgatgttgttggttttgtagcaatccagactaatgattcagaggtgggagagtctctggtttacttcggctggactaaagtcaggggtgtgttggagggtgaacttctcaggattactttggcactgcggatggcaaaggagagacaaacctcagtttttaaaattgagacggattcattgattgctgctagtgcctttgaaaattctcatcttccttatggttgggatacttacccgttgtttcgtgattgtttaaatttgtgtaagtcctttgataaggtctctgtttgtcatgtgaaccgagagaacaatgtattggctgatgcacttgcccgttgggcgagagtgcacaaggtcgaggccactggtctcttaagggatgtagccccctcttgttgctactagttttctttgctttcaataaaagttttgttacccataaaaaaaaagcaacaaaacaacattcaaagctcagaattgaatttcaccattaaagctccaagtttgagttctaaaactcaaaactccgctaaaccttcaaacaactaccaa

SEQ ID NO: 90006 - DNA, 579 bp, Cannabis sativa
  modified_base (435)..(447): a, c, t, g, unknown or other
  modified_base (538)..(540): a, c, t, g, unknown or other
ttataagttaattattttttttttatttaatttttaaattaatcacaaccattcaataataatctaatgactaaaaaaatataatagttacatttttaatttttaatgtaaccattgaaatcttcatccattatctgtaacatctatataaaaataaatgttagaatgaaacaaaataaaatcaattatgattgtggtttgttcttttttttttatacatacactatttctttttttacttttttatttatttttttatgaatgatgtttagtacaatttttttaaatgatttttgtagtattatttccatatggcatcttaaggtgttcaatacaataccgatttacatacacaataattagttaacagatttcactacaaaaagttgctacttttagtgacaattttattgtcacaacataaattttttgtgnnnnnnnnnnnnntttagtcacaacaaaaaattacttgtgactaaaataaagcatttgacacaattagttttagtcacaataagtattgtgactaaaaatacannnagtcacaacaaattataatttttgggactaatactttta

SEQ ID NO: 90007 - DNA, 643 bp, Cannabis sativa
tttatcactcacaaatataaggtggcttccgtcataattatattcaacaagctacatataagtgaacaaaaacaagtgcaaagatttccaaagagtgtcttccccaaaaacaatcatttctcaatacacattcagctagtcaattcgggaaaaacatcttacttagaagaactttccaaaagaaaacctgaacaaaacataatgattaacaattatcatacacttatctaaaataacttgagtgtattcaaaacaaagcaaaataagccgatctacaagccctatgaagctaccttctctaaacatttattaagatattttacaacacttttaatggcatcattcaagaaacaaaaaggctttaatgtaggattgtgtggtcaaattcgtaaccttctggaaatttacttgcatgaatactttcacacttcgtaagagagattgatctgtttcttgtacacataatgcaggctgtttttcagtatgtggtttctgaaatgttatcttcagtatgcatatgaaatgtaaatattttgtggcacaagttaaaaaaaaaaaaagaaaaaaaattgaaaaaaaaaataaaaagaaattatatatatatattataattagctataaataattgtcatggtgaaattga

SEQ ID NO: 90008 - DNA, 679 bp, Cannabis sativa
acagataagggatttttattgctagtgttgatattacaagtttgaagaacagatttcacaatcttttctgatggatggccaagtctattgtgccatagatcatactgagaaagttgagatctgttacagtgagtacaatttgaggaagttgactaagtgttgtgtgacagagaagcagtgaatgcacatgggacaacagctggtgtgttgggttacatatgaaattgagatggcttaaaaatatagaggccattctggtgtatcccagtgagaaggatggcttgtgtttcctgatccttagtaaaacatttgtcagcatgaaactcaaaaaagacatgattatcatgagcaaatttagaaatactaagtaagtttttggtaattttaggaacatgtaaaaggttatttagcacaagaggataagagttatttgtatgaataaaagattggccaatgtgtttgatggacagacctgagccatctccaacataaagctgatctgctccttcatactcaatgctgatgttgaggttttgaacattgggattataatgattagatgcactagaatcgggataccagttgttgtcatcaacaggagttgtttgagcaacattcacttgagcattgggagggttggaagtgggaaagacttctgtaaagctcttatcaaatctgt

SEQ ID NO: 90009 - DNA, 701 bp, Cannabis sativa
ggatcagttaattgagcaactttaattttgtctaatagattcgattgcaatgtcaaattattaagtttgcccacaacaaactcgataccttatctggccatatcatctgttaggtgaggtgaaatcttgatcatactagtcacttacccgggaccctttctactaagggcatttgccactacattagccttcccgggatggtaaaggatgtcacaatcgtaatccttaaccaactccaaccaacgtctctacctcatattcaaatctttctgggtaagtaaatatttaaggctcttgtggtctgtataaatctcacacttttctccgtagagataatgctgccaaattttcaaagcaaaacctactacggcaagttctagatcttgaggagggtatcattgttcatattcctttaactgacgggaggcataggcgatgacccgattggcttgcatcaaaacacactccaaaccctgtctggatgcatcgtaataaaccacgaacttctctttcttagatggtagggctaacaccggagttgtgataaatcattgtttcaactcctggaagcttacttcaacttgtctgtccataaaaactgctgattctttttagtgagttcggttaagggtgttgagatcttcgaaaatccctcaacaaaccgacaaaaataattaattagccaaacccaaaaaacttct

SEQ ID NO: 90010 - DNA, 1847 bp, Cannabis sativa
attgtgagggaggtatttttggggttttgaaaaaaaaatgcataaattttttagggtttagatttttggtttaataataattttttttaattttttaagtatataaaatcaaatttcccttgttatttacattggaatttaacaaattttaatttaataactattataaaatattattaataatcatttaaaaggcgttacttcgtgatgatgttggtggtgcccatgctcaagttgagtgagtctcttgtattactcatttataaatgggcaccactcatatattaaaaaataattaaaatttaaaagttttttaactaaaaaattgctaaaaggtaccaatattatttaaaagtgtcatatattactatttgtgtaattaagtactgggtctcagataataaaatttaataattattataaaatatctctctaccatttatatgacaccgcttatagatagtactaaacatcaataataatgctaaaaaagtatttatttgtacgagaaactaagaacttttttgacattattttttgtttttaaaaatatacgtttttcagaaatgagaacaaaatctaatttttataattttcaaaagacaagacttgtttggttagtttactaaatatatttttaagattttttttttttacaaaaaaaaataaataaataaataaaaacaaacaaacaaacgaaaaaaacacttcaatactctagaccctgatctatgaccttaactcagacccaacctgagctcggacctagagaccggacccaaacctgtgactttgacccgaatcccaacccgaccacagacttagactgaacccctaactcaaactgatcttgaatccaaacccagcactactggtcccaaaccttgacttaaacctgaacccaaactaggatctccccaaaccaaaccctgggttagggtcgacttttaaatttagtgggccataggaaaaaaaataattttgggcccttatgtagaaaagaaaatgtggtatttttttcaaaatcggtagaaaaaatatgtatttttaaaaagaaaaaattttatttggactctgggctaggtgggccctagggcacaagcctagtctgcctatgtccagtgtcgagtttgcgttggatcccaattcccgacctcgatccctaatctcaaacctgatccttgaccccaacctcgacctcgttcatcgaccttcaccccaaatccaacagtgactttggatcccgactctgatcctaatcctgaattccagatctcgtacgtacccaaattagagtggaaccccgatatgagatatacaaattaatatgatgtgtgagaaagtaaaaaaagaaatattgacaagtaagaaaaagaaaatataactaaacacctcctattgtttttaataagtaattttcctatttttaaaaagtaaaatagttttcaagttagaatgacaaatcgcttttagatttatattttttttaactagttttgatgaatctatcgatgttgattttgaaagtcttaataaaatttgattaatttatatacatattattattatttataccccaaaaatattcatattatgtgcctaatattatatttctatatttccttatatttccttaaaaaaaaaaagaaagaaagaagaaaaattgcatgcccatgcaatattatatatagaggcaaataaattgcatggcccaaagtatatagcatataaatttatcgttcacttctttaattcaattttcaaaaagagttattattaatatgagtaatttacgctataaataattaaatttaatttttagttgtaaataaatatctaagattaat

SEQ ID NO: 90011 - DNA, 554 bp, Cannabis sativa
actagtttcctctcagcattaaaaagcttcttgttgacttcacccagctccatccggacagctccaagttccaccgtgacgtcatcagcatccttcttagtaaagtccacctccgccctcatggtgttggacatggcatcatttttggaggcagcagatttagctcgggaatagatgtaagccaacttcagaccagcctacacagagaaaaaactttaaagtctgaaccaagtaaagaagaattaaacgaaactatcaacaaagatttaccctggtgaattccctcaagactcctcccatcagcaactccagggaagactcgttattagcaccaaccagctagtcacttacctcaggaaccaaccggttcatgtaatgggcgagcatctctttgcctttcttggcctctagaagcactagccaatgtggagtacgagcccgcacctgcttagatccgttcttggccatcttggatccaccctttgattgcttaggcctgtccgagcttcctcctcgatggccttagcaacttttggaatagatggatcaacaac

SEQ ID NO: 90012 - DNA, 842 bp, Cannabis sativa
ttggatctttcccattagtagtggcaaatctccattgagttcttctagataaatgggacattgagcaaggttaacctcaagtcggtcaatggtctaaaatgcaattttgaacaaaattttaacaaaactcccattatctactaggatctgggacactctcttgtttgtgatttcaaattcaatctccaatggatcatgatgtgtgaaatgtacattccgagcatcctcttcagtataagtaatgggcaagttcatcatctacgacctttgagttggtgcttgcactagggcataaacctctcctctatgttttagctcatttagatagtttttctatgcatttcaagtagtgcagctaatatgcggaccctcaaagatggtcacagcatgggcatccattgatggtggcgctatccttagcggattaagattttgggtcccagagcttggattgtttaggtttgttgaacaggcaatatcccttgagggacttgtgctctcgaagcttatggatgaccacacactgaggaggtctagcatgtccttactgtttgggacttacttgttgcccttgtactatcaattatcttaggtacttaatcgatacctttatctattggtggagatggcctaacttgatcaggttatccatcttatccttcaactgattgcactctttgatagtgtggtctatgtcgttatgatactcacacctcttgttcgaatctctattgtttttctctctagtgaacagtggtgtcggttgcccgataaatgttctctctagtgtgtactgagttggtgtatatggtatattggaatttgtatacctcgtgactcca

SEQ ID NO: 90013 - DNA, 657 bp, Cannabis sativa
taataataataataataatcagttcaatttgattggctaattgcagtgatgaaaaacaagactatctcatcaatctgttaaagaatatttcatttgaccactgataaagcaagctcttttcacagactccaaattctgagaattaaaaaaaaatgataaatctgaatagaatttcaaaataataataagcagtagaatttgattgggtaattagtaatgaaaaacgagtatttcatttgagaatagtggagatattttgttacctcaagaatggtaggagcgtaagttgagaagaggagcatccatgggcaggagaagagagggcgaggccggcgtcgaggagagtagggataatgaatagaggcgtgtagtgtaattgggaatttgggagagcaataacaatccaaatgcctaaaaatgaaaggaaaatttgattttttatacttattatacttaaaaattttccaataaactcgtaatatttcatatttgtaggatatgacacattttataatatccctaaaatacttctcccatttacatagagatggaaattagtcggttaatgtacggggaatgtaatccccgcccccatccccgttacctatttatacccccatccccgccccatccccgtctaataaccaacggattcgg

SEQ ID NO: 90014 - DNA, 670 bp, Cannabis sativa
atttttctcgatattgcttcacttaattgattaaagaaaaatctgacactcttgataaattcaaaatctttcaaaatgtgcttgaaaaataattaggaagagtcattaaaaaatttcattcggatcgtggaggaggatattatggtcattatttagaatctcgacaacacatgaggccttttgttcaatatttataagaaaatgatatagtttctcaagacactatgcatgtttcacctaagcaaaatggcattgctgaaatgataaatcacactttaacggacatgattagaagcatgatgaatagatcaaatctaccagagttcttatggagtgaagcactcatgactgctacttatactttgaatcgtgttccaagtaaatctgttcccaaaactccttttgagttgtggactaggaaaaagcctagtttgaattaaagtaagaattcatgatcacaatttgaaaaagttagatttgagaaaaattcaatgttttttcattggttacccaaagcactcaaagggctatcgcttttactatcctatttgagtattgttgaatctcagactgctaaatttttagaatttgatgttgctaaaaatattaccttaacatctcttgaaacaggagagtcatataagggatttttattcctatgtctttttca

SEQ ID NO: 90015 - DNA, 666 bp, Cannabis sativa
tgaattatatatcatatttttatatatggctgctgtagtttcttcccgcgttaagtttccacataataaaaaaacttgatgtgttacttttataattgatttccgtgttattgtctgtggtgctttgcagaatatttgtatttgtaatggaactatttgataagaatcccaaatatattatgatagattgcataagtttttccaagactatataatataacaattttacattttgatttgtttttctcaaacattttcactgtcgcaacacaaaaatatgacaccgcaaacctattattattttcaactatcttttttatttgaagaaattattttcaactatcttgatctttattcttctcaactttctgtccttgctctttttcttctctaaattataacctacaaaacaagcctagataaacagaaataaagtacattaatataatcaatataatgtaagcttgtggtcagtaatttatttattttttattctttttggtttacagtggaaagtttatgacattcaacaaataattgaaaagacataactaccccaaaaaaatttgttcaaccatgaaccaatccatagactctgagcaaaaaaaaaaaagaaccaacccatagacagtacttgtgcccactctgtatagaaaatttagaaga

SEQ ID NO: 90016 - DNA, 707 bp, Cannabis sativa
atatttatgagttaataacgaaagtggtagtaacggtgtaagagaattgtaacattaaatatttaagtgtataaaatcaaaaacattaagtatttatttcgcaacttacccttttaataatcaaataaatatactgcttctttaataaataaactgatttatatatagctagctaatacttcatcatatattatatgtatggatatctagttttatgattttcaaatttaattatatataaaaaaagaaagcataagcataaagcagttgccagcaatcacacataaaatcaatcataattttggtttggtttggtgataataacaaacacaacccatgcttggtcaacactgtttatatatatatatttatgcaacctttgattgtgatttatgacatattgtaaatgtaatcgacccttatatccatcgatcctatattgaaaatacttgtttattatttaacaaccacctttattaatgttatctttaaattaataaactaattattaaaagcatttttatttattgtacacaagcctgtcatagtctcatgactctattgataaaattattacttttaaacttataataacaataataaaattaataataataataataataagatttttttaaaaaaattaaaataataataatgcgtgtgtgttgtcaccagcccaacccattttttcaaagtatatatac

SEQ ID NO: 90017 - DNA, 1011 bp, Cannabis sativa
gtgaactagctcctgacaccactctctacatgtttattgtaggggctcttcaatataccaccattaccagacctggactctcctattgtgttaacaaagtatgtcaatacatgcactcacctttgctttcacactagactgcagtgaaaagaatcttgagatacgttgctggcactcttgactatggtctttacattaaaccagctcctgatttagcgttagatgtgttttgttatgctgattgggcatctgaattggatgataggaaatccaccacagactattgtgtgtattttggaggtaatctcatagcctggaagtcacaaaaacaagttaccatctctcgatcatccatagaagcagagtttcgaagcttggccagtgttgttgctgaagttgtgtggattcaatcactgctgcaagaacttcaaattcgcatccttgcctatacatctgtgtggtgtgacaatcagggtacgatttgttggctgcaaaccctgttttacatgctcgaacaaagcacagtgaaattgatctgtactttgttcgagacaaagttctttggcagcaaattcaggttaaacatgtccctgcctctgctcaacttgctgatttcttcaccaaacatatagtagtagcacgttcaatgaattcaggtccaaactcagtattttttctctcaccacattgagtttgaaggggctgtttaagggagctgagttggttaagtctgttaattctgttaagcactatttgtcttaatagttaggtttttagttaggggttagttgttggttattcacatgtatatataatcccttgtaattcctaactataatcaatagacagaacaactctttctttctttcgattctgttctctttctttctctctcgtttgaatctcacaatctccaattatggttatcattccataaataccaattatgaaaaaaaaaaaaaggttgatctgcaattaaattaggactaaataaaaaattactttagtttt

SEQ ID NO: 90018 - DNA, 656 bp, Cannabis sativa
ctgaatcatcagtctttgaactttaaaactttttccttgtgtgttaattgctgcagaccaaaagagaaaaaagagtatgagattgaatataattgtggtgattgtatatgaggatttgtatatacttattttaatatatgtatgagtttgtctaacttttacaaatagaactatcataaccagtatttcattatgatatgaccaaaatgctataaatctaatcgattttaaagaacccaaatgtgaaaaaaaataataatatatcataaaaatggagaatatattattgttataccttggattgagcagagttggagaaggactcatttctgatcttcctgagttacttgctcaccacttaccactttaattacgatctgttttttggatcaaaataaagtattggactctgattagatgagtaacaatctctgattgaagccctttgcataactgaaaaatcccccccaaattatctttttttttttttaagaaaataaagtaagtaagactttgcatgccaaatggtgaaagtaataagcgagatgtagacagagaagagcatcacgatgaaattattagggtttatgagaagaaaatgaggttttatatgaggttctctcaaactcatatttaaactcttttgacataagttt

SEQ ID NO: 90019 - DNA, 619 bp, Cannabis sativa
cctagcggccagggaagagataagtggatatggactagagagggctgtggtaaattcactactaagtctgcctatttgacacatgcgtatgatagagccccggcctgtgtggtggctccggccttatggaacaaactttgaaattcaaaagttcttgagagacacaaaatcctttggtagagtatcctctaggggtgttcatcaaacctctcaaaccgctcaaaccgctcaaaccgcccgcaccgcaactcaccgcaaaaaatatgcggtttgaaattcttcgcggtgcggttgcggtttgaatttttcctaaaccgcgcggtgcggtgcggtttgcagttttgaatttttaaaccgcagttcaaacctcacagcatgttttaaaattcaatttttatttttatttaattaacccatacatatatttaattaagcccatgtgagcccagcccagcccataactattacggcaaaacccttaacctcactcacatatccctgccctctctttgcctcagcaacaaaaagaaaaggaactcttgtcttctctctcttacagccaacaacaccatcgacaaaagacaaatctgttggccgtcggcgccttcacgattggcca

SEQ ID NO: 90020 - DNA, 1044 bp, Cannabis sativa
gtaccagggtgaagccaatcgagtatctgccctcagatgcaacttcagctgaagatgcagtgactgtaaatccagaatttgaagcctggatagtgaatgatcagctccttcttggctggttatatggtttgatgactgaaagcatcgccactgaggttatgggatgcgattcagctgctagtttatggcaagcgttggaaactttgtttggagctcattcccgtgtgaagatggatgactatcgcactaagatacaaacattcaggaaaggaactctatccatggctgagtatctacgacaaaaacgacagtgggccgatgtcttgacacttgcaggtgacctttacccagagaaacaactcgtctctaatgttctctcgggacttgatatcgaatacctccctatagtgcttcaggttgaagcgaggatctccaccacttggcaagaactccaggatattctcctaactttcgacagtaagctagacaggttaaccaccttgtctgggtcatcaaaagttcctgtttctggctctccatctgccaatattgctgctaccagaccatctggtttttcaggaaacagacctcaaaataatgctaattatggtcatggaaatcgtggaggatctaaccaagctagaggaggcagaggacctggtcgatttcgaggcagaggaggaagaaatcagagtaattctaaaccaacttgccaggtttgtggaagatatgggcacagtgcaacctattgctacaatcgatacgatgaaacatacatgggtacggacccgaatggatctaataacagcagcaaaggacctcagaataacaacaatgggaacaatggagcctcggctttcatagctactcctgagatggtggaagacacagcttggtatgtggattctggggccagcaaccacataacagcagatccaaacaacatgactcacaagaccgaatacaatggtgaggagacattgactgttggtaatggcaataaacttgaaattgctcatgttggtaaaagccttttaccctcta

SEQ ID NO: 90021 - DNA, 611 bp, Cannabis sativa
tctgtgctttttgtgctgagattcaaattcaatttaatgtgtaagtccatacattgcaaagtgataatgccaaagagtacacatctgctcaatttcaatcttacatgacactctaatggcatacttcatgagacttcttgtgttgatactgcacctcaaaatggtgtagcaaaacgtaaaaacagacatcttcttgaaattgcatgtgccctcttagttcaaatgaaagttccttaaccctttcgggccgatgtagtttccacagcatgctttcttattaattgcatgccatcccctgtacttaatggtgagatcccatctaaaattctttcttcctagtaagtcattgtttccagttactcttggtatatgacaatgtttggtatctgtcctttctccttccctgtcaagatgaacaatgcggttaagcgtgcagattgttggtttggcgcgaagtgagcttggccgctctaaggcattaaagtgtgtttttcttggttattctcgtcttccaaaagggtatagattttattatcttgatctcaacaaatatcttgtttctattgatgttactttagtggaaattacacctcatttttcattttcaccta

SEQ ID NO: 90022 - DNA, 818 bp, Cannabis sativa
  modified_base (41)..(58): a, c, t, g, unknown or other
tagtatagagaaaaattagagtattattattattattattnnnnnnnnnnnnnnnnnnattattattattattgttatttaagtaaataccctttctcgcaatcaatattattaattatatctcaattatttaaagttgttgtcaatcattgtatcttataagttgccatcaccgtatttcacttatagtcgtcgtcattgttatgtccaatagatttaatcaatacataattatacaaataaataatataatgaagtgctaatatagatgaaaagattaaaagttaaaacaaaaaaattaaacactacaatgtcatatccatagaagcaagattaataagagatagtgttaaaactttatagagaagaaaaaatttaaaattgaaaaatttataaagaaagcacttaagattaagagatctttattattattattaataataaatttattaaaatattaaaaaaaataagaaaaaatttgactctcaaatatgtggttaaaaaaattatagttttgtgtaaattaaatagaatacatatttggatttagtatcattaattattaattttttatgatctaattaaaacatagtagcatattattatatataattgattatgttactattttatttattttttttaattacgatatatataaatgttgaattttaattttattgtgtaacatatatatcatttaaattaaaaaaattcttactaatgaataaattataaataattcgaagttatcgacaacggtgaagtcgtcgattataaaaaaaattatatttctccaacttatcgagaaatatttt

SEQ ID NO: 90023 - DNA, 561 bp, Cannabis sativa
  modified_base (67)..(70): a, c, t, g, unknown or other
  modified_base (513)..(516): a, c, t, g, unknown or other
tcacatatattgaactatataacaatataattcctccattatacataattatctagttagggttttnnnnatccatttcttaattccgggtattacataagggttactgcctgactttcattctaacggtgagaccacccttcatgattaatggtcatgactttacatattcttcattaatttagtctcggtatttttgtaccatgtgttgctactcttgacacgtcatcatcgttaaaatttgggtaaacaattactaaattctaaatgcttaacttataaatttttttttaatgtcttaacagtgcatatgcaaatattacttcaaatactattgtatttggcacaaagggtccgcatatatccctttacttgtccaaagcaaccatacaattatgaatgtggttactatgtgctaacttatattcgtgatatgcttcaacaatcaactcttattacagccatcaaagaaaaagtaagtatatactcatttttactataaatacaaacatnnnnaagtactatcttcttaattagttttatttttttaatttgacagtt

SEQ ID NO: 90024 - DNA, 739 bp, Cannabis sativa
attatttttcctttcattttttttccaatttccaacttctattttattttttgctattgcagtgttatttatactgattttcgacttttggattgcaaaaataggaaccaggctgaacaatatcataaattgttcaaggtatcacattgctctctccacctttatgttttattaatattgattctttgttcaagtcgggatgtgataatcatttctttcgtaatttttacaaaacatacataacttttcttgttaaaaaatgtacttgcaatagttgagtttattgccattcaaaccaaaacagatattgggatttttaatcctagctactccatcccgcaagaaatcaaaatcatattgtgattcttctttcttctcaaactcttattgcgattctaactctctgctattctccaccaccgaaagaaattgacattgtgtttcttcattcttctctcaaacacatatttaggacaacaattcgtgaccccatttatagtctttttcagattgtgaggtttgtatctcaattaatttttctaaatggtgagcttttagccattgctctagcttctattcattcaagaagaattagaattgttagtcttcgatgtgaatttttatttcagttcatcatttacacacttcattgcttgttgtagtgcttcaaggagtattcgatggagtatctgggttgttgaagtgggcgaaaaagctttaaggtacaattctcatccaa

SEQ ID NO: 90025 - DNA, 710 bp, Cannabis sativa
agctaagaaagaagaaccaaggaaaaacaacaactagaatttgaggcatccgtttaagatgactcaggctgaggctaatgctagtccgtcagtggtgacatgtcagttgtccataaatggttgttcttatagtattatctgattcaggagctagtcattcttatgtatcgagtagaatagttgagagttttcataaatagtgcgatgagtatgcttcggtgtttggcaccctattaccctcgggacaccaaattgtatctactcagtggattaggtctttttctttttggattgacggttatgaattaaccgccaacctgattgaattacaattgtctaattttgatataatcctaggaatggttttcttgtctaagtatggggcaacaattgactgcaagcaaaagatggtggtgtttgagcctgaaagtgctaatcgagcggtgtttgtgggtaaggttcaaggatggcgcacacctagaatcacaatcctaaaagttaaggatctgatgcacagagattctctaggattcctagttactgcagtggatagtagtcaacctatgtcatctagataataaaatacgagactggtgtgtaagtttctagatgtatttccagaagacttacctggattaccaccttcacgaggaattgagttcataatagaattagtttcgagagcagaaccaatatcaaaggcaccatat

SEQ ID NO: 90026 - DNA, 672 bp, Cannabis sativa
tacgggcatggtagagatatctactatacctgttaatatcttttgtaatgaccataaaatttaacttcaattttattttatttacaaatgtatttttcaaataaataaataaatattttgtaatgtaatttataaatttgtgccataaatatttaaattgagtaacattatatatgtattttctcctccaccttcaacttcttcaacaacccaaaaaacgacacaaacaaaacaaagaacaagtaacaaaacgacaacgacgagcgttcaaatactcaactctctagcctctagtctacactctccattttcggcgggacccgcgtattgtgaatcattcgttttttccaataataccctccaccaatggcagcctcattatataaattggaggtattcttcccgttttaccctttccttttcagctcggaaacaaagagagcttcctcactctcatccttccctccaaacaggttctctctctctctacaaagattttctctcagatctgatttttttctctcactttctcggttgaatcttacaaatccttgtgtttagtttattttgatttttgaagttattaatttctgaacttcatgaatgattgtttgcagataattaatcaatctcgaagatcgtaatattcggggttttggagttcgattaagc

SEQ ID NO: 90027 - DNA, 618 bp, Cannabis sativa
ttccatcttgttgtgaagtgtagtcttcactatattcatagctgaaaaagatgttctgtggtagttgtagaaaagtataagaataagagttatcactttatatataattggaaaaatatctgcttttctagtttttaccaaccactaacataaatttgaaatggttgccaaaacattaaatatagatgttattttctatcttaatgataaataatatatctatagaaataatcaaaataaaatataattcaatccctttatttataaaaatggtagctcatgtaatatatatgaaatgggagaatggcaatacctaattatctaaaagagaggaagaagagaataataatacctaattatctattttgaaggtcttttaaattttttagttttcacttttttttttaattataaaaaaaaaattaaaagaaatatatgtcttagaaaataattgcctttaaaaaaggaaacaaatgtgttttttttttcttttctaagaatacatatatatatatgattttgtccgatgatgtactttcacggaatgtattccgtggtacattagattggtctcagggtacattaaatgagtgttagggtacgtttctactttttaac

SEQ ID NO: 90028 - DNA, 665 bp, Cannabis sativa
ttttctttgaattgtactgctgccataattttttttttggattcagtcacatatgtttaaattttaatttatgtgatgatcataattgtgggcttgtgtgatcggcagccaattatgtatctataacactgaagcgactcataatgaatcgtatgtatatatggtttcagtttttttttttttttttttggcaaatatacatattgaatgtttttttttattaaatggttacgctttcaaagcccagttttgtatggtggattttaaaaacagttttgtatgatgtatcgtacggttatggcggcttaaggtgtagatatgtgttttgaaattaactattgatactgaccgcgacttctttgatactaacgagataatttgatgttggtaattaattttgggcttatgatatatgaaatgattattgtgtttgttttatgtacaaatatgaatattgcttattattaattggtttggcttcagatttaattaaagttgcagtatattattgtttacgtcataaaataataagtttatatttatatatattagtattattctatattttggtttaaacaattgaattcaaattttggtgttggtttattactaatattttgaataaattaattgaaacaatatgtcgccaaagtgacctcttttgt

SEQ ID NO: 90029 - DNA, 721 bp, Cannabis sativa
gtagccactcgtggcacactctccagaggaactgtttgactttaggtgggattctcaagctccacatatgtttccaccatctcgtagtgttgtccgtgtcagagttctcttcattaactcacccattaagtgcagtgatgtacccacttcgaacattgtattccccgttttttgcaagtgccaaattagtctatcttcactttccaaggagccttgttggatattcataatcagctccgcatcatcttcacaaaagatagccttaataaactcggtatcccaatccccattggcaagtctaaggtcaacgactttggtactctcggggatgtccggattaataattggtttaaatctcaccggtctaggcagccatctatcatttataatatcaatgttttcccccgaaccaactctccatctagaccctgcttccacaatctctctaccccatagcaaacccctccaaactgcagaagaacacgagccttttttagcttccaaaatagaggagtgggagaagtaactgcttttcaacaccttccccaccaatgacaagggatttctaacaacccgccacacttgcttggctagtaatgctttattaaaaagctccaaatctttgaaccccaatccccctttctccctcggaagacaaagcttactccaagctccccaatgtgttttctttttttcttttgaagagccccaccagaatctt

SEQ ID NO: 90030 - DNA, 551 bp, Cannabis sativa
  modified_base (509)..(512): a, c, t, g, unknown or other
ccccttccatgagggggagcagtgttggcacactttaacattgcacttgactttgggagaaccattccttccctgaagtcctctttgttagaggtgatcatgggctccctattgtcagcaacgatgttaggtggagcccccattttagccactccactgcttccccctccatgggttaatcgggtcttggtggaatctctaatcttaagtcgggtgtcgaagggttggctacctagttggctttttggtctgggttttcttttgttgccccttaaactcaacaacagcattgaccttcttgatcatgttcatcagatcaataatcattctggattcaagcagatttggaaaaattaaaacaccacaacaaacaaatcagttataaatgtagaaaataacaacgcaaatcacatggtttcaagtaaagacatcatgtgagtacaaccatagaatgtgttattatatggttcacctctcacaaacaaagttactgttggaaattattttannnngatcttagatctacacacaagtatgttgtttaaacaccc

SEQ ID NO: 90031 - DNA, 977 bp, Cannabis sativa
aatatcaatatatcagttctattatctctacttttgctactgttgtaccgagatgataggaaattcctatccctctcttccctcacaattatttatggcccatcattctttctcttaaaaaaaaaagaaaaaaaaaaaaaattagatggtatatcctttttaagttggtgtctctcatttttaccgcgcttcatatttctttaatttatagttttataccctcttttttattctttcttccaattatacccctccatttcacacctttttctctaaatttgcataacttttctctaatctcgaactttgtagtcatctccttccttggagctataccctttaattctctctcaaagattctcaaccatcaacagcaatcggagtcgtcctcaacttcaaaccgttgcagccacaccaccatcaactcccttacacagctgcagcagcaactagtgctgttgtggttgtttctcttctttgttgacccttccttatttctcacattttgataataatcatacagtttgtttgtctcctgacttcaccgaagaaagaccattcagagagagagattggttcaattccttataataatttgatttcatgtctctattctatttaggttaaataaaattgtaattgtacttgtattacattttgcattttggttttctatgaagtatttcaacaaacacttacaaggcatttcaatttaagaatatttttatacataaaatacaagtaatgatcctaacaaatagacacacacacacgtatatatacaatgttgagaagaacatagaaggaaggagaaaccataaaatctatacaataacataagaagaaaaacaatacaaatttaaagatagaaatagaagattacgtacaggaaaatgggattgactcaattttcattaatatggtggagacgtagtgtcgatctttatggtaaaggcaatgacgatgatgtagtttcg

SEQ ID NO: 90032 - DNA, 1288 bp, Cannabis sativa
cggtctcggcattcctgtttttcgacgagttctttcttatactttatttttcatgttcttaattattagtcttaatcaattgttcacaataatccgaacacttgtcccagatcgactttcaaataataattgctctagtgaataactaaagaaaatagatagatggaaaatagaagacaaaaaacaacgtctaaatatctctcaaagattcactaattacttaattattggcgggtctctttgtatatgctttccagaaagaggaggacttaataattattcgttcaccggaatcaaaagtgaaaattttggtagatagggatcccataaaaacttcttttggggaatgggccagatcgagtcatttccagctaaactttcaattagggttgaaaatggagattgtttggcactttattttgattttaatgtgatttagttcttttccaattttctatgtgcatctatttgtacttattttttttttaattgtctgatcaccaattaactgttttatgatttcaatacaaaatttaagaagttatgctatagtaaaatagacacagatttcgatataagagtacttatatggtctgtgtagcatttaagatttttatgtttgatgcctcatatttatttaaatttatcacgagagtaaaaaatttgcatataggttgagatttatatgccctaactcgaaaataaatttctttagtaaatcttttatcacataaaaattggaattcgtgattaattgaattatactaaaccatatgaagtagatttgattcaaattaatcaccttaagcttgaatcattgttaaattacactttaatttatttttgttttctttttcaatagtttttaattttttttttcacttattattatcaccaaataaaatttaaaaatttaattatttggtaattaattactgttcttgtaagatcaactttactcttgtgaatctattacttataaacgatacgtggacttgcatactagaaaatccataacagattcatctatatatatatatatttatatatatttcctcatcatgtattttgacaacacataaataatattaactaatattgttaagaacatatggctctatctctcctccccaaccattgtttgtgaagtttgttcatctattggcatggaaaagaagttaaaagaactcaagttcaactcagcattagagaagtcttgtttaatttatgtttggcttacaacataactaattaagggaaatttgattttctatacttagaaaatcaa

SEQ ID NO: 90033 - DNA, 1409 bp, Cannabis sativa
gcataaaacccaacactatatgtttcaaaccttattttggttgtgtaatactgtgaacagtaattgtagacatttaagttcatctctttcatcatagcaagagtatgagcacatgggagtttttctagtgggaatctattgcaattgcattttttttcctttaaatttactatctatgaccttgtttgttgtacaacttcaaacatgttgttgtttattggtttcacctgtagattaggtaaggataattaatgtattgaatgttaacaaaacaaaagaaaagaaaaaaaaaactacaaagaaattgttatgctacttgaagtttaatgtattcttacattttctgtcaatgtgttcacaaagttgttgattaatttcttctctgcagtaggtgtcaaaattattgtggttttttgtgcttttttcctgtttgtgtatgtccattgttgtgtcaaatctcttaatgactccattagtgtagtgattggtagttctctagctgcaaagtttgcttagtttagagattcagtaatgctagaagtcatagttgtatacatgctgtgtttgttatggtaacttgaccatttgtagtatccaacttattgtaaatagggtctaacacgcttgtccaagctgttaagctcactcatatggttaaaatttcttatctgtgtatgcttttgctactgtaaagaatagtttatcgagtttgcttgtattcttcttaaaggttgcttaataggtggtacacacagtagccatgagttatttctggaaatacattagaagctgccttaattatgctctcatgtatgtctgagatcaagcactattcttctctgaccccatatgcttcccttaattttgtaaaaaatcatccatgagtttgttatttctgaatccacaatagaaaaagctagggggaaaatgtgtccatttgcatcttgggtataggctgagagcaatgtccctccatatattgattttagtaaagttccatcaaccacgattatggatttgcacttgttccatccctttattgaagcatctactgccacaaacaagtacatgaagctattatcttctttagttttcatgtgtactatggttcttggattagttttctgtagcatgtgcaaaaaccttggcagtaggttgtatgattcttttgcttttctgcgtaattcttcatccacgtgctctttacttctccatgctttcttgtagttcatttttacgccatacttattttcatttctcctctaatgtcttctggcgtttgagttgtttttatgttagtaaaccttggcttgatgtagtttccaatcaatattgttgtagcctgtcttttttctacacatcttatgtttagatcataagtgtgtatcacctttctgtcatatttacgg

SEQ ID NO: 90034 - DNA, 1393 bp, Cannabis sativa
  modified_base (376)..(380): a, c, t, g, unknown or other
cctttgattgatgttctcgggttgtaggttatatcgaattgccccaactcgattgaccattttatcaatcttcctgaagcatcaggtattgataaaacttgtcttaatagtcgatcagttaagacttttatgggatgtgcctggaaaatagacgtagtttgcgagatgcatgaatcaggcatagggcaagttcttcaagaggggaatatctcgactctgctcccaataaccttttactaacatagtaaacaagttgttggtgttttccctcttctcacaccaaggctacactgattgcactctctgagacagctaagtaaaggtatagagtttatccagttattagtttggccaaaattggaggtgttgataaatnnnnntttatgcctttaaaagcttcctcgcattattctgtccattcaaacttcttattgcctcataaaacattaaagaatggcagacatttatctgttgattttgaaataaatcagtttaatgctgtcattcttcctgttaaggcctgaacttccttaggcttcgttggtgaaagcatctctattaaggccttgattttttctagatttgcctcaattcccctcgcattaactatgaaaccaagaaattttcccgaggatacttcaaaagaacatttcttcaggttaagcttcatattgtattttctaagaatttcaaagcattctgcgaggtcttttgtatgatcatcaaattttattgactttaccatcatatcatcgacatagacctccatatttcgcccaatctacttttcgaacatcccattcactagtcactgatatgttgccccaacattctttaaactaaatggcatgactttataacaataaagtcccatgttggttacgaaacttgtatgttcttgatcagggacatgcattttaatctggttatatcctgaatatgcatccataaatgtcatcagctcttgccttacagttgcatctaccaactgtgggaaacaatcttttggacacgccttatttaagtcgtaaaaatcaatacaagtcctccaagtgccatttagtttcgggacaagaataggatttgaaattcacgagggatcgaaggcctcgcgtatgaaatcattggttaataacttttcaacctcttctttaagtgccccttgtctcttagaatctaagggtcgccttttttgtcttttgggcaggtaattggggttgatattcaaatgatggaaaatcactttagggtcaatccctatcatgtctgaatggctccaagcaaattgatcctagtttcccttcagaaagtttattgactgctattttagtttttcatctagatttttcccaataaacacacatttagtgggattgtttggatctaaaacaac

SEQ ID NO: 90035 - DNA, 719 bp, Cannabis sativa
  modified_base (693)..(694): a, c, t, g, unknown or other
aaatacatattcatattatggcaggcttgcaatgttcagctcttcactcgagatcatctttgtaagttcttgagcttatcctcgaacctctatccggtttgcgagaaggacactgaaacacatactcaccttttctttgattgtgtatatgctaggaaaatctttgctgaaattggttgttggctcggtaatgtgaattggccgattgacattagtaatattcagtagtggtgtactcgaggccctcttaactttaagaactgaataattaacacgatttttgttgctgctatttatatgatttggaaaaatagattttgatatattatttagcttgtacctcttctcttaagtttagcatggaaattaggaaggttactcaatctaaaattttgagcatggcttgtagtacccttaagaaaagggagatgtgtctaattaatgtaattaggtcccggtagcaagtttttttggctgctgttgagttagcagccccttgttggctcgttgagcctttgttttgtgctgttttcagcctgcttgtattgcttagttttgaaaaaatttcttttgttagaaaaaaaaaaaagaacataggaagattttttatttaatttttggctaattaggattgttttccccaaactttgatatgtaccaaatcatgcctcttgaatttttttggccgttaannattccccctgaactattgagattgt

SEQ ID NO: 90036 - DNA, 940 bp, Cannabis sativa
acggtattcaatggaaccacacttattccaatgggaaaagtgaggttaccagtcaccttgtgcccggacacacccagagcacttttaaatactgcacattcgtggtggtagaatgcctaactgcttacaacagaatcctcgaccgaccagccctagtggactttggcgcaattacgtctatccggcacttggttctgaaattccctactcaagaatctcgagtagggaccgttcggggtaatcaaggagaggccaggcaatattacagtgttgcggcccacttaccagtattgatggtctgtggagttattgagccaggagtggcggaagaagatgagttggatccccgtgtgcgattcaaaaaaattgtagaacctatggaggacgtcgaggacgtgtcagtatgcgaccttgaccctagcaagatccttcggctgggaaagagcctagaaccggaggaaaaagaaaaaataattaaagcactaagggcagccagggatgtttttgcgtggtgccaaggaaacatgaccggtataagtcccatgtcataacccatgtcctcaacgttaacccagatatgccaccagttccacagaagcgacgtcccctcgatctagtgaaggcagaaactttggagaaagaggtggacaagctactaactagtggcatgatctgagacgtatattatccagaatggctggccaatccggtgctggtgcctaaacgaaatgggacatgtcgggtattataaattttacagatctaaacaaggcctgcccaaaagactacttccccctaccgcggatcgaccaaatggtggatgccacctctagattcaggctattgtccttcatggacgcctatgccggctacaaccagatcaagatgcacattgcggatcaagaatgcactagcttcaggaccaataagggggtatact

SEQ ID NO: 90037 - DNA, 1565 bp, Cannabis sativa
cacatgcattgcgaaaaacttattccttgaaataataataacagcaataatatttgattcccgatgccgtcatctacaggttacagcatttccttataattaatgataattttattatcagcacactacaattatttattttaaatagaaaaaaaaaagttaagaatctttagaaacagttattgaccctaatttgataggtaaaacagattattgcgcagagaagaagaaactagattagtagagcctcagttataagagactaaaccagctattttcaacccatcattgtaaatctttacttagtgttgatcatccaaacaccgagacaaaatcataacgtaacttcgacaaaatctcgtctcaaattaaaaataacaagaagcaatcttcttctcgtgatcgaaaacaaaaatgccgtgattttagctaataagaagtctgaaaacgtaacatatacaaatgaaggcctgtttctttctagagaaactgaacaaaaacaaatcaatacaatacatataaatgatatataaaaatacatagggagtacataccgctgtcgccgatcaacaaaagcttaataaggtaatcataatcagctcgagccctagctggtggagcagccattactcaaatcgaaattttctcaattaatttccctcaaataattgagtatgtacctctctgcatatccatgaaaaattaaaaacatttataaatcaaatctaaaattcatagaacaaacattataaataaacaagtaccagatcggtgaccaagagagagaaaggatgacttctagagagagaaaatatacacagagatttagaaagaacgttcacagaaattaaaaaatcaaaaaaccttgaacgattgataacacagacgcctacaaaaggtcctccgactacgatgcgcagtgcactcgttcgaatctttccttttcacttcccgtgctccgatctcttccacctgcgcactctagcaactccaccgaaaccagggagagagaagatagccaaaagagacaactattgggagagagaggctactgcaccaaatcaaagttccctatttctagcccaaaaaagaatcaaatttaagccaatagcaagaggccacctggtaaatcttctaaataagtgaaaatggaagcggatgtagatgatcgcagctctggtgactgagctggcaccctaaatcatcgttgaaggggtctctctgtcaaaaagcctcattaaggaacaactgtcatctgagtatgggtcctatggagctccgtatggaagcaaaggcagaagaaaataatgagggtttctaatgcatgattggctacacaatcaaataaaataaagaaagaaattagaatttgaaaaaattataagagtttaccatctataaataagtaaggtattttttttttatttttttaacatttatatgagctttttattttttttgttatatttaagagtttaattttttgaaatttttacatgaaaaatctattttacacaattactcatacacgcctatgtctatatttttacttacaaagttggttt

SEQ ID NO: 90038 - DNA, 917 bp, Cannabis sativa
tagttttgaacatgagactatgtgaatgtagtaattaacactttcatcaccaaaatcattggatcaattagtgtaatgttcttatctgaaattgtgttagtattacaactttggccgagtggagttaactaaacatgaaatttatctgtttcaacagagaaggacaatggtccaaagacagtaaaagatgtcaagctaataagtggagggaaaatattagacaacagcagaacagttgcagattgtcgtagccccttatgcgacatccccggtacagttacaaccatgcatgttgtagttcaaccaccaccacaggagaaaggtaaacattttttggcgtctccacttctacattcctaagctgcaaaaagactatatatccatcattgttttaaactatgcttttcgggtctttgggaccttgaggaaaactggaaaaacaagttactagaaacctttcttaaacgttttgtgattcttcatattaccaactcgaactccaaccaaccactatattaatctagttacctaactttcaatgcactataaagggaaaaactagcttttgcattggtttatttatggtatttaaaagcttattgttgttgattctttcacttaacagaaaagaaagcgactagcgaactgaagcaaaacaagtgtgtctgtgtcatattatgattgaaaataacagaggaaatgggagttggattgacatcatttttaggttggtacatattacataatacatattacagattgattctttgcttaatcagtaatttcatctaggatttctgatcaaacttaagcttatgcagataaagagagaagtggagcttgtaaaattggataaccaagttggatggctcgtgttggtggggttcaggatttgtactttgactgcatgcatatac

SEQ ID NO: 90039 - DNA, 873 bp, Cannabis sativa
caccccactagtttaagcgtgttacagtgcttttaaaaattactgtgcaacctttgctaatcaaagggtttatcaaaagtgataaaatttaaacttaaacatatattgtaatacatttataaaatctggatcgcgtatctacattttttaacttaacataatcaaaagatgtcgcacagtgactacaagatcgtgagccctggttgtcccgaagctccaacactcaaggtcgaactatctcgatatatacaatcttcatccaactcaaaactcactgccgttcaacaacagctttgcctttacctgtacataacatagcatctgtgagtcaatagactcagtaagaaaagtataaaacataaatatataactgacctaggactaagtgcccatacacctatcaacaagtcataaaccaagcaaacatgtataattgagtctcaaacgttcttgaccatagtataattgaccataataccacatgcactcagtactctagacgtactagtgttggtagcatcaattcatactgtaagtagaactagccataataccacatgcactcagtactctagtgtactagtgttggtaccactagttcatgctttcgaaagtataaccaaccataataccacatgcacttagtaataaggagtactagtgttggtagattggttcatactttctgaattgccaaacacatacattcacgatatcaagatgcaaccatatgtacaccaactatcattctaacagatatgtcatacatctggcaaagataaaaataaacatttacgtatgtatgtgtgctatactactcttacctcaattttaatttcaggtgtgtcggacaaccttagtggaaatagctgc

SEQ ID NO: 90040 - DNA, 1058 bp, Cannabis sativa
aaattctgggtccgccactgctcgtgatggagtgttcaagcatagtgctccctagctttgatagtctcgcctacaatgtggggtccatcaataatggcccctagatgtcctgcaactagtggtggcattgaatctccaacttgggcaccttatgcttgagtttggtggttctacacataacgatgcaggtggggattgttacgccttatgaggaattcaatctccctcttcaaattttgacactcattggtgttatgtctgaagtcattgtggtaccggcaaaactttgacatgtccctcttactaatctcccttttaataggaaagggctttcggtaggggactgttccctaagtggccataaagatggcctcaaggttcttcgtcagaagggtgaagtaggtatacttttccaccttgttcttttgtgtcatgggggaagtgttaaactccacttttttgccactgttcctcctagagatgttggcgttgtgcttatatctagtgtttttgccattggaggtctgggcagagttggttgtgtctacctgggcatctagtaggtcatcagactgtacgatgtctcatgatggcatgttgttgacgtgccctgcctgggtctatcgtatggcttctttgagtttgataaagccatcatctttattaaggaacttcttcgtgttgttggttgagattcatcagatgtctttctagaagtcactcaatggaagtatgccccccggtatggccgtatatcgaccttcttccatgaggcctttgacttttgtagcctcgaccatgaacctctagatgtaatccttcaaaggttctccttattgttgtttaacttctacaaggtcttctagctctgatggtacaagtcttgaagacaagaattatgtgtagaattctcgagaaaacttggcccaagaatttaatcttcttagggtgagtttaaagtatcattgttgagttgtttccgacaaagtggcttggaatatgcaacatcacacatcactagtaaccttctggagattgagttacatgtcgaagtattt

SEQ ID NO: 90041 - DNA, 1065 bp, Cannabis sativa
tttccctcttttgtcattatgttgttcagagccatcattcttgcgcttgcctccactattctcgttgtttgagaatcgatggagatcatctgcactgttcggcatgttggacaatgcttggggcactatgaggccctaggtttattcatcgttgttctaccctcttgtttgggctttcttgatagcttcttctagctttatgaagccatcgaattgctcaaggaactcctccatattgttcgttgagatcctcttgatatcttttttgaatcactcaacggcaggatgcctccgatatggccgtatatcagccttcttctgctaggcctgtgaccttggtggcctcagccataaaccattgaatgtattccttcaagggttcaccttgtctttgccttattttgacaagaccctctactcgggcaggtatttgtcttgaagtagagaactggacatagaactcctaagaaagctcttcccaagaatttaatcttcttgtgggaagcttgaaataccattgttgcgctagtttagctagatttgccaaaaatattaggcatcgcacatctccagatacttgtaggagatatttttggatctcaaagtacttcagctgtactagagggtcttcttttcccgtgtacatcttccaagttggcatcttgaatttgggcaagggcgaggcattgatgtatgctgaaaatggtgatcccctcgccttgtctagctcgagttttgaaggttttggactagctaggcccttgagcatggctcgtatttgatcctactatgcttgcacagaaggatcaatggatgcagggccctagttgattggccttctttgattgagctatagcctctgattggccagagcctggccagccataccttgggagagggtatactgaagactggccagccctgagtttggtgcttgtacatggttggtcaactctaagctgggcagggcctggcctcccacacttctttgtcaagctggtggagcttgtgcattgacatagggtagatcacaccaattttctagagtttggtggatccaactgt

SEQ ID NO: 90042 - DNA, 564 bp, Cannabis sativa
cctctgttcttactcaaataactaatccgaccgcatccatcaccaattccccaatgcctgtagttgtgactacacatgtgcctactgctgcaatacataatattcctattactggtgcaaacactacaaggcctgctattgacactctacctgtctccaatgattctgctgttgttcatcttaaagatgtttatactcctgacattggcacatcatctacaaatcatacctttgccacataccctccaactaccactcttcatcacgtaacaaagtgccaaaatattactatggatttctcttcaaaaagggctggcaaggctatcgctacaaccattacctctcatcagccttcttcccctttggatgacatggatgattttattgatcaggagaatacacatcccaacaagacctttaagagacagtttgataatctttctcttcgaaaaactctcaaacgatgtcgtgctacaaatgtccaaagtgcttctccctcctcagttgaagcatctgctcacctgcaagtttcagattctggtgctgattttgctggtatggagg

SEQ ID NO: 90043 - DNA, 542 bp, Cannabis sativa
atagggtcagacctggaatcgagatttgaagaggaccaagaatcagcaaccgtggagtagaaagagggttcagtgagccaatggttttcaaaaagaaatcttttgtttttagttttatgcatactatcatcagaaaggacaacttttaacaccctgtggtccgaaccataaaaactaagatggtggaggagagcctggggatagtgatgaaaccatttatcattggctatcccccaatccaaccgctcataggttgaaccatgcttccaggtgtacttattaccaacaaagtgaataggaactaaagaatgtttattgacaaaagcctggaaattaaccatagcatagtgaggaatattagaagtactacttctatcattagcagagagatagtcattaaaatcacctaaaactaaccaaggaagaagaggggcattatcaaagagcctatcaatgagagtccaagtatgagttttatcatgagcatagggagaaccataaaagcaagaaaagtgagtagttatattatcctcaaaggtaat

SEQ ID NO: 90044 - DNA, 2199 bp, Cannabis sativa
cttactttataatttagccaagtactatgtttttatatattgaatcttgattgggttattcacatgtatttgttttattattaaaatttaagtagcgttttgttagaggtaatgaaatagaataaaatgaaaaggaaataatttttattccatttctttgttcagttgcattttaaagtattggaatgacattctaatggaatgctctttccactattttggtggaatgactattccattttaaaaaagaaagaaagaccatcccaatgtaacaagagaaaaaatttaatgatttttttatcaattttttttgtgcattttccattctattcctattcttattcacattcacattcttatattttcattcctttcaatcaaacgtcaccaacggatttaacccaatgataaaatctgtttcattaataatatatagaataattctccttaatttttctttctaaatttacaaataatattaaatagccataacttaaccgaatctaagaagaaaatttttttttgatgaaagaatctaagaagaaaattataatacaaaaatatatatatttaagaatagcatattacacacgttttatagctataaatagccatgccctgccattacatttttcacccacaactatctcacaaaaccttcaatttcaaaagatggctttcttatccagtctcctcttctccttctttctcttctccattctaatctctgtctccactactactccattgcccaaggcccttgtcctacgcgttacaaaggacaccaaaactctccaatacacaacacaaataacccaaagaacccctgcagtaaaagccaatgtagtgttagatgttgggggtgaattcctttgggttgactgcgaaaagggctataaatcctcaacccaaaagcctgtcctatgcgaaacaccccaatgcgccctcacctcatctgtgggttgcactgtcacaggttccaactcaagtgaatacatttgtagtgtgacacccactaacccattttcattcagtactagtggtgatttacaccaagacattttttacatccaacccaccaacggatttaacccaatggtaaaatctgtttctgtaccaaatctcccctttgtttgtgccccaaactcattagtgaaaggtctggcaagtggaactgtgggcatggttgggcttggtaggaacaaagttgctcttccttctgtgctctcatctgcttttaactttccaaggaaatttggcctttgtttatctggtcattcaaacggtgtcgttttctttggaaaagagcctttagtgcttcatggtgttcatgtcactgatccaaattccttgatttacactcccttaattcgtagaaacccatcaaccgaatatttcattggactcaaatccattaacattgaagataagccagttaagttcaacacaacattactaactttcaagaacgaaaatggtcatgggggaacaaaaattagcaccattgatccatacacaacattggaaacttctatatacaaagctgttgttgctgcatatattaaagctgtaaaggctccaacagttaaggctgtggctccatttggagcttgttatagtgctaagtccattgggttcacttggattggaccaaatgtgcctagaatcgatttggtgttgactaatgacaaagtttggtcaataattggtcccaacttgatggttaatgttggtaatgatgtgttgtgccttggattagttgatggtggtccacttcattttgttgattggggtattaagtttaccacaactgctgttgttattggagggtttcagattgagaataatttccttctctttgatttgggtgtttcaaggcttggtttcagtaaatctcttattcctagacaaactgagtgctctaatttcaatttcacatctctttaaatatattattaatatctaagctagctagttgtctttttttgcttttccttttttggtagcatgtatggttagttaattaataaattaataattaatcatcttttcatttattgtcctatatattatgatatgcccaacatttcatgatttgtgatgattatgtatatatatatataggctttggatgtgatcacgcattgtatgaaatgcgtgactagtgactcacaaaaataatatatatatattatatca

SEQ ID NO: 90045 - DNA, 548 bp, Cannabis sativa
aaagaggcgaaaaaaaggtctcgaaggagataagagaaggatcggagaagagaacggttgaagcaatggggtggaatggctttcttgagttggcttagtgtgaatgatggcgtggtgtgtggtgctcgatcaagtctactattttcaccattgactcccatttttgtttcttcaaaaagattaagaaaaaacaaacaatactatcaatttttgagctaagtatgggtatataatgcataagaagatgatatattgtataataattagtaactatggctaaattgatagacaaatttcaaatatttagatacaaaaaaaaaaaaaaaaaaaacttaattgtcatggagatcaaaattgatagggaaccctttttttgggattcaatcttaagactcccacatgcactctttcatacctcatatggttatttaaactagctcaagtgtttaaaattgataaagaaccatagcaataaaaataaattactttgtatacatgatatgtctacatacaaaattgagctaaaataaataagtaaagtaaaatgc

SEQ ID NO: 90046 - DNA, 1297 bp, Cannabis sativa
gaaacaatttaggtaatcagtggtttaaaaggtcatttcaaattttaatgaagattggatacacggtgccatattttttggaccatgtactacagttcctttatactatatatatcgttgtcattagactggagttaatagattgattgcttgtttgtctagcaacttgctaccccaacagcttgaattaatgaatttcaatataaggaagaatgagcttgacgaatagtcaacttgtgctgatctttttgttacaaattataaataaggtattttcaatgctccattttaacataaggtattatagcactagtgcactgctattaattatttgtagcagcactcaaatgtctatattttactctattagcatcatctatgctattagtatcctcttcttttgtactacttcttttgcatttgagactagtctaagttcatctcattctcttaaagatggaacgactctggtttcagaagatgaaacattcaggttgggctttttcagtcttggcagctcaaagaatcgttacctgggaatttggtacaataaaatcccaatacaaactgttgtttgggttgctaatagatgcaatcctattaatgaatcatctggcttgttgaggatcaatagcatttttggcagtcttgaacttctgtatggcaataacagtgttgtttggtcaactaactcaactaaacaagctcgaaagccaattatgcaactcttggattctggaaatcttgtcctaaaagatggagaaatcaacttgtgggaaagctttgatcatccttgtgacacatttttgcctgggatgaagataggatggaacttgaagacaggtcatcagtggagtttaactgcatggaagaatgtcaatgatccttgtcctggagacttaaattacgggtttgacataaaaaataacgcatgcccagaaatctatattctaaagggtactcaaaaatattatcgttcggggtcatggaatggccttcgtttcagtggtgtaccagaaattcaggacaatccagtgtatgattttatttatgtctacaacaatagtgaagtgtccttctcgtatactatgaagactatgcaattgtcgtcaatgatagtactaaaacaaacaactgctagtcgtcaacggttggcttgggtaaataacaagtggaatgtttattcaacttccccggaaaacgattgtgataaatataatcattgtggagccaatggaaactgttctatggttaataacaagccaatatgccaatgcctagatggattcaagcccaa

SEQ ID NO: 90047 - DNA, 587 bp, Cannabis sativa
aaagaggaaaaatcgagggcaactaccagcctagtttggaggtgttcttaaggaaaataaggagggaggggcatttctaaattttaaatggagtgctgcaatctactatgttggaattttagggatcttaataaaaggaatcaacaagaggaagtttatactctctgtaagttgaataaagtggggataggagctttacaagaaactaaggttcgaggtgacaaagtggatgatatgatgaagactagcttcaatggttggcattttcattctagttttgttgtagaaggtagaattcttctcttttggttgcatacttttgtaaatattactattttggttaagactaaacagtttctatcctatttggtttgacattctagattccaagatgatttttgtctcattgtggtttatgggttaaactctatcatgaagcgaaaggagttgtggcaaggttttgatttgcttcctttccctgttaaaccttggcttattatgggggactttaatgttgtttttgatgtagaagatagagtaggtggtcgtcctattgcttcccctaaacttgatgatttgtgtaattg

SEQ ID NO: 90048 - DNA, 815 bp, Cannabis sativa
ttttttcattatgttttaatgtatagtataaaagctttttgatttgtatatcaattttgagtgctgtcatttatcagcttcttggagagtaaaatatgtgcatattgagttgagatcagaaaagttacttaaaattagacttttgtatagattaaattatggggggttagttaaagatgatatagcttggtttcagcatatttgtgaggacttcaaagtcctctgttttctctgttttgtacatattgtatatcattcagataaggagagagagctgatcacttttgtggtcgaccaagaaggttcatggaaattattataattctcatatcatatgtaaatccaacaattaatattggaaatagtaatcaaatataattatatataatgtaaataaatcataatttaattaaactaataataataagttcaaaataatagtgaattccaatggggactgtattatattgtatatgtgattcggcaaagcaggcaggccaagtaccactcaataagtacccaaagtgcatataaataacataacatttcaagttaattattgtgaattaattcattaatattacataattatggcgtcgtttaagaaaatagtgtatgttggtgtcacaactattatgttgttggttgcttcaacttcagccgttgattacattgttggtgatgatgcaggctggactattaacttcgattaccaagcttgggctcaggataaatcgtttcgtgttggtgacagactaggtaaccactaaggccgatcctgagttaagatgagcataggaaaacaaatgggttaa

SEQ ID NO: 90049 - DNA, 3412 bp, Cannabis sativa
tcttgagctttgaaaaattgagccaaggctctatcttcattggggagcattgaagatgcatgctcaatattgggccgtggagaggaggggccacgattctcattacttaatttctccaaggaaactggcccaatactaggaggagccttaaatgaaacaaccgggccctcactttcttttaaagagggagtgataatcacattattaatcccaacctcaggcccagttcgaataataccacaattcaaattaggaggcccaatgaatttgtctttttgtaaatctcctttttcaccttgcaccatttggccagacggcccagacccacacacacccggcccaaacgaaggcccatcaatcaaatccaaattagaaacgactaaatttttaaaaaccttatccctgcccaatgaacagtccacctcatcacctctcaaaacagaaacatgatcagacccttttctaatcacctgagccccagacgtaccacccatgctcggattggaaactcccgtctcgacaccttcaccacgctgtttagggaaccacaccaacgacttcccagggacagcagcagcacgagaattcgcactcacgggacatctcggacgccggaccttcagagcacgcccggtctttgaaccatcaccgtcgacatcagagatcttcatcaacacttgacgacgaggaacaccgtacgacggaccagaaaacacgtcgtgatacgccgaggacaaggagagccaaggtccgaacatggggtaaggaacaccatcaacctttgccaccgtgaccggagacgataacttacagcccctgcgttgatgaccgagacagccacagttgtaacaaaaaattccaatcttgacatatttcacttgcaaccattgtttctccccagagattaaatcgaaaaagcacccagaaaccagcggtttttgcacatcaatatccacctgaaccataaggtaagtggtccaagttgctggtttgtcctcctccaagtctagcctcacaaccttcccaaccaacccccctagtagatagccattgtcacgcgagaagtattcatggggcaggttatggatttgaatccatacacggagcatattgagagtaatcgacccttccacgcttggagaccaagcatgcagaaccaaggtatatccgcggatacaccaggggccattaacgagtgcccaatctctgtcttcagctgagtcgaaaccaaacttgaaaatattagcagtcttcataatatccaccataggcaccaccgataactgcttcttccaagttttagccacaaattccacaaccgtagcctcatccacattcattggagctattactctcccatacaaacaacaagaagaaagtaccttaacagatgatgcacacggggaaagctttacagtggtttcgatgcatgaaaagcttttacctttcagaggagatttgcatgcaatgattgacgccataagtaaacagaaaaggacaagaataaatgaactccaaaagacaataactcactcacccaccgaatcttaccaaccacccaacaggacttaagaaaaaaaatgaaaaaaagcaacaaggaaacacaatcaccccactcaaagacaaaggggaaacaaccagataaaagaggataacaccagagaacaagccaaactaacataaaaaactgcgacacagaactaaaaacacagaggacaagaaagagaaaagagaaacttaataaacaccctcactcaaaaccacacgataatacaggagacaaactgtgggagacacaagatgggacacacgaaagaagtcaaaaaaaaaaaaaaaaaaaccagccaggaaccaaacagaccggactcaaagcaggagattgttagctgaaattcaacttatacaatattagctctaaaaatatagatactagtaatattcctaaaatttatcgttatatttctatctatgcatgtattttttgtctaaacactaaaactgttccaaattagagtcacattagtgctatattagaaaaataaaaataaaaattcttatttactctaaaaaataaataagtaaaaaaagataacgcattccacatttagtaggtacgtgccttaattatcttatagaaagatcacatatataatttagctagtaatattgtttttcaatcaacatctctaactatagtaagtaatagtatgataagcattatattttgaccctaaaataagttccatacagtattaggaagatggcttggctatatatatttattagtgtattttgcaagcaatggaaggtagataattatctccaactatctgaccatccaactaattcactcaatccacacaatgaatgagaacaaaactaaaagctacacagacaacgtcacactacacatatatgcttatcttatggtttttaattattttagaaccattatggatttccattattttttttctttttaattttaatttgctggaaagaccctttattgacttgtatatgaaattcatattggttgatatagcataatgatcaccataaagattgtatttagagtgcactagctgtcatggaatagaaaattaagggacaagcactggtatgcttgggagtgatatatggggaattaatcaaagttagtaatgttagtttcattttttttgcatctttttatttgtttggtcttttttaggaaaaatatcatttaatttattgtcatattattatgatattttatctttattgtattgtgtattttttataagtttaagcaaaaataaaatccttatttacatatataggcaaaagaaagtttttgttcgctttcgaagatgaaagctcaaaaatttaaaaatgcaaaaatggtgaaagtgattccctcgcaccatatatagcaaaagtagcaatccacgtgctttgaaattaagggctaagatctccctagaaaaagcacatcatgcgatccaacggatagggaactgagaggatggcatttaatgcctttatagaaatcgaggtattttttcaacattaatgctcactgcggggcccacactaacattaaatggtcatcgttccatcgttttacacaaaaagcgccttcccaaagcgcgtggcattcacgaatccaagaagtggagacacacaagtgatgctggttgttctccacactaactcttgactcttcaactgacgagtgtcagaaagagaaaaaaatgctttcactacttttagaattgtccacatgcccgatgactccaaggtcgcccagaaggaagactgcaagctttcgcgactcttaagtctcggaagcttggggtaaatactatcaatgttttcggaagacagacacatggcataactgaaaggtaatcactatctaaaaatgtgc

SEQ ID NO: 90050 - DNA, 550 bp, Cannabis sativa
tttgcctatacacccatttacatctgatagttgtctctctaggaggaagcctgactagaacataagttttgttccttattaaggcgagaatttcatctctcatggccttattccagtgttcattgagtaatgcttcctgaatgcaagaagggagtttagaaatactttgggtttgtgaatcccagattttgatctggttttcatgtgatggttgttggctttgctgggatcatttgaacaacctggcatgatcggatgctgaaccacattagcatcagcattttcagatcgaacagcagtagtagtagggccatcagcagtggcaattggtgcagcagtagtttcatcagctgctgtgttgacatcagtttcaggtgttgagaaatgttcatcaacttcagtagtgattggcttagcagaaataggaccctgcaataatggttcacctgtagcagtaagagaattttggcttggagagccattgttagttgcacaaagtggagtaatgttgtctattggaacatgctgatcaaccctttgattattagtg

SEQ ID NO: 90051 - DNA, 625 bp, Cannabis sativa
aaaatttaataaacccaacatgttcatttttagtctaactgccttagtacggttaataacctctaataaaaattaatgttaagatattaattccagttcgtaaattaaatgaatgtaaaacaacgcaacaaagattcttacaataatttaccttaaaatcttgattaaccaaccaaaattctctcttagattcgaagataaacttcccttgcttcgattgacttgaaatcattttagacataccatagacaaattcgaatttcccaaattatatatgtaattaattatcatcagcaataacaaattgtacaaggtgtcatgtcgttattagtgtaattagatttggatctcatatagcagaagaaaataacttttagaaaatatcactaataatactgtccaataacaatgctcttctttaaacattagtgtcaattaactaagggctaaataaataattaactaccaatttaaaattaaattgcatactatataggatataaatcactttggtgataagtgtaataactcatgttcttagatatgtaggacaatgttctacaatattcctccttaagatgttagctatttttggctcaccagttttaaaccatatcagagttga

SEQ ID NO: 90052 - DNA, 720 bp, Cannabis sativa
atgtcctcgaggccattggaccttgtcaatataaaatggtatgtttcacatttaattatttaaaatattccaattacctggagaaaaaggctagaactcggcatataattaattttcccctatttatatttttgctcatatgaattcaaatttgagaatatgtgagtagcccaattcaatgatcttattttgttgacatctcttacaacagaaaggtaggtattcttcacacaccctccagatgttgggcacaatatggctccaacaacatacaatacataccgcatgatgaatattgcatcatcagcagctgaatttctcaaaaggacctccaaatcatttagtttgcaaagtttattgggcccaagcaataattcttgataaggattatcaatatcacaatgagttaatttatgggtgtacctccatcttttatacccattactctctcgacatctttcggctccaacacatgcatagtgccattcatattaaggacttttccaccaatgtccagggagtccatcacatggtatattaatgagcctttaattttgtctatcttcttctctaaaaatgacccaaatccaactgcacgcactgctttcttctgcttatcattcaaccttgcattaacccttaacaatgagttggatttacaacaataatttaccaaatctttctgatgcaagtctaattttaatctcaattcaccatact

SEQ ID NO: 90053 - DNA, 706 bp, Cannabis sativa
atttcgaggacaaaatccttttcacggggggataattgtaatgaccgcttttcataatatggattagtaaaggcaattagcactaattactgatatttttatattatttgcgaatttaaattatttgtggatcccattgctagagatggacattagagttataatttctcaatttcaatgattttactaaactctaggtgtatgatttgtgttatatgcgaattacgttatttttacaattttcgctcggcgacaacggaaaatgcaatggatggttagtttggtcacatgggtaggtatagaaccttatttcttagtggtatgtatgttggaggaaatagagtaccggggttgagcggggctatagaatttgaccattttaccccttgtcttgaaaatgcctaagctataagtttaggggcattttagtaaattgccatgagaaaagatgtcgtggctgcctaggggagtggcacctggttattctaatctcagcaaaggattaattttactaaccttcattcaattagagaaaagcaaaggaaaagaccacaaatagaaaatactcaaagaacactctcttcccttctctctctttgaaccagctaggaaccaaggaggttgttgctgatttttgtgtttttagcaggaattggaggaggttttaatcaaggtaaaccccagacactctttagctatgtttttc

SEQ ID NO: 90054 - DNA, 728 bp, Cannabis sativa
ttgggaattgaaaatgaaaaccgtaaggtaaggtcatcttaaatgagagatgtaaaaattaagttatattttgtacaaaaagtgattttgaaatatttttacatcaacttttactattatgctccaatgtataattgtaaatcttgatgtaaaatttaatatgttatttaatgcactcttaataatttattaaaaaatataaaataataataatgcaaaatcaaataaaatgtaataataatataataataattaagtcataaatttaatgataaaatattaaaaataacataatagtaaatataaaagtataatatttattgtggtgtaaattttgcatcatgctatattgagatgtaaatttaaattacttttttgttatgtaagatatttgtatcataatttagcatatcattaaagtagatcacttttaataaaatgagctatattttacatttacatcacttatttgcatctccattgaagatgttctaaaggtatgtgaatgaagtaatttttcaattttaatatattttaacatgagaagtataatatagattttttttttttaaaaaaaaaaaaaaagaacaagcaatattatatggaacttttttaaaaaaaagggatattggcggctaaaccacctaaactttacggtttgtaacacttaaccaccaaaactgaatttttggcggctaaactacctaaactctggttccgttttgctc

SEQ ID NO: 90055 - DNA, 2142 bp, Cannabis sativa
ctaaagggtataatggagacattatttataaaagtgggtatattttaaagaatatagaaatgaaggtaaaaataaaaacaaataaagtaaagtgggtctacaatgtaatttatttgtgtttataatgtattgatttgtgtttatatagtttttcatatactaatgatttatttttttttttctccaggcccatcaattggaggcaatctctctgattcaatgcaccaagtctactaatgttatctatccggcaatattgtaagtgaaactatgcgcctttaatttctactaataaagaagcagtaataatttaaatattctaattttcttaatgacaaaagatgttatttaaattttgatattgatgttgtatattttaattttttttaatgaccaagtgatattaacctaccctaaattttattattttctttatgaatcactctcccttctatgcctctctctacaatatttgtgtttttttttttaaaaaaaaaatcactttataggtttgtgttatgcaggatcaatagtggacatcaaagcgtaaaaattaggattatgtggactatgattaatgatattatatggaatcgataaatttgttgataatattaatataatttatcatatattataataattgtagcatatttttttttataaaaactctaaatttattactttgataatatttattgatgaagcatgtgtgaataaaagtatatctctaaataattgatactatatctttactttaatttttttgagttttaaaatatatataacaatattgataattagttgattcacatttattttaatatttattctatatctacaatattagttctttttaatcttataaaaaaaataaattgaattacacatattattaaaaacattgtataaaaaaatattaattaaaattttattacattttaattactcaattatcataaaacaaaaacttaatttttttaatatataatttaaaaattttatagaactgagatataagacggtgacacgacgctttaaaattactttaaatacttttatccattttctccttaactcattgcatagtagctaactcataatataactaaaacataaggcagtgacataatggttttattctataggttaactcattatttaatttgttttatgttgaggaaaaatttaatgacaatgatagtgacgattacaaataaaatacaatgataacattagtttttaatgtaatgacaactataagtgagatatagtgatggcaatagtcaataaccttaaatagtggcaacaacaaataagatacggtgatgacaatgattctgaaattatatgatgagtttcatagatttatcatcaattatctatttagattttatatgaggattcttcaatttttatttttcttttaattataacctttaaaaatatgtcttttttactttcattttaagataaaaaattgtatgatgactttttctacaaattcaatttatttttttaagtaaaataaataacaggtgtggctccgcttttctcccaacatacgtggcagttgttgtgtgtgacatgtggctaacataggcacgtcacccggagatgagttgaaaacttaacaaaaccacctcaagaaacattaagtaagattcaaagggctagctcccggacatgagcaaaaaggcccatcttcttttctaggagctaaagcaaagatgaacttcttcgggccagtaaggctggagttgaacaaccactttgcatttaatgcgacatggagaaaacttttgggaatacccataggaggacgtgtcagacgtcataaacctgactttgggtaattacacgataatcaagggagctagtgatgaatccattatgaagaatcacattaaccaagaagggatgaaggctaatctcacctaaaacctaaacagcctactacacaggtaatgcatgccctagtttgtactttctaggaacttgtgcatgcccatagtgaagagaacactaaggctaaagaaacaagtaaaattctaattggcccgatgacgagggcgcgagccaagaaattcaaagaagaactcaacaatttagtcaacagaattttaaaataagaggagaccg

SEQ ID NO: 90056 - DNA, 542 bp, Cannabis sativa
tggctgccactagaagctttttggtacatatgggccgccgcacagtagtgataaagaagaattctggactcaaacaggggaactagccatgagtgcgggtacaccaatcttactttgtggggatatgaatgggacattgaaggatttggaatgcttcaactatgttagacgaagcaattcgtccagatatgcattcgatttccgtcgaatggttcatagagttggattggtagatcttggctacttgggtcctggtttcacttggatcaaaggtggaaatggcagccaaatgggaggagtagttaaaaaggcaaggcttgatcataggctggcttcgccgaattggttcattctctttcccaatgcaatcataactcacctttccgccactggctctgaccacagacctctcctacttgataccacagctggcgcaaattgtagaacacgttccttcaagtacgagaatatgtgggtaagagacccacgatgtttttgggtggttaaagaagcctgggctagtcaacgccaccacaacccaa

SEQ ID NO: 90057 - DNA, 1069 bp, Cannabis sativa
tttttttttgaaaattctttcacaactcacaaagaatctcaacttacgcctgttgtagcaatatttctgtaaaaattcagcaaaaatattactgattgctcctttaacttgtacttttgctaaaattttgctagaaaattgttgcaacatgcaaactttttcgaattaacgacaaaagccttttgttcatgcctagttttactgcaataaaattcaatcaaaaatctaacaaaaatttcaaacctcaaatcacatctaagaatcaaaagtatgctccaaaaacacatgaagcaccaaactaagtgtaaaatccacccaaaaactaaaaataaaataaacatgaagaaaaataactctaatatgattacatataattttaactttcatttattaattctttttaacaaaaatatttataaaacttgttcttcttccaacattgggttgcctaaaaaaggaattgacaatccaagcataaggcaacgtcccaaccaccttccgcttcatgcatcctccaaagtgattgaggtctttgttcgatcaacctcaccaccgaaactatactttagatgttgctcactcactttaaattcccttccggattgctcattacaaatatcaacaactctatgggaatgacatttggttctctcatgagaatcatgatttgtcacaatataattaccacaatataacctataagttggttttgaataataaatataataattcgataagtaatttcacatgagtcgcggactaggtcgctctctttaagacatgcggcactgcccaaaactgtgtaagcagactatcattctcgtcgtctcctggataaaatagcctagtcgaaaacaatgtataagagctctattgcacgatagagaaccgtcaaaataccacacccaataaccgtactactgtctggaatacatttataatagaatcgtatataactgtatatatttttctatgagaaaaagatatatttctcccattggttctgatgaattatatagataattcacagaaggtagtaacgggaagatagacatttcagaagagaaca

SEQ ID NO: 90058 - DNA, 1121 bp, Cannabis sativa
gttattctttgcttcatagtattgaccattaatccaaaaacagcttaatcacaaatgttgctgttgcccaatgattttggaccaagtattgaaatattaatgaatttagtgagatatattatccatccctacaagtattaatttctgatctttctttctttgtttcaactaacaacattgttattgaatactagtagtgtctagtactttttatatgtaactttctacgattgattagtgatcttcattaagagtatttttttaagtgttatatgaaactcgatatttaataatacttattatatgacataaaaagaaaatagtagtatatcttcataattctcttcaattaatgcaaaaaaaattattgtacttggtaggtactgcacaaccttattatcttcataaaaacatctcaaagaccaaatcaaacattatggtttcttaaatcttgctctgagtgtaagccatatccactttgtgagctaatattcataaaatattagtctcattttccaatgccacactcaactccattataattatgagacaataattgaggtccacacagcctaaaaaaagtggtacatttacaatgagttctgaaaaattggcaagaaatttgtactagctaactattgaaaaaaagatagaataaatagtttgagacagaaccaatatttgtactaatttgtgttgtgtagatctaacttgtgcaagttttggttaaataaattaggttaatagtgatataaatacttaaaagttttaagtttataattaatataaattcaataattttttagcggtatataaatattaaatattactagaagtataattttaatcaagttttgtcattacaagctccggtaatatttttaatatgacacttgtaaaatttagattttaaattattagattggatgtaaatatagtgtatgagttatttttaaatattcttttaataaatttaaaacgaaatctgtatttaagaaattagataaaaatgatagttttgctaatgtagggattgaaattaaatatactttatcagatacagttaatagtacattttattggtccatgatctaactcttgattaaaggtgtaccctgtat

SEQ ID NO: 90059 - DNA, 855 bp, Cannabis sativa
  modified_base (766)..(772): a, c, t, g, unknown or other
cattaattagatgaattattgttcattttttatattttgtatagatttgatatgttttctgtagtgtgcaatcttgagcttaaagtgatgaaattatagtaaatttggtgtaaactatacatatttgagcataatgctgaaactggaatgcaaacaagttgagaatcacaaaaaatgagaaaaaaagtacatatgacgttgtaacactgtgattgaggcgttgtagcactgtgattgaggcacaaaatataaaaaaaattagattttggcatgcatgaagtcaaaacctcaagaaaatcacacatgttgttgtgtctttggcgccatagtgatttaatctaattttcaaacatcatctttttagttctataaatagaacattatatttcagctcctcaggactagagagatagaaaaagaaacaattttaagagatcaatgttgcaatctaaagctacattcaagagttttcattcgttcgtcttcgtttcttcttaatttctcttatttagattttaaataataattgagatgataaaccatactatgtagggctagttttcttagatgttaaggtttagatggacatctaattatgattttaatttttttgagttagtgcaaaattttagtttcatctaatatgtttcatgtgattctactttgtttaattggttccataattatgtgttatatattgtttaattttatatgattatctagattgtgaaatttattccatgagaggagtgttgggttttatgcnnnnnnnaaaactcatttcaaaataatcagatttacttatcaatatagatcagaaataacatttaatattgcatgattcacatgatttat

SEQ ID NO: 90060 - DNA, 612 bp, Cannabis sativa
ttttttttttttttttttgtgtccatgtacgtgtatatgtgagggagctaatgcatgatgtgtgtatatatgtgtttcactcaaaatatataatatagaaattttaataaatactatattaaaaatgttgaataaatttaaattaaactaataatcaataaatataaatgaaatacatcttattcaatatctattgatattattggaacgatttgataaataaaattataattggataaatagatggtataaaatttaacatccaatatataattatattatataaataggcctaaaaaaattaaatgtacataaacacttctaataatcaaaatatattagctagctaactagctagtgtgcattctaaatgtatatatataacacaccttattaattagcagatcaaacaaaagaagtatcatataattaaaatctcaagcgacactatattaataatattaaaagtgaaacatatctaattgttagaaggttttacattgctaattcatagaaaaattaaaaaaaatatatgtgtaagattcataaattactctttccattattaattagttttaagataaatccttatttatcctacaattctaacat

SEQ ID NO: 90061 - DNA, 504 bp, Cannabis sativa
  modified_base (57)..(57): a, c, t, g, unknown or other
ttgtgataacactggagctatagccaacagtgtagagcctcgaagccacaagagaancaaacacatagagaggaaatatcgaatcgattaaagaatatgtgggaagaggcgatgtactggtggagaaagtggatactgaagacaaatttgttgatccatttaccaaagttttgagtgcaactacatttgaaaagcacatactgaatttaagattaattgaaatgtacagattgttttatgatagtgcaagtgggagattattgggctttgtgccctaaataaaaatctatttcaatgtaatcttttctattaaattatcaataaagaaactgatttattttcattgtttatttagtgtgtaattttgttcatgcgatcatttatatgtttatttaatttatgtattcaaccaaatccttatctaattgatattcttgtttattgtgtcgtcagcatagtggaaagtaatcaagatagtgtgattaaatatatattcctaaattt

SEQ ID NO: 90062 - DNA, 609 bp, Cannabis sativa
atgagaaagcaaaactgattagcggtgatttgagggctctgataaagattgtataaatttggtcgtttagaccttgaaggttgagatttatgggagatcaactggcgtgacttgtattttgttgttagacgactctttcagaataatatagtatagatgtattttgtaattaaaattttaattattacgatacttaattatacttttatcgtaaaattctttgattagcaaagcttagtacaatttaattggctttggcacatttaaaaatattattgttattttttttattaaaaaaaaaagataacttattgtatccctttataaatagaggagtgctaccatcaaccttctattacaatgtcttagtcaacctctgtacttgaaaatatatgttggaatatttttttttcatggtggtgttcgttatgctaagaacatcattcctgtaaatttttaaaaaactttgaatagcttacagcaccgaaaatacgtttgaagttttttgaacacgcatggtaaatttaaatatcataaactctgttttcggtactgtaaattatttagaattttttaaaaatttacagaaataatattataactataacg

SEQ ID NO: 90063 - DNA, 967 bp, Cannabis sativa
ggtcaacaccaaattatttcgaaccttaaaaattagctcacaacctacaatataataaaatacaacaaaattagaattttaattatttattacttactagtaataaaaaaaaataacaagttactatagttactaaattatatagattaatttttgaaaaaaatcacatatacatacacatataataaattatatttcacactaacataattttaaaaactttatttctaaactaattaaattcctcctatctcattctcatttccaataattatatatacatacatatatattacttagaatatatacaatacaattataatattatatttacataaataaaatacacaatatatatacacacaatatatacacacatattcgataaaacacaaaaatacatatatatgcacacacacacactatatattaaggtttaaatttttatcttataagcgcaatccggtgactaattctgcaaaaagtccagccaccagccaccatgtacattataaatatcttaatggatgttgagattcaatattttctcaacaaatatcggtggccggagttatacccaccactattttccaataggttcggttgactgaaatagggaaaaaaatcgtaaaatgtttggtgtatttaagtatcaaaaatagaagatttctttttgaaaaaataggctcaaatggtgcaaaaataggagagataatggctgtgggagaagtggttggcgaagatggcaggggttttggtttgttctctctgctggtattttgtttcgtgaggaagaagaagatgaagaagacgactgataggggtttttatataaccctatcccatcggttattagaaaaaaattgacgacatagggtatacgtgtcaattatcgcctgtaccctatgccatctgttattttctaataatcgacggaatagggttgtataaaaatcatcagaaataa

SEQ ID NO: 90064 - DNA, 1275 bp, Cannabis sativa
aaatacagggtaccaaataagcataattaaaaacatagggtacctaacttgtatttagataaaacatagggtaccaaatgtgtagacacccaagcaaacagagtgtagagtacacattccccaatatctccactctaccccatactccaaacagccctttaggagtgttgcatgttgaggaagaataaaatcacaagcaatattgcaattaggatgattaatcacaatatcaataaacacaggaagaaactcaaagataaacaaaggagaagaatgaacgaaatcctagaagataaattggttcgagataaactaattttgaagaatgaagacttgacacaatgaagattgctgtccacaagctctattccaagccttctcctagagttgcttgaggtttcaaccaaatagaataagtttgggattaacaagccttgaaaatcatataggttgagcaatttgatgattttcttgaagaaaattactaatcttgagagctaagagagagaggtttagatagagtgttgaaaagtgtgatcaaagctttccaactgtaatgaattcttaaatagtgtaggaactaccattggtttcatgcattgttgggtgacatgtcgcccaaacatgtactatgtagggtgacatgccacccaaactcactgtccaaattgagaaatcacactttgacatctccaaatgctcccaaacttcttgggtagcccatatatgctccaaagcaacactcaaaagtcaaatttcacatccttattatgtgagattatttaaggtttatgcaccactttgtgcttaaccttttcactaggtatttaaccaactctaacattggggtcaatcgatggttttctcatctaccaaaacttttcaagacaaacattgaagttgatatttttttaattttatattttgtattctttcgatttgttattgtttgaatgttgcttatctaaggccaagactcatgttcttttcacctgtcatttcaaaacagggatttgggatatgggctcgatctatagcaatttggatgctgcttaatgttcatataattacccaggtaacaagtcgctagctatcttttgctcaagtgaggtagtggtttcccaatcaataaattgcagaataagagtttcccttttgattggaattcagaatatcatttctttccttgttttttactcttttgtggatggctattctgctggccttttgggtttctaatttgttttttcctggccttcttttgggggctggtct

SEQ ID NO: 90065 - DNA, 501 bp, Cannabis sativa
tattttggctttacgcaaaaagaggataggagggaggatggttagaccagactctccaagcctgtttagccaacaacgcttggttttgcaaagtaatggaacggaagctaagacctccagcaaatttagaaacacaaaggctattccaattttttcaatgtatttttttcttgtgattagaggaaccccacaaaaatttgcaatgagactttgcagctgcttaatagtgcgaaggggtggtttgaaacaagacatgacataggaagggacaacttggacaacttctttgatgagggcttccttacaagctttggaaaaatatttagagttccacacactcatcttggaagagacattctggacaagatagtggaacacaaactggtcaattcttctagagcattgagggatcctgagatatttactgacgaaacactcattgttaagacccaacacattacaaaaactcattctgtacatgggattggtgttaggagaaga

SEQ ID NO: 90066 - DNA, 924 bp, Cannabis sativa
tcaccttttttcctttagctttttctcttttggcaccgaggcacctctagaggtcaataatagaccaactgtcttccagagaaatctcttctatcctatcatcctggttaatggaatcactaggcattttttccttcccttagcagtaggcctttgcgcccaagtgtcaagcctatcattatgcacaactttgcctcgtagagcaaaagggcgtccaagatcagaggcaccggtggcctccttttttctgcaagggttggttggttgtgtttacgttgtttttaggaggtaatgagacaattgtatattggggctcgcctacttttgcctttcccttgtcctttacaggagttgaggttccattgtcagtagggcttgtccttttctccctgttaacaggctcttctagagcattttcctcagagtcttcctctatatcgccaagtttggcctgtatccatgccatcattttctctattcgacaagaaaattcttcttgctgtgccaactttctttgggcctcagctagctcactggatacttgggccacttccaggtcttgcttataataatatccatatttgtaatatccacatcatttcacaatcgtctttctccacctctcctcatttgggttttcctccacagactgttcctgatgttgggttgtttcaactgttttatcgccaacttcggacgcttctccgtcctttacagtactcaactaggcatgcactggagggaacggatcagtgccatccatgacgacgtcctgacctagagtagacttctcgatgatggtttttctggtagccaccatttttgcagatgcaaggtagcttcaaatctttcttcaactctcaatgatagcatcaaaatatttatcgagataaaaatcgattaaataagaggttaagaaattaa

SEQ ID NO: 90067 - DNA, 881 bp, Cannabis sativa
ttagtacaattaaaggtataaattttttaagatatatttttttgtttgtcatagtacttatcttggccttcttaacactttgggtcacaacaaaacatcaattatgggttttgtaaaggataaaatcagaaagagaattcagaattgggatggaaaattactatctcgagctggaaaggaagtactcataaaaacagtagtgcaatctctcccaacttttgctatgagtgtctttcttcttcctatggaggcgactaaggatctagaacggtcaattactaaattttggtagcatacaaataactctcaaggtaaaggtattcattggatgggttgggataagatgactaagcataaagactcgggtggattgggatttagagattttcatgattttaatcctgctatgttgggtaaacaagattggagatttttaactcaaccaaatagcttggttagcaaactttacaaagctcggtattttcctttgggtaattttcttgatactagtctagggaataattcaagctttatttagagaagcatttgggaggccaagaatctgctttctactgggatgagatgggcaatcggttcaggtgatagtgttagcattttggggcagccttggttgtttgatgatgcaaatccttttattacttccgattcactgtcactgattggtaataaagtttcatctctaatgaaaagtaatgagcgagcttgggatatggagatcataactgatttgtttgatacttgagatcaagcttgtattctcaacattcctttgaacaacaaccagagtgaagatagaatttattggtgcaaagaagcgtctgagatgtatactatttgaagtgcatacaagttgttgcaat

SEQ ID NO: 90068 - DNA, 1052 bp, Cannabis sativa
tgagtagatctaagaccctggtaaaataaattccaacagtattcagccagtatcgattacaagcggaaaatggtaacttttcagccatagcgtgaggatccatttgtttatgtgggatcggtttaggggtctcagatcgcaattatctcagtgttaaggactagagatttactacacaatggatgtgtaggattttttgtagttgtgattgactccaacagacacaaaacatttgggctaagggtagtcagggttgttaaatattttcttgacgtatttcctgaggagttgctgggattactgccacagcaagaaatagacattgtgatcgatttggcacctggagcagaacctatttcaaaagctatgtatagcatggctctagcaaaactcaaggagctaaagttgcaccttcaggggatgcttgatttagggtttacccgacccagtgtatcgccctggggagctccagttctatttgtgaaaaaacaaggatggttccatcaaaatgtgtattgattatcgggaactgaataaactgacgattaaaaacaaatatccgttgcctagaatcaatgatttgttcgatcagcttcagggaaagactgtgttttcaaagattgatttgcaatccagttatcatcaactcagaattcaggaaaaagatataccgaagactgcatttcgaaccagatatggacactatgagtttttggtaatgtcattcggattgacaaatgctcctacaacctttatcgatctcatgaatagagtattcaaggatttcctcgataactgcatcatagtgtttatcgatgacatcctcgtgtactctcagtcagaagaggaacatgagcatcatcttcgaatggtattacatcgactcagggatcataagttgtatgcaaagttaaaaaagtgttaattctggttgtcagaagtaccttttctagggcttattgttggaaaagatggaattatggttgacccgagtaagattgaatcaatgaagaattggccgaggccacaatctgtgatggaggttcgaagtt

SEQ ID NO: 90069 - DNA, 1698 bp, Cannabis sativa
tatgattgaatcctcaatgttatttccgctggaattacaacatatatatatgcaaccatgcactatgattttattatttaaaaatatataggacaaatagaataaagtatcctaatcaattatatgtaatataaaatcattaattcattgaaatatatccatatatatataaataaatatatatactatatataagaattgtatgtatgattttttatatgtatatatataaattcgtttagttgcataaaaatattagaatttgatgaaaaaaagtaatcctaacaacaatatgtattaaaactataaaaaatcaaaattttccttcatcctttaacgaagaaaataacaaaaaaatagagtcttatatatagcggtataaacacagaatataatcaagataaaagtatataattttactctgataccaactattagaattttctatgaataacatgaaacatatagattgtctatgaaatacgtaataaatcaaatatatatgcaatgtgaaaaagattgaaatacctctaactagaaattttttgagctttgatcttacacgatctttaaatctaccaaaaaaaaaagaaagaaaacttagttcacgtgggtatttgagctttcaagctctctctaactcccttagataattttttttttatagaatgagtagtgagcttcgaagctcgtacactacattaatttataggtgaaatacttaactcgtatcttcactacattaatttataggtgagatatttaactcgtatcttcgccatattaattgtcagaatattttgacaagtaatttaaaaaaatcaaattgagaactcatttatttaataaatcaaaatctgacaatttataaaatatttatttttattacataatttatcatcaaatataattaatgaaacaatgaatattatcttgatacatataaaatcaacttaattgattttgtacaaatataaatctaatataatcaactctcaaccatggtcatcattcaaaataactaatgtgcgaatatagatgtacaacaaaacaaatttatgattgtctcaacctaaaagaaaaagaaaaagttttctaatcaaggataaagaaaggtgacacattaaattttttttcattttccatttcaatatattccaacttttgattatgaattttgttactacacgataaataatataaacatcacaactaccaaattggtgaacaaagtgataaatcattgttgtaaataatataaacatcacaactaccacattcgtgaacaaagtgacaaatcattgttgccgaccataagcatgaaaatgccattattatatatgatgatgagcacacactgtttctcctatacatatactactacgtaagaacatatatatatataaatcaaacaagaacacatattatataaatatatatgtcaacgttaggaatatagatactgattatcaatattaaataaaaaattatacgcaaacgcagtagatataaataatggaattgaaaggtaatggttcctacagtagttgagatgtatcaaatatattggaaagtcattgtcactatttacttttatttttttttaatttggcatttttcataaataactaaaaaaacactaaatataattactaataccaaatttaaaatattttaactgatcgtaagtttctttct

SEQ ID NO: 90070 - DNA, 1259 bp, Cannabis sativa
tttcaaataacatagaaaaaaacctagcataaaatttagtatacgtgtctcgcacgtagttttttgctagtctatataaatatgtatatattaatctgactggttatttgattgagtatcctagcatcttcgaatgagaatacgtgttacttaaatgcgggtattaaatcaaagctcaaaaagataaataatattttaatattgttgccatttctattgtatacaaagaaatgattttattatatatgttttttttttctcataaaagacttaccccaaagttgttattatattgccgagttctgcaattaagttacctgtttaagaatcttcttccttgtctactctcccaagaacaaaataactgtctcataaaccaatcacatcatcacatatcatatctattgtctacctaatatattcacaactaaactaaagggagaaattaaaaagattcaagttttcaaaagaagactcttgttatatagaaataaataagtgctgagccataacaaagtgttatgacccctaatccaaccaaacaaagattttctttttcttgaacttatagctaagaaatcgccagttgaataatagctatttctcattgaataaaaatattaataacaaaacactaaagttcaaactactcacaactccacaaagtaattttaagcacaagaaatcagtgtaatttcctaatcttaatggggttgccactaacactagatataaatctacatattgcctgtaaagatcataaaggccagtaaataaaatatacacatatgcagcagcagcagtagcaagcttgttattttgggaaaagaataaatagaacatcatcaagattagaagaatttacaatacatccaagtggaaatttaaaacaggtagtgaataaggttaaaaagcccccagagaaaaaagtttgtttttttttttaatcctaaatttatagaacaagtaaaaataaagattgtctcaggagagattgaggaacactttaccaaaattttcataggagttataattaatcaacctcagtattcctcccaacaagggcagaataacctaaaacagcacaaacagcagccacaaggctaccttccttcaacaaaatcctgatcacaaaccccacaatctctctggtaatcttcctaccttccaccaccaaagccctcctgggttttccaaagaaggcaagcagaacaacaatggcgatccatgtgaccatagtggctggcaccaccaccgcc

SEQ ID NO: 90071 - DNA, 500 bp, Cannabis sativa
aaatctcacatatccagtaacaagtcacaagattaaataatgctactgctagaaccgcacctatcatagaagaacttaaaaaatctgagaacatccttaatgatcttttggcacaagaagagatgtattggcagcaaagatctcgtgtgaattggcttcaaagtggtgattaaaatactaagttcttctatgctcatgcttcatcacgcaaggcaggggacaaaatttagtttctcttggataacaacgggactaaagttactttgatggatggtatgactaccattgttactgattacatcgctgatgttttctcaacttctatgtttgacttggaagctttggaattagttacagaatcaattccaagtaccattacagtagaaattaatgagttcctcaccaaaccttttttttacagaagaagttctaataacattgaagtccatgagccttgacgaaagccccaatagtgatggcatgtctgctatgttctacca

SEQ ID NO: 90072 - DNA, 590 bp, Cannabis sativa
ttaaaataaacaaaaaaaaaataattatatgtaattttaaatatttttacagtttttaaattatttatataaaatacggtattttgatattttttttttatattaaactcttgttattttgttttttttattatttgtatattgtttttacgttattttagatattgttttcttatttgatgtgattttcttattatttttatgttatttttataaacacccgtaaaaatatatatattaaaaaaaagaaaagaaaaacttaaaacagtaaattttttaccaaatttccccacattctcatataaatacatatatatatatataaatattcagttattttttttctatttatgtgtatcttcttaacaaaaattgcaactttatttgtgtatttttttttttttttgagatccttcccttcaaacaccacgaggctctaataccacttattattcttcaagctcgatcactctcaactcacagcaagaacacacataccaatctcagattactcgcacaccctcagacacaacaacacagtaaactctttaagtcaaagtagaatctttaaattgaatgttagaacatta

SEQ ID NO: 90073 - DNA, 1335 bp, Cannabis sativa
atgccaatgtttttgaaaaaaacctggccccattccatcaggtcccggtgctttatcgggatgcatttgaaatagagtcgtccgaacttcatcactagaaaccgcttttaacaactcagtattttgatccatagagaccgaacaagaaataccattcacaacagtatcccaattagcattcccagcagaataaatagaggtaaaataatcaacaattacctcttttagaccactgtcccaagtagtccaaacaccagagttattttgtagagattgaatattgttgctgcgtttgcgattgctggccatagcatgaaaaaattttgaatttttgtccccactatgaagccaaaattgcttggacctttgcttccaatagagctcttgttgagcaagaatctcaaagtagttattttgctcagaaccgaaagtagcaattgaagaaggatcggaattacctttaagagaagtgaggatggctttgctttgtttgaggcgctttttgaaattgcaagttaaactcctcccccaatcctctagttgtttgctacagatggaaattttttcaagaagaggcagttgtgcattgttgtcccagcaggcctggacaatttgagcgcaaagaggttctctagtccatgcattctcgaagcggaaatggtgaaccgaaacagtaggagcagctggagaaatatcaaggaagagtggtgtgtggtccgatgaggagaagtcgccatttgtgagaattgcagaaggaaaggagtcgagccaaagagaagaaacaagagccttgtctagacgaatttcgacccaattactggtgcctttgcctcgttcccaggtgtagggatggccgtggaggtccatatcagtgaggttacaattacagagaacctcctggaaaccttcgatcaagtgagaagggtacggacgtcctccttttttctcagcttggcttctaatgttgttaatgtctcctatgatacaccaaggtaacaaagattcggtggagagagtggtgatgagttgccaggtctttgatcgcagactacggtttggctccccgtatagtccagttaaacgccaaacaggggagttgggcatagcaatttcaatatctatgtgattgtgagagaaaccgagaagacggaccccgtcattgaatctccacaaaagagcaagcccgcctttatgaccttggacctctacacaataggctccctcaaagcccaatcgaattcttagtctttcaataacatcacttttacacaaagtttcacttaaaaaaatgaatttgggtttcttttgaacaacatagttctcaaggaattgacg

SEQ ID NO: 90074 - DNA, 568 bp, Cannabis sativa
aatccacccgagtctttatgcttagtcatcttatcctaacgcatccaatgaatacctttaccttgagagttatttgtatgccaccaaaatttagtaatggaccgctccagatccttagtcacctccataggaagaagaaagacacccatagcaaaagttgggagagattgcactactatttttatgagtacttctttctagctcgagatagtaattttccatcccaatctgaactctctttctgattttatcctttagaaaacccagaatcgatgttttgttgcgacccaaagtgttaggaagaccaagataagtattgtgttcatctgcttcaaccatttgaagagtatggcataggagttgtcgcacaggccctccaacatttgtgctgaaaaatattgaggattttgagagattaactttctgtcctgaagcatcctcatattttttaagcatcaccaacaccttaagtgccttagcagtattggctttacaataaaggtagttgtcatccgcaaaaaacatgtgagaaatgataggtgcccgacgacaaactttgattccatgg

SEQ ID NO: 90075 - DNA, 724 bp, Cannabis sativa
aagagcttactaagcttacaaataatatcatcaaaggaataattatgaagcaaaggtgttctgggaatgatgatgatgatcatagtgaggcagagaagataaatgagttggtcaaagagagaaaccaacttgttgggaaattcaatttgtcagattttttttggttttgtaaaaattgggatttgcaaggatttgaggcaagagggaaaggcttccatgaaaagtttgactctatgatggagaagataatacaagagcatgaagaagctaggaatgtggagaggggaagaaatgacattgttaaagacttgcttgacatagaaaagatgaagatcaaaaatcagatatcaaattaggcagagataatatcaaagcatttatactggtatgttctttcaaactcttacacattcctttaaagtcttaaattgaaagaccactttgatttgcaatatcttagaattaatctttaagagtaaataggtaaaacaccattgtgcaatgtagtccttaaattatcattcatacatttgttactatatattttcacatctaccggatatatttgtagctgggactgggaaaactaccataactatagagtgggcaatatcaaagctaataaaccacccaaacatatgaaaaaggcaagattagaaatagatagcatagttggaaaaaccagactagtagaggagtgagacattgttgatcttccatatat

SEQ ID NO: 90076 - DNA, 1039 bp, Cannabis sativa
acaattagatgtctaatgtttggcggttgcttgtaattggatcggtcggttatcattggattggatcgatttatgtacaccctcttattcacaaacagtgtacgaatatcttcttgaactaggatagatcattgtctaaccgaaaggcatgcttcgccaaaccataaactgctaaagtgagcaaacataaggcaaaactgcaccaaaaatttagataataaagctataacatcctcaaacaacacaccaaaaaagatggagctttagtttgtaacacttaaaaactatcagaattgtctcaaaacaataactagaaaataatttgtattaaaatgtctatcaacaaagaaaaataaatatatcaataaaaaactaaattcttagattctaccacttgattcaatcaaataaaatataaactaataaaaaaacttaaacatatataactagccaaaagtgttatcctttaactattagtaataagccaattaacttgatggaaatataccacaaagtaagttttttgaataaaatgttaagttttattttatttcaaaatttttaattccccgtgaaaacgtgaaatatttaaccattctaccctaagtaattaggggcaagtcattaaaataagcgcaaaagtcttaataggtatcaaggccaacaaactgtaacgcatcagcactatatatatcccacataaaagagctccacattaaaactaagtgaaacctgacttattcacccaacaaaaaatctatcaaaatgccttaaatactatcattctctaagaatctcaacacatcaaataaatgtgtacacctaacacaatatcattcacaccaacacgacctaacagtaaaactattttcatttcagatgaagagtgagggtaaacaaacataaagagtgaaagaaaaataaaagttctaaaaaatcacaatcccaacatattacaattaaaacatcaaataaaggtggaaatgagattgcacctcctctattgtcatcctctatcgtcctttcgatttctgagtac

SEQ ID NO: 90077 - DNA, 1231 bp, Cannabis sativa
aaaaaaaaaatagttaaaattatctgttaaatttgtatgtgaattatgcgtttaaatccgtaaagtgttgatgtcaaaaaaaaaaaatccgtaaagtgtttccacatattaattcctccgcagtgctccaatagaacttacaaagatggcacgtcggcctttcttttttaaaaaaaacaaaagaaaaaaaaaaaaaaagcatgtcggctagtcattaatcgcatgaggatatggttttctataaatgaacaaaatatagataaaaatgtcagcaaaaaaaatatagataaaaatggcaagagtacagctttgagacagcagagacaattattgcaataagtggttgacacgtggtttggattacgtaagagccttaccctccacatacttcttcactaacaaaacgacaaagcccctttctttagtcaatcgatcatttcagtcttctttctatctttctttctttctgagtttgagttttctctgatcaagaaggagatgggttacttgagaatgaaaactgactcggacgctaccgatttgcttggtaatgatgtcaaagatctggccaatgctttgaaaaagtttgccaaccattccattaagctagcttcccttggctttggtacctcattcctcgagtgggtcgctgcattcgctgctatgtatgtctctccttcttttcttccccattttattcttaacagatataaatttgcttaactattattcttaaaatacttgttcataaatataagaaagaaaacaaaacatttaatttaaggatccttacagttacacacttttatgctaaaaagagccacttctttaaatattaattaagtacacaggcttgatcatgctacgttgaattcgatgtttcaaaatctaaaatgatgtatatgtactacatacatatacgaaagatgctatagcttatttttgtattccatactgaacttagctttttttactatacattatatacaaccgaatactatatgttgagcttctgcagatttttcttttggtgtctgagcgtctttatcttatttggtatcttataccgttatactgtgtcgttataaaaagaatgaaaacgacagtaaaaaataccttttctcctatttttttttttttttatccttcagataaatttatggaaaaagtaaaggaaaaaaaagtatataaattcccatgctatgagaaagtgtttgaccaagatccagac

SEQ ID NO: 90078 - DNA, 904 bp, Cannabis sativa
aaaaaaaaaaaaaaaactgctttggggtgtaaaaataaaagagtctcatgtaaatttttaaaaaaattcaatggacgactctctactttacactatggctagcttcgacgaatcctcaagttcgctcattgctacttttttagcccctcttgcaattacactctcttatgtgtagaaaattaactttaaataagttagactttttttatgagcttttttatgttctagatgaaaataaaattgccttagattttctttctctcttaaattcatatcaacctttcactaaaactccttcctcctttactaaatccattaaagcacttattaaaccatcattcaaagctcaaaaaaaaaatacaattaagcttccaataatccagtcagtgccaacttgcaccaacaccaaaagttcaatttgtgactcttgaaattccatctcaactccctccacaatggatggtgcagggttatacccacgtccactttggtgctattcgccttgctctaaattatcatggcaggaaaggacttacagttagtgctcgtattggtcttcttgatactcgaatgaggaaatatcaacatgcaagtatagctactattgaaactactttaaatgcacgaacagtggtcgtcactctatttcacattttcaacatgtctctcagagacaatcgtcttactgatgcttttaaagtagaagtgcagacaaaaggagtgaaccaagacccaacttctctttgcgccacactccattattagatggcatatcggctctaagatcatgttcttgatcttaacatccctcaaacacaatctcaattgattcgaaacaagtaccaacctgtacacatgtcccaaagcaaatgaccactgaagaactcacaaagcttttacccaa

SEQ ID NO: 90079 - DNA, 761 bp, Cannabis sativa
caatcaatccatttaagatctcttcaagtccaatacctacacagtctcagaatcatcacacttgaccttccccaggcgatgtaggattgcacattttacccagtattttcccttacagatcacatgactactgactgtcaccgactttttcttatttgtatgttatttttttgttgttgtttaaatgttattttcccgttacttctatgtaattttcttgtcgtttttataaaacattgtaaaaatataaaaaatttacaaaaaaaaaaatatattttatgtaattattctttgtatatatatatcgagaatcggattgtatccagtcctctccagaaaaaataactaaacttttaatctttatttttatatatgcatatattaagtataataatataaaatttaattactcatctaaattaaataaaaatattaatgagttcgattagatattagatgtattggattttcagacataccatttaatatttaattcgatccaattagatatttaaaaataacatttaatctgaaatgattataattaaatattcaatatttagtagtaaattataattggattgaatcgatttttgtacatacctatttgcaataattcagtaatttactaatgagagaacttttttttattcacaatatatatagggaagcttttatcataatttttttttggggggattatttcacaaatacataaatataacaaaaaaaattataaaaatacagttttacggaatttt

SEQ ID NO: 90080 - DNA, 545 bp, Cannabis sativa
  modified_base (36)..(41): a, c, t, g, unknown or other
aacactagtaaaacacaaaacagaacaactcaaaannnnnntagaacaactaaaaaataccagtgaaaacttaacaatgtatattgcaatatgaaatttataaaaatacaccgtgaaaatgtaaaaaataccatctgacagtattttttataaaaaaataacaaaagtataccatctaaatttcccttttcttttgtaggattgtaatattataatttgaaaagcatattagaccatattatgatcaaatatgagaaccgattaaacaaatattcttcatcaatagattgaaacatacattttaataatttgaataataatatattgagtataataatctgcaatgatatcatcctaaattaaaaaataaataaaatatttgagtacttgacaattaaaaatagttgtatagagagcatagaggtcacggcaaggcaagggcattattgggaatgaatgaggccatgggccatgggcgacggtgatggttatgggctttatggcccattatggactgtcttatgctcattaagacaagagataag

SEQ ID NO: 90081 - DNA, 952 bp, Cannabis sativa
aaaaaaaaaaaactctcccataacatctgttgttattagtattactgtcaaaaattaaaacaaatgaatttcttaataataattatagtcctacatgtttaatgtgctataattttttaaattatttttcattaataattcaataaaattaactcatatttcttgtcaaatattgtattaaatgatttgtattttgatgcactttctaataataaacaaaattatttgcaaaaaaatagtaaacgatttttctttttacaaaactaataaagaatgtacttttctataataagcctaatttcctattttaactttgaggaatattattcttcataatctttcttcatagtcggcaaaaacttctcatttccattagttcatgtctaatttaattttgatgaattcattggtcaccattttcctaataaatctgtccaagaacctataaaagaaaacaaacattacatagataataatattaatcgttgtacaattaaaagatatatctacttatattgttaggcaaaatgaggcataacattggtgtaatattaatgataatcccatgtgttatggtgacaatgttctcttctgtagatggtgtgagtgaaaaagttacaatagttactacattcaaacattggggcctaaaatttcactgcgattccgatggaaaaaaatacagtgaggtcttgctaaaaggtgggtcgcacacagctgcaagtttcgttttcgaacgtaatagtcaaactgtcgttttttgttcatttaatttcggatatgaggttgaagatcgtacgattcgtttagttacaccggggagtccctcatgcgcacttccagaaggatgtacatttgatatctatgcagatggaccttatcgtcgttcaaaagagcgtacatcactgtgtccagaacaactttcaggaaaggataaaactcaatgcaatcc

SEQ ID NO: 90082 - DNA, 666 bp, Cannabis sativa
  modified_base (114)..(114): a, c, t, g, unknown or other
acagcaaacccggcatacccgacccgagaaccgccgaacccgaccgcccgaaaatcgggttcgatcggttgcatatttttaatattcgaaatccgaaaacccgaacccgaccanctgaaaacccaaaaatctgacccgtgtgcacccctagtcgcggcataggttttgcatgtcgcgacccgctaggttggaatttctgggtttgttacccagatgtcgcagcatggcttgtgagtgtcgtggccagcctggggttttctgggcagattgggtgtttaacttattttgtttataacttttgaatctgaactccgtttgggacgtttcgaatatcgttggaaagctcgtttcgagttttatatgcttatttgtgattgaaatgccaattatatgaattatgtgaaagttaaattttgggattaaccctatttgtaaaatcccaaagattatgactagaattattggcacttgttgaggagcaccttgggatttggaatctctatatatttagaacaccaggtaagacagtagttagcacatagagttaagcgcggtggcgctcatgtttaatattatgcttttgattaaatgaggaatcgggattagggttgttaccctaaagtgagcggttatatatggtctagggttattactctagtgattaaa

SEQ ID NO: 90083 - DNA, 912 bp, Cannabis sativa
aaaaaaaaagaataacaaatgttgtcaacaccgcgcgaagcgcggattagttctctagtcacaaaataatgtatatgtactcaatatgcaggagtgtgtataaatgcaaacaccaaaatacacaatatatctaaatatatatatacatatacataatataaagaatattaatatggacatacatataaagaatatatatctatactacatatgagagggtaaaaaataatgtggaaagagttatgaatatttactcacgcttttaccaattatcgtatacagtgaccatatatattttatatgggctaaaaaagaaaccaaaacaatgtatatacactcatatttattaccagccgaaatatagatacactttttttttttttgagaacgtccaagtcatgtgtcagcatgtatatttatgtatttcataaatatatgtatatcatgaggtgaggtaataaaagatagagtgacttactgtgtacgccgaattgtatatgcagaatggtttcacaattatgaactgctaacaacaattgaggatgatatatcaatatattttacaagtattttaatcgtaaaataaacagtcaagaggctatatatatcatgtgtctattatataattcaaataggagttgaattataaaataaatatattagatactatctttaattttaattgggcaatttaaatttaattttgagatagtatttaataaaagataaattattattccctaaattttggaataaataattaaaagtatcagtcaaataatttctttatttttttaaaatgacaataaagaaattttaagactcaatttatcactaaaagtggtaaattctaaagccatacaaaatggcacaaaattccaaatgagctcactaaaattaatcttggaatat

SEQ ID NO: 90084 - DNA, 951 bp, Cannabis sativa
gactccttgaagaggtagggatctttcttcacttggtcaaataaccaagggagtaaggatagaatctattcgaggatagatcatgcttttaagaacgaggattggttggatctgtttcctaattcatcagcctctttcagttgggaaaaggtctcagatcactgtgctatagtcatatcttcggctgtaatggtggagataggagtgaagccgtttagattctttaactattggacagagcatcgagagttcaaaaatctggttttggagagctcgcaaaaaccagttttctcatctggcttactggggatctggtctaaattggctcgactgaaccatgttttaaagtcatttaatcatgccaggttgggcaatgtggagttggattttcagaaggcaaaagataagtttcttgaagccagattacaagctcaaagcaatccgggagttgaaagatttatcaaggaggaaaaagatgctgctgatagttttcatcttcgagaaaaaatgctgaaaagttttcttgtccaaaggagtaaggtaacttggctaaaccaaggagatggtaataatgcctatttttatgcgtgtattaagaaaagaagagaagagaataggatagctagctttgttgatattcagggaaatattgttgacaactatcctaacgtagtgaggcattatattgatcattttaaaagctatatgggcagctgtagttcggtttctagaaagcttgataatgagtgtctggagcttggcaaccgattgacattaaaccaacagttgagattaattcaatcattttctaataaggagatcaaggaagctttgttcagcatccccagttcgaagagtccaggacctgatggctacaactctgaattttttaaggccatgtggaaagaaataggagttgaagtgtgtctagcgatcaaagatttctttaat

SEQ ID NO: 90085 - DNA, 605 bp, Cannabis sativa
gagttttgcattgatttgattccttgagcttgacttgtttctattgtgccttactgcatggcaccaatagagttggttgaattgagacatagtatattggggagttagtggataagtgttacatcaagaatataacacttctccaattagaaatattttattttataagaaggttgatggatccttgcgactttgtgtcaattatataaataaataaaaaaatgaatgaatcattaatttacaattgagaaggagtatcctaattgatgacgatgagttgttttcccaacttgaatgtttaaatttctttgaaagattgacttgaggtcaggttatcataagggttagggaagaagatatccttaagattgctttcaagatctgtttatggacagtttgagtttttggtgatgccatttggattaacgggtgcacttgttacatttataaatctcatgaatagagtctttagaccttacttggataagtttgtagtgttactcatcgatgatatcttagtgtattgtaagacatgtgaggatcatgctgaatacttgtcaatagtattacagaccttgagagatcatcaattatatgctaagaaa

SEQ ID NO: 90086 - DNA, 778 bp, Cannabis sativa
acaggagagataaaaagatcagtgttcaaacagcttgagtcccaggctctgggttcggttcttctgagccaactggagcaggaggatctgttgttctagcaggagaagcattagcagcatggtcagaagcttggccgaaagttgaagcagccacctctttcccaccataggcaacttgggccgtgcagtactcgaggtacatgtcctcggcgtcacccaagtagttgaaattggcctggggattagccttccaaaaatcaaagaagagctcgaggccggcagtctccaaagcattgaccttctccttcaaacggttcgcctcggccacctgagcgtccttatcttccttcagctgaaagaaggacctgccgcagagaactcctctcttcctgaagacgatcaattccagcagataaggtctcgatggtttcctcaaagcgctcagcagcctcgaggtcctttgtcagtattgtgatcttcttctcagcggcaaacagcttcttgttggcctcatccaactcgtgacgaacagctgcagtctctgccctggcctcctcaacttcctgcttggtcaagtccgcctccgccctcaaggtgtcggacagagtcgcactcttggaagtagaagatttagcccgggagtaggtgtaagccaacttcaaaccggcctgcataaagaaaaaagtcagcatatggagttaagtatgaagagctaaaagggaagtatcggaaaaaaaaaagactaaccctagtgagctccttcaaaactccgcccacc

SEQ ID NO: 90087 - DNA, 745 bp, Cannabis sativa
gaggtctgcaggcctcgtgaagagggtggtttgggaattgggaatttggatttgagaaataaaggtctgcttatgaaatggttgtggagattccccttagaaccaaactcattgtggcacaaggtggtgttgagtcgttatggtaaggcggacaacttcttggacacaaaaaaaggaagtcgcctctctcctaaaggcccttggagggatatctcagatttgtatgacgaataccttggattagtacaattcaaagttggcaatggaggcaacatccgattttgggaagacgtttggcttggtgactcctccctatcaagctcctttcctgacctagcagtgatttccaaggcaagaaatgtgtcgatcaaagacctgattgtcgatgaaggtctgcctggggggtgggtataaagttgggatttcaaatttaggaggaatttattggagcgggaaatcccaagtctcaccttgctactgcaaaaggtggaacatgttagagtgctgaatatttcgaatgatagccgcctatggaaaccgaacccgtctaagattttttcttgtaaatcagccctatcctggtttacatctaacccaaatggtagtggagtttactggacaaagcctctatggaaaagttgtgttccttcaaaagtcaaagtttttggttggctcatgtctctagataaagtgaacgttcacgataagatgcaaaagaggatgccttacctatccatctcccctg

SEQ ID NO: 90088 - DNA, 819 bp, Cannabis sativa
gagagagagaatagggttttagacttagagtgatttagaggcttagtgacttaggtttctaggctagggttaaggcctttatataggaggcctaaaccctatatagcagtttaaatcccgagatattttcataggttattagataattacaaaagactaaagtgtctctgagtctagatattatttagccattatgttcggcttttagggcccgattcccaacccatgacttgttgttcatattttgggttgtacatagagtctttccaatttaatcatggtcccccatagacctacaggggaggtctggctacccaatgcctgcaggatctagcaggacaaggcttgcaggatctggcaagacaaggccagcaggatctggtaggacaaggccgacaagatcttccaggacaaggcctgcaagatttggtaggacaaggcctacaggatctggcaggacaaggtatgcaggacccggcaggtcactatagctccaccaagagaaggccaacctttgagtgtggatgccatccttttacaatttgaggacagctttgtacaccatttccttgtagagatgaggttctcttggtcgaacaaaagctcccttgacccggaagtcacctcttggttggccagcttgtgcacaaatcctagccagcctataggctcactttggccatcctataggcttttctcgaccgactagggttattggtacaactccttgagggctcactacacttcatttggttgctgcttgacggttttgctatatcttgcatggagagtctattctgctactggcagggctatact

SEQ ID NO: 90089 - DNA, 526 bp, Cannabis sativa
aattcaactcatctcttattatcgtaacatttgtaactacttcgtcgagtctccacggccgccgaatccaaatataatttattttaaaaatggtatcaacgatacccacatagttagataaaatctctttaattaatgaatgatgctttatttattcatttcctcgtaattatcttaagtaagattataatcgtactctaatatccatataattacatatttaataaaatatgtccaaataaatatcaatataattttcgggatattacaaagccattattccatgtgagcgcacataattgaatgccattacgagaaatagtggaaatagaactcaaaaaattcaatttataacattgtgtttgtaaacatgaaacactaattaagtttctactaaaatttggaataaacaaaacattgtctaaaaacaaaaatttattctaaaacttgaggcgagctttttccttagcttagacaaatactaattcgccattcccaactttgagcttcaactcccctagattta

SEQ ID NO: 90090 - DNA, 532 bp, Cannabis sativa
  modified_base (377)..(381): a, c, t, g, unknown or other
attgagtaccaccttaaaatctgagggtttccaacaatctctttttgacaattccttattcataaaaaaaaaaactccaactttccaacttgccatcctcatatatgtggatgatataatcattgctagcaataacaatgctgccatcactcaattcaaatctttcttggataaaaaattttctctcaaggacattggaccacttcgatttttccttcctttggagatagcaagaacaaataaaggcatttcaatatctcaaaggctcttcaccttgcaacttctaactgacatgggttacctaggagcaaagcttgcttcaactcccatggaacctaatctcaagcttagtaaggacaagggaaatctcttacccnnnnncaccacttataggagcctcattggcaaactaatctacttaactataacacggccagacatatcttatgccgtcaatcatttaagtcaatttctcacatctccaaggttaccccatcttcaagccacccatcgtgtgcttcaatacctcaaa

SEQ ID NO: 90091 - DNA, 569 bp, Cannabis sativa
gtagaggagttgttgtcttgggaataagccattagcgacaaaggtcagaggcgattgacaccatgtaaagctttgcaatgacatcttgttgaatggtacataccagatggtacaaaccagaaaagcagaggaaaagtaaagagaaagagagaaaatcatgccaagaaagctcaactcaacagttgccttttacctctttatttatagtgtaaagtacagatcaagatacaaagaaatgcctaacagattttataacaaactacatttaactactcactaacataaccgtttaactaactaattagttaataggcttatagataccatggttatgtagtcactgattttcacaagaatcttaaaatgtacggaagcactctcacaggctgtgtaagaatggaagttgaaagggtattcagaacaatctatggtctaagaagatgcccatgtggcatgcctctgacacgatccccataaatctggtgaccttttctcctctactagacacaaggcaaaaagggggtcacctatattagggaggcacattactttgacattctttttttttt

SEQ ID NO: 90092 - DNA, 803 bp, Cannabis sativa
ttagtgacgcgcattgaagtgtcactaaaaacatttagagtcactctaagtgtgtaactgaaacccatttttgtagtagtgtgagtcatattttaggggtcccgagaccccaaaatcttatttcgacatctgaaaccctcaagggtaaccactaccacctgttgggaccgaaaagtggcagtggtcggctatggcttatgggaagccatagatggtatttcttgcttatttcagtcacatagatgctagaaaacaactttggtcacattggttcttggctaattgcttaagagagcactaccacaatttttgttaaaaaaatggcagtggtcgcataaggggactatggagccttgggtgacttttcttagttgtatttgatacatggatgctgaaaatataatttttcaaaagaaactcccactcctatgtggtggccgaccactgcgaccacttgtgccaaaaatgtggcagcagttggccaagtggtttccacaccacttggtggctttcctcacttagttttgacatgttattgatgaaaatgtacttttggcaaaacaattcatcctcattccttgtggccgaccactgccacaatttttgccacaaagatggcagtgttcggctaagcttgcattttggtgagaaatggtttctttcacttgtgttgcactccttggtgttgagggaacatatttggacaagttccctttggtgcattataggtggcgatcactgccatctccttgtggcagtgttctccaaaaactgaaaagcactgccatctccatatggcagtg

SEQ ID NO: 90093 - DNA, 1045 bp, Cannabis sativa
agtttttggtcacccaattcacattaataagcctgaaaataatattaacgaacaatcaatatgaataaaaatagttaaaattaatgaacaatcaattacaataaaagatcaaaagtacctgttatccaagacaatgccacactagtgccctccttcacttattgtagtgatcttgaatatcattccatctgattgcacatgttcatttatcatccgtgggcaccgctctgcattgcacttacctctgaacttacatttatcattgtgaattagaatatactccctgtctatatgtatgaaatgctcctttagtgcagccctcaatattttgatactaccaaactctatgttcaactcaaacttgaaatcatcattctttgtttggggattgaactccaacttcgaggtatgatcaccatcttcatcatcaatgtgaacacggtgtagttcatctcttgaatctaacccatcattgccatcatcattggcaacacgaatctcagttgcctggttccaccatctgtttggatctgatggtccaacatgttccctttccactcccccctgtatggctggattgaactcctcttctataaattcaaagtcaccctcagttgtttgtgtttggggttgtctttcaataggtgtttctgtttggggttggggatgtgtttggggttgtgctttgtgtttggggttgtctttcagcaggtgtttctgtttggggttgagaaggtggatccatgtcaaaatcagtgtcccaatcaggctgtgtttcaggctatgtttcaggcaatgtgtcattagtggcatctgccacaggggtacttggtgcttgtgtttggggctatgtttggggctgtgtttcaagccatgagtcattaatggcatcttccataaggggtaccaggtgcttgtgtttggggttgtgcctttctcatcctcctaagtctcaatctcttatccgttgaagtttcttctagaggttctttgaatccaatgaccacaacattaggggatttaggtccatctggctctgcataag

SEQ ID NO: 90094 - DNA, 611 bp, Cannabis sativa
ttccaaatttggaaaagtttgtaattgaaaaacagttggaacaactgtttggagacaaaacaaggtaaaggtttttaataaattttttttccacaaattccaccttaatccatgtaaaaccgaaccttaacaacacatgactacacttgggggagttatcatgtagaattagtcaggatctatttgagcaaatccaaacaatgttggaatttgctcactggaaaagtcttagttcatgcatcagcagggttctcatcacttggcaccttatcaagatcaatttcaccatcctctatcttgtctcgtatccaaaatattttgatatcaatgtgtttggatctctcatgatacagaggttttttgcttaggtgaattgaggattgattgtctaaaaatacagtcactttgcctttcatcatctgcagctctcctagaattcctttaatcgatacagcttccttgaatacctctattgttgccatgaactctgcttctgtggtaaagagagctacaaccggttgtaggtgagatttccaacttatgtagcatgaattgagatttcttgaacctgagcaacccgcccaactcgaaccggtgaacccgcaattttt

SEQ ID NO: 90095 - DNA, 849 bp, Cannabis sativa
aaaggaagaggagtatagtgagagagaggggttcggtctagggctaaaggaaaactagaaattctcatttcatttactagaaattactttaattacaaatagcacatatatccaaaatgactaaaatgaccttagggccaaataacatacatacatacattccaaggaaaaacatgtcattagccacacattatttcaaataattttaaattattaacacatcaataaaatgtcaataaatcatcccgaaattatatttcggcctcgaacccggtttggcccgagatacccggttgcgactataccgcgctgacttgtcagaacacacctgaaaaaagaaaaaacaggtatactataaaataatatagtccataagcacgtaattaaattaaattcacagttttacccttctcgggtcaaaattactaaagtgcccctagctcaccaacggggtcttaacatatcatatatcaaataaattcacatataataaattatttaataatataattccataataatacacatttaactagttagggtttgctaatccattttctaactcctagggtattacacaatctgtcgcagagtaataacaagatttgagtctagatctccttctctccttcggtttggttaaccaccgtcttccgcactatgattgagtacttgactagctatgtgtggccatggtactctatcactatggcctgaattgatgaagaataacaagaggcaaaatcactatggaaagcagtctcccatctactagttgtctcacaaagttagaaaactaggtttttggttgaagtgagttgtatgagaatgagagcatcatgtttcttt

SEQ ID NO: 90096 - DNA, 1546 bp, Cannabis sativa
aacattattactggcagctcacgccgctaagcgatgagccacaccattgtcactacgagagatccaaaaaaatagaaacaattcaccaacattcaaattagaaaacggaaagaggaacaattgagaaagtctccaatcggacacctgaaacctgcaaactgcaataacaaggacttggcagtctataaggaaagcaaagcagcattctccaatcaccctttagtgggttgttgttgagttgaagaatgcatttgcaaataaatagaatataaggaatcatacatgtgcatttatcatttttatcatgtaatataatttcaaaaaaagtaaaattgatattaaaaaaaaactaatatcccgatcaagaatttgttaatgatattattctttaagagctcgtttggttagtcatataaaggtcgtattgtattaattattacgaccataaattttaatacaatgtgagttgtattatttaatacataacaaatgactcgtattagcttgtattataatgtttacaaaaggtttgggtcaatcccgacctcaacccagctccggactcggacccataccctgactatggacttagacttggactctaaactccaacctcaaccttgaattctagacttagattcgaacccagaccccagactcggagcccagacctaaactaggatccagacccagacccagacccggccctagatctcgagttcgaattcgggttcgggtattgtacacaatgtatagtacaagtcaatatcaaacatagtattatattaaataataatacaataaaaatacaatatatcacaatatactaaacaaatcctaaattgtccgatcacaaattaaacagtaaattacgttaaatactgataaatatgataaacaaaaattaagtggtaaataaataatataaatgaaatattgttctcaccatccactatttactttttagattttaagttgaatataatatttaagaaaactacacttcaccaactaaattttaccattacttttaaaatttgttaacttcaattaagatttggacacttgaccttaatattatgccactactcttcctctatttgaaattgctataaattgtttaggctccaattgttgattgtattccaaccaaacaaacatttatcaaaattcattttttgtgagaatagtaagaattaatcaccacaaatcattcagcaaaataataatgataatccccacaaatctaacaagctatgacttcaaaatttgatggcacacatatatttgaagtgtgagtagagtccatcacaatccccacaatttcatggaaatccaaaaacaatatcaacatgtcgccagtaaataccatccaaagccctagtaaatatgggaaacgagtgctttaaaatattgttggtaaaccgatattagttttctaagagagtgcaaaaaagacatcgttttaccaacataaaaagatggttcttaagcaaaaaaaaaaaaagaaaaaacagatggttctgtagaataatttgttacatga

SEQ ID NO: 90097 - DNA, 1363 bp, Cannabis sativa
caacagattcatagtttgtttgaacaaattttgaattttcttttcatgaatattttgtatttactttctaattgtttcccttactcttttccactatctaaagtgtatttagggtgtattatgtatatatacatccttaaatcgttgattttgattatctctgatcatgtttcaaaaagttttttaagtttttagagaaaatttcttggtgtgaataacttgagttcataaagttcttacacttatattaaagtgtgttatgtattgttctttatgttaattgtgtaggtttgatacatacttagacgcttcattaagtttgagggaagttttgttcatgagacacttttaagaaagaagagtgcaagtattatgattgaagggagttcaaggtcttaatgcttcaaaaatttaattagaagttataattataacaattgtgacaaatttaagagtgagtctttatctgtataattcaatttagttttgtataaattttattttttttgggtatagtcttgttgagtggtaacaatctctaagaattgttgatataccacttataattttctgtgttatttatttttatatgattattttatttttaaactatttaaatttattgtgtttttgtttaaacaatttttgcgtgtaaatatttccacaacacaattgctattaattatttattttaaagaattttttacagttaaatcctcttaactatcattccacttgcacttaactctctaagcttaaattttgacagtagaattctccaaactactaaattgcttgcaaatttaaggtgacatccattttttttacagttaattatcaatatagactgtttatgtgtacactttgtacatgtgtcaaatttatattggtacacgtaatattattattttaaaaatatataaattatttcaaaatttataatattttttatttttatttttataattttatttaatttttaaaataaattttgaaaataatttttaaataataatattaggtatatcaatataaatgtaccatgtgtacaagagcataaatagtccatagagacagttaaccgaatgacagcttaaatttgctactagttcagtagtttagaggataaaatttgaatttagaggattaaatgcaagtgaaacgacaattaacaaagttttgtcgcaaaaaactctattttgaataattaagttggtaatcataaaatcagaatttcaaccatcttcctattgacaatcaagcttcacataacgttatgcaggtgtgaatactaagttatgggggtccaggcaacaacttagtttcccttagaaagaacaaagaacaaagaaggaagagccaa

SEQ ID NO: 90098 - DNA, 554 bp, Cannabis sativa
gtggccgcctgggttaagtcaccacctgattaagaagaagacaaagacgagaggcttcgtcctccatggttgggtcgctgctcgattaagaagaggacaaagagaatgggaagggttttgaagtggatgagatggggttgagttgccgccagtttcgaagagaacgaaaggggctcgagtgggagaggtttcaaagaagacaaaggggctgctagtttcgccagagcaattcaaataggttgatcgagggttaggggtgtgaatagtacatctctgatttaggttttagggatattacttactgttgcatcgatttctatttttcacaattgtatttcgcgtcatttttaaaacctcgcaaaacacaataggtgagtgttgataacagacgcaaaatgaaaaataatttttaaattttttttatttttttcgtctgtttactttttagcgtcatttaataaaagacgcaaataatatattattagcgtcgtttctaaacagacgagtctaattgcttaggcactattcacgtcggtcaacgctatgaatagtag

SEQ ID NO: 90099 - DNA, 977 bp, Cannabis sativa
  modified_base (915)..(915): a, c, t, g, unknown or other
tctgtccactcgaactgcttgtttcctcgcaggatgtttaagaatgggacacacttttctgttgactatgaaatgaattcgttgagcgcgacgatccaaccagttaagctttgcacttatttggtttttgttggcgagttcatatccaagagggcttgaatcttttctggattatcttcaattcctcgagcattgacgatgaagcctagaagctttctcgaggtgactccgaaggaacactttaagggatttagtttcatgttttattttcagaggactttgaagcattcgtccaggtcgtctatttgccccctatcctttctggattttacgagcatatcatctacgtatacctccatatttcgcccgatctaatctttaaacattttgtttaccaatcttatgtacgtagccccagcgttttttagaccaaacgacatgactttgtagcaatagggacccatatctgttaggaaagttgtatgttcttgttcttgtggattcattttgatttgattgtagcctgagtaagcgtccatgaaggataatatgtcgtgccctgttgttgcatctacaagctgatcgattcttggaagtggaaacagtctttcgggcacgccttgttgaggtctgtgaaatcaatacagactcaccatttcttgttcggcttgggcactagtacgggattcgcgacccaagccaggtaaaagcttcaattatgaagttgttgttgcgcagcttttcaacttcatccttcaaagctactgctagttctttgttcaacaaccttcattttttttgaactagctggaagttgggatcattattcgaaatatgtgaaatgatagaaggatcgattctgaccatatccacatgtgaccacgcaataacatctaggtttgctctcagaaattntatcaattctgattttacttcgagcaacaaatctttttcgatctttagctttctggtcggga

SEQ ID NO: 90100 - DNA, 1646 bp, Cannabis sativa
tattgactcgaatcctcctaaatgggggcctgacccgtttcgattctttggctggaacacaaccctttctctaagctccttgaaggttggtggaaaaatgcaagtgtaaatggctggccaggaactaaacttatgtgcaagctgaaaaaagtgcaaaaaatatcaaggaatggagcaaatcgtttatggaaacaacaaggtggccataaatgctttagaaaggagaatagtggagctggataaaaaagaggggagtaacttgtggaatcaatcttgcagaggaaaggagaaatcttaaaagggagtggcagcaatatatagttgaagaagaaaggagtctatggctgaaatcgaaatgtaaatgggcaaaagaaggggatgcaaacacaagaatgttaaataatttattaaatgcaaggaaggcaaggaacactacatcaagaattgaaagaatggatggctcgatacttgacaaggaggaagaaatagtaactgaattagttgatttcttctccaaattatatacatccgagaggagaccgggttggggagttgaaggtattgaatggaaacaaatatcagaatcattagctacagatttagaaagacccttcgaagaagttgaaataaagaagcaattttcagttgtgaaggtaacaaagcacctggcccggatggatttagtttggcattttttcagtcaaattgggaactcataaagaatgagctcttggaagtcttcaaggtttttgaaagagagggcagaattgagggaagcattaatgagactttcatttgtcttataccaaaaaaacttaatagttgtttggtaaaagatttcaggcctatcagtcttacaacaagtgtgtacaagatcatagctaaagttctgtccgcaaggcttcgaggtttattggggtaacgatttcggtaacacaatcggcatttgtagaagggcggcaaattttggattctgttttagtgactaatgaggcagtggaagattactgatgtcgcggtaagagtgggttggtactcaagattgatttcgagaaagcttatgaccaagtagaatgagatttcttagatatggttatgacaaagaaggggtttggtgaaacttggaggaaatggattagaggatgtatctcgtcaacatcattctccttatttgtgaatggaagaacaaggggaaaattcaaaggatctcaaggcctcagacaaggtgacccactctcaccttttctttttacgttagtggtagacgtacttggaaggatgattgaccaagctgtgaattcaagcaatttctcggggtttttagtgggcaaggataagattcaagtcagtcatctgcaattcgcggatgatacgcttctttttgcagatgatgaggcctcacttcatatactagtaagaattgtagaggcattttgtgctatttcaggattaaaagtaaatatgagtaaaagccaagtgttgggtatctctatgcacgaaagtgtggtggccttgtgtgctaatcaggttggatatgaagtagggaattggtctatgtcatatcttggaatgcctttaggtggctcgcccaggaaaaagttgttttgggcaccgatcttggaaaaatgtgctaaaaggcttgatgg

SEQ ID NO: 90101 - DNA, 597 bp, Cannabis sativa
agtaacaatctgaaaggattgttgaaaccatgtacaaaacccttgtgtgtttttacttttttacactgtttgttaaactcgtttattctggagttacagagttgtcttttgtagctacagaaaagctatttcaatactagtgtcattattctgtatttaattaaataataaattgggaatattaaaatacaaaatttggtatcaaagtggttcactaaaatcttagtgagatcatgagattattctgtttaattttttttgtgtgagatatctttgtttgtagaaggaagcttcattacacgaccacctctgttgaatgattcgaattatccatattggaaggtcaggatgagagcattcatttagtcataagatgagaaggcttggagagctatacttacatgcttgtcacaacctactgaaaataatgataaaggtaacgaaggtaaaacctaaactcaattcgactactgaagataaaaaattatctggttataacaattaggctttacatgctatttataatggttttggtgaaggctttatcaaattaatttcatcttgtgaatctgcaaaggatgcgtgggaaatccttca

SEQ ID NO: 90102 - DNA, 892 bp, Cannabis sativa
tcttccatacatttatgatgattttatgcggtatatgcattatatacgaatataatttacataaaagttttaagtttcggtctgtactttgttttctaactttcggtatatattttgaatctttaatgccatatcacattcatataaaattatagagtgattttgtgaatgaaaatgattttttaaaaaaatcaatgaaatctgaaaatttctctcaaaaatacgttcggacccgaaaagatttttatgaaattaaagtctacattttacgtgttttcgatgcttgaaatcagtacagatctcttaatttattcatttagatcattttggaattggttttatgtattttggacgttggaagtgagttttaaattcggatttttggtcgggtccaacgaacccatgtgcagaaaattgggtcataatgactcgtattgacgttgaagacaactaaaaacgacatgttgtttttggtagattaagggaaaatgacacgtcatttactaaagatttgaattcattttcatacaaaaacgacatgtcgttttcctatatgaaggaaaacgacacgtcgtttttaaggggcagatttcaaacaaaaaaatgaaaattaagaaaaaattccgaaaatttattatttagatttattttagaatgaattttatttattttatttccttacttaattttgttaatttagtcaattaaattacatttgtttaaattttctatttttatttaacacatatcttcatatatgttatttagtaagaaaaaaattatggtaaactttttaatttggtaaattaattacatgctttatttttacatgtaattataataattgtgatattataagaatgtgaatattttaatattctacaattaagtg

SEQ ID NO: 90103 - DNA, 928 bp, Cannabis sativa
aaactccctcctatagatacctatgcgtttgatcaaaatgataaaataattctaagtaaatattattttcttcttgttacatatatgttacacaaataatagagccaattaagaacagttcatattattttctctctctatatattatatatttctatacggattctatatatgtaaaaacggcaaaaactctaaccaacaatagctcccttttggttatctctaggttgtgtaattataaaggggaaaaaaatatgaagggaaaaaaaataaaacttttacacaaattgggtatattcgtaaaagggtcctcctggtcttcattgattaaccctatggaacccaataacaaaaacaaagtgatcaaataaaagctaaagttaaagtaactttttaatattctaccttctttcttaaatcaattatcagtgtcaccaatgatgtgggagagagagagacacatttaaataatgtaaacacatacattaatctctcatcagtactccatattaccaaacatcataattaattactaaattaattcactagaaaaatgtctatacatttctctttccatatatgcatattcaaaaatctttataatatatatataataaaacaaaaaataatatgagagagatctaacaaaagaaccacaatatatgaccccatatatatatatatttatataaaaggagccaaagcaagaaaagcagctctctctctgttatgagatacccattaagcccccatgcatgcttccaagattgcccccaccatagtgccttccttctcttcatggcaacccccccatgaaagaaagtatacagatttaattaactcaaaattgaaggaaacccctttctctttcacatacctttattttattttcatgagtatatcccatcaatttattattattattatt

SEQ ID NO: 90104 - DNA, 624 bp, Cannabis sativa
catatctccatggctccaagcgaactgatctagattctcccttaagaaacttattatctgctattttagttgctcgtccaggttcttcccaatgtaaacacacttttcagggtttcttgagtcgagaacaacttcttccaattcttgaattagttttaataagtttctttcatcttgaacccaagggtcaagatcctcttccttcttttcgctttcctctgccaagattgccattaactgatgtcaagcttttctatgttatagctctatgcgatagcaatcacgagctagcatctgattgcctcgtaccactcccactccctctagtgtttgaaatttcaaggataggtgcttgatcgaattaactgcccctagtccgattaatgctagacgacccaacaatatattgtaagctaatggcaagtcgacaactagaaagtcctgcacaactgtgacagataggggtgcctcgcccaaggttaatgcaagctcgattttgctctgactggcgatactgttgctagtgaagccacaaagatttaccatgcaaggcctcaatttggcctttttgagccccatcttcttcagcgtttccttataaaggatgttcaccgagctcccgtt

SEQ ID NO: 90105 - DNA, 887 bp, Cannabis sativa
aaaaacaaaaaagagttgaacgcatctaagtttgtaaacaacacagtatatatattagttcagttttctaagtttgacatgcacattttgagttagagaagctaagagagtcttgtctttagattttaattcttaaaaaccagtctcacaaataggcattcaattgggctactcaattagaaaactgaactagtatgattataattcttaaaaactatgaaataataattattaaaattaaaagttgaaaaaaaggcatcaccaatttgaaattgtaatgtataatatagaaaatgatagttccataattaatatattaagccatgtagccgtccaaatggtacacatgacctaatgaaaattatataaataaagtaatatgaaaaacgagtttttggtcaaaaccacagcttataagaaagccatttaatattattctaaccattagcaattggtgttcacatttacactatcgatacaagatattaaattcttattgtagtgaaagggaccacattccttgttattattggaaattttattattaaattgtgagcaaaataaacaactactacaagttgtttattaaattttatcccaaatttaattcttcccttccttgatgtcaaataaataaataataaaaaggaaaataaataaataaacaaagcttctcttgaatcttaaataggttttgattttttggtatgatactattactatttaccattttgatttgtttaaaattcaaatgcaaacagaacaaacattctcttctttatattatatccgctgtattttattaagcccaaaaaaaattgatttttatttggtaactaatatcataaatttatgtgttgttatattatatgttagaaacaattatt

SEQ ID NO: 90106 - DNA, 709 bp, Cannabis sativa
attcgtgtcgctcatgtgaatgacattggccctttgacccacctcttatcaactccatacaaatcaaggttcttgtcttatttacctcatcacattaatttcaatttgattagtattaatatttgcagatgaaatttagttgaacatgagcttcttaatacagagagtcttgtaaaggatgcttatggggatggtcggcacgtcacataaatgtttgattctcacatatttggtgtttgttgaaatgtctaaatgaagcaatattattccatgaaagagaagaataatagagggagaaacatgatctggtgaagatgtctttcagactggattttgaagttcaaaatttggcaacaacacaattatggggtggtcaagtttgtagaatttgtggacatctcccaaatcaatattggatgaatattagtttggggaattaataataaataaaaacattattttgggtatgaattaatctactgagagagggatttttttggggagtttaatattattaaatgaaattaaaaaaaaaaagaaaaagaaagtgaaaggtttttaaattttggtaaatgtgtgaattaatttgagttgcacttgcacacgtgtacacaaacgaacagaaagtgaacattgtgcacttttgccataaaaaaaaagattgggtacttaagtcatataaatatgaaactttaggtacttatgccgc

SEQ ID NO: 90107 - DNA, 765 bp, Cannabis sativa
agttatatttctagaggtattatttacaagtcgtatattataagaaacacgacttgagtgtaaaaagttcaagggacaaaaatgtaattattatataatattataacttttatagaatatggctaactaataataaagtgtcacctctaaatagtactgagtatcattagtgacttataacaatactctaccttaaggtgatttcttagaaatttttttctctcttttgctgctttttttttaatctcgctttttattgtagaattattttatattgctatattattgcttattgtaatacttcggtaaaaggggaaagttgtttgaagtcttattaccttgttgagtaatattagatttgaactcgattacccatgttttattttgtttttttatccttttaccctgttggttgaacaattataattattattatggttttaatggaatatcccaaaccaattgctatcaggctcatcatgggcaacctaactgcaataatgagaagaatattttatttggtcctaatgataggaactataaattgagttttttattcatttaaatttttgcagttctcattttattttaatcatttctcaggataattagatgtgaggaagcaaaaaacaattagatggagtaaaatgagatctccgatccttgtacgttgactagcggttccaatacatcctcttaaaatataatgattttggatttggtatcagtatttgtgacagccctttttgcataagtcaaattcaa

SEQ ID NO: 90108 - DNA, 1649 bp, Cannabis sativa
taggttttagttatagttatggttttttttcaaatgtcatacgtaattttaaagtaaataatgctaaataaaaaaaaatcgttaaactaagaatctttaaaccaagaatataaagatatgatgtaataaaaataaggattaattttaagtttttttaatttctgtagtatatttataaactaaggaataaattcccgcttggggttttaaaattttattttaaaaattaatatatgttcacttttattaccttcttattatattttagttttattatttattactcataattattaatttaaaaaaaattaatttatgttgtcagcttttttgtttgaacaaatctattttgattataatttaggtaagtgcatcactttatcatgtatatggtagtatacaattttatctttaaaaaaatgtggttctttagtgaaacattttcaaagaaaaaaaaaactaaaagctgtcattctatgattttctagtgtaattattaaagatataattacataaaataatattttttaaaaaaaaattatatttttaaatttaaagattttttttttttacatgtttaggatattttataaaattacacgaaaataataacaaaaatataacattcaataacattcaaacagtaacaaaaaataatatacaaataataaaaaatcagcaataaattaacaaaaaatacaacatcaaaatacatcaaaatactgtatattctgtaaataaaatcgtaaaaatatttaaattctgtagaaccgtatttttgtaattttttttattatttttgtgttttttgaaattatcctaaatcggcctaattttctcttcaagtatgtttacctgatgctatggaaggacccacccttatctcaacgcttatacatgcagctaagggtgttcgttagactacattcaatatttttaaatgatatatcatataattaaaataaaaataataattatatgtaagtagcatactaataaaattatgtacctttaaatttaaaatatatatatatattatgctaacaaaatatatactatcattgtacttaataaaataaaaaataaatattatttaagaataataataaatcatacaataaaaaagaaaaaaaaatgatataactttaaaataaaaataatttaaacaaaattgataaaaatatacaatgatatttaagagatatgtttctaaatcttaaatatatataggattttttttaggtgagggtaccacttttgctcttacccataagattttatttcagttttaattagtttaaaatgagggtgtataaatataacattaaaaattttatacaataaaaaataatttaagcaataaatagtataaaatagttacttctttacaaattttaaaataaagatatttatatacatagtaatatatttttcgatcataaactataatttttcttattttttaggtttatatgcttaattttaaaatgacatcataaacagattaagaagttgattttcatagcataatattttttttaagagaaaattagactctataccctttttatattgttcttttttatttttatcttcttttttaaaacctatcatttttacctttttttctagggctatttacaaaaata

SEQ ID NO: 90109 - DNA, 616 bp, Cannabis sativa
aattagggagtaaaaccttagttgtaatgacgtgaaaagtatacgagggtcttagatattgatgaattagtatcatcaacggggacttactataagttggcatggtacttcatgtcaagggattttcaataaaacaaagaatatacttgaggtatgtatgtttctggatgtatttgaaaagaattttaagatctctaccaaaaacagaaacaaaactttgagatcagggaatgatctctgattaattgttatatgttgagaattcagaaaatgggtatttaaagtttagttagtggtgccaagtatgagcagtgttgtctctatcctgtaggttacatcaattcagtttataacggttgtaactgtaagtgattgagaaatttaaaataaatgagttgaataagattcaatttgataataagatggaaatttctcatagttgagtgaagaaaaccgatgaagaattgtaagaggctaatgaaaggactgaggaaactgaattttattaacgaacgaatgaaaacaagaaatacaattgggaacgacaaagaagcatctactttttgataacccaccttaagcttacctaggagttaagcatacttaacttgaggta

SEQ ID NO: 90110 - DNA, 586 bp, Cannabis sativa
ccggcccacagtattgttgtaatattttactctttttggaatattcctgtttttttccttataaataaatatatttataatatatttatttatatctttgaataataataataaaattaaaaattttacgtgattttatagttaaaatgtacatactttacaagttagtattatttctgagtttcttgacggctgcaaaccaccgagattgcttactcaatcttgacggttttgaaaagaatagtcaagatagcataatatttggtcatatatttaaccaatcttgacacttaataaccatcgagataagttattatttggtgaatatttaaccaatcttgacgcattttaactgctaaaatatctcatacttagtggtcaatttggacaatttttttcgccgtaattggttttaagaggggagataatatatattttttttctcaaaaaaaaaaacattaaaattaaccattctctttacggacaaattacattctcaccatctctaatgagatatgtaaaaattgtgttatatttggcacaaaaaatagttttgtagtaaatttataccaaattttagctttgt

SEQ ID NO: 90111 - DNA, 519 bp, Cannabis sativa
gtagatctaagatcctggtaaaataaattccaacagaaagatcatagcttgcctacatgccaggttctagcaaaagccttttagtcaagtgtgttgttgagaataacagagataacgctgtcagggcgacgcctctgctcttgcgaagggcgaaggaaggtgagtgtaggcaatattggggttcccgctactcccatacctctttgaaaaaacatgaatctagtcggtcaaccctctaaagacgcagaagaccaccggtgctttcgagcctaggcacccttctgctcacagaggaacaatcatgcagaaaaggaaaagggtgaaagtatctgagctcaaaggctaagagggtcgccctagcaattctgttaactaagatggtaggatcagggaacattattcaaacgacatgtagtctagggtggacctccaaaagtatctcaactttgagtgcaaaaaggctagaaagaggatgctactagataatagcctccgcgaccgtttagtggataagttttc

SEQ ID NO: 90112 - DNA, 927 bp, Cannabis sativa
  modified_base (826)..(827): a, c, t, g, unknown or other
aatgataattaatgttgaatgtgtgtttggatagctcataatttatgtgataaatttaacaccgatggacacctagcatatttagagggcaattatgagttatatttaagatcatcatatatatatatatgtgcaacattacccccaaaattatgtgtactatagtatatataatgcacagcgtacacaggcgtggtgcttctatatttctatgtcggattcgtacatacatttggaaacacgccaaggatgaatcattgtccatttcgtaaactaagtgggagtcacgtgcacttccgataaataagtctaacatatcaaaatagtccattaataatgcatcttctgataagactctctctctctgtctctctagctatttgtgtggtttgatcatgttgtgtaggccgaactctcaaaaaggccagttgtttagagatgtgttcatattaagatgcatattctagcaatacttttatgatttttatattctccttgtctatttgttagaaattagtggaattaaataatatttgagaatattgtcttacatggattaaattaaaaaataaaaatattgagccatatataaaaacatggattactccactcatcaccaatcgattttgagatggaaccttatgattctcatcattgtatcaaagtcatatccctaggccagagttaaccatatataaaaacatgagctactccactcatcaccaattggttttcaaatggaactccatgattctcatcaattaataaattagtagtccatgaatcttattatggtttcactttgttattttatttttattttttnnaaaaaaaattaatttttaaaatatgatttaatttattgtgaatattcaatgcgaattttttttttttttttgaatggtaaaatgcaactttattaaccat

SEQ ID NO: 90113 - DNA, 677 bp, Cannabis sativa
  modified_base (178)..(182): a, c, t, g, unknown or other
aaaatattcatttatcagaaaatcaattatttattttatttccttaaataaaaatttatttccttaaacagaaatatatttactaaaattaaaatattcttatagaattatctttggagtttttaaatttttaaaattagtttaaattttcaattcaccccctcttggaaacatatcnnnnnctaacaattggtatcagagcaagactcttatttttgggtagatttcacaatgtaagagtatagcgtttccaagtaattcacacaataagattctaaaaggttaccataagtagagcactatttttcgatggggtagacatttcttattggaaaattagaatggaaacttatttttaatccattgattatgatttgtggcatattatatgttatggtctttacattcctatgcatattttagatggtatagaaactataaagaaatatgatgcatatgatgaaaataataaaaaggtgatcggctcatgatatgtaaaacatgttagaggtaactcatgaaggaactaatgctatgaaagaaactaaaattcaaatctattccacataatatgaaaatttcaagatgctacaacatgaaactattgctaacatatatacttgtttcataactattactaatggtttgaactatcttggcaaggtacttacacaaaa

SEQ ID NO: 90114 - DNA, 908 bp, Cannabis sativa
ggagccttgaattttggggcgttgctgctatagcagtaaataagcactacgaactgtgaagaggccagttcgattctcaacccaagaccaacagtcagcagtatcagtatcacaaaggggcatccttaatattaattcagcttcatgagccaaaaacagatcatgaataacatcacaatcccatctacaaactccaacttagaagagtgaattgactgtgttattatgcagagatgggtgaatagaattaacatgtctgttactcgaatggggtaaccaaggattgccagtaatgttagtagtagctccatcaccaataatacgaatagcacctgaacgaaccaaatcttgtgcaccccaaatgcttcgctaaacaaagcttggattataaccaagatccgctgaaagaaaattcgaattaggaaaatattttgccttgaacactcttcccacaagagaatttggattacactacaacctccaaccttgctctgcaagcatagcaagattgaaatcatgcaaatgtctaaatcccataccaccatccttcttagaggaagctagctgatcccaagtcatccaagtaataccacgacctttactagacttagtcttccaccagaaatttgccattagattttcaatttcattacaagtcccaataggaagaagaaaaacactcattgcatatgtaggcagcaattggaggacggttttaatgaggatttctttgtcagcacgagaaagaaactttccttcccaactattgatacaggaaataactttttgttcttaatataaaaccaagaattgtgtttttattgcggccaataatattgggaaggccaagtgttgctaaatttataatcactacgcaagtatacgcaatcaagtagtaaactcacaca

SEQ ID NO: 90115 - DNA, 1311 bp, Cannabis sativa
  modified_base (1148)..(1171): a, c, t, g, unknown or other
tctcatcatttttattatttttagttcattcacatttatattattttttatttatattaatttttaggggtaatttacctccatgtggatacgatatagcccatttactaccgcggtcgcagtgtaactaattagacgacatcaggtaatttggtagctgaggagctctttatgccttagcaactgacaaagcagggagcttattacgtgaaatgtgctccactggtaggaggtggagcaatgttctcatttggttagaggtgcaatgtgtcaatgtactctactggtaggaggtgcaatgtgccaatatgctccactagtaggtggtcaatgtgctcccttgatagcacttccatatctagaataaaaattcatgcataattatcataaatttttttgaggaaaaacccttttgttaagagagagggatgaacaataattaacgccattaagaaaagaaaacaataattaacataaacaatgttcatcaaccattattaaaaaagaaaaaaatggaaggcataccataatataagttaaggaatagccattaaaattaaggattcaatcaattcttttttgaatccaatccaatccaatcagtaattgaatttgaaaaatcctcatccaatccaatccaattagacctcaaaattcaattcaatctattccaattacaaatttgattagatcagttttttgattgaatatctaattacacacctaaattttaatatttaactttaaaatataaagaaaaatactaaaaactaagcatcaccttttatttaagtttgatacttcataaatatattttccttacaagtgtaatgtagtcaaaagttttaaataatgaaaacaataacatttctaagttatcaaatagaacaaagcatcatgaaaataaatacacaaaacaaccaagtgttacaaattcaacacactcacacaaaaaaatataataaaaatatatcatatttttcaatattttttactatataaataattttttaacatatataaatgtaattgcagtggatcgatttttcattggattttgatattaacatctaataaccgatccaatctaattagaatccaacttttagcatctaatccaatgcaattataattgaatatccaacttnnnnnnnnnnnnnnnnnnnnnnnnaattggattggattggataatgcctacccctaaatttagaataaaatatcaaataaaactagatacatcaattagagctaattaatactcattcccggttgctggacagaccttaagtcctctatcaattgatccaaatt

SEQ ID NO: 90116 - DNA, 918 bp, Cannabis sativa
  modified_base (891)..(892): a, c, t, g, unknown or other
tagttaatttaattttaaaaaaataaatttttacatattagtaattaacctactattatatgtcaacaaaaatgtaacaattaagtagtcaatcaaatcttaatgtataaaaatttttatatataaaaaggggctatctaactatatatttttgttagtttaacagaatattctattaagtttaacagttgttgttagtattgtttgtttcatagatatataaatattaatattaatatattaattatttaattttatgaccctaggttattgcgattgccacctgcatgcgattgattgcgattgcaattgaaaataagtgactctaacttattgtcattgtgattacgattgaaaatatttttctttattttgaatattttttgattaatttaaatatttgcggttaaattcattatttaatttttgattaattcaaataattttttttttcaaatttaattaaaacaaatttttctttaagctgatattattaaaataaatttagtcaaataataatatacttgaccatataaattgtattgcgacatttaattttaatttatgtatttgttatctttatagttaatgactacacaaaataaaaaatttactcattacttttaatatattttactaatattttatatttaattttacttttcgtataaaaaatattttaatttaattttctttttcaaattactattatatctttttatacttcataatcttttatattaaacatatttttttataaaacaaatattatttatttaattaaattatatataatattatttattgtaacacttaaaaagaaaaatatataaattaataaaaaactaaatattggtgccttatattatctagtatctttatatattaaanntgcctatctaacggcaattcttggtt

SEQ ID NO: 90117 - DNA, 926 bp, Cannabis sativa
tacatattgtctcatcacaattgtataccttttgataatcagataaaataaactgcttctgatttagagatctagggaggaagacttagttaatattattgcactatcaaattgcagtagttactatagatcaatcaggtacgcatatacctaattaatatattgttatcgtgtttatcgtgttctatattatatacaaatagatcttgggtttattgttaatatatttaacatgtggtatcagattgcctattgtatataatttagaacctataatttgtatatgttaattatcaatagttacatattaattttgtaataaataaattataaataaagttttttttcgttattaaataaatcttaaaactttaagggttttattcatcgttaaattctctttccattgatatattatatgtatgaaatcattgtgtatttactgagaattttaagtttaaagttttagagtttatataattatattatgaaattatattttgtgttttttaatttttttgtttttgatctaaaattgattatgaatatctcattatcaattgttttatcaatgttcttaaatgatttattttgtgatttgatcgagattggtattataaacaagttttctttttatgttctttaatttcggattgcttttttgcattagatctactcttttagccattaatacccaaaattagtagcgtagatcgactagaaatccaatcacaaacaaaaccccgaagtttcccatcgtttttcgtcagttttttggccgattttccagtcagacccgactggtctgcaatccggtcgcgtgacccgccttcaacccgaccggaggaagaagaaaacaaagttccagcgaagcccactctcggcctcggtgcgtgggggcacgtgcggcacctccgggagtcgtt

SEQ ID NO: 90118 - DNA, 532 bp, Cannabis sativa
ctttttgaccaaaacttttcaaatatactggcacacgggaaacataacttttttactgtccaagcccgttttcttttctttatactgctcaagcccaataactttacttttataatgtgaacagtaaaaaaacacaaaaaaaagggaactccttcgtggttggggacgggccggaatcgaagataaccaggaaaaaaccattaaatccggcgaagagtaacccctgctaaatctaaggataatcaaagaacgaacaacaagatttacagaagattttttcccaaaaaatagaggtaaacacaacaaaatcgaaattagtttaattcttaaaaaactacaaaaaaacaaacctagatttagatttgaagtttaaaaaaaacgaaaaaaaaaataatgtgatgttgtttagtttatgatgtgaattgataaatcagggttgttctattgttaatttgtcgtttctaacacaaaatgattagtaactatacttgagaaactactacaattgttcattcaaaaaattagggttgtt

SEQ ID NO: 90119 - DNA, 710 bp, Cannabis sativa
cggattggatcggatgaacagccttaatatacacgtaacaataacttaggtggcatttagttgggaggaatgaaaatataagaataggaatgacaataagaatacgaatggaataaaatttaaaatccataaaaaataaataaataaaaaaatcattaaaatttttttcttattatattagaatggtcttatcttacttattaaaatggaataatcattttaccaaaatggtggaaagagcattctattagaatggcattccaatacttaatgcaaccaaacaaaggaatgaaatgaaaattgtttccttttcattccatttcatattattacctccaaccaaatgccaccttagtatataaacatatttagattgaattaaatcaattttttttttacatatcaattaatatttaatccgtaaaaatacaaattttaaatttttcaatctaatctaaactaatacagatatctgcactttactgattaaattatagcatataaattaaagagcattgctataagacactagttgtgcctaacaccttctcgacatgtcacgttgcgattagttagcgatactccttaaaaactattatattaaattatatggaaccagatacttagttcaaccaatagcgatactgacacataagagagtactagacaccactggtgccctataactatctctaaattatattagaatg

SEQ ID NO: 90120 - DNA, 994 bp, Cannabis sativa
tttttattaaaaaatactaaaagatactgatagtacttaaaatcctcttatatattaatatcactattagtttaactaaatatcaactgcatatactttaattaaataattttaacatagaggtggtaatcactatttatgtgtaatatcaatattattctctatttataatgatactactttgttcctaaagaacaccggcgttgacttgactgaagcatgtagattatttatattgtttttcttcgttccacgttcaacgaataaacatgcatgggcattttggtccatacaaatgattatcttcttatttgagtgtggtcacctattttgacaaaataaataaatttcaaattattgttaataataataataataatctattttggaaaggtgacgaaaagtgacgtagataatgctttcttaagtatatgtgaggaaagcatcacttccttacacaacacttacatagtctaagcaaaaatattcataaagcataaatgctatcaaagcatataataggttcacatggaaaaaaaaatcttaggtggggtatcaatttagctaactattttttgtttttgataaatcgataaattgtaatttagttataaattagaaaggaaacaaggagaaaaagaagacttgaaagaataccacttggtttaaaatcataatctgttgagaatcatgggattaaatctcaaaatcaattagcaaattggaatagcctatgttcttatatatagttcaatatttttacttttacttaatgtgggacaatgttctccaatataattgaccatttagcttagtttactgtagaattttgatatttcaaaatgccagaaagaaaaatacatgaagatatgtctataattggattttttttaatcaaagtttcattgtaaaattggcctaagagtccataacgcaacaactgaaaaagctccagtgttgcaagttaaacggtcaaatatttacctaacataac

SEQ ID NO: 90121 - DNA, 959 bp, Cannabis sativa
  modified_base (28)..(31): a, c, t, g, unknown or other
  modified_base (59)..(62): a, c, t, g, unknown or other
  modified_base (89)..(92): a, c, t, g, unknown or other
  modified_base (120)..(123): a, c, t, g, unknown or other
  modified_base (149)..(152): a, c, t, g, unknown or other
  modified_base (179)..(182): a, c, t, g, unknown or other
  modified_base (210)..(213): a, c, t, g, unknown or other
ttttgaaaagatttccgtgtgacagtannnnaagatttccgtgtgacagtattttgtannnnatttccgtgtgacagtattttgtaaannnnttccgtgtgacagtattttgtaaaagtnnnngtgtgacagtattttgtaaaagttannnngtgacagtattttgtaaaagttaaccnnnnagtattttgtaaaagttaacccaaattnnnntatttttgtaagtttccctttgtatatgagaagcagggccagctcaagtgatttgggggcctcgagcgaaaaattaaaattggtcctttcaaaataaaattatcaattaatgctttacaaaatttagttagttttttttcaaaaaaaaatatttataaattttaaaataagcaagaattttaaaatcatgtgtagtgagatgattttatcatttttttaatgcatattagttattatgaacatttattatgtatactatatattataaaaaatatttattatattatatataaaagaaattaaaaaaaatagggtcttttaatatgggggccttgtgcaatggcccaagctgccatatgtttgggccgaccctgatgagaagaagggtgaatttaggaaaggtcctattacgatggatagggaagaatctggtcagagatggagaagaatctatagttattagaagtcgtcttttttgttcggccaagtccgttgtttttctctgaatttaggtgcggcttggttaggattgtgttttgttactctaattcgatttttgctactgcgattagttttgtcactgtgatatatatataattttgagtgttttagtcttgtctctataatacaattttaatattattttttgaattaatcaggagatttattaattagtaaactcgttcaaaacaataaaacgcacttcagaggaacaatcctccaattgaaccacacaacctgtagag

SEQ ID NO: 90122 - DNA, 542 bp, Cannabis sativa
ccatggtttagaataatgggccccatttttgcaaataaatagcattggagttccgcagcttgaactcatagatgagttttgaagacaagacaacgtactcgtcccttatggcctgctgaccatcaagggctgccttcaacttctcctcacacactgtgaggttagtatccaacttggagatgttagcagcttgcatggtgttctcttgaatcttgttgccaagcatggtctccaaacaaaaaatcatgctccggttctgcaggctgagagcctccatcttagataaagtttggccctttgctaggagatccgcttccttcgccaagagagtagcctccaagctatttatttgctcacgaagagtgctcgaagacccactagagttgtcacttgaaaacctcagcttcatcaaggcctgaaaataaaacaaggtcaaaattagtgtcaaaagacaacactgtccaactagcctttctataagactaccaaggtcggctagcccctcaaagactcatcattggctggccagctccatgcaaaaa

SEQ ID NO: 90123 - DNA, 640 bp, Cannabis sativa
acaaattcaatatttgaccaaaaataaaatttgtagtatttctcataaatttatttttgacaaatttttaatataccattatgtcctcgtgaagtgattttttcttgcaagttagaatttatatttccaaagaaagaaaatataaagagagtttggcgaagtaaaagtgggaagggacctaattagtataggccagtaacgtagctagtactcgaaagaaaaaatccactcggacctactaattttcagcacttctaaagaaatgtcattttccaacgtattgggcgcattgagaatgtgtgtactgagattgaaaataaggtctatttggaaagtagaaattacgctatatgggaaaattataagagtttacttttttatggcataaataatgctaagtaattatgtgattttttatttttttacatttatataaactttttttatgcatatttttgtaaaaaaaatatggaaatcccatatttgtaaacaataataagttttaccgaaaagtcactggcgccaaaaaagtcgtcggaaaagtcactggcgtcgggttagtcactggaaaagccaccagtgtcggaaaagtcaccagaaagttagtgttgctggaaaagtcaccatcgccgaaaaaaat

SEQ ID NO: 90124 - DNA, 548 bp, Cannabis sativa
tttgtacttgtggattaaggtggttgatctcaggtactcttccccagctatccctaggatccgagttctgaactcggtgtcatctttgcagatgaatgatggcccccagtcaaggcaggcaagcatctggtgtttagttgtaatttgagattttacaacactttaaattagattttactcttctaatgattattttttttttcatttttttagttgtaatttgattatgggtcttattaatatggggctataatcatgcttcttgaaaaaacttttcgaagaggtcacacatcgcaagattactactagtcaagaacacttaattttagaattgttaagtgatagactaccagaaaacaagatgaatctcattgatatagatagtatcaatcattctatttaagtactcttcaaatacttttcaattatgtggttacttacttacacagtttcagaatcacacttgacctttcttgagtgacgtgggcattacttgatatttcccttacagatcatgaaattacttactgtcacaccataatatttct

SEQ ID NO: 90125 - DNA, 611 bp, Cannabis sativa
tattaattgattatgtaaagttataatatatttttaatacactcgatcccaacaccaactacgggttcgggtctagggtctaggttcgggtttaggggtctgggtccgggtcgggttcccgagtctaggtctgagtccggggtctgggctggggttcgggttcgggtccggggtttggggtttgatccagggttcggggttcggtgttagatccggggttcggatcggagattggtgctgaccacaaattctttgtaaatattataatacaagctaatacatatcatttattatgtattaaataatacaacatacattgcattaaaaaatttagttgtaataattaatatactacattgtttaatctaaacataacgttatttattagttaatacaatacaatccttatacggcgtaaaaaaaaaacccttaaatatttaaattagattggagtttggccacaatagagtacgagaggagtgagggatatgacaataaattattgtctcatacagccagttgcccactgcggacactcatcatcacaaataatcatttatttattatttttttgcacttaggtccctcttgggtccctataatatatttct

SEQ ID NO: 90126 - DNA, 746 bp, Cannabis sativa
actactacaaaaaggagtattcgcaatagttttaaaaatactttttttaaggaacctttgctaaaaaaattaagcaagtgtttaaaattatcgagaaaaataaggtattttcgacggttttaaactgtcgggaagtataagcgacagtttttaaatgtgccttaaaaaatctcttgtatttgtaaaaggaaattgccgacggtttaaaatcgtaggcgattcccatgcttcaatttcacgcgtttcagatctaaaatttcatttcccacatctctctcctatgcgaccatgagtcgcaccgtccttctcctccactctctctctcgctatatccctctcatccactctctcgtggcaacataaaggtaagcacaacattctcttatttgttgtttaaatttctattagtcatgagttggtttgttgatcttgatctgtgtatgttcaaaataaattcgaaacttgcaaatcgaagaaagtttcaaagatcgtcaagtgaaaagcaattcgaaacttacaaaagaaaattttgaggaggatgaagacgagcacaacaacggtggaggaggatgaagcttgtaaaggttttggagcagctgcgacatatgcgagaagtaatttcgaggagaacgaagacgataatttttttgggcaatccactatagcaacggtttataaccgtcaactatattataggccacaggccacgatttaaaactgtcggctatagtatcgactattcgaca

SEQ ID NO: 90127 - DNA, 566 bp, Cannabis sativa
aaaaatcatgaaacatgtatgattctatacaatcatttatgttctctttactaagaaagagaatcctaatacgaataggagtatagcaacagcaattggaaccacaatggcaacgattgttcggactgaaatttttcctttcctgggaaaataaaacactaatacttgattagtaatagtacttataaattcatcttttcaaaacagagccacgatttacagcagggaataaaacagggacagggccatgatatattatcatctctgatttaacacattaatgacaatccaagatttcagcaacaacaaaaaataacaatcaaagatggcagtacgtaagtttcttttttcttccaaagaaaagcaagtatttctttttatcctacactcgctactcaaaaagcatttccaaagatagattagcatttagcaatgacacagtaacattattttcgaattatgccacaacctcttcacagttcacaccaaccatcattcaaatttccctgattttaaatctaaaaccagaagtaatctaaaagcaccaatgccccctctaaaaatca

SEQ ID NO: 90128 - DNA, 529 bp, Cannabis sativa
tatttgatgctcattggcattttgtcaactttattatcatggaggttcgtctattcatattttttaaatcaaacagttagtcttttgttaatcccagaaagggttggagccccagacatctcaatcgcacgcaaccacgttatctaatatttagtcttaggtggtgatgttttgcaaattggctggcagttatctggtaaatttaactggtgactgttcttgataaattttcagttttggtgtcatatgtatagaaaattgatacacttatgttctagttcagttttggtgccatatcaagagaaaattacaaagttccaaacttttcgagacagctccctgagtaatctcttactcactttgttacaaaatcattcccccctcttacaattgaccggccctctatttatactaagtcttccgtaactgttttaacaccttaggagttaggactataggatacctcacctagagccactaagaatttgacaacgcagcctctaaaattctaatcagttatactaatgag

SEQ ID NO: 90129 - DNA, 1292 bp, Cannabis sativa
tatgttataaattaattaagtggaccattagttatcatatatagttatatagtgtaattctgtattttaaaattctcagctttattatttaattaaatgcggaataaaaaaactggtactaaaacaattttttttgtatctacagaaaacaactctgactgtaactatagaaaataactctgtacctccagaagaaaccagaaaaataaacagtgcagaaaagtaaacacacacaaagtttttgtacgtggtttcaacaatctctttcagattgttactagtccatgagaccatgcccagagataagattcataagatagatcccaaaaatacaaagtagttgacttatgcataaatagactccatcttattacatgctgcaagcttgatgtattctaacttctaatcgaattttgctgaaacttcaagtgcttgaactccctttgatccccttgaagagtgcttacttcctccaagactaaacaattcaaagctttgtaaaaccttctctcgaagttagcactactgttgttcttcttctttgtagacttgaatacagactcaagacaatacaaattacaaataaatagagtaagagtcaaacaagctcttctctacaaaataaagactctctttttgaaagatatgagtgaaatggaaagatacaaaagagatgctaaacctagctgctataaggtgtatatataattaatatacaccttattgacagcttacacaaggtctgaataagaccccagcccactagaaaattccctaaaaaagatcttcaatcagcccaggaatttccatttatgtacatacagaatcgtaggcagtaagtgtaacttttcttttatagaaaatgaaagtttagctccagttttctcctcaaaaaatcatatcaaacaaaatggaaaacgcacacaagattagaatataatagctggttaaataacaaagaaatgagtaaccaaacttactattttaccttattttccataaataggaatgctgtacaactttccttccaaagttagatacacaaaataaggaaattaatattaacacctcaagagaaactaataataaataataaaatattttagttaattaaatatgtcaaaaatggaattaacatatagttatatagaagtattttagatgtagtcgctttatacctcggctttatataaatatatagataataaatgatttaaatattatttattctaaaaataattacctaatttttaattggaaattatcccgtattattttttaacttttttttt

SEQ ID NO: 90130 - DNA, 1860 bp, Cannabis sativa
cactcaatgtttccatgatgttagcaataccattacctgttgtattaggctgtacttgtaataaaaaaaaaggacacacacataacaaattggttgaactctttaagcattgtaaattatctgaaatttcttctgtaatgaccacataaaaaatcattttaaatttctcaattacaccatatcctactataggttatagctcaaactattccaaactaacatgtccatgttcaattctgataatcaccccccaatccccactttttctttggcctacctcttgtcttgtatatttatacttatcaaaatttgacaaaagtgagaaggaaaaattaagatttaaataattctaaatggaacccaatactctgatatgaaatccaaatggtgaatggtgcgagtacaaaatttaatggtacataaaaagccaaactaataatttcattgcccctgaaccattacttcttcttatacaataattgagtactgaacagtgaatacaaacatacaataattaataacatgaatgttctgcacatattgcattaactccactatcatgtccacaaaatatatgtccacaaaatatatgaagtaaaacccatcatcatcatcatcatcatataagaaatcaataataccagtcagagaaactcttgctggccaaagcttcccacacctaaacctagctcactgtctcaagtttctccaagacacatataatatggacacaagaaatataaaaccaaaacgaacctaaataacattttacaccaaagagtaagaagattagaattggaatagctctactgttacaaatgttattgacgggggcgattctgttatcaagacaaaccaagtagacgccttcctttaaatctttcaaagacaattttgttttcctcgtctacaatggtttttccaacaagagacaaagtttaatgctattgaggacgttccgctggcattctgtacagagaactaatttttcattgtttactattcttccccaacataatctgcagatcaaaagcccactggttctagaataagaatcatgattggtgaaccttcagcagggctcggtggaacatatcaatgaattgatcatcctagcacaaaacaacaggaaaaatcagcaattggttaatagatactgtctttcatatacttaaagcaactaaaaactcagtgacccgggcgtattagtgtacagcataagcgcgagaagattaaatatgacatatattcaatagattactgacctgaacaagcactagaagtgcatcgcgaactttgtctctggtaataaagagcccatcagtagcaacaggaagtgatggactaggagttagagatggtggtggattgggtggtggaaaaggttgcagcaatggagtgccatatgtacgttgcagatttgggggagcatgaagagcagcaaagttcggcatgggcgaagaaataggtggcatcatcaatgaagatgaaggagaaggttgtgggaaaaaagaggacggcttaacaagattagtattagttacaagaatgctgttgttgttgtttggatcagaggtgccatgaagtgggattggtgtagacgaagctgaaagaggaagagttggaacttgtggagtaggtggtgcaggagtggatacaacactaggagcatatgaaggttgagagacaacattggaagaagagtgatagtttggtcttgtatttgttgcattcaaagcgccacctccaagattcattgctgcctgcagcatattaaataattgctcagctcagggacacgagcaaattttgtatgtagcttgtcaaaaacatggatggagaattaatggaaaatttaca

SEQ ID NO: 90131 - DNA, 1384 bp, Cannabis sativa
cgtctcgaaaagacgaccaacttccactcccaaggatggccgagcgacgcaggctcctactgggtcttctcttcggtctccgatcagttgattttctcttgaacgaagccaatctgagatccattgatcttctcattgaaaacaagtgtacttgtggttataaatatcccaagtatacatcatggcaaaaggttccagttccagctgacgagaaaccccaggactatgcagctcgtgtgcactatctccagaatgcagtccctcgggaagctgaagaagaggcatcccaaggttatcaatgtggatggttgcctacagtacttaggaccgagtggaacactctagtgtcttttcgagatatcaaatacaacttttatacatggaatcccctcctcatagatcgtatagctcataggttcgatagttggtacccagaattccatgtccagattagttgtagtagctcatattatgggatttccaagcaatacgggactatgctagatagatcggtgcatatagactcaagttgggacttagaaccgctgaacccttatgatttatttaggataacaggatctagggagtttagtaagtattatagccatccttcattgtcttcttacgactatggtaaatcccttaagtgggaagtcattcccattatcttctttacctatttttttaaataagtgttgtcacatttctttgtctcgcagatatggatctagacgaccttttttatacttcgagcaagaaggggaagaagaggataaccatctcggaagcctcttcaaatgtcaacgtggagccccccaaaaggtccatgaagactactaccaataagaagcgtgcctcgcagaccataaatcttgaggtccttgggagccaagttcaaactcatcctcctgtcgttgcttggtagcctgaacgagatgctcgagcggagtgtcgcttttagcctctcggttagtttctttcacttcctctttatgccttctttttcataactctcaaaaatacttatgcattttacttatttatttttcaacaatccttcatctcctttgtcgcccaacgtcggggccttgagaggatgaagcaactggagggcgagcttcagaaaatgattaggcaacacaagactattactcgggaatggaacatggcccagtcggagaactctcgcctaaataaggaggttgaggaggcgaagaagtcccataaagctgaacttaaggcagctcaaaaggaggccaaggacaagtctaaaatatgccaaaaatccaggaagaactcagtgcagctactgcaaagctcaaaggggccaaggttgacaccaaataacgatgcaatgccattgccaagcctttccatctaccga

SEQ ID NO: 90132 - DNA, 554 bp, Cannabis sativa
aaaattatagggtaatgtaagtatattaattcaaatttatatagttagattttttttcttttttaaaatatctaattgctaaattattttctttctatgtattctatttttttttacgtgaactatgtttctattctattttaaatttaattaaaaataataataaacatgaagtttaacatacatccataataaaaaatatatgcaattacgtaaattatacatagaattaaaaataataaatatgaagcttaacatacatctataataaagaatatatgcggttacgtaaattatatatatagttagattttttttcttttttaaaatatataattcttaaattttctttttatgtattctatttttttttttacgtgaactatctttctattctattttatatttaattaaaaataataaaatatgaggcatacattaggtatctattattttttttaatattaattttctatgcatatatacttttttttaaaaaaaaataataaaaaaaaaaaaaactagatcttaaaaaaaatagtagtcgagacaaa

SEQ ID NO: 90133 - DNA, 549 bp, Cannabis sativa
cagtagacatgttgtagtggggcagtgtgaagtagatgtaacaagtgtactaaactcatgtgaatattttggtatgatatatttttaagaacaaatatatgtcttactacatctccactttaaatatgatctagattaattttcccctaatttagggttgtattatatttatctgttgattatgcttttgtgtaaatacttaatttttttctgtgtaatttgctaactatccagaatatgtaatttggataaatatgttattgtgcatataattatttcctcatcatggcaatacagaatatgtaatttggataaaggtgttgacttgagtgaattatgataccatcatgtttattatgtttcaacaattcaatcgagataatgttttctcttttctttttcgttgaatattttattattttttaatataagtttgtctttttatgattgtgcctacatttcttttaaggatattatttcagtgtctttaattttatcttattgaatttttttcgaataaaactattgtgttgattaataatttttcct

SEQ ID NO: 90134 - DNA, 813 bp, Cannabis sativa
  modified_base (762)..(764): a, c, t, g, unknown or other
gcaataaacttctatactgagcactatgctaacaaccaaaccacaacacacaacactataggagagttcatctaattcaatctgtattattttgaatctcgtctatgtcatggattctaaattgtattcaatacaattcatttaggagatatttgcagtgtctcaactcttgtatctgaataaaaagattagcaacttgtttggcctaaatgggatgaatcaatgcacaaaaatgtgagtatttggataagctaatgaaacttctatacagagcaccattgcaaacaatcaaaccacatcaaacaacaatattaagagttaaacaaatattcaattgaccaagtataaagaacagaaaagatcaaataatcataagaaaaaaagggacatttacggcaaaactccctcaacatttatcattattacacatatatgattctaataaaaaaaagtagcggtaaaaataacttatcttacaatttcgttacagctacccttattgattatttaattaaagaaaaattaatttaatttttctattcaaatttgtatatttcaaacaaaaaaattggctgaataataatttctcaatgcgtggtttaataacatgtcagaacgtgtttttaagttggtacttaccagtcaaaagtgtacaactgtaataaaattgtaagataaagtacttttgctgccactttatttttttattaggtctatgtgtaacaatgacaaaactacaaaaaaaatcttacttttagtcannncaaaacttgtgattaaaagtaaattatgatttttatgttgtgactaaaa

SEQ ID NO: 90135 - DNA, 720 bp, Cannabis sativa
  modified_base (49)..(55): a, c, t, g, unknown or other
atttggtacttatgccgctaaaactaaacattgggtttatgccgcttannnnnnnaaaactttgggtacttatgctactatttaccctaatatttatttcttttttttaaatagatttttttatttaaatgttttaaaataatatcatttatactagcttattatttatttttttaataagtttttttttttgatagatagatgagtattagataattttaaaaaaagatatgtaatttaattaataaatttaacaatttataatgctcattcacaaaccacaataactaaaatagttccatcatttatttatttacaaattgataggcattaataattattaacggtgcagagtcactctcccataatatcacattaggtcttcaaaaatcatacaatatttgtattcaaacttattcaaatttgaatagcaagatttatcaataagataaaaaaaaaattcaattatatgtgttataaatttaaatttgtgtatagtttaaaatataaggtattatgtaattttttttttaaaatacaggatatcaatttttattttgataaaacacaaaatattacatcaatgtattctctttttctattaagaggatattaaacttactatgggattttaaaattcttaagataaatatgacacatttaagtttgaccaaattatatgatattttttttttaggtctttttatagtatttgatatg

SEQ ID NO: 90136 - DNA, 703 bp, Cannabis sativa
aataaaaaattaatctttaaattttatttattatattttagtttaacggttgaggatatgatcatgaagcacttaacttgataatattcttattcaatatattatacaaaaagaacgtaaaaaaaaacaaacattgtttggcgctcgtgtcttaagaaacttgaacacaaaactagctagatgcactaaattttaacataaacaacaaaacaaaagggacggcaaatttaacgaattagtgaacgattagggagtttttatatggttttagtttgcatatatgaacaccttttgacccttttcaacgtttgaactcggatttgaatttgaattgggtaagttttaacttttcatgaagatacatacaaacttaaaataaactatattcattccttcaaaaagaaaaaagaataaactatattcaatatgtcgtttagtttttaatatatatgacataaaatgtacaaaagttgaacaaatcacgatgtatgtaagaggtacaaatcttatatataaaaatatattttatttagccttagtaaacattgtgagtacaatatgaaaatctagtgattataagaaattcatttagggtttaattgagaggccatgttacactttattgtattatttagtattatattaaattattttttatgtaatatttttacataaaactatatgtaatattaatttttatggg

SEQ ID NO: 90137 - DNA, 1288 bp, Cannabis sativa
ctgaaatgaacaaattaaaagataaagtgaacttcgcttccttgagagatcgcaagcccttcactcagtgtgccaacagctaaagacaaattcatccatgagatgccagcaaaatttagtttatcactttgacaagggattttagtttggatatattttttcatttacgttgtgattttaactcatcaacatcatcatcatcctaagaatttgtttcatttttgagtttcaagtattcaagttggagatgatgatgaagtttatccaaaggtttggttttgttttaaattttataagtgttgatgtttttcattatagtaataaatgtatagtgttctttgttttagcacttgaaaatattagacatggatttgaattaacattgattttgtctttattttttaatctctttttggtttattgtaatatattgatttactagaagatcaatggttccccatatcagagtagtagttcccaattcttggtagtggcttcaccaccttattgttgctactgtgattttgcaatagttattttttttatttctatttgatttactataatatattgattttgtttgtaaatacagttgtctatctcagctataattgagttgagcatttcatatttgagcttccctcattttatcatctctttgtttttcaggttggagtaatagaaaataaaaataagttttaaactattggaatgtgaaagacttcaactattgaatcccctcatgtctaacaaatactgtttgtcttgctgcagcaaaacgttaataaaacttaagcaaaaatctcaagttagcaagaactccattaaagtgcataaaactcttccaaattctatgctatcaaatctatgaacctagctgaacatattcctatgccaatcaagctaaaaaatactattgcataaagaaattaatacactaagacatagggtgcttcaacaactcaagccataaaatgaaaacaaaacaaaaaaaaaaagtaaaaaataaataaataactctaatataattatgtataattttaactttaatattttaattgtttttttaacaaaaatatttactaaacttgttctttttatttcgacattcaaagtatgaaacagagtagaaaataaggattttatgaaaacataagttgatgtattgtagaaacatgttgtctccaattgaatcttatcatgaatcaagtaactataaacaaagacaacgaaccgccaacatcaacatctgagtttggaacaaccacaataatggatgattaacttt

SEQ ID NO: 90138 - DNA, 2018 bp, Cannabis sativa
tctcaactccgccgatccaggtttccattttcattcttattattttaatttttaaccaaaaccattttagtataattattttcatttttctgtttttttcatcaattttattatagtaaaaaaatagtttagattggatttttttttccccagtgatttttgtgtaggatggaatgcaatctctctatattaattcaatgatttttcttgtgattttaatgatttgtgtttaacagtaattaaaaatctgccatggaaatttaatgagtataaatgaaattgatttggatttttttttattgtgcgtgtgtatgccataattaaggtcatgtttggtatgaaacatttattattgtatttattaaatcttgtgtgttaagcaaggaattcatttggtattttggatgaggatagggtataggattatgctattattgggtttataaagagacagtactatttccaatgttttgttgttatgtaaaatgttaattgtgttgatttgtttttaaggaaagctgttacacaagtttacttaacttttgtctaagtttatattctaataagaaaaagaaagaagaaaaatacttaatgattactttggatgaaccatcttttttttagtgttatggaaagaggtcgcctctctatgaagcaaccctttttgtgtttttggagaatattgtgtagcctataaagctgacaatgatgatgatgataatgatggcaggaatatgtaaagctgcaaatgaggaacatgctaggcacctacctattatgaatggcatcaaagaagatataaaatccattggagttttggacaatggcagccctgcctatctagaagctttctccaacctttctaaacgcctcaaagcactgctggtgataacaccaaactctcttatataaaagtgaatatggtactgttgatttatacatcacatcgttgtttttaactaacaatgctttattggggctaaaactaacaggaacactgcaaagagcactttgtggaggaggaaatacaagtacttccctacatagaggcaacggaactgagcaaaccgaagcagcggagagtgctagagcagtcgctggatgtgatgcaagggactcactcgcgcttgttcaactttttcctagaagggcttcttcctctcgacgcaatgcagtacttggacttggttgccatgtgtcacgacgaagaacgaatgtcctccatgcttcagatgatcgaggagactaataatctatgattgaaattgcagagatgagttgctgtgttctgtttttgcttatgttaatacacagtgagtgagtctctcctaaaatcactgacttaacaagacatgttatgggttcttttcactgctttcttagccaatgtgagctccattttctagtttgattctgcaaattgtggtcaatgcacaagcagaagggtccataaagaggagcatgtgtgaactgaagaggagatgttttttactgttacttttttttctttccttaaaacaatattagttcagtgtgcattgtaaatatattagtacttggatcaacttgtaacaaaaatttgtgctgttttgatattaagagaaataagagtgaaaaatgagacttttgttgtgatcgtttgtttctaaccaaaatagttataaatgaataagaattttttgtaggagtcacgtgagagtgacatatctcctgagatggcattgtttaaagcacattaaccaatatgatttgatctctcattgtggataatatatacacataaaataaaagaaataatatcagagaccaattattatggagttcagatatttgattggaagatgcataaaagttcacatggcttgcagagtttgcagggtaagttcagccacttgttaatatgaatcaacatttttttagtattaaaaatgattaagaaaagagtggaaatgagatgaacatggtgtgtggggggtggtgtcctcttttgtatgttttaaatttatgagaaaggggta

SEQ ID NO: 90139 - DNA, 525 bp, Cannabis sativa
gttttagattcaacttttacaaatgctatgtttatggtaaaaaaaacattttattgtaaagatagattaatttttttttttttttaaaaaaataattgattaagataaatttgttgttatcaaagaacttaaaaattgtggacaagtatctatccaaatacattctcttaaaataataatagagattatcagtgtgtgggcaacaccattcgccgaagacgaaatggcgctacaagaaccaccaccaacagcagctaataattaataaatatctaataaaatagactaacaactaaaatttatgtgacttttattaatttaaccaatagtcacggtagaatcactattaatcacagagatactgaaattatattgaagtgcaatagtcatgtctaaacgaaaggcaagtagctctgtcacattcacaaaaaaatcatctagcacaccaaatgaccacgctaaccaaaccacacatgccgtatcccgtatcacaccccaatccgacaaagtccctccccagaacca

SEQ ID NO: 90140 - DNA, 1107 bp, Cannabis sativa
gtaaacatgtcctaacaaattaaacaaaataaatttattacaaatcaataagtagtgtaggtgccgttttttttttttttattatttacatttttttttctttccttcattcttatggtaatggtttttagaagttatatcataaatatttaaaagattattattttgttatatagttgttaatacagttttgtaacaactttttagaacacatatattatcaaaataaaaaattaatcccaacttaaaaaaaaataataatgaaaaaagaaaagaattaacaacattacatgtcttctttaaaaattaaaatagtaaagctaataatattacatgttaaattattaccaataaaataaatttatagattataagtgtaatgattaagctaataaatttgacaaaaaactatagtcattatacataatttttcatgtggcatcctatatgattttttttctaatctttcctctcttattttttataatttaattatttttttgtgttatttagtatcttcattattagatttgtgtgttttattacgattttttaagtaacaattattctaatacattaattacaatatacatcctaaattataccgtcattctaatacattaaattaatgacaataacatagtaaaaatttaggtgaagatcattatctagacgtataaaagaaaattgtattaattaaatgttattcaactaataattgcactattttatttaatgaagctcaaaagactataaatatttataaaattatttaataccattacattctacattttattcttaaaagttgaaaaaatattaataattcatttatatagaattacttcatgtaacagtccaaatttcattaatgtttcattttaaacccactcccaaattgtatatataataacaaatcctcctcttatcacttcagagaccatcgctcacttttatttttttctctccttagtatatttttctctttctctttagtatgaatcttatatatgtttatgattactttttgtttcctttcttaagtatctatttcactttatatttatatatatatatggtatgagttttatatatatttatatatat

SEQ ID NO: 90141 - DNA, 743 bp, Cannabis sativa
tctccatgtaacggtcagggtacatcacggaatatataggggttttttctattttggattaatattactttaaataaatatttatactaaaaataaacatttatactatttaatatttacaaaaatactaatttcaaagtttattatttacaaaaatacttttaagatacaaaattggacaaaaatagaaccagccagcagtgtgaaagacacgcgggagtagagaatcatattgccacatgaaaagaaataccaactataattacgaattttttaagtttttttcttgtaagattttgatccaacatattatatcaataaaaataaagtaaaagttgtcagatattttgaccaaaatgactaaattaataaaaaatatttatatatataaaatacaatttagtattttatttaggtagtctcaggtgcaaaacgtatgagaggatttttgctaaataaattttatatcataaaatataaaaaataatattgtattctagtatttgttattttaaaaaaaaattgttaattagatagctatattttattatgattattgtcgatgtgtttatgtaaaatggtggaattggaaataactaaatcaaaattttaaaaattaaaacaaaaatcattacacaatcacaaatatatatatatatatatatatatactaggttgatgttacgtgcattgcacgtataattagtttttttttttagttaagtgatgttaaatgcaataaa

SEQ ID NO: 90142 - DNA, 657 bp, Cannabis sativa
gtatctgcgccacattaattgttagaatattttgagaattaattcaggaaatcaaatcgagtaatgaatatagaaatctgaccagatatagaatattatataattaattttgtctagactcaatgaatataaaatatttattaatcggaaaattaattatttattttatttccttaaatagaaatatatttcttaaaataaaaatattcttataaaaaagaactaacacgtcccatagacactcctttgcttttaggcaatgctttgatggatatgtatgtcaagtgtgagtttttatgtgtagcgaaagcaaacctttgatgagctttcagaaagggatgtcgtttcctggacacgcatcataagtggattagtacaatgtgaacgtcccaaggggtcactagaattgttctgcgagatgcggcaatcaggaaaagaacctgataacattttacttacgagtgtgctctctgcttgcgtcagtcttggggcccttgattatggaagatgggtccacgagtagattgatcgtagtggcataaaacgggatattcaaatagggactgctatgattgacatgtatgcaaaatgtggctgtataaagatggcattgcagactttcaatgaaatgcctagtaggaatatcgttacatggaa

SEQ ID NO: 90143 - DNA, 503 bp, Cannabis sativa
atgggcattttggtaattgtccaaggtttgggataggtggctgcctagctttttgacacctaggccttttaattttcagcaaaggattagttgggaaaatcctttttcattttgaggaaaaatcaagaattaggaaaaattgggaaaagctctctcttccttcttctccctttcgaaccagccgtaaccaagaaattggttgctgattcctgttgttttcagtaaagagtttcaagggaaatcaacccaaggtaagctttagcatctctatcttctagttcttgaattttaagttttgcttgagtaatgattttgcaatataggggctgctagggttagaaatgtttagggttcgaattttgagcttaatttaagttaattttagcctcaagtagctggtttggttgaatggaattggatttatgcaagtttgggtttgaaaacctaaactttgatctttaatggcatgttttgattcagtgggtttttctgtggtttattgg

SEQ ID NO: 90144 - DNA, 555 bp, Cannabis sativa
tcaccaacactcacggcaacccacgaaatccccaacccgcagcagacgtcgatcggtctcaacccacgaccgtcaacgctcaacccacgaccgtcgacgctcaacccacgaccgtcgacgctcaaccctcgaccgtcaacgctcaacccgcaaccacggtggtgacccgaagcgaaaatgtccaaggtatgttgtgtttttttgtttttttagagagggttaaaagacttattttgtttgggattgtttgtgaaacattatttgttagatttaagaatttttttgtgaaaataggattcggatccgtgaatgaagaaaagattggcgtttcggatcttgggaagaagatggtccgatggtccgactttgtgggtccgatggtgtccgactgtatgggtccgatggggccgatggggggtccgaatatggggtccgacgggtccgatgggggcggggggtccgatgggtctgatgcatgtgcgggttgggaaaaaatagggttgagttatgtgagggttatttttgggtttttgataaaagtgtcatatatttttt

SEQ ID NO: 90145 - DNA, 527 bp, Cannabis sativa
  modified_base (217)..(217): a, c, t, g, unknown or other
gtagcccaatttctgtcaccagcaggcaaactttggatagcttgtaactgaccctccaacttagagatgcaagaatccaacttgctaaattgcacccggttccagttactcagggccaggcgggtcgcaccaactttcttaaacactctagtaggggcccaatcatgggaaacaaacccccacgcttgatctaccaccaaggaactacgagggtccnttgtccaccaagcttcaaagcggaaaggccttctggcgttagagaccgaagtgtcggtattgataaagaggggccgatggtcagaattacaggtggtgagagaccgaacgaccgtcttaggaaagatttgcagccagccattatttacaagaggtttgtctagggctgacttaatgtgattagcaccatctctatgattgtcctaggtcatgatgtcccctttaataggcaaattaaccagcgcatgacagttaattaactccgaaatgaaggggataaattgatccctccccttggacccaacccgctc

SEQ ID NO: 90146 - DNA, 921 bp, Cannabis sativa
  modified_base (235)..(235): a, c, t, g, unknown or other
cgcgactggagatggtgaaaaaaagatcgaactcatctgccgaatctcgtcgcaacggggcatatttcccgtcgcgacgagaccccccttcagcaacataaataccccaaatcgcatgaaaaccccccatttaacctaaaaatcaaaagccactcgattctttccctcttctcagccaccaaagccattttctaccataaatcatcaaatttcttcaatttctcttcaaatcttncatctatatcaccaaaaacccaatttttttctcataaatcttctttttccttcagaaatcacaccacaaattaccctttttcacctaaatccaaaaatgctactattcatcatcttcaaccttgagttttccatggatatgcaacaatggaggtggatggatggcattctcgcttagtaagtctacttcttttcaaaactttgattaattaagcgagttttccgatagtttgaatagttttctatcgcatttgggaatttgtggatttcttttgaggaattgttgaatattgtgaaatattattgttattggattattgtggtatgatattggtgaataattgaacttttgggaagtgaagaaattaaggggaggtactgccgaatttttttgagaatttttgtgtggtaattttgaagcttgtcatgggttccaagcgtactagaactgggcaatcgggtgcttcattatcaaaaccgccaacaccggcgtcaaagtctacttttgaaaaagatagatttgttagtttgaaagcacaagaaagatactttgaattgcaaaagagagctttcattatggatcgaggtatcgaatatgatgaaaatcccaactcgaataacccattattcgagaccatgaggcaacaaattcagattcgccgctgggagaagtttgtgaatgttcca

SEQ ID NO: 90147 - DNA, 1225 bp, Cannabis sativa
  modified_base (65)..(65): a, c, t, g, unknown or other
tagatctaaccctctgttgtttttccttgcatgtacgagcttcaatctctggttcttcaagcttnaaagttctggatcttgaagaacaccctcaaccacccctgttctggttgttgcttgaggtatatatatagatctagggtttttattttgcttctgaatgtattagttagttagttacagaaagtagttagagtgagaccgaaggtcaacttagggattttgcatgtatttctttttctgtcctttgtatcaagttgtatttagcctcaatatcagtgtaagtggaggtttaatccaacaaaaacatttattgttctcaattttttttttttttttttgtaatttattttctgttttcaaaaagtatggccaaacgtacctagatgttctagaaaaaaggttttctcttttcaaaattaaaaaacaatttttttagttaggatgtcatggaaccatgtacaaaatgattcaaaaaaataaatggaaagaaataaagggagccaaagtactaatggtcataaaaattctaatcgggtagagtactaatgccatttgacaaagtattacaccatactataagtagcttcttagccatttgacaatgtattacaccacactataagtagcttcttagccatttgacaaagtgttacaccacactataagtagattaaaaaacaacataataatgtacaccattttgatagaaaagagtagttaaattattagctggaaagaaaagatgaatatggagttctacacttatgatatgttgagtgatttgctttatctcatgctcacaatttttatatcatttcaaatcttcaacctattgtcttcatacaccaaaactcaacaacaacttccaccagggccaagacccttgcccataattggtaaccttttggaacttggtcacaatccccataaatctcttgcaaggctttcccaaattcatggcccaatcataagtttgaagctcggccaaatcaccacagttgtggtttcttcagcagaaatggccaaacaaatcctccaaactcatgacaacctcttctctaacagaactgtcccagactcattccgagcctacaatcaccacaagcacagtgtgtcattaagtccagtctctcctagctggagaaaccttagaaaaatatgccacaaccacttgttttcggttaaagctctcgactccaaccagaatctaaggcaacagaag

SEQ ID NO: 90148 - DNA, 562 bp, Cannabis sativa
cacatgtaattggattctagacattctgatcactgtcaagaagcaacgtgggttattggtcacattattaagaacaagtccacatcagatggatcaaaatacaaggcaaaagacatacagagggatatgtttgatgaatatggcatcaagatgagttatgagaaagcttggaggtgtagagaaaaggcatttatgtacaagaggggtactccagcagaatcttatacgaagttatatggtttcttctacatgctagaacagaagaacctgggtactattactgacattgtcagtgaggataaccggttcaagtactgtttctggtcactcgatgcttgtaggaggggatttaagttttgtcgtcctgtgattagtattgatggaacattcttgaagataaagtatggaggaacactgttagtttctgttgtgtacgatgcaaacaaccaattgtttccggtagcttttgcagctgttacagtgagaatcatgactcttggaagtatttcttgcaaaagttaaaggaatccattggtgaggttgaaaatcttatgttcatatc

SEQ ID NO: 90149 - DNA, 761 bp, Cannabis sativa
gagtgaactcgcagaaattgattgacagcatgttggaggctttggtcagatgaggagataggaggaaggaattcctcaaaaggggtagcgttggagatttcgaaaggattcttcttgaacagggacggggtcggagcacgaagagtatcacgatattctaagagagggggggaagggaagttatcacaacgaaggaggtagcgggtgcagcggttataagtatgatcaaggaggccacaaaagtagcagaagttgggaaggctttcatatttgaagctaatccatcttggctcagggatggatctgaaacgaattgtcatacctctacgcaagggtttggtgatgtccaacagaacacgaatcctgagaaaggggccagaattctcaaggagagagaggggataggtttcaatgaggtcacccagttcatcagctatgaactgggccagctgaaggctccttctaccaaaaggaattcggtgaacttggatccagaaaggggtatatcttatactttcaggggtgggagtgggagaaacatcaggatgagtgaagacaataaggaatttgtcaaaatgccatggctgttcctccaggactcgtcgacggtccccatcgcattggaaggtggctaagaagaggccagaatggtactcggagatttggacagggaagcggagggtccaggcttcagacattgccttttcaatccaagcgggcttagcggtgcgaggcgataaagttttgaaaataaggcagaa

SEQ ID NO: 90150 - DNA, 792 bp, Cannabis sativa
ttgttgcaataagagaatctgtttcgatataatgaatcggtagttgcaattcaattagtcatagaagactataaaagatagccatagccttgagaatttctagtttgaagcttcagtgaaaaggctttgataaggcagtcactatctcagtatttgagtgacaaaggatagggccaaaactagaattttttgtcatcgtattcactgcagcattattgttgagtttcaactttccagatggtgaattcaaccatttcggggatactgaaatagttgtggaagatgttggccaaatgtctccatcatcccgctcctttttagcattttcaaacttttgtaatataatttaaggcagagagcagtaaaacaccagctggtttgagactttgttcatggatctcattattccgttcattccaaatgctctaaatgatgcaatcaatctgttctaattcctattgagagaaaacatatgatatgtgaaacattgatgatttgtagaagtaaaaatgatcaagaaagacaataatgttgaagcttgataatcctcaaacttgctttgctcttttacattcaaagagcgtatggaaagctgtttcagaacgatgggaacaaagggagcaacaacttgaagggttgatgtaccaaccatggagaactgtagcaacagacagcaaatcatgaagaacaggccatataaagatcttaagttttgaagggagcttcaatgaccaaaatttattccaccaacgtgattctaaggtagaactagactcattacccatgtttgtg

SEQ ID NO: 90151 - DNA, 594 bp, Cannabis sativa
attatccttttgattcaatcatatacagttatagtagtgcaatatcagaattaccatacaagatacaacatggtgaatctagttgagcttattttctgttttctacatcttctgatattacgtagacttttatttcatctttaatatatatgaactgagatggttgacttgcttaagtttcttcattgtttattatctcttatgattagttcttctaatggaattactaaatgtgtgttcaaataactactttgtttggcttgttgggaatctggaagtggccttgctaccaaagcaaaagagctccaaaggatcgtggatttattcttgttccatggctgccttcattttcaataggtatgaatctttttatcattgggtatttagaatatgttgcgtattgaaggtttttcggttgctgggggtgttatgtttatttgttattctcaatgactatagttgttgctttgagatatgttttgtattgtataagttgtctgcaaactaattatgttttgtattatgttttgggtgctatatatttagttcactgtagttatggtttgagaaaataatttactaagtttcatgtta

SEQ ID NO: 90152 - DNA, 891 bp, Cannabis sativa
aaaaaataggacgaatataagaaagcaagaagcaaaataaacttagtgatctaagttgtctaaaatgtaaatagtaaaaggcctggggccgggccacaaaaagtctcccctaaaattaaagaaagcataattatcttataggtagggggaaggatgaaataaggaaaaataaaaaacaacacttaatcaactcggggaggaagacgaggacccatgcgttcatccaatataacctcaagctttttatttttctcccatactcgggccaggacttccttaggcttggggtagaaagaaaggcagggttcaaaattattggctttctagcacatgaacacggcgtcgtcaaaatgcttcgtgtagtgttggcaagtgatgggggccaaaagagcatccctcttagccttagctgcctccttacggacctgttccttgaactcatggagctcttttacttcaatagttaaattagctgttgtttctaaatcagcctggtgaagttcctctaagaccttaacttggtggtgagttcttggacctcttccttagaatcacaaatatccctccgggccgcagctataatctcgtccttggccgtcaacgcctcctgatggttttgctccacgagggcctccttcctttaggcttcgtcctggatcgccttcttcttctcatctaactcctggagactcttcatcacctcctccgtaccactgaacttagacatggtaaactcatggtcaatcaaagtcttggaaagacgaccggcctccacagcaatctggcagccaataggaacaagttagagcctaaaataaaaagatatgtaagaaatttaaaaaaggttaggacttactgcagaaggggtacactcatgtcctgaatttggta

SEQ ID NO: 90153 - DNA, 712 bp, Cannabis sativa
ataattttgtaatttttctttacaaatttttatatttgccccccttaatttttatttttatatttcccctcctatttctttccttaccaagctacacctaactatgcaactactaccttagcaaataaggtaattggattaagctctatttaaataataatatttgaattaatattaagatagtaatagtatataaaattaattaatgatagtttacagttataaattgaagatgacaaaaagcagtgaataaatgtcaaaaatcttgatatcaaatatgtttattgaaaatatctatagtataccaccctaaaaggttgtttggtagattttttatctatttcgacattctaaagaggtctttagttcaatttttttttattactgcgtacattgtagctatttaaaatcacttttaaaatcacttgtaaaatcacttgtaaatcacttgtaaattttcttgtaaattttcagaaaattctgaatagtttatagtatcgaaaataaagtttaaatagttaccacacatataagaaaaacagtcaagcatgcaacaaaatatggaaatattattttcaaaattgtaaattaatcaaatttttttgaaaatttacaagtgatcctatatagctgcaacacatgtaataataataataataataaaatactaaaaactcttatgaatggtgaagcagataacatgtctcttgaa

SEQ ID NO: 90154 - DNA, 1029 bp, Cannabis sativa
  modified_base (48)..(48): a, c, t, g, unknown or other
gtgcccgtctctttgcaaacggtagaaatcattgatgattttctaccnttagctttgggaagcaccgatgtaatattgggggtccaatggttggagactttgggggacactcatcataattggaaggaaggtatcatgaagtttaagagaggtggccaaaccgtggagctatgtagcaacccagccctccacaaaactcgggtctcgctaaagactatgatcaagacgattaaggaggaacatgaagggttatgggtggagcttggtcatacaactattgtgggagatgtggaggatattccagcagctgtatcggagttgttacaacgatttacgagtgtttttgacatgccaaacaagctgccacctacccggcaccgagaccatgctatttgccttcgccccggagtcgctctgattagtattcggccataccgttacccccatgtgcagaaagatgagattgagaaattggttggtgagatgttacaagggggaatttgtcagcctagtacaagcccgttttcgagtcatgtgttgcttgtgaagaagaaggatgggagttggcgtttttgtgtggattaccgggctcttaacaaagaaactattgctgataagtttccaataccagtcattgatgaacttcttgatgagttgtatggagccaaagtcttttcaaagctggatttgaaatcggggtaccaccagatacgggtgcgaccggaggatgtgcccaagaccgctttttggactcacgagggacattatgagttcttggttatgccgtttggactcaccaacgccccagcaacttttcaggccaacatgaatgagatatttaagccatatctacgtcggtttgtgcttgttttcttcgacgatatactggtttatagcccgaccatggaggcacatatctcacatttacaggtagtcatggaaaccttggctacataccaattttatgctaacaagaagaaatgttgttttgcccaacagcagttagaatacttgggtcacattatctct

SEQ ID NO: 90155 - DNA, 688 bp, Cannabis sativa
catatcagactccaattcccaggtggcttcttccaaaccagaaggtaatgagtaggagatcttaaaacaatctacatattgcctgaaccctagtatgaacttagatacttaaaccctaaaaactaccaaaaccatatgagatgacaacaatacaaacaaactaagtaacaaatccacaatataacaaacatgagaaagatgaaaagaaacttactgtttgaagttagggcttgcggcaatggccagtgactccgtctgcaaatcttcgaaggaagcaaggatcgcttcgagaggatgaagtcagaagaaactcgcagggaaaaggtcaagaacagagatggcatgcaagtcctcggataaacttaatggtgatccttgacgaagaagcttaagagttttttcagactttctaaaatggagaaaataatgcaaaggtggtttcttttctcttactttatacccatgatagtggcttcgttagatcagagaaagatttgatcctacggacatgattcaaaccagaagtagaaaagagggtcatttaattttgatgtacctcgaaaccgcacaacctccgaaatcagaggacatgcatcttttcaaaaaagaggaacatgacaaaactacactttgtaatcattaaaaagctctttttttttttaaaaaaaaagaactttttaagaggcaa

SEQ ID NO: 90156 - DNA, 1236 bp, Cannabis sativa
gtaaaataatttccaacagtcctcccatgatactaactggctatttgacctgaaatctagccccaagcaaaacaaatcgtgatacttctatttttcccataatgaatactagtggctgagtgacactacggacaaggaggtgtccatgatcggtaggtttattgaagattactaatttgttaaggacatgggtaccgaccatgtctcctttcagcacattccttcgtactaccatcctccttttacgctaggtcttaggtcaagagcccaaaaattcttcaactaccaaagtcagctcggaacatttctcttttagccactacagacaattttatcaagtacgtgctttacccatctgatgagacttaggagtctgagcaagtggccgaggggcttacggccgagcaggaggctctgaagaagaagaagaagaaagcttcttaaggtgaccaagtaccaattaaacagcctgttaggattagggatgaccctgaagaagttgctcgtcctactgaccaagtggtagggaaagggaaggttgtggtagtcgaggaagaggacgaggattcctttgatgaggatgccccatcattacttgttaaggagggtgctcccacagatgtacagggtagtttttttttccaattagccttgtttattcttgtttgtctatatttctaacaagtgtttttctttttatgcagccatgtcaaagagaatgatgcgtgccttgaggaagagatcgatcaatgcttctggttataagtcttcggtcaagcattcaaaggtgggcgatgctcttcccaaaggcattactctgagctccaagaatccttatgtaacgccctaatgaataggcacactacagtgatctttagattattgtgcactcctttgctaatcaaagagttttctcaaaatagcaaaataaagcctatagtgaaggcgtgtgtgctctctcatcattctcccatggtgaagaaacgacgagtgattcaaaaacctgtcattcgtcaacccagcgtgattgaaacagtgattgagaatagagaattagtctgtgataaggtggaagtagagatggatttggtagattcatcgactattcaagctacggatggagtggaatgtttagatctagaatcagagggaatttagaatgcagaggaagaggaagagtgggtggaggaggctcaatcttgggctgacaaagttgaaattgatgattaccaagca

SEQ ID NO: 90157 - DNA, 511 bp, Cannabis sativa
ctcaatagtttggggggaattttttatggccaaaaaagttcagggggcacaatttagtacatgtcagcgtttgctgggttatcggtgaggcttgattatggtactgttggtagaggctgacaactttgggcaaagttcacttaatgtcgttcttgttgcctagtgtagctgcaaccccggggttacatcagaagggagcaacttgggccattaaaaataagttagggagtccttgtgacatgcttatcttgttaagagaccgggttcttgctctagagaccctcaaatgcctcgcgcttaaccagcggagacagagtgcccatgagatcctggggtataaacatgcacctcctagagccttccgaaactcgggggatgcatgcacactgcatgtccatctgtgaaatatcgttgggtgtgtcgtacgtctttaaccctccttctcggactggaaggactgcttgaaatctgctttactcccaactactctttcaccctttgatcttttcaa

SEQ ID NO: 90158 - DNA, 728 bp, Cannabis sativa
aaaaaaaattagtacaattaaaaatataaattttatataaaataaaaatatcaaaatggggtgcctttaaaactttttagggtgtaaataaaatttcaccgtactactataaaaatgtcttcattgtgtgatagttctatagataattttaccctttgtaaaaataaatattaacaactttgccattttgttgaccggtcaaaagtcaatttttaactcttcctttttcttctcaaatctaaacattaacaattttcccattttgttgactaagtcaagttttaactcttttcttttttaattttttctaagtctctttctatctaaatctcctccttctctttctcacaacactactaacattaaattgatgataataatgaagattattagtgtgaaagatgagtggaatagaggcatatatagctctagctagctgacatgtatcttagaaagaatgcagccattaagggccatgacagtgaaggcgcagtgtctaacggtgccgctcactttgacatagttcttccaagggtattggtacataacgaccatgaggtggttcccacactgcaaagcctaactgagattatttaattcattgcacataattaattttcttaattattaaagttcatcacaataattaattaattaatattctaagaaataaagagaaatttcatttttaatgcttaaaaaaataccttttaacaaaatttagactc

SEQ ID NO: 90159 - DNA, 728 bp, Cannabis sativa
gaacgtcttaaagagagcgacttattcgcaactcaacccaaaattttaatttagtaacatcgttcctcttttattttttgctagcaatttactcaacaattttaagacgttcattctgctatgactactaccgatgaattttctggttctactgctgacataggcctttttgtttttaggatttacactttaaatgttggacacagaagatgttgtcttttttaccatgaaaaaatttgcgtttgtgcttactattttgaaaccaattgtgtttgagactccacctcctgccgagaagaaggatgaagtcgagaagtacgaatcacaagttaaggaaagggacttctaggtagagaacgattttcttgtaagaattttattttgaatggtctgtttgataatttgtatgattattataatcctgacaaatctacgaaggagatatgggaatcattacagaaaaaatatgatacagaggaggcaggaacaaagaaatacgctgtgagccgctacctgaagtttcaaatgactgatgataaatcagtcgaagcccagtctcacgagttttagaaaatagctcacaaaattctatcagaaggtatgactgttggtgaacaatttcaagttgttgttatgattgataaattactccctttgtggaaagattttaaaaatactctcaggcacaaaacaaaagatttttcgtttggaaagtctggtcactcgtc

SEQ ID NO: 90160 - DNA, 4202 bp, Cannabis sativa
ttataattttgcttcttttaatttgcaatagagttcaatgtttgttacatgtcatcatatgaagaaatgatcttcatgcagttatttgaaaaacaatttttcactagtttctgaaatatgaagactaaatcagctattcagcagcatgttggtggacattgataatatacatatcctagagtgaagagccaaatatgtatattctgtcaagagtggatgactaggaaatgatataggtggtgttgatatagaaattgaataacttaaaggcataatttcatttaaccttttgggaatcatgaatctaaggatggtagaagttctgttctagatttttttatagtttttccacaaatggtcagatcctacttgagttcatgaaggaacagatggttgactgaattctgttgaaaggggagatctgatggctgtctgtgattttaggtcataattagtcttcatgctttgtactctttctccctaaggcttcattaaatatcatcccagttgttgtgtcatttaactttggacctgtgactacaagtttcttttgaatgctaaatgctaaattcatcacgtgtaaattgctgcattgttagttcataccattttttcggttaatgagaaaggaattactagcactaatttacatttattattttattttaaagtttttattgattggcagagaacatttgattttcatctcttgtgtttgcacttcatatattgtattgtatcttaaactgtcatttgtttaggtgctacttacaaaagcgtattctcaatgtctcaagaggccctgctgttcgtgctttgcgtgcacaaactgacaaacgagaatatgctatggaaatgaaaaacattgtggacaggcaagttttgcttacctttatgcttcgtattttaggtgccatattcttgctcatgatggcttttatgctatggtgtacacatgtttacaacagtgaataatcaacttcatgataataatattcagttgatgatatgtctccagtcagtaagtatgtgattgccaatgctacctgattgatttgactctggttttcaagttattgattgatcatacaattaatgagaaattggtgtattatcttatatatatatatatgcacatgtcacgataatctgcatgcactccatggtagtaatgccctagaatttgtcttaaagactaactaggcaataacttcatcttctacagaattttgtcctttaaaatgcgatcttcatatcattgttgtagcaccactgctacttaagacaacaaccatttttagagtcggcaatgtaatagaaaatcactgcgagagtttaaagagataacagttgaaagcaagcaatttttgtacattacttctgacacgcatttctctgttggtgtatgcttctttctgtttcttgaccagttttgtctgcatgcattttcagcaccccaaacctttccatcagagaagccatggtaacagatatattattgggaaagaatgacaatgtagaaggtgtacgtacattttttggcatgaacttctatgctcctgctgttgtcctcacgacaggaacttttatgagtggtaagatttgggttggcaaaacttctatgcctgcaggaagagctggggagtcagcttcacatggacttactgaaagcttacagcaatttggatttgaaactgatcggttgaagactggaactccagcacgtgttgacattcgtactgtaaatttttcagcattagaagctcagcatggcgatgaagaggtccttccatttaatcccatgtgtaggttcaatagatttggtttaacaaatattaactggaatcttaaagaaaattgtttgtacatttttccaattccacgtagtatgttcataggtcaatgtcattcatttcacgttttttacaaatgctgttgttttgctaccgaatcacccatttatgtaggcactggcatgttaaattaatggtttccttgaataagtgccgaggtagaataagaactttagatcaatggcttaggattaaaggcagaataatatcaggttggatggcaataattcttatagtagtattttctggttctaaagcttgagaaaattacttggggcgaatgacctaaaaatcattttctacgggattaaggtttaaatgattctagactgcaagactttaaatgattcaattagtgagggttttgtgtctggaagctgaatttgatgagattcaatttcagaattctgtattaacaagctgaagagtcataggattgtgctgattttaggaaaatgtgatggggtaaagggcaggctatagcttacactaagcaagagaaggggaatcagatagctttttctcttaggaatgcttagggaagtggaacatgaggaaggaatagtgttttgctcaggcttaactgcaaatatccttctgctaactataagaagataagtttaccctattgtttacctattaggaaattatcaaaaactgctcccgtctattatacaagaaacaaaaaaatatgtagttgaataggtcacttaacaaagatctacaaaatgaaataatagaaacctgataatgtaacatgatatccagaggtccaggtttcattaagagaatttaagaaagcaaatttaggaatgtctccccggtatttaaattcaagaaaaactataattaatgaaacctactgctaacttttatttcttttttaaccccatatcagcattgctttgctttagctgattctcaattttagagtacagcttgctttctagtatgtctattgcattcatttctcagcaatcctttttttttttttatcttttctttcctttcccttttttgaaattgccagcctctgtttattttgagcctataaaacttaaagagaaattgttagttttatctttattcatgactattgaacttcgcaattctgtttattatggtggagtttaaatgtaagtttgtgttttacaggttggttggtttagttttgatcctgagttccatattgaaagggaacagatgtgctgctatctcacacgtacgacaaagattacacaccagttaattaatgataacttacatgaaactcccacttatggaggatgggttgaatctaaggggcctagatattgcccctcaattgaagataaggtatacttagtgtaatctatgtttctaaaacttacgttattaacaacttcggtacaccaggaggtgataatacaataatatagatgtatacaattcttcacaaatttattttactattctttttttcttttgttttgctttagattgttcgatttaaggataaggagtcacatcaaatatttcttgaaccagagggtcgaaatgtgccggagctctatgtccaggtgcagtgtaaattattagttttttcttaatgctcacttttcttatttcctagactatacaagtattaaaatccaaagctttgtatatccgggattttatattttcctctactacagggtttttctaccggtttaccggaaagactacaattaccactcttgagaactttgcctggactcgaaaactgttcaatgcttagacctgcatatgcagtagagtatgattacttgcctgctcaccaatgcactaggtctctcatgacaaagaaatttgatgggcttttcttctctggtcaaataaatggtaccacaggctacgaagaagccgcagcacaagtaagtttatttagtactttatttaatttgttgaaattgaatattatcctagtttaaatttatagtgagatcttgcaacaaaaagtgtatccaatgatttgataacctatttcttttctttagggtattctatctggtattaatgctgccagacattcagatggtaaaccactcatcgtacttgaaagggaaagcagttacataggaacattgatcgatgatctggtcactaaagatcttcgagaaccttaccgaatgctaacaaggtaacaacctgcatatctcctacctgtatatatgattgttatggtgatggtgggcagttgtcccgaatatgctctcctgaatgtttttgtcatcatccttttcaaagtcttgaactgtagagaggaagaaggtatgacttcacagcctaaatgacaaatttatggtgtgatcatattcataatatggt

SEQ ID NO: 90161 - DNA, 580 bp, Cannabis sativa
agctcattgaatccaaagtgagggttatttgggattatgtcggtggtgtattaaagacttatggcatcaagcaagggcgaggatggcacattatatctgttgctccaagggaatttagctgctttccaccaaaaagggtgattcgagaagagtgtggtgaagccagccctagtgcctcatcaggaataggcatttggagcctcgaacatatcaaggatggagtagtactccccttgagggaatattataaggagttctgtaattatctcggaattgctccttttcaattgattctgagttcttgcaaaattctggcaggcctaagagtcctataccatattttaggctgggagtgtcctactcccctcaagatagtatacttctattctgtcaaagctgttcccacaagaagcaaggttcaagaggtttctattacctcagtactcacacaagtgatcgtaggatcattgtaaggttaccaaacaagactgagttaaaagatgatttattctggactactggtctctctcccattaacacaactgcgttccatattatacgtaagtgatttctttctcaa

SEQ ID NO: 90162 - DNA, 1416 bp, Cannabis sativa
tccttgaccccgcgttttccacctccatggcatagttgacatcctttttcaaatccaattcatctttaacacaaactatttccaaggtatctctttggctggaagcattattaggttcaagacttgcagcttttcccttattttgattttccaagaaggtagacatcgagtaaggtctcgattctagcgattcatttttgtcactttccgcaatttgggtagttgttccagagagaaacgcagctaaatcatcacgttcgtcttcatcaaggttaacccatctaagaggttgctttccttgttcaatatacgattctcttaaagctgattccacacgggaaatttgactttcaatggcagcaacaaattgactatgtctagcagttgaatgatcttcaccacgatgtccatagctcaatctgacagccctctcaaactcttctaactagacaccattcacaattcaaaataaacataatcactacataaaaccaagactctccctcaaaaattaaccaaaacaaaaagattaacacagattcaaattaatgctttccaaacactaaaacataatgaaataaaatttgagatgtaaaatagttacaacgaaacaaactcacctgccatttagcagtacctaaagcagtttggagctctctacatagctcatcaagattctccattgctggtctttccctcctttctctgatccatgttctgtatgctgattccattctgaaattttttttttaaaaaaaaagaaattaaaacacattccataagaatgataattggtaagagcaaaatgaaaaatgagattcagatttgtaattaactaaagatcttcaaaacgctctataatttttttctcactaactaataatgcttcattttctcagcaattaataaaagtaaacagatgatctaaatcataaaacaggtttcaaatgttgaagaagaaaatcaatagcagcaaaaataacaaacaaactccctcactacacagacacacttttgaatctaacaactcccttccacacacaaccaaataatttatttttttttttcattacacacaaccaaataaattttacagaaaaaccaactcaagaatccacacaagccaggtccttcttcaaaccccataaaccaaaacccatcatagaaaacttataagcttactccatgcaatcaattaaacaaaataataaattctgatttttaacaaacccaaattcttcaacaaaatattcataaactatacaataaaaaataaaaattagtttttgggaatgtctacgccgacaatcttagcaggaattaaaaataaaaattagttctttcgaatcttacgcttagtccctcccattcgaccaggcatcttcttccccttgtaaactctcccaggagtggttc

SEQ ID NO: 90163 - DNA, 556 bp, Cannabis sativa
atacaccatgaaattcaaattctcactctcaaatatttgttccaaaggtactttgagtatcagtccacactattcaaggtgatactcaagcctttatagaagactgtggtgaatacaatcgaaggaggagaagatccaagttcaatacttggtaatactctacgacagaaaggaacaagagttagagaactgaatgaaaagagtcaataatttttgttgcaaccactgtaaagaattcttaatcgctttatgtgtttattttgttattttaggaatccatgttaggatgttagattagtcttaacttaacatacatgaatagtaaataagatcctagtaaaagaagtttccaacagtctagggctgacgtttgggtctggagtcagggtcaagacacaggcccagtgctggggtttgagtcctggttcggggtttgaagctggggtccgggctagggttggggtctgggtcttggtcccaaggttgaggtccgaggtttaaggctggggatgggtccggggtctaggatcgggtctagggtctagggtgttgggct

SEQ ID NO: 90164 - DNA, 1188 bp, Cannabis sativa
gcgttttagcccattttttccatggcaccaacttgtgagttgaaggaaagctagagagagagagagaaggaacttgttttttttattagagaaaatttatttcttacctaataagtcattaatacaatttgatgtgggatcatggtagacaacttttagaattgccaactattagagtacttttttcaagaaaatgtgacaaatcttatgtggatgagagagaaaataaaaaaattaatattttaagatgatgtgtgtattttacaactataaatgttatgctccattggagatgctcctacaagatatttccttaagttacatgagaaccgatacttaattacacttatagcgatatgataccgatgagggggctagacaccattagtgtctttcaatatttctcattatattttattcttttttaaataaaaatattgaaatataaattaaactactaatatttaaataattttacacttaaaaataataattaaaaaaatttgtccaatcaagactacaccaaacactagatagtatacattatcctaatcccaatctaatgtaatccaattcaatccaataatcctatccaaatctatgcccaaacggatccttaggattggatgaggtattggtagggaatgatttcatagtctcgttatgtgtatttcaaagaatttacaacttacaaaaaattataaataatctaagaaaattacaaggatcataatgaaaatagtttgataaattgttgattataaattttaagtccttatttgaacgtgtcatcctatgtaaagacacattagtaaattaataaacaaacattataattagatatattatccgaaatggatcaaataaaccaataggctacaataacatcatttgcatactaattactaattatataaatatatattaattacatatcctaaggtttagtataataattaaatgagtagcacctaagtaacatacatgatataataatgtgtaaaatactctataattgcttttagataagctagctataactagtatacaaaaattaattaattttaataaggtattaaattgattatctattcttaataaattaaaatattattgttattagatatcagtagtattagtatcttttataagtgacactttattattaattaacgatattctttaaaa

SEQ ID NO: 90165 - DNA, 1065 bp, Cannabis sativa
tttctttttataatttaaaacgtttaatttgtatttaaaaaaatataattcttaaaaaaaaaagaataatttcaaaaaaaaaaaatacacaaaaataacaaaaaaaaaaatgacaaaaatacagttgtacagaattttaaatatttttacaatttttataattttatttatagaaaatacggttttttaatatatttttatgttgtacttttattaatttgttgttaattaattgttatttatatgctatattttgttgttgtttggatgttattttcttgtgtatttttgtgttgcttttattattacaccgtaaaaatatgaaaaaaaaaattaaacgtaaaaatataaaaatttacaaaaaaaatagtatttatgtaattattcaaaaaaaaataataataataataatattcttatgtgggtggggtaggggacatctttttcttctaatccgatccaatccaaatagttattggatttagaaaatcatcctctggttcaatccaattaaatcttaaaattcaattcaattactaattggattgaatcggttttttttaattggatatccaattacatactcaattttttaatataatttaaaaatatgaaaaaaaaaaaaatacctaataattatatataaaattttatttaaatttaatactgtataaatatatcattcttaaaagtttaatgcaactaaaagtttaaaacaacttaaaaacaattttagaaatttcttttatggatattaaagttttattttttaattttttgggacatttctttgttatggtagtcacaatgttaatattgtgactcatagattaaatatttttactttgcctcttggcgttctattctctataacagttacacttacacaaaaacaacaatactaccaacaaaaaaatagatttgttgttggctaataaaatgaaagatagatttgttttttttaaagtttattaaggggtcttcaaacaatggagtgttagataaattaataattaacccaagatctatttgtatataacatagaacacaataataagatataat

SEQ ID NO: 90166 - DNA, 706 bp, Cannabis sativa
tgcttctttccacaacaagattgaatcaataatggctcaattttggtggggaggttcggatagcatagtctcaaattgcaaagttttagttaattatatttgtaacaaagacactcataatattcatctcaacaaatttgtaactactattaacagcttgctgtcatattttcctaatgctttcattagctacattccaagaaaggcaaatgaaatggcctattctctagctaagaaagctttaggccttgaccagaaagctctgtggataagctctactctagctttgtgattgtatcctttctatttgattttaatggatacatattcaaaaaaaaaaaaaaaatatcgtgaaactttgtctagtaaccgatgctttcgaatcatgtcagattggattttaatatggagtttttgttttactttcttaagcaagcaatggaaaaaaaaaataataaataaataaatcaccccactggcatacatacattatttgtcatatatcttgtctcaaatctaattattagatcgttattttaaatttattattttatatttttattaaaaagtatttttttatacacatttaataacaaaataaaataaattatcattattattatatacaataacaaactaaaataaataaaaggctaattagcaattttttctcccgaactttgacatataccaaatcatgctccct

SEQ ID NO: 90167 - DNA, 965 bp, Cannabis sativa
  modified_base (299)..(324): a, c, t, g, unknown or other
aatcaaattatttttcagtgtattgaaattagctacttaataattaacaaaaaagtatgttttatggtggaagataaaatctaaaattaatagttacaactaaataaaataatatacaaaatcatgaaacatataagaaaaataaacaaaaataaaaaataaatacctaaaatgataacaagagactaaatattggtgaccaaacaattttaagctaagacaattgtagacatagaacacctgaaaaaaaaaaggaaagaaaatgaggtttagaaatacacttaataataataataatnnnnnnnnnnnnnnnnnnnnnnnnnntaataataataataatgaaaaattaaagctccactagattgtagaaccaaagatcaagtccaagtgccaagtacttgagaactcagataaaaacttgataatcaccaacttccctgatctgataatagagcatggtaagaaaatcatataaatctttgttcacaacaaattcctaaattcaaccaaaaatatactttgttagtctggcagttctactacttctcaaaccacattgcaatactagatgtggcaatagatttggggttctaaatagatttttctacctctaggactattgatcatgtggttattataagtgttgttgatttatcttaaaagtgtgagagttatggggtctaactatttgcttcataatttttaaaaactcatcaataaaaacaaacattacaaaagaatttgagtaagttgttatatagattaacagagcaataaaaactttttttttttttaccaaaatagaaggatgataaaatatactttataaatttggctatataatatataaatataccatcttgaagattatttcttagtgtcatatagtgcaaaaaaaaacaaattaatctaatgaaattttattaagggcaccttttcatgcatatgctctgtcctgttaacag

SEQ ID NO: 90168 - DNA, 630 bp, Cannabis sativa
cacgtatacatggtcttttccaatacctatttatatataaagctaaaaaaacgttttctttctcccgaactttaacatgtattaaattatgtatattaaatttttaagaccattaaaaatttccttaaattattgagattattggatttgagaatttttgtctaattttagtaagaaaaatctaatatggatgaaaattcaagagacgtgatttgatacatgtcaaattcgagggacaataaagtttggagagcatggtatgatctagtacatatataattgaattagtaaaattgaatgaaatttcacaaaaatttttgaatctaacgatctcaatagtacaagtataatttttaaaggttaaaaaaattcagaaaatataatttggtatatgttaaagtttaaaaaataaaaattctaattagtctttatataaataagttgtaggtataggagagagatttttttcatttagagctagagaaatcttttcatgtatatgtgataaatattattttgaattttgtgttttgtaaaaattattgattaaacattctctgtttattaataaatgagtatttttcaaaatagtacaaaatagtaccttgaactaattttttaacaaaataa

SEQ ID NO: 90169 - DNA, 663 bp, Cannabis sativa
gtagaggctataatcccctcccacggaagaaccacttacgatccaacaacaaaccaagccttgctacaagaagcactagacttagtagatgagctttgggaggaatctcaaatacgcatggcagcgtaccaaaataaagtagcaaaatattttaaatccaaagtcgaaattaggaaatttgccattggtgacttggtcctaagaagggtatttctggccacccaggaacaaggagttagggtacccagacaaaattaggaaggcccatatgaagttgaagatgaaataggcttcgagacctataaactaaagtaaatggacggatccatagtgcctcgagcttggagtgctgaccatctccaaaaatactaccaatagttaggagctcagtattcaaattcatctttactctgtaagttaacctgtggcggacaaagtacatgcattatcccacataaatttaagttaagtgacccaaaaaatattttttaagtcacttacacacacgcagacaggaaaaacaaaaaagcaaatagataaagaacttgaaatataagttgtctaagacataataataaaaagcccaggttgggccataaagatgtctcccctaacagaataaagataataaaaactaaaaattaaaatattgtcttgaggggg

SEQ ID NO: 90170 - DNA, 726 bp, Cannabis sativa
ctaataatctttcaagtggccaattaaagctagggtcaaggtggatctaagtgtatgtcacaatcccgctgcaattcaaaagtttgggtcccaaaattgactcacaagataaagttagatttctcggcgaattttctataattttttctatgatttgattataattttattagacctcctttcccataaaaaaaaaaaaaaaaagctcccttagctgattatgcacactttccatcatctctataagttcaaagcttctttctctagaaattatgaaatgaagctagacttagtcatttttcttgagttctcttgtaagacaattaattttttgtgataataaaacttctaagaagacgtagctctaaaactatcgtaatatggagagtgaactactgtaaattttggtgtgctctttattttatattatttttttatttaccgctatcgcttaacaaactatacaaagttaaataaaaaactcgaattgtaaattaaaaaaaaatatcgacttaccaaatttttctgactcttttcattaatatagtctttttgtaaaaatctctatgtttaatatgcttataaatttgaaaagaaaaaaaaatattataagcgatgtaatatcttctagttaattattaatttatagagcgcttctatagtctaccccattaaaatagttgtattgatgcaacctctaagtgtttcaatatctataagaatttt

SEQ ID NO: 90171 - DNA, 762 bp, Cannabis sativa
tataaaattttgattttgtttggtgtagcagtagcaggtgggggtcgtggggtcgtaggatcttaagtcaaagtatacaatgctaagggcacgctaagtggcatttattagaacaatttattattgattctctcgcagaatttaatatgaaaaagttactaaacactagtaacagctatatcgatacggtgataatatattctaagttaattaagatttttgctcttgaactttaacatgtattaaattatgttcctgaacttttaagattgttaaaaatactcttgaactattgagattgttgaatttaagtatttgtttttcaattttagtaaaaaagtttaacatggatgaaagttcaagagacataatttagtacatatcaaagttcaaggagcatgattttgtagatattaaagtctaaagagtatgatttagtacataaacaattacttaaatagtaaaattgaataaaattagacaaatgtcctgaaatccaacaatctcaatagttcatggggcatttttaacaactttaaaaatttaagaacatgatttaatacatatcaaaattcaagaaggcaaaaattctaattaacttatattttatgattttccaagaaattaatattacattttagcacttctcttttagctgtggtggtagtgtagtagtagagactagagatgtttaagtttaactcggatactttctttcaagtattgcaagtagtaagtgtaacatgtctaaaattagtacaa

SEQ ID NO: 90172 - DNA, 658 bp, Cannabis sativa
aaaagaagtccaccaatatttttccattaacccttccaactcctcacatgtttttaaaggtaactaaaaacaagacatcacgttggtggggatagattgaattgaataaaaacttttagaagtatctctttactcccataagagaaaaagtttattattcgaggaatttaattgagaccaaactttttctttaacattattaaatatattttctttgtttattttgtccgcttaacattggtaaccctgaatacttattatcaatagctttagtgatttgcatgtgaaaagttgcagtatataaggattgcatatcatctatttggtgagagtgcatactagatttattaaaatttattagctgcaaaaaagaaaaaaagaatatgtaaattaacaaaatagacttaaattaatgtaaggacattttatcatttagcaacaccacaatataagtctaagtatcatattattataagtatataacctcttgtaacatagtagattcattaaattatttagatgcaaagatccaaagttaatactaaaagaattctaaagtcaaaaccaaagataatacattgatcagataaatgataaatagtatgtagtagaacatggaaccaaagtaaactacattatcataagaacatttcaagtt

SEQ ID NO: 90173 - DNA, 514 bp, Cannabis sativa
tgaagcggggacgttacatccttcatctccatcctttcttgattttttttttgttcttatgttaattcctctccttactatgctgaaaatataattccaaaacccaaattaactctaaaatgcacaattagaaaagcccaactcgtatagacccgcacttgcatgtaaaaggctcgtgctcacggattgcttgttatccaagtattttactactctgacctctttcagtcaagtgcgcataacttttaaatacaaactctaaatgagcttattcaagatgtattggaaaactaagaaagacatttaaaacttttatgttttgaatttcctaaatctgaacagaacatggttgaatttaaatttaaagtttcagctttatttttcttgcaaagttttcctaaatcctttcacactttcacataacgcgaacgtggtggaccaagaactatatttcaaatctacagctgctttgtccacccctccaaacacgttcttctcattctcgaactcatcc

SEQ ID NO: 90174 - DNA, 963 bp, Cannabis sativa
  modified_base (71)..(72): a, c, t, g, unknown or other
aagctcgaaggaaattatcgttttacttcttaatacttatagaagtaatagattccatatctataattagnnctcccactcaattgaactaccattcccatgatgtaagtattgggccgatccagctttaatgaacaactctgagaacataaataacacaattgagatcgaacctaaccatatcaggattaagatatattagcctaatatcaactagctgatattgacttagatagatataacggtaagtttatgatatcttatccaatgtcaatatcggtttggttcgatgtaaactccatacagtcgatactagcatacattgctaatgctctggaaaggacataacacttatccatggtgtaagtaaactttatcgttgattatcatgttagtgtgaacctcgtgtactgacatatcatgggacttaatcttttaaaacatatcataattattatgttccactatgttgacaacactataatgatgaataactatatattatagatttaatataatttatacattaaacatataatggtgaaaaaatcatgtgcaccatgaaacataaaatgatttctgttcttttattcattagtttatctgattatatggaaataagatttatttagggtataaaatcccaacaaactcctacttgcacaaatataaaactaaaagtgcatttcaattaatctcaacaccttgatgtccatatcaagtgtagtacgtagtgttatctttttaataggaattgacaggttgtattcaatacaaaccttctccaatattacatctttttagtcacaaaatcctttatattgtgaaattcctccctatatttctactcctcttgggatgctggattctttacaatttgaaaactatatttgtgttagttaagaagaacactagtagttaatccatgactagaattacaccaaaaactgtatagaactttcc

SEQ ID NO: 90175 - DNA, 1586 bp, Cannabis sativa
ggtaaatactatattttttttttttggaattgaagaaattttttattaaaaggcaaaaagtcaaaatcaaggacactacatgatagtcaagattagaggtaaggcggtaaatcaggtcactaaactcgagaaaagtaaaggaataaagccaagcgtacaagagaatgagttaaagcattttgagcccttttacaatgagtaagagaaataaaagagaaagaaagtcggatatgtaaaatatcatgaacaataatatcaaactctctctgatatattaatagcttggtcaagacgaagatagtttgagaaaacagtattggagttgtaccccaaatggcgacacaacaacaacccacttaagagagttgctgcctctgccacatgaggatgaaatgaggctgccactagatcacttacaaaacacaaaatcaccccgtcacgatctatcaccgccgccctaagacccatacaactattatcctcattgatacctgcatctacaaatatattaaaatcactaacctcaaagtcttggtcgagccacttgagagcccaaccacagtctctattggcttcacatgagcattcagatccaaattagattaagcatcttgataacgccaaagaaaaagcccattgataatcaactcatcagacagcatcttcttatcatgaacaaaagtattgcgacgataccaaattctccaacataacacaagaaattcttccacatcctgctttgaaaggacatccacacaacccacaaacaattcataaaaacaagaagcctttttcaaagtgtccaaccctttaacaacccaacctttccgaatatttttaggtgaagaacaaaaccaaagagcatggatcgtggtttcattattttggatacataaagggcacacatcaaaagtcttcataccattccttgcgagattagcataacaaggcacaaaattaaggctcgctttccaaataaaattcttaacattgagtgggatggtgagagaccataaatacttccaccagcgcgaggaactacaagaggctgacacttgcccccatctcaatttcgaagcagaactccaatatccactcttaaccgtatacataccactttcagaaaagttttaaatcaaccaatcatgtctaccaaatgttgaaaccggtatagacaaaatagccttagattcaataccatcaaagagctccttaactaagggaacgttccaatgtccagacttcagcttaaggtcactcactagccgtaattcacgccccccatggaacaaatattctcaattttgtgttttgccaaagtcattattaaataacaattcacaatttatatttttcaaaattgtacataataatattttgagctcaattttattattttgtttttatacgaacaacataaaatcaatttttaatataaaaagatgtaaaaaataatataacccacttagttataaaactccctaagttaagttattattatgttttattttaacgaaattgagctaaaagtataattgtgtcattttgaaaaatacaggatcaaaattattatttaacaattaaaa

SEQ ID NO: 90176 - DNA, 1087 bp, Cannabis sativa
gaaagacaaatagcgatcatcaccaagagagtcacactccctaattggtcttttcttagaagacccgggcatagtgcttttcactatggctgtctgtgccagcgttggaggtcccaagggtcgcgggattttccgtactccgctagaaggggtaacaacaaagttgaacccaaaatcgtctaacacccggggggatgttagaatgtttagatccttcttatagtcaggcagttgggctaatgcaagagccctctcgtacatggcaagggtgggggaaggcttctcgaattgttccaccattaggaatttggtttgtttagtcctaatgtccttccccaaaaaatagagatttctgaaatcatgttccttcgacgacgtctccacaccatgaaggaatttaacattcctgtgtgcatgctgaaatcctaatatcctgaccgatacccgatattgttcggtctcagatcgaagagatagtgtacctcatggattgtcggccacttccatctcatcaacttatataaaataaatatgccggtcaggactagcatggccaagggagagaactgccccagactaatgccaaaataatcatccacatctttgaaaaaattatgaagtgggagtgcccccataagtaatttggcgacgggaccatgcacacagttcctccccaggatcatgcgccaactgattcgtggaggggagtactaactgacaatccttgccattcacagccatctcctccacatattggagttggtctcggtgagactgctagaaggggccacaaaggaggtctacttggttttgcagtgggaagtgcgaacctccttaatcactctcgaggcaaactcactgattttgagagtggctggttgggaacccttggttggttctttctctttggcggctttgtggagggtattcttagtttcatcttccacccacttctcaaactctctgactatctcctccatggctccatcatcggaatcagtctcaagatcgtcagataccctccgtttagtgatgacctccgccatatgaggactgtcagaagagctaacccgactcttctttttag

SEQ ID NO: 90177 - DNA, 675 bp, Cannabis sativa
gttatttatatcctgagatatgcatacaattgaaaacatctatgaaaatgcttttgccctccctgcacaaaacgtaagttatgccctccctgaaggtcacaataatgtgttactaccctgaacaatataacagggtagcactcaaacattctaagccagattaaaccggttctgtcactaccgcttcttacgacaaactgattcagatttcaaactggggaaaacaggaggtagaacaaatttatgcctgagtgcacgtacacacaagtaaataaccctcaaaattatcggtcaccagtacaacgcaatatagtactttgctgctggaagagacaacagggggtagttgaactccaatggttgtgttgggtcacttgtcagctctgtttagaaaactttcaaagggggaagattccaaaaaccagaaacatatacgtttttagctgccaaggtatgattgttttctccaaatggcacccaaatacgatcaaattaaactaaaagaaattaaagaaaaggaattaaactaagttgttcgtaccgaatgggaggtccgttgtacccaaaattatttcttgtggttaaatgaagaccataattctagaaatccgtgaaattatacaaagaatcactcaatatgataaactctaaaaaggatataaattaatatttttt

SEQ ID NO: 90178 - DNA, 842 bp, Cannabis sativa
  modified_base (66)..(72): a, c, t, g, unknown or other
  modified_base (461)..(469): a, c, t, g, unknown or other
accatagacctataattctaagctccaataaactagattatttattgagtctcatcaaccaaatannnnnnngtttattaattccatgattactccgttataaatatagaattacactctgggtaattatagaattatatttactaagtttaactgcagtgtccattgatataatcaattccattgattagtcttccatgtgtttgttcataattagttttggtcaaaatactattttacatttctaattacttctttaccttttgttccattaattcactagtggaagtataattcaagatctcatctgaatttgtgcacaacattccaattctaaaattaacacttaaagggaaccaacattcaatctattaggtaagtcaggattcaataattgtacatcattttctcagtcatccatgttattagattccttaaatagaagttgtaagaatcatctnnnnnnnnnaactttaacgagtgaatcaaagagagtaataacatgaacaagagttcatgataactcaggatttaggtcaatctactattgatcatcgttatgatatgaattaggactttatgataaatgacatgttaatacagacaactttatccagatcagtcattgtcatatattatctctattatatatagtaccttcactttgatgtctcactacatccataatttgaaccaagattacttgcaccgaagaaaaggtatcaacgaaacgtactagcaactattgattaatgatttcataactttaatatgttattgactattttattcatagccaagttgtcttagttctgtacagctacaaggcataacttcatata

SEQ ID NO: 90179 - DNA, 725 bp, Cannabis sativa
tgctgtatatggcttccctgaatccgttaacaaaaaatatacatgagaacttctaaataggcttgctgatgtttccccattggatccatggttacttataggtgatttaaatgaaatattctctcactctcataagaatggtggccctttgcggcatgataaccaaatgaatgcctttcgaacaaccttggacagatgtttttttgcaagattttccatttgatggggatgaattcacatgggctaagaaccggaaaaatccaacagttctaaaggaacggttggattggtgtctcattaataaaaaatggactaatgctttttctcttccaaagcttactcaccttgattattttggttcggatcatcgcgctctcttggtcaatcttttttcctcagccccaactgattctatccaaccaagacggtctcgtttttggtttgaaaaaatgtggctttcggatgctgagtgtgctgagataatttcttctacctggcagatgcaacccgaaagtgatttgtcctccaatcttcaaatcaacctgcaaaatgttgcagcaaaccttcagcagtggcacacccgaaagtttggaaaattaaaacatgatatttcacaagctcaaaatcgggttcacagtattaattcctctccagctacagatttgttacattctcacaatctcaccactgccgaatcaatcttggatgaacttcttgctaaagag

SEQ ID NO: 90180 - DNA, 957 bp, Cannabis sativa
ctaaaaatactgaagcatgaatctaaattgaacagttccataacaaaataagtaaaacaaataacacacaataacttaaattttaagataaagaaactggttatatttatcaactagttaaaaaatatgagactattaaatattaaatgttgtatattttcttctactgtttgggtatagtgataaggttattcctagttggatttggtgtgtatcctagggttggatatcctcttcctatatatagtcttttctttacacatttatcattaattcaaatacaatgaaagtttccttttactaatagagacaaagaaactggttacgtaaaacaaccaagataaaaacttacacacaaaaaaagttaaataaaaaaaatcaaaaactgattctttgaattaactaaattaaaaattcgttcctaaaataactaaattaaaaaccatctcattaaattaattaaatcacaaactggtttctgatataaataattcaagaattattttctgaaatgacttaaataaaaactaagctgcgacataaattaaaataaaatcagttccacaataaaaatggccaaaaataaataacacacaataacttagaaattagatataattaaaaaaaaaaacaagagaaaatgagtttgaaaaatattgatacataaattataacagaaataattccgcaacaaaatgagtaacaaaaataacaaacaataatttagaaatcgatactaattaaaaaaaaaaaaaaaaagaatggttctaacaacagtaaggcatgaattaaatagaattgattccacaataaaatgagtaaaaacatacaataaacaattaataaataatataaatcataccatatcacaaaaactagtacgctttttaggagattcctttcgtgaaaagaatatggaatgtaaggtacaacaaaataaacaaaacaaaacaaaca

SEQ ID NO: 90181 - DNA, 599 bp, Cannabis sativa
atatgtaaacaatgttcacacgattattataatttgtatggacattgaacatatactatatatattatatgttcaatgtccatacaaattattataataaattatattaaatctaatattaattatatattacatatatcagtctatatgcatgttacagtgtattgtgtatatgtgtatattatacctctagaattgtttagtgcttcaaatattggtggaatatttgacaccctcattattataacatgtttcgactcacttttactttaaaattacgtacattgaaaatgtatcatatatatatagtgagttgttattagattggagatttatgtattgggaattttaaaaattaaaaccaagcaaatgtagaagtttagaagaggataaaagatgaaatagatgatgaattatgacacaaatataatccaatatacaagaaaaaggagaatcctccaaaataaattaattataattaattttcttctcgtggtaatttatcaaaaaatatatatttatatatatcaaaagttaatttttgtgatatccggtattattacaactttttaattaacgttttcttaatttagctccat

SEQ ID NO: 90182 - DNA, 1463 bp, Cannabis sativa
gccattgttagtctttagtaccttaagtttgttcccagtcttgtttcctagcagcctcttccatgtatcaaaggttcatagagcctcatttttgcttttcaacaaataaaaccagaatttcttgttgtaatcatcaactatactcaaaaattagtgtgctccaactttgattggaatcctagatggcccctaaaaggttgaatggacataagctaacctttctgttgtggtgtgttcttccttgttgaactttaatctgcaagccttctctaaaacacattcatcacttgattcaagtctttctgttagcttctctttgaatagtccttgtgtgttcatttcctcaagtcccttctgacttacatgcccaaatttgaggtgccataggcttgcttcactgtgtttagttgagttaataataggtgttgcactacatgtatattgtcattccatccaggatatacaatcgattactcaacttttctctcatcaaaatttaagtgccttatgaaattttcattataccatcctcaactttggacaacatatcctaatttatcaaatgtaccaatagagagaaaatttcttttgagatctggaacatacctgcctgctgcaaggtcttcatgactttattatgattctttaacaagattgttcccacatcactgatctcacacactttatagtttgtaagaagaattgtgcccccatcactctctaaaagagtcctaaatagttctttgtttggtgccatatgaaatgaaaaccctgaatctagaatccaacctccacctgaatctaatctagacatcacaagtgcatcagattatactacaagtgcctcagatgagtcatagccatcagcaactgcatgccttttggacttgtgatgattttctctcctaagtttagccttccaaacccacaatcatctctaaagtggccctccttttgcaataataacattgcttttctacagctccattagagcttggccctcttatggagtttctagaattggatctggaatggttacctttgtagccatttgagttctgatttttcttgtattccctcttggggaattttcccttaacaatgagtaatccttccccattggtctcatctttctcatcccccctcttctgaatttctttagaattcaatggagccttaacctttgtcatggtcagagtatctttgccatacaagattgtatcaacaaagtgcacatacatctttggaagtgaactcaacaggattatagcctagtcttcatcatcaattttcaccccaagattattcagataaagaatgattctgttataatcatgtagatactttctcaattcatttgactcatccatttgaaatgtgtgcaacttcttcttaagggatacaacttatttacaagagatttctccatgtagattgaagctaacttgtgccagagacccaag

SEQ ID NO: 90183 - DNA, 809 bp, Cannabis sativa
gtggtttccacagaatccatgatgtactttagacagaagtcgtgtagcttctaccttccttcccattttttgagcttcatttctataattcggaagttctccattattgaggtaggctgctattggtgtcatctagtttagacctctgtcaatcatttcaatttcttcgacacaagtgatgctgggttttttaaggaattgaattgggactaaattagtcttatcagctatgttgctacttgcaagtcagactaaggcatcgacagttgtgttttcttctcttggaatttgcttaagagtgtaacccttgaattgtgcgaggagatcctgtattttgcttaaatcggctatcattttctccacttgggcctcgtactctcctgacacatgattcactaccaattgtgagtcactacacatctcaatgtgttcaggttgtagctcccaagcaagttttaagccaacaataagggctttgtactctacttcattattggaagccttgaatccaaatttgagtactccatgcagatgtcgcccctcatgtgtgacaagggcaatctctgcaccagaaagttgatttgtagctgactcatccacgtgtaatttctaggtaggtatgtcttcattgttgttcggctaggattcttgtactagctccgagttgtgctttgaactgcttttttctttgcaactacaaagtctgctatgacctgtcctttgactgctatttggggttaaaagaatattttgtactgactcaactctactgcccatttgactaaccatctggaagcatcaagtttttg

SEQ ID NO: 90184 - DNA, 564 bp, Cannabis sativa
  modified_base (27)..(27): a, c, t, g, unknown or other
actaatcagattgtaaagagttttatntagggcataaaacccaacaggtcgatccaccttaggtataagacaaaggagggtttgatttagcacaccacaatccatatcattatttaaaacggacaagcaaacctgaactaaattgtcgccaactatatcccaatggtcaagatagaacaaacccaaaaaaccatccaccccaggggctttaagggggtttatttgagaaagagcattttaaatatcagtcaccgtaaatggttccagcagacaatcattatctggaagtttagacaacacgaaacaaagcaatgaagttgctggaaagaagtatcagaataatgttgggatgaaaagaactattgaaaatgagtggtaaagatctctgccactttatccgaagactcatgccaaatatggtgatcatcaaacacccctttaatgttgtttttcttttgtcttttcgaagcttgctggtggaaataacgggtattacgatctccatggcaacaccacaaagcacggcttcgttggtgtcagaacatctcttctttgtctaaatgg

SEQ ID NO: 90185 - DNA, 684 bp, Cannabis sativa
tgatacgtagtcattcacttgacacttaatggttaggtacttccggaagtttcagaaatataatttagatattattaccgtcaaaaattaaacttatgtatttgtctacaatcgagaattaaacttaaatatttacatcgcaaattactttactttttatttttttattaaatgaaattcttctaaagactaattataatttttgctccctgaatttcgacatgttctaaattatgcttcctaaacttttcaaattattaaaaattctacctgaattattgaaattgttcgatttaaagacttttgtctgatttcattcaattttagtgatgtgatgattgtccgtatactaaattgtgtccctaaactttaacatctactaaatcataccttttgaattttaacatgtgccaaactgtgccttcaaaattttcattaatcccaataattcgagaagaattttgcacaacctaaaaaattcacagatataatttggtaaatatcaaaatttgggagaaaatatccaaattagcctcttccaagttccaaatgtctcctccatctttggcctgttgtgaagctggtaaagctaacccattaatggaaggtggtccctccaaattcccaatttcatttcattgccttttccaattactgaaactccacttctctctctctctctct

SEQ ID NO: 90186 - DNA, 556 bp, Cannabis sativa
atatatatatatcgaaaactttgtggaatcatttgtttgtttctgccaggtatttgttcgaatatatatgatacaataaatacatttataatacttaagcgttgaatcttgtcatctatgatctatacttagttataaatatattatataaatgaatcatctctcattaggtattacgtattaacccaaactcttaaaaaataaatatatcatcatttttttttttcatttatataatttaaaattttttatttaattacggaaagatattctttggtgaaatttgatattattttttttaattgttttataatttatttatagttgttatgtggttgattttatggttattattttttactattttatatttcatttataacttttgtaaagttaagttgtggttatttttttacattttttaattttattgcgaaaaatatatttttataattttcaaactttgaaatcctatattataaaatagtaaataaatatatataaaaaaaatgtacggactatacatttcaaaacagtttttttttttttttttttt

SEQ ID NO: 90187 - DNA, 689 bp, Cannabis sativa
  modified_base (543)..(543): a, c, t, g, unknown or other
tgtcggctgttcataatgtattctatatttcaatgttgaggaaatatatttaagacccgactcatgtcatgagttatgaagcccttgaactacagtcacacgtctcctatgaagagcagctagttctgatccttgataggaaggaaaaagttctttggaacaagacaattttttttgtcaaagtgctctcgagaaacagcaaggtggaggaagccacctgggagttggagtctaacatgaggagtcaatatccagatctattcaggttagattttgaggacgaaatccttttaacgggggaataattgtaatgactgctttagtaatttggattagtaaaggcaattagaactaattattagtatttttacaattatttatgaatttaattatatgtggaccccattattagatatgagcattagagttataatttctcaattccggatattttattaaactttagaagtatcatttgacttatatgtgaattatgcaatttttgtagtttttgctcggcgataacggaaaatgcgatggatngctagtttgatcacatgggtaggtttagaactttatttcttagtgggatatatattggagagaataaaatacttaggttgagcggggttatatgttatggggcattttagtaatttatcaacgggtgagtggtggtggttgcctta

SEQ ID NO: 90188 - DNA, 607 bp, Cannabis sativa
tgatgatagtgattcctgaaaaaatataaagtttgataaacataataatgactcttgaagagtgtatatgttttggagaataatataattattttattattcatgtatttaaaaatgaaatttgcaatgattacttatattttgtagtgattttacattacgttatgaaagttttattgaaatacaaattataaagaacctgaagttcatgaattgaattattttgacatgatcaatcatatgcaataaattatcaaaagatttgactaattttgttgaagaaccaaaagattcttcccatcgttaatttataaggctaaaaaaagaatgcgcatatatttgcacatagaaaaaaatgaaagtatattttcatatttttaattttaaaaaaatatatatgtattatttcatttagtttctcttttatgcttgttataaatttatatgtttattgataattattttgctaatataattcattttaatatatgtgattttatttatttatctagaatatatattaaactatttttgaagaaaatatttgaattgtatttctttagcaatcttgagttattgttagatttttattgcatagcttcttatc

SEQ ID NO: 90189 - DNA, 570 bp, Cannabis sativa
ggtccgagggttcccaagcccacgacaattccaactaagaacactcataatgtttggtgggcctggacaccagaacccaccaaaagcccattttttgaaagagtaacattatttgaagacataatcaaatcatcttccatagcatcattcggcccatttgaaatttccacatcattaggcccactttccataaaaactccctcatttgacctcctccttttgtggtccgaaatttcattggccaaaaataaagtagtggtatttggtacaatcaaagcattctgaccaaaattctcaataaatgaatttttattaaaagaatgaggaaataaaggagattgattacctcccataaagttaggagaaatcggtttggggtgtaaattgtcgtgattctctccatcagttaaaaaaggcaacttctctttgcctctggtaatcgcatcaacggactgcatcttctccttccctctgttcatcgtctccatggacggcaaagggtggttctcggcttggacctcagcagccggttcacgtggcccaaacgtttgtacatcggcctccgtacca

SEQ ID NO: 90190 - DNA, 1093 bp, Cannabis sativa
tgaaactatccaatcaataatttcgtagaagctcagtttctatagtgatagaataataagaaaaaaaatgtcgttgtcattcttattgtgattggaaaaaaaatagttttatagatcagaattacaaaggtttatcatgtaatttgtattcagattaataattatgaatcacaaacaatattgattctcagtttagttttatggtattttactctggcactgttaaagagaaacctacagaataagagaaaatgaaatagaatacaacattaaagactactaatcacctgatttacttgacaaaatgacatacacaaaatcacatagttctgtagaaagtgaattcatgcattttcagtcatactactcctctcttaaattttttctttttttttttgatgaatcagaaattgtattagctcgagaacatttgattacacccaaatagcaccctttaaggacctataacaaagacctaactacacattgtaaatgtatttacaaattttgaaaccatctatatttgagattttttttggccaaaacaaaaaaacaaataaacatttaagagaggcaaacaaataaacttgaacccgagaactataaagatcctagaaatatattcgcagataaaaaaatataaccaaaataaaaccataccgagctactggacgatatcgtctcctaaaaagattccttatgctagtggaggcattactccctgattcatctgttacaacaaattcaggattctcctcttagattcccaccattaaacgttagactccatataatcaaaacaaaaagaaaccaaatattatatataatcaaaacacaaatacggcatgtcatgtttaccaaaccgtaataaacaaaataaaaatataaaatcttacaagaaaggatttggagttcgtttctatggaagctcaagccttaacaaaattatattttctctcaaaacagacgtctgatctgtaatgttctttcgccaaaagtttaaaaaaaaatttcgaaacatgtgggcagtgcaaattttgatggtataagcaaatatttaatatcagttcaaatattaataggatttgtttta

SEQ ID NO: 90191 - DNA, 519 bp, Cannabis sativa
tagtcacaacataggaataatgatttataattagtcacaattttttcacttccaatcacaagttttgttgtgactaaaagtaagattttttgtagtaccttctaatataataaattaccgaaaaagaaaaacaaaatgatccgacacatgtacttataattatttaacattagaagaagaagtgaaaattacacatttcacgagcttttatggaatgtgtataaaaatatgactttttctaataaaagaatacatattttatatgaaaaattcaaaaaaaaaattcaaaaatatgagaaaaatagtataaggtaactagttaccctaaattgttttctcataattttagtcttttttttttccgtaaaatatattttctttaagaaaaaaaacagccatatttttattaatttttttccaaaaaaaaaacataaaaaaatccccaacatttaataatactttgaattaggggtgttcatccgatccaatccgcacttttttggtcaaaaaacatccaat

SEQ ID NO: 90192 - DNA, 994 bp, Cannabis sativa
gtcatccatccatctttccaagaatcaggtttatcatgaaaatagcaaacatatagacataagactctactggattaagagagaagatagaggaatgatggattgatttagagaaggtcgggacagtagtaatcatgctaatgttgggactaagatcttaacagtaaacaagttcaagcattgcttaaacttgatcaatctcagaagttagtatacttagatatatgaaacaccaaccatgatgactacaatctttctccatcaccgtcaatattttaatttgaagtaattaggtagaatttgtggtataattcctccaaatgaaaagatctccataagactgtcccaataatgaaaagttagttgtctccgagaagcatgttctgggataggtaacttgccatctagaaggagtctcgtggaatgatagtcggaagggcgttcccagataactatcatgtccacctgaatgaagtcgtcaggaaagctagccttcctctggaagggtgttccggatggctagttgttcatccaagaagggtgttttggatagtcgactccaatgggccctttccaccatggaatccccttcagcattcgctttagtctgttgtctaggaagcgtatgtccaatccagaagcaccttgttttgtgctgacatggagattttgttacaaagagtttgttaagtcgtaactaacttaacaacttagcatgtggaaccactgacttaggatcttcatcctgagcctataaataacactaacacttatcatttgaagcacactagattgacgagttttcaagaggagactttaagtttaagagagaaagagattgagaggttgagagagagagagaggttcagagaaaagaaagagattgggtttgagttttgtatgaagaatctattctgtagataaagaagattcttgggtaagagtgtgagagttcaaatactttgagagaatctaacagagaatctttctcgac

SEQ ID NO: 90193 - DNA, 916 bp, Cannabis sativa
cacatgcatcaaaattcagatttaaacaatacaaaacataagcttcaacaaaagcatgattcaccaagaacccaacttcaagaacttaaatatttcatcaaaattccctgctacataacccaaatacaaacacaataaagtccttaaaatcatcttaaaatattaaccaagcatccaacatcaattttctaacccaatcacacatggggtacaaagattaaaccaatatcataatgcatgcatttcaagaacttcaaaaagctcaaaatcacaacattcaacttcaattttagcattttaaatcaagaactaaagttgtaagagctaactcaagcttcaatcaaagattacacctaagcaccaccaagatccaagcttgaatccaagttatttctcaacaaaatcaaacttgggaagatgagtttaaggagagaaaggggtctgtcttagggtgtaagaaaccagaaaaaaatgatttttcttcaattaaaattatccttttgttgcaaataaacaaaatatgcaaaaaattaccaaattgcccttatggccatatctcacacttaaaagcattcaagcacaaaatggtaactttcatcacacaccacatattcaattaatttttagatttctcacatatatataaaatgccaataatttatcgcaggattatatttcggccccgaacctaggtcggtccgaaatacactgctgtgactataccgcgccaacatggcagaacacacttgaaaaaaagacataacaggcatactatataataatatagttgataagcaaaaaaataaactaaattcacagctttacccttctcggtcaaaattactaaaaagcccctcgctcaccaacggggtcttaacatgtcatatctcattaatccacatataataaattatat

SEQ ID NO: 90194 - DNA, 1627 bp, Cannabis sativa
aattatttttttgtaatttttttattttgttttgtatgtatttgtaaaataatcccaatattttttgttcctctccttatttgggcctcattacaacgttgtccatataaaagagatggacttaggtacaacgtggtaggcctattttgtctttaagattgatttttaagtcaacttcattaacaaaaaaaaaaaaaaaaaaaaacctgggcctttaaacttgtctaatttgtaagtagctttttttttttcaaaccaaattgtatatgcggtttttgtaatttttcaaaccgtaatcgcactgttaaattttaaaactgcaaaacctacaccacgaaaaaatacagtgtagtgtggtgcagtgctgcagttcagttttgagcgatttacactatcatcattatcgaatattattatgaaaatttaaaaatcaaactaataaagctttaacaatacaaaacaaaattttttattaatgttttaacatcattgttgaccgaaattttcggcaactagatctttaatgtaataatgatagcttaagaagagttgatgtaaatatttttacgtggggcattaatgagccttagttcacaagtctctgttattaataggtgggtgtttcttacagagaatgttctgtgttcttttttctgatcccctcattaattttgtcgaggggtatttatggcagttgtcaaaaagaagaaaggtcacaattgtcctaactgtcagccttgggcatgcacaaattcccaaacttacaaaatagggcatgcatacccgacgtagtaggttgcctagggtttaggtgggattagcccttatcctttcttgattgatgtgattattcatgatggagtcgtcatttatatccttgattatcgcatagttgctgaaagacaggtttatggcgtctgacacgtcctctcaagtacgttcctagacgcttcctctatattgcattaaatgctaactgataattcatctccggtactgcaaatccggaggggttaaatgccatccggttgtcagaaaggaaggcgagcaagacttcccatgattgggacctagctcccgaaatagttactgacttctctagaggggattgacctaagtaattgttcttctttaatcattttcaggtaggagagcctgatttgccacgtgtcttataacgggatggccacgtatattgagagaaaaccgggcaataatcataatatgtataataatcatcaagtcattatattgaattgtctctaagaaataaagtgatatacaaatatattacatacatttgtatatgaaaagaagaataaaaatcatattgtaaaaattggtaaactttaatttgtattaaaaatcaaactctcaatctcaataatcaatatagaaacaacatcaaatttcaagttctcaaaatctataaaaataaataaattaaaaatcagatctcataaacacaaacttaaatagtagaacctcagtaaaatactaaaattcaaacattaaaaacacataataaaattgaacctgaaacttaacacacacagcagaataaaaattaaaccataaatgaatcaaacccaaactcaaatttgtcttcttcttcttactttttggc

SEQ ID NO: 90195 - DNA, 540 bp, Cannabis sativa
cacatgtaacctttagtttatcaatgtaatcagagatagactgattacctttgtgagaatttgaaagctgactcttgagttgtaacaatctggccttcgattgacttgtaaatttttgttcaagagctttccacaccgcatttgaagtagtgtaattggccacagttccaagaacaccttcagtcattgaagatcggatccacgaaccagagaccaataatcgaggaggagacagatcagtgagcaagatttcatcaagctcatgaccgattacagtgggcagaacttgagacttccatgccaggaagttgttttgatcgagcttgatcgtgagagaggacgtcagagaatgagaaaagggattccaagatggaggagtaggtgcagaagatgcaggatcggtaatacttgcaggtgacgagttgtcgctcgacgaagccattgacaaaggtcaaaggctctgataccatgaaacaatctgaacagagaagaacagagaagaagagaaagcttggaaagcaaagcttatcccattcaggg

SEQ ID NO: 90196 - DNA, 1072 bp, Cannabis sativa
ataattaaatatataaaattataaatattaaataatattggatggacattgcatgatattggattggatcggttcggttatccattggatcggatgtttcatccaaaatccgatacgatccaattggatttttaaaattttcatccgatctgatccaattatgattggatatccgattttattggattggattggattggatcggtcggttgggattgtagggtttcttggggaccaaccagtccttcggttcctccaggtccccctgaaatagaattctggttcagtgcaggaaaaacaaaaacccacctactcacttcaattcaacctcaaacttcatacaaacttccagatcacataataacatcataataaagataattcatgcaacaaaaacaagaaacaacccctaaaactcaaaacaccattgtagaacaaagcttgagttctaaaactcaaaccttgtctaacaattaagcgaagccacaaactaacttcaaatcagctcagacaaccataatatatcatcaaaacacaaaatctaacaactctaaattcacagaaccctatttaacaaaatcatgctagagaagttagcttaaaactaaataaaacacaaaaggaggagctaggaagcttactaaggattgaaacctcaacaatggtgttaattaagctctaaattgctgaagaaaaccctagcttcttgctggcttctagggtgcccgagagaaagagagagaagggagaggaaatattgatttttttgatatttttcttaatttgaatgaaatagaataaactaagctttatcaaactaaattattaaagaaataatctgattataactaaccaaaaattccactagaagacaaaagtaacatagggcaaaaagaccattttgcccttacacacaccaacaagcacacttgtcacttaggggtattatggttaatttactacctcaaataattcccgacactcccattgtctaactatgtggcctctctactaccaaaatattaaaatgtgattttattggccgaatgccgccttccaatattgtggggca

SEQ ID NO: 90197 - DNA, 661 bp, Cannabis sativa
agagtactccaatacacgttaacactcaaaccagtaactggaatagacaaggatagacttatctttgaacgtgcaaaaatatattgatcaagaaaacttcttaccgaggagacaacagatgcagttgtagttcttttttttttctactgccaaatagattcatttcgagccctccaaatttcccatgacaccattgcagcttcaatcgaagcatcaatactattaccaactctttgctatagacattatccagctacaaaattaacttcacaccagctagtaacatcaataacagattgattccagtaagcccgagcgaaggagcaacccaaccaaagcatgaaaaaattattagaaaaataaatatataattttaaaaatgaaaaaaatatatgttagaatgtgtcataaaaattatatcatgttaataaaaaatgtattaacgggtgcaattatggcatttaactaaattaaaatttgtgtataaataagaaaactatatccgagttgtatagatagtagaattaaaagtagacttaatcttatataggaaaagaagttgtataatataaaattattcttaaaaatataaaagagttgcaagttgatcttttgaaagagaattcccttgtggatgtaattggctcgatttgatgatcaa

SEQ ID NO: 90198 - DNA, 1998 bp, Cannabis sativa
accgtgattatatgtctagaaactttagtagtataaacttttcagttgcagcaataaaagcaaggatgtaggactatcttatataatataagataatggaacacttatggacttaaatcaaatactagctccacttgtgtgctactttagttttttgagattacatctatatagcccacgtctagaaaagtagtatttgtgaaaaaaaaaaaacaaacacttactagtcttgatgaccatagtgtactccacccctagtcaatttagaatagccaacaaatatacaaaccttagtcaataattctagcttttcttaaggacatggtaagggcttccttagatttaataatgatatacactaagtacttgacaattatttcaatccaagattgtcttgggatctagtcttagatgggacaacattttaaagtatgatttgctgtctctaaggcatatcactagaaaggactttgtcagctgctagtaactaatcacaaacctgatcatttcatcaaaatgtgactttaaaattctgagcaggtaagttcaattacaattcaaagttcatttaaatggtctttgaactacatatcaaatatatctctactcctattagtttgcaagatctttaacgactttattaattgtctttgctagaaatacatgaaatttttcaaatatttcaaatttctggcataagttaaatatctatagtactcatctaagaattttacgagttactcgtatccaccctagtttgtatacccttatgttaaaaagacacatgaatgcaccatccaagtggttttctaggacaaacatctctttgcagagaataatcttgtaaaaaaactatgacaagatagagtgccatagatatttcatagtcataactaatcttttgatgtatatggttcctaggtttaattacaacaaagagtttgttgaatagtttaagtgagtattcggtctcagaatattaactcgattttcatacatagtttgatcaactaaaatggatataaaaactcatgaatgttaagcatagtgtttagtaatctagaaattgagttattattctagctttgaccgccaataaaacactattaaaattccgtgtttagcttacaaaatgcttgatatagatttcagaactataatcttaagtttaatcgatatttagtagcactataatgagattcaattcttgaaaattgaggatagttatcaattcttggattgaatatctagaatatgttcatctgcatcacaaatgatcataatccatataggtcaatgatgtacgttgtagtaatttctaaatgaaaaagatatagggaaaatctaaagaatgattttgatttaaaataagaatctaacgatgttccttaaggtgacagtgaaagttattcttattttataaacttcttcattatttcggtattgtagaccctagtctaagttgcatctattggggatgagtcaactagattttttatttccaaaatatatcttatgagatcaaatactattatattttctaacagagaacaatctattggaaaacaacaagctaagttagacaaagaataaagattcaaaattaatactacattatcaataccaaaaatcaatgctatgttcaatataaattttaatcacaaaaatttaggaagctataaacacataatcaagtatagaagatatgtgaaaaatactaaaaataaacacatctctagttttccaagggattttttaaccaaatgatatatactgtcactgtaacgccctaatgctaaggcacgctacggtactttttcaattacagtgatgtctttgctaatcaaaaaatttacttgaaaaacatgtcaaataaaaacttttattttaaatattaaagttcataatttacatagttatttataaactctgggatcccgtttctaaacttttcatacaagatatacaaaatataatcccagatgtctcgagaccgaa

SEQ ID NO: 90199 - DNA, 2299 bp, Cannabis sativa
  modified_base (2219)..(2220): a, c, t, g, unknown or other
taggatgttaatcaaacatacttggtagtaaatctagatcctggaaaaataatttccaacactaacttggccagcagatctactaatactagccatggaaaaggtggaaactcatctcagaattccaatcaaaactctgctcctggccgtgggaatttctctaacaacaatattgggggttcatctcgaggcaggggtcatggcaggttcagcaacaactctaaacccacttgccaagtgtgtggcaagtatgggcacagtgcggctatctgttacaataggtatgatgatacctacatgggccagaccctaatcacaatcaatctcaacgaaaaccaggtcctacggctcttgttgctactcctcaagttgttgacagtgaggtttggtatgctgacagtggagccagcaaccatgtcacacaagatgccaacaacatgactcaaaagaatgactatggcggtaaggataaacttattgttggagatggccatcctttggccataacacacattggatctggtatcctcaccacagattttcattccaagaatcttgtgcttaaagatgttttacttgttcctgaaatggctaagaatctcataagtatctctaagttgacatctgacaatgacatacttattgaatttgactctcatttttgttttgtgaaggacaaggtcacaaggaaggtgttgctcaaagggatgcttaaagatggattgtaccaattcaactccttgctgcccaaatctgtgtgtcactcaaaccagtccactctatctaacagtgcctttgtttggtctgctaatgttgttcaacaatctagtttactttccaggaagatgtttggcataggagattaggccatccatctactagaatttttaaacttgttttaaattctagcaatgtaccgatttcgcttaaaaacaatgaaagtttttgtgatgcatgtcaatatggaaagtctcatgccttacctttcaaattgtccaatagtagagcaactaagatgttggaattaattcacacagacttgtggggtccctctccaatcaattctaatacacattttaagttttacattcattttgggtacgactacagccggtttacatggctgtacccgttaaaacaaaaatcttatgccattagtgccttcattcagttcaaaacaatgcagaaaatcaatttgaaacaaagataaaatttattagaactaattggggaggagaatttcaagcctttgatgattttctaagaacacatgggattcaatttcatcactcttgtccccacacttcagcttaaaatggtagagctgaaaggaagcatcgccatatagtcgaaatgggattgactctcttagctcaagctagcatgccactcaaatattgggtggacgctttccaaacctcagtttacctcattaatagactgcccacactagttttgagcaacaagtcaccattcaaaattgtttatcacaaaaaatctgactatcatttacttagaacgtttggtactgcttgctttccttgtttaagaccctaccaaactcacaaatttcaatttcactctctcaaatgtgtcaatcttggttatagtgagtcctttaagggttataaatgtttaagtactacaggtagagtctacatttcgagacatattgttttcaatgaaaaggaatttccttttaaaactggtttcctaaacacatatgctgctgaacagtcattaatcattcacaatgaagcttggtcacaattgcccaaccttcattttcccatcagttcaacacctgctgcagtcacttccactcatcgagcatcccatgttgcagcacctgcctctcctgaccactcatcccttcccacccaacaagacaggtctccaacatctattactctcaataatgatattactgatcatgctactattgttcctgaaatatcaggtcccaatgctccattatctccctcttctgctgctggtgtaaacaccacaccagatgaaatccctcctgcttgttgtttctcaaatgcctcgaacacagggatcacatcacatgataacccgtgctaaagctggtatatttaaacccaaagcctatgttagcacctctgaggatttactttcaggtgaaccaccttcaggtcaaattccataacccaaagctatggatgatgaaattgtttgtaaagcccgcttagttnntttggaaattagcagttgtttatgattaataatgaaattatttatagctatttaaataatttattatgctgttatttat

SEQ ID NO: 90200 - DNA, 640 bp, Cannabis sativa
ttactcatgtttaattattagaacgagataataaaagcaagaatgtaacaagacaaagtttaggttagagttttcctttttatcaatttcttgataatttcagatttggcttcttcaatgttttaatgatcttcttgtttcttgacgttgtttccaggtgttgttgaatcttcttgcttccccgagctctgataccactgtaggaaatcacggcattccaaaaatatccctacacccaacaccccaacagtcacattctaggggcaaaaccgactttctcccttggtgcggatcacaagggaatatgctttcccgaaaccgaatatgcccctttgaatatcagattttatcttttcaaaaaccctattgcatttatgttaatataaaagcaatcttttctttttcctagaaaaccctagcaccacattttcacaaccggcccttcaacttcttccttcttctctcttctttgaacagcaacacctcttccttccagctttgaaaaaaacgcagcagcctaagtttcttcttttcttccttttcttcttgctgcaaagcaacaaccccagccgagacaccctttccttcaagcttcttgttgcaactcagccgagcctcttctcctccttcttctctcttg

SEQ ID NO: 90201 - DNA, 1044 bp, Cannabis sativa
ttaaaatttgacacatacgcttttgggtatatatatatagtgtgtgtaatttatgattctataatatttttttttcttttatttatgaatatttatatttaataacttgctattttttgaaatgtgaattgtagataataaattcaaggtcaagagaacaacaaaggagaaggctaagacatcacctctgtataatggaattaaagaatatgatgattaaattttttaattatttgttttaatttttagattatatttgttatatttggatgactctaaaatttggattctaatattttggatgactgtattatgatcactaatttttgaattttgatagtttttatcagtgtttattttcttttctcttcagtttaggtttagatctaaatttttacataagggttgtaatccaacccaacccaacccgtaatgtgtgggttgggttgggttatgcataaaagataatttgaatgggttataatttttcaggccgatctaattgggttggcccattgaaatcccggccaacccaacccatgattagccttatgtagagttatgaaatggtcgtatgcctagcttacgctattacaaaatccgggggttgccccgctcatatcttatgaaagaacgaaggaaagcttgaaaggcgaactaaggtttgcatgtttcttggaatttttaaggagactaggggtggactattttatagtcataaagatgataaagtgtttctttcaacaaacgcttattttctagagaatggttatatcaaagacttcaagcacgtagtaaagtagtatttgaggaaatgctttcagaattaactccaaaagatgttcatatatcttctacatctgtaaaagatgatccaatgcaagttgagacacctgaggagactatcactatggttcccattcagaacatcactgtacctcgtcgtagtggaagagtttttaaaaactcccaccgctatggcttggatggtgaaatcaacatggttgttggtgacactagtgatgacgacccattaacctataa

SEQ ID NO: 90202 - DNA, 555 bp, Cannabis sativa
tcggtgtctggatttgggacccagccccagacttgaacccagaccaggacccgaacctagtcctagatccaaacctagacgcaaacccataccgtgtgacctaaaattggaattggaacaagaagtagaccgagacctgggaacaggaccgaaaccaggacttggacctaaacctggaacagtaactggacctagactcaaaaccgtaaccagaccaggttctgaaatccaacccagacctagacccaaatcgggacccagacctggatcccaaccaagacctggactcaggatccgaacatggtcctaaactcggaccgaaacatggaaccagactcggacacagaattggggcggggacgtagaaccacaccccagtctcggtccccaacccaaacacgaacctgggacccagtctctaaaccagaaccagaccgagacacgtgacagggatccagatctgggactaagactaggaccaaaacttggacaaggacccaaacccggtccctgaccttgacccaggactcgaaactagaacatgaacaagaaccg

SEQ ID NO: 90203 - DNA, 808 bp, Cannabis sativa
  modified_base (499)..(500): a, c, t, g, unknown or other
atttaaaaaattgatttcaataatatagttcttaaaactaaaataattatttgtgtaataaaaattaaattttttaaaacttctaaaagaaaagagagagagagagaaatgagtatagaagagaatagttccttgagagaaaaagaaacaaggagaatcgttggaaaacaatctccacccattttctgttttaagattattagtgtatcgttgttcttctttttttaaaaatatttactccgaagtgattattgtgttgttgtatttattcgtattggattttttaagtattttgtgttttgggttttgttttatgctttagtatttggttgtttagttttatttttttaatttttgttgatattcggttttgttgttgtgtgtgtgtgtttttctttttttttttttaaattttgttgatttttgggtataatttttgttggttttagtgataaattttctttcattttttagaaactggtttttgggtatgattttnntgatgattttagtaatttcgggttttagagtcaatgtgttgtaataaattttgggtttcttgtgtaatctgaaaaactatgtagtttctgttgaaagtattgtaccagttataaacttgtatggcttttattttgcatgaagaaattgttgttgtgtttgagcagttataatctttgttttatttataaaaactggtttttggtgtgaatgagtggatttgaggtttgaggtttcaaaataaatctcatatggaaaaccagtttctagatcatgattacagttttaaaaatgggttagaaatgatgca

SEQ ID NO: 90204 - DNA, 674 bp, Cannabis sativa
ataatttaatagagaattttgcggcaaaaccctcataaatgcctagtttattgcaactaacccacaattctaatattttggtagtaaagcccccaaaactcatgttctgttagcagtttaatatttccattcattttttagtgttaagtgtcatgttagaatgtccacgtgtacacatagcacaattttattggtacacataaataattattttaaaaaaattaaaaataatttgaaattaggaaaaaaaaaaattgaaataaataatatataaaacataattaaattgaaacctaaaattatcgcacaaccgcatctcccaccctctccctctgttcattatcgcacagccacccatccattctctgaccaccccaagccaaaccaccatctgaataatccccacgacccaaaaacccatccatgaccaaaatggaagccaaaccaccatttgaataatccccacaacccaaaaaccccaacccgattcctttctctctctcgtttttctttctttctttctctctttgcgtttagctcgacccaacgccgaagggttgtctccacccatccacggccaaaatggaagccacgaatggcttcctgagccatccgatgatagaagaaggcccaggtcgagagggaggtcatttttagatttttgccaagttttc

SEQ ID NO: 90205 - DNA, 633 bp, Cannabis sativa
tttgttgattatgaaagccacatctggccgtgtaagagacaaatactgtaaggcaccaatagtgctacgatacagagtaatatcagagaagggttcaccctctgtcaaggacagttttgcacttgcactggcaggatttggacaaccttttgcaccttccatgtgaagcttgagtagaagatcggtgatgtatttagtttgggacagatacatcccagtgtgatccctgtaaatttcaactcccaagaagtaatgtacttctcctaagtctttgagtgagaactggtgatttaaatcagtgacaagcttactgatgagagacatattcggccctgtaactagtatatcatcaacgtatactaggagtataacttgattcgatcctgagccataagtgaacaatgaattatcggacttagaagccgtaaaaccccactgatatagacagcttttgagtctgtcattccaggctcgaggagcctgtttaaggccataaatggctttctttaggagacatacatgatctggttttgcagaattgacaaagcctgaaggttgtttcatatatacagtctcttggagattgccattgagaaaagcattagaaacatctaactgcttaatagaccagtt

SEQ ID NO: 90206 - DNA, 1143 bp, Cannabis sativa
ttatttttatttttaattattattgtatttatttttgaaaatttctttttcagtttttgttgcttagttttaacaattatgtcatggtattctttctatatatgattatttatttgattctatattagaagttctttcttttatttcaatgtgaataggtatgttttattttctcaaggtatctttttaataagtccaataatggtattctaaatttataacatttatgggtttttcaagtgttttaatttttggttattagagttacaaagatattgagttattgaaattatagagttattggaatggaaaatttcgagttttgcgacttcaaatgatatgcttgctttgctagagaacaacatttttagcagattagttttttttttttggtacattcagtctcattagaaatagttttttgtgatttatattagttgctaattttctttgtattttatgcagttggattatcttattttcatttggaacatttggagggagtagaacaaccatcgactgaaaatttaggtgtggaagatggagatttctagcatttcaagcatattttctggcaattttaatgacgttggatacaaaattttccttcaaattttattgttcttgttgatttttccccttagtaattgtctctacttttgctaggagacattttttttcagtgatctaggatcactgttagagaatgtaacaagtttgttatccagttttcttggagtgtccctgatctatgtacattagtcggtcattgtggctgcacatgaattagctatgcatgctcttcgaatggattaacaacttctttggctagatgactttttgctattttattctttgggttgtatatagtcttttagcctgtttgacattattcaattatcaatgatattggtcattgttttcaaaaaaaaaaaaaaagtactctaacaaccaaaaataaatagataatagtatttttaagaaaataataaatcaataataaaaaaataaatttaatccaaaatattaaatttaatttaataactaccaaccataccaaataaaaaactaccaacatttataaattattctaaaagtagtaaaataataataaattattacttttcattcaaaaaaataaaa

SEQ ID NO: 90207 - DNA, 505 bp, Cannabis sativa
aaaaaatctagtattgttggctagtcgggtttgttgggaaatttagttgagagttttagtgggactaatcatttcattcatttttgccttatttttcatttcaagatagaaatggcttggtctttcaagggtcagggcactgtcaatgtttgtaagacatgtatgtaccatgtccttcgtccattttagacctttaacaaaaatctaaactaaagtaataataataataataaaaaagaacatttaaggtttcctttttgtttctttatatagatttaattacagacttttaaggtttcttactaactattaactaactaccaaaaaggtttttgtgagttggaaaattaacagtataaatatgacccttttctacccagatacacactacttcattgctttatttatatatagctaaggtgatcttatgataagaacgtgtattggaaaagtcaagtcaacatctacaaggaatgagatgacttaagcatctaaagttgaaact

SEQ ID NO: 90208 - DNA, 988 bp, Cannabis sativa
aggagttggttatgctgagctgtcttttctttatttgtttttgctgtatttttgcttccagctactggtataagtagcttgttcttgtgtattgcaagaactgatcattcattcaatacatcctctgtttttctctgtttgtttttgtctggtttagctcatcagagttgttatggtatcagagcaggttttctgtgctcttcttgttcttcatcttgttcttcttctttgatctgtgttttgtgctggtttctgcgatggctcgaggaggttgaacacaaggtcgaggtaatggagcacacactcgatcgaatcgtgaaggtgaagacaactctcttaactcgaatatgtattctgttcttggagaaaattcgagatcgactactgcaaacgatttgtcgaatccctactttctttcaaatggagataatccaggtgttgtccttgttcctaaaattctcaaaggcagtgagaattacagcacttggagaaggtcgatgctgatagctttggttgctagaaacaaagttaagttcgttaatggtaggttgccacagcctgatgaagatcacgatgattatgatagctggtgtcgttgcaacagcactgtgatttcttggatcttacacgcgatttctgatgagatcgcagacagcattatgtatcacgataacgctgctgaaatttgggctgagttgcacgagcgattcaatgaaaagaatgctcctcgcattttcgaagcaaagaagacgatgcaaagtcttgttcaaggatccaattctgttacaacctactatactcgtttgaagtctctttgggatcaaataagagagttttgcccacaacctgtttgctcttgtggcgcaatgaaggtgatacaagagtattaagaagaagacaggttgctggagtttctggttggtttaaatgactcatacagcttggttagatcacagattcttatgcgtgatcctcttccaagtgttaa

SEQ ID NO: 90209 - DNA, 556 bp, Cannabis sativa
tgactaggtcatctcttattttaatatttttagttatttgattttgattttatagacccatttactaccaattacatgttgatcagcagacagagatacaataattcaagtatagttcttctccaaagcctctatttcagtatccatcgcattgtcccattcaggaattccttgggcttaactgaaaaattctagttcaaaatggcttgatatagctagaacagtagctctgaagacaggagacaaccggtggtacccaagaacctaagataaaggatgagcagtaacaaaagaggcctgagaagaaatagcagtgtcattagtggccaaataacaattatattcatttaggtatgagggctttgtcacttgtctccatgatctagtatgtggagagacatcatgagactcatgcggagtaaacacatcagaagaactagacatgacaggttcattaagatattgtgaagtacctgcacgcattctgagaattatgggatcttattgtgtgaggaaaatcaggaaaaaaaaaaagattcatgtgtaggaggaagcc

SEQ ID NO: 90210 - DNA, 667 bp, Cannabis sativa
ccattaggtaaagtaacaatattagcaacaagattagtgtttagagatgtaaaacaatgaagataatgacatatatgatgactagctccactatctacaatccctaaaaagagaggaaaaagtttatcattaccgaagacgttagagactacaggaagatttgcactagtggatcgagcgctttggatttgctgactgagtaatgaaatcaattactagctgagttgttgttgataagagccagtaataggggcgtcaagactagccaaaacttggtttgctcgaacagtaggtgtatttttctttctgccaccatattcaagttggaaaccatggaggaagtagcacttctcaaccaagtgacctagtttaagacaattggaacatgtagggcgaggcttcttgtttcgagaaggctgatttagtttcggtttggcaggggtagcagcaataatgcatgtgttgccaagacaatgttggtgttcttgttaaacaaccatggagaaaaccttggatagtgggggaagaggatccaagaggatgatctaagcccgcattccccaataagattcattaagaccgatcaagatctgaaggatatgttgtctagtgtagtagtcttgaactttttgcatggcaccacaagtgcaaggagtatttggttgat

SEQ ID NO: 90211 - DNA, 636 bp, Cannabis sativa
aacaaaacagctcatgaataaaacaataagaggtggttcttgcacaaaacatggctgttaatgaacaagaactccatacctgcatgatcttccgtgttaaagtgatagatgtaccactacggattaacaggtctgaccacaaaccagcaagatatcctatgactgccatcccactccatggaacagcactaaaccaagctgcatgtctgaggttaacttgaaacacctgtagtatgaagtaccttgcttgagtttcaaaatacttttagataccgctaacaaatgacacaaaataaggataagtattagttctgacaaagttaaagcaaacaggcattcaggagagaacaatgaagaaaccctgcaaaagaagaacagtgagttttcgtaaatagaaagtatcaagaatctatacaaaggtctaacacgaccataaaagcaaacaaaaacacttctctcaaaatgtgttttgccaagcccaaaactaaaactctaatctcaccaaacttatgaaaactcacctaaagtcttcttacatagcctgtaaaacaaataactaactacctagagaacaagctaatgttgtaatagacaaaacagactagccaaccaaaaaccgattgttagttaagttag

SEQ ID NO: 90212 - DNA, 588 bp, Cannabis sativa
gaaattctagattaaaaccctagttaaaatcaaacataacctaacttccaacaactccaaaatagatcaagcattccatatttaaattaaaatagacgatacacaacttcccgggccaaaactgaacctgaaggaaacccgaaaaaattccctgcaagcaaccggtcgaccggttctggtgcagcagaaccaaccggtcgaccagttctggcagaccaggttcccttgggttctttccttcaaattcgacccaaaactcctccaaacctaaccaaactttccagaacagtataatatcataaatatagcatatcccaagctgcaaattacagtagttcaatctctagctcaaattcatatgctcaagtgaagaaaactaagttcctttagcttcctcattcataaatcgatcccaacagccatgaattcaattaaaacatacacaattagacttaattcaactagaatatcacactcaaacctcaactaagtctacaaccctgaaacttacaagaattatcaaaacctagccttagaacctaggatttcaccaacaaaacataaggaggaacttacctcaagatctag

SEQ ID NO: 90213 - DNA, 765 bp, Cannabis sativa
acacgataatatatcattcaaaaagtaaataaataagataaagctcgaagaatattagatattcaatttaataaacaatatgatacaaattacatctattaataattatattattagaatttggtagcttaaaatcagctcattcacacgaacaaacttacaattattattttaagaaatagatattatatagctattaaatttatgaaaaagctttcatattattcatctaaattaattgatttactatatattctttcaaaaacaaaagaagaagtgtattgaagtgtgttaagaagagccatattattaacctagtatatttcacaccttttggatacttgatcgctaataaattattactttcttagctgagattgttgttagaatttttttttcatgttattgtaaacagctttctatgcttatttttataattttgcttttcaagttatattttcatgtaataaattttatccgatttacttattaatataataaatattttcattttctgtctctcaaaaaattaaaaaaaaaaattagccattacaataaaaaccaaataaaaatttcatgaactatactgtttttgtttatttatttatttatttgggatgaccaaactttccaagaactttcttgtagtctagaaaattctctccaacaactcttacaattgaattcatttttttttttacgttttgttttcacaacaaaagttattgtggctacatatatatagtacaatatttgtttatttat

SEQ ID NO: 90214 - DNA, 714 bp, Cannabis sativa
tccttgcttgcctctcttaaggtgtttgagagagtgaatgagttcaaaagcaacaagtataatatccgtaattaaccgagatggcaaaaaagcactttgagattcagatatgactgagttgaggtgaggcttcattcttagaacaatggttttagacacaagcttttataacacattgcacaagctaataggccgaagatgagacatgttcagcggcttctttactttggggattaaggtgatgagtgtagtgttgaaagaggaaggatcaccaccgtcattgagaactttcagcactgttttggtaaaactttcaccgacgatgtgccaataattagtatagaacatgactgacatgccatccaaacccgggctgccatcttcgctcatagatttcagagcgagaaagacttcttcagcagtgtaaggcacggagagagcttcattaatttcatcagaattaaggcagggaactgttgcaagaacagattatgttgcagctgtattaactccttcactggaataaatgttgcagaaatactcctgaataatattagcaatgcctggttgagaagaatgcacaattccatttgaatcggtcagcttagttatcttgttaacaacttttcttgaactcgttttttgatgaaaatacttggtgttagaatcaccagattttagccatgaagaacgagagcgttggtgtcaataatc

SEQ ID NO: 90215 - DNA, 864 bp, Cannabis sativa
  modified_base (99)..(101): a, c, t, g, unknown or other
tctaattataaaattgaaaagtaaaaatagttttatagaacatgtttttaaaaaatattttcacttttctactattaaaaataaaaaactgattaaaannntgttaccaaacgccacttaaattagtgataatttatttctaaatactatgttttagtcataagtaactttttgttgtaactgaaagtcacattatgtcactaaacatttatgttgtgactaaaaagttaccactaaatgtagcttttcttgttgtggattgtggcaaaacgaacccgaaatccatggacgatgttcattcattggcagcattgaacttcgttttgtcccgcacgagattttgaggcttctacaaaggggtacactgagaaaccaaaccattaatttccatcaagatttgtgtttgtcaaagttttgtaatatcactacaaaaaactgttacctttagagtgctgataattttttaatcaaaacataaattttttgtgactaaatgtaacttttattcacaacaaaaaattatttgtgactaaaacataacatttagatacaagttatcactaatttagttttagtcactacaaatattgtgactaaaaactcacaataaattataatttttgtgactaatatttttaaccacggacctttttagtcacaatataaaaataataatttataattacttatataattttttttttatttttaatcacaagttttgttgtgactaaaaataataatttataattacttatataatttctgaactaaacttaagcttcttcaataaaaaaaaacattgaccgatctactttgtattgaatgattttatttttgtatgttttaatgtatttttttttt

SEQ ID NO: 90216 - DNA, 1095 bp, Cannabis sativa
gtgaagggatattttgcatggtcattacttgacaactttgaatggaattcaggttacacagttcggtttgggattaactttgttgattacaaagatcatcagaaaagataccccaaactctcagcacattggtttaagaattttcttgtgaagaagaagaaatactaattaatcacacaatatatatacaataatttatatatgctagctctctcttctatgtatgtgtgaagatgatcaatttatggcattatatggaaacgctctcttctatgattttgtaatatggaaactctttaattagcttgaataatttatgttgatcagaaaaataattatatatatacataaaatattttaataattttagaaaagttagtaagaaattatatttgatggtaaaaaaaattaattaatagctcttggtcatatatatatggtcattactattaggcaccttaagggcatctccaatggaattgtctattagagtgatacttttaccacatatgcatattctagtttaatttttaagaccaattttatgtgcagtgttgttcaatatagataataatcacatgtcgtttttttttaattatttttattagaaaaaaagttattttttacttaaaaagtcattaatttaatttaatgtgagactatagtatacaacttttagagttgtcaactattaaagtatttttctaagagaatatgacaaataatatgtgaatgagagaaaaaaataaaagaaacaatattttaggatgatgtgtgtattttgacaactataagagcatttctaatgggattgtccatccacttatttttgctacatatgcaatatggtcattattttcagtgcaattttatttattatcattgtctatatttaataacagccatgtgatattactttaccttttctttttcaaaaaattacattgtggtattattttacagtatttaataaaatttaatcatttaaatggtgatatgtaggacataatgggcaacttttggagttgaagaaatttttgtaagaaaggttgtcaaattttatgtagatgagagagagaaaattaaaaaaaaaaa

SEQ ID NO: 90217 - DNA, 531 bp, Cannabis sativa
  modified_base (45)..(46): a, c, t, g, unknown or other
cggatactaaaacagatagagatgtatcggtgtatcccttttaanngggtgcattatagaatttcccaatattttatttaattaaatatttaatattcttttattggttataattattataccggtataaaaataaaaagcctaaaaaaatgaataattattacaaccttctgaaccaactcaaatcctcttgtttaattatattctttggcataatattatcaattctatatttaacttttctttgcacactctgtacaattgaatcctccatagccactttttgatccgaaagagcttcattacaagtatgtcatagagcataaatcaaacccaccattgttgctgcccacacttgtcttcgaaacttgctcgttcttgacttctcaatctttctaaaaagcataagaaaatcgatacattgtaccctccaatccaaccactacacttcaaatcatgaagacaattgacacttgggcaacaatcaaagaacaagtgatgaattgtgtctgttgtggacattgtcccaca

SEQ ID NO: 90218 - DNA, 862 bp, Cannabis sativa
ttttttgctatttagggtttttttacgtttatattttgttcttataattgtttatttctgtattgtttttttttttatatatatatattttataattgttgttgttttactgttttattgattatattattttattttttcagttatggaataacaaatttagtaaggaagattttcatacttctcgggttacttctacatgttgttatacaattattgagactctcaattttattttatccactaaacaaaaggaaatatttgaacaaactatatttggattctttttaagacttcgttcttatgttttgcaacaccagttggttcacacttcacagtttgtcgttgagggaggttgtccaaccaaataataatgagatgtggtttaatgttgctagtcggatgctaagctttagcattgaggaatttgctttagttttagggcttgattattctggttaatgtgataaattgaggtataaacaagaaaaaaattattgaaggagaagagttttgctcgttttaaagaataaacaagaaggatgtggagaagggttttgttgagaaaatgtttggcgatgatgatgagcttgccttgaaagttgttgttctctactttgtttagtgttttgtgttaagtgattcggacacaaagaaagtctctgacttagagtttgatattattgatagtgggaggttcaatgaatatgctcggggcacagaatcttattttttatttcttgattcggatagaggtgcgattgcaaagaatcttattaaaattaagaaatgcgataatggagaaaaaaatggtttttgtaggttgagaggtttggcttatgtttttcgagtttggttcaat

SEQ ID NO: 90219 - DNA, 940 bp, Cannabis sativa
tttttttatcaattttttatgcattttaaatttgcttctattcttattcctattctcattctcactctttttcttatgttttcattcctttcaaccaaacgccaccaagtgtcaaatatttcactcccttcaaatgtgcgaataatgtaagattctcaaatggattgctatcttaatggcatcattttgaccttagtacagttgtgtggctgaagattatcaattcaccatgttactcctctcgagtaaatcaagtttatatttggtttgagagagatgaagacatcgatgcacactcactatcttaaagccaagaaagtaagtaatagaactgagagactcaggagcatatttttctgactaagttttttgatagtcctatcgagaggatgctgtcaacatatatgaggaggtagagaacaaaacgggaagtattagctagagaatttacaaaaccaagggtgagtaaggtgtgtcattaagtagcaaactaggtgtgaggaatctgttttaggccatagagagcacaattcaacttgcaaggaacactcaaattagaagagtcaatgtatccttctgatcgacacatgtaagaagagtgccattgaggaaggcgttattgatgctgacttgttggataacccaattgttgcaacaacaagagtgaaaatcattcgaatggtaaaaggctcaatgacagaactaaatgtttcaaaaaaaatcaattccatgagcttgttgaaatcatttcgcaacaagttgagctttgtaccaatgtatgaaaccatcatagctttaatccacttgttgggaacaatattcatcgcatcacttgggacacaaatgtccaaatgtttttgttttattttatgagagaatgatattcatcatctgttgctttccttttgggaatgatcaaggcttgagtagcgaaatgagg

SEQ ID NO: 90220 - DNA, 670 bp, Cannabis sativa
  modified_base (81)..(84): a, c, t, g, unknown or other
gtaaattcattacactgataaatctgaagactaaataattttaaggctaattaagatttttttcccctaaactttgacatnnnncaaatcatgtcccctgaactttttggcagttagaaattcctcctgaactattgaaattgttaaattaaggacttttgtccaattttatttaattttactaattcagtgatttttttatgtactaaatcatgctccccatattttgagatctactaaatcatgcctctcgaatataccaaatcatgccccttgaactttcatctatgttagacttttcttactaaaattagataaaaatccttaaatctaacaattttaatagttcagggagatttttaacaaccttaaaagctcaaagagaatgatttggtacatatcaaagtttggagagtaaaaatcataatatacctaatttaaaagcatataatcgcaattatttttcagtataatgacatcaatataattgtgaataactatatgtttagtatttaatataatttatatcttaagcaaataattatgaaaacaaaatatgtaagcaaggcgattgacaaggtcaacaaatgattttttttctttattgataataaataagattatatagaaattagattttatttatatcataaaactaacaatgaagtct

SEQ ID NO: 90221 - DNA, 562 bp, Cannabis sativa
aacaaaattatttgaattgtttaaatctctatgagaattttgacaacatgaaatgttagatttgatagattgctattaattggcaaagtttaaaccgtcatttaaagtagttttttctaacatttataaaccgtcattcaaagtgattttttttccaacagttataaactgtcatttaaagtttcgtatttttatgacacccacacagccaacggttttaaggaccgttgggaaatagtataaaagacagttataaaccgttagaaaaagataattttgtagtagtgtcaaacgactccctaccccaacaatactcatcccatcgaccgctgccaatgacatctaaatcaaacctagaaacttccttgtctagaatatcgttaagaaggaaacatttgatgaaatacaacacaaagagtttcaaacctagggattcatcctgtcccaacctactgcctaagtaagcatcctctatagccttatgatcaatcgtttttatgctagggaaacaaatatttaattagtttttattttattgtatacaatggtagtatataatttt

SEQ ID NO: 90222 - DNA, 570 bp, Cannabis sativa
  modified_base (152)..(162): a, c, t, g, unknown or other
aagaattgaagaattgcatccgacacttccgtaccaatttcatgtcacacactcttgagaaaatttgaaccataaccattggagtcagggctattattgttatagactaagttttctcatttttgggctagaaataataataataataatannnnnnnnnnnaataataataataataactcttatcttataatatattattattatgttcatgtattacagattcagtatagatattatttaacgcaaagatgttaataagattgagtcattttacacttttagactattgtttgaaaaatgagtattttgtataaacattcacaaaagacaaaacaccgtaaagttccaatgttgcatgggatttctccgacgagttggttacagtcaggtcgagagttctgagattgcagaggtgaccaagtgtcgttggtattttgtcagagaagaagttttgtctgatggctaggaagctgagatttttaatttgagaggtggattgcagcaacagattgtaaaatcgactcggtacaattgagaactcatctaatgcagagagcttcctattgt

SEQ ID NO: 90223 - DNA, 903 bp, Cannabis sativa
  modified_base (861)..(869): a, c, t, g, unknown or other
cctcaggatcgagaggaccgaaagagcgtttctgtgcaccaggaaccaggagggagaggacgaaggggccaaaaataccctcccgtcgatctgagacatcagattaacggaaaacacgatgacctttgggatcacctagaccaacagaaacacgtgcccgcggtctccacttgaacctaaacgaaggaatcatagctgagcttgccatacttcgaaaggacattggtcgagtctcttggagacaaaaaggggatgactctgactatgactgtgaagaccgggagccatgtgccagtcacatcctggaagcggagctccccaaaaatttcaagatgccagaaatggcagcttataccgggaactcggaccctagcgatcacctgtcacggttcaacccagtcatgacagtcatgagagtcagcaatgacgccaagtgtttatgcttcccgctaaccttaagcgggtccgcggaagaatggttcaagaaactggagccaagatctgtggactgctagaataagttgcaaaccagcttccggagacagttggtcgccgcaaggaaagttaatctagaggtcagcgcctttactaacatcaagcagctgactacggagacattgaagaatttcataaagaggtttaaggaagaagcctcgaaaaccaagaaagttgatgacggacaacagctcgctcttcttcaagcaggcatccgtatagggattccgttctggaacgagttacagcaagaaagagcctccaaccttcaaaatttccagaaaagagtccaaaaatacatcaacctagaggaggcccagatagtggcctctgggggatactacctattggaaattattttaccannnnnnnnnatctactcacaagtatgttaattaacaccctaaa

SEQ ID NO: 90224 - DNA, 669 bp, Cannabis sativa
tagttaacgccccaaccacgtaaaaaattatttgtgtcttttttactttttctcttttaattatttgtttcttcaattcttattatttataacgagttttcaaaaatctcagtaatcacacaagatatagatcgatctactattgatcatctttatgatatgaattagatctttatggtaagcgataagtttgataaagacaactttactcatatctaccattctcatatataatctcgttatatacaacatatccacttagatgtcatcattgaactacactagcaaccattgattaaagatccctaaattttaatatgctctgactattttattcatagctaactgatcttgattcattgtacaatacaagtcacagtgtcatgtatgaataagaaattttctaaaatttatatatcttactcaatattaaatattaaaaattgaatattcatgcatatatagaatattaaactcttattaatcattagaaatatctttacagaacttttaaagcataaatcttaacaatctcccacttgtcctaaaagtaaattgggcatctccttctttcacttttaaaacacgagccccttaaatagaaattagggttgctacctttgaaaaagtcaaaaactgcccaaaaatttcgttttttgcccctagtcg

SEQ ID NO: 90225 - DNA, 1294 bp, Cannabis sativa
atatatatatatatatatccatttttttttctttttcttaaaacttcttatacatggttacactcttcctaacattgctctaaatctacagggtgagaagaaaagctttctggtatgtaagaaaaagatggctatttcccctgaattgatgtgctgcttttgtccaacaccattcaagcagtttcttgaaacagttacaaatatgaagtttgatgaagagccaaactatgccaagctgatatcatattttgatagcctgatagagccaacagtaccattaagaccaattagaatatatggtgctcttaaggtaatcaaaatatatttaatctgttttgtttgttttatgttctattccttgaagctttagtctttttaaaaatagatggggcaaaaaacgaggaaggacacctattaatatagaagaagacgagcaaccaaagaagaaagtacgattaggtagtccagcaacccattggatttctgtatacaatgcgaagcggccaatgaaacaaaggtgattactgattggatttttttttttcttctattaaattatacgattagcattgcattttttccacatttcctcctgtgttgtaagtcatttgtaattgttctttgagcaatgttaagagttatcgcaatttagtttcccatgaatgaagtttgcatcactttttctcttgctactctttaacatatatcatgtttgcctatggcatttgtccagatcatattccctttagaattaaataaaatgcgttaattttgttctaaaagtttctattttccactatgtcagggtgaacatgaatttgtataaccaattgacaaatgattattgcatatatattcacatcttacataaataaaaatgaatcaataaaaacttgcggtgcacattaatttcttgaaactagccttgtccagaaacagaattagagttatgtggctaaaagtctttttgcatagcatgaagtaaacctcttcttgctcttgtaggtatcattataatgtgacaggtgcgaggcttcatcaacatgtagacaagggaaatgaagatggattatttatcagtggcctcatctagaaacctttgggctcttattatggatgttgacactggtttttcttcgcaggtctatgagttatcgacatttttcttgcataaggtattataaagaggaccgactactatgatctattgtagattattaactacagtgatattctgtcattattaaatcatgttgctaggcttttcatagtgagtgttgctcattttatttct

SEQ ID NO: 90226 - DNA, 905 bp, Cannabis sativa
ttaatcttcttttgaaggaaattaaactatatatttttttttatattgttttcttttacttttacattttttttttctaaagtctatcatttttttttttaaatactttactaatttttcctcaatcacttcaatatactctccgcacgtgactctcttatatcatgatattttgaatacaatacatataaaaagaaatatatttcaattaatataaattagaggtattaattgataaataaaagatgtatttttcaatttaccccttcttttgtgggttacttgttatcgtcttattggatccgtattaataataatatacattttaatatgagataagttgtaaaataccttttttaatccattaatcaaaaataccctcatattatatttcattaaaatgtatctattttttgtgagtgggttgcctaatatattctcactctacacttaaaatatcgtacataatatttattaacttaaaggtattacatgaatatcatctataaaagtgggtatatttaaagaatatgaaaataaaaataaaaataaaaattaaaatatataaagtaaaatgagtatacaatgtaatttcttctttttaatatatatatatatattttttttttttaatgaataaacgaataaaagcaattttattctcaaattgaaatgtaatatatttgcaaacaaaatactagaacattcaaaattcactatactcatctcaatcatcccgttgtttagtgcgacatcattggatcagaccactgctagagcccatttaaggcatggatccctaaaagctagttctaaggcctaatacatgatactatcaccttatgcatttttaactttgttaatgctttgttttttcttaattttttttggaaggaagaagaaac

SEQ ID NO: 90227 - DNA, 574 bp, Cannabis sativa
tgacttgtctgttgagaattcactaccctcaaatgtcgattcaacaaagaaggaagatgggttaccagacatcccaaccatcattaacgaatcaaactcaaatgagaagagacaagttccaactggacccactaaactcaagtttgaaggaaggaggattgatgtaggaaatctgccacagaatgaaaatttcatttcaacatgtcatttctgcaataggaaaggtcacattcttcccaagtgctataaattgcagaattacttgaaagcaatgattaatcaaccaaatagtttccctcaaccaaataagtctcatgggcgcaaacctcgtcgagaatggaaaatgaagtctaaaccaaatccaaatgttggattggtttcaaagctatctctgtctgccttcgttgaagggcagtggtattttgacagtggatgctctcgccacatcactgggaataaaaaattgctagttagctacaaagaagaaaaagaggaatccgtgacatttggcgatggtaacaaagggcagattgctggtaaaggtgatgtcaacgtgaatggagtggctcagtta

SEQ ID NO: 90228 - DNA, 778 bp, Cannabis sativa
tgcttcatctccatatctcatttattaaattatttttcatcttctaattttttttccaaatttaatagtacattttatataagttcagtcatgcttttcgtatgtaaattaggctattaattattttggtgttttattatattatatatcgtttactgcattctgccaatagtggtattttgtcgatttatgatatataatatgatatgttgttaagttagaggtgagatttaatttatgcaagattatttaatttgtgctcataacatatatatcttccggttgtaattaatggtgtagaattacaactgcgttctgaattaatatcagtattagaataggattcgcataactacatgtctaccttaccaagatctttatctaatcattccctttcactcaccattttattatttttaattcattgacatttctatcatattctactaaactaatctttagtggtaatttaccttcctgtggatacggcgtagcccgtttactaccgcgatcgcagtgtaattaattaggcgacatcactataaaacgagaaacacacaagaaaataatatttaatttacattaaatataataattaaataatattttgacagctaaaatttctaaaaaataatgacctaacaatctctttttctttgacattttagataatcaaaataactttttttaatttttaagtacttgcaaaacaaagttagtaatatcacaaaaataaactccccttaaaagaagaccattaatacaaaaaaaaaaaaaa

SEQ ID NO: 90229 - DNA, 689 bp, Cannabis sativa
gagaccttctggtgtcaatatttcctgcataatctgaatcaacatagccagttacatctccatgtaactagtttctgcaatcaaataccagactagagtttaatgttcctttaatgtatctcattgtccacttgagtgcagaccagtgtttctctccagggttggctaaatatcttcctgtaacactcatggcatgagcaatatctagtcttgtgcacaccattgagtacattaaacttcccacacagcttgcatagaatatttgactcatgtgcttcctttcagtatatgttgttggagcttgagaaatggacagtttgaaatgttgtgctaatggtgtcaataaagctttagagttgatcattcaaaacttgtcaagcacttttttgagatagtttctttgagacaaaatgatcttgtgaggcctttctcttctgatgtcaatgcctagtattctttttgttgtctctaggtccttcattttgaattccttgcacaaaagctgcttgagcttgtcaatctcagatctttcctttccaacaacctgtatgtcatcaacatacagtagcaggtagatcttgttgtaaaatacacaaaggggtcatatttgctcttaatgtagccaatcttgttcatgtattcatcaaacttcaagttccattatcttggagcttgtttaagaccatata

SEQ ID NO: 90230 - DNA, 567 bp, Cannabis sativa
taatattaatacatttaaataatataaaatacaagtaataataagagctttaataatattagctccactgtaaagtgtcatattatttatgatgtaattaaatatctaatctcttaactttataaatagtgatattaaacgtcgctacaacctagtacctactatacctaatagtaatgctatttcttgaatgattaatgttaattacaacctattattataacttatttgtaatcattcgcatttattttgaaaaataaaaaattcctaacaattttcgttataattataatatcttttctataaaattttgattttttttagtaatttatagtattataaacaaatttaaaattttttaaacacaaatattaacctaaaatatcaaaaatatatttttaattgtaaaaattgttattaacacttttcttcctcaaattgaatgtttaactcataaaatggcaaaaactaataaaaatgatttcttgtcctctttagaaaagaataaatatatatattaataataaaaaaaaaagaattggttttatgaaaactctttggatttct

SEQ ID NO: 90231 - DNA, 543 bp, Cannabis sativa
acaataaaaatgtaaccattgaaacctcttcctttcataaaatattaaaattaatatatttttaatattgatatttataattaaatttatttcgtacccttttatgagtaatacccattaaaaattattctatatacacatatatagtacatccacctttatacattctattgaaaaaataattcatatgcatacaccattaacataatatatttaatattgttggtacagattcacttatataccctaaagttttataacgctactcacagggttccaaaatgacagattacaaaattacaactttgcccatgtttttaaatacaacaaagatcaaaactaaagaagataaaatcagttataactgaaatagttacaaaacagttacaaatattacactacggctctgccctagactagaatcacagatcagatctataaaaggataccttctctcatttttgagagaacaagtgagacaaccagaagagaacaacacagagagaacacaaggccagtttgagagagctcctccaagagtgt

SEQ ID NO: 90232 - DNA, 585 bp, Cannabis sativa
ttttgggagggtttacgtgaggatgttcacaagtttgtgcaaagctgctccatttgtcaacaaaacaaattgctcacaacctcaccagcgggtctcttgcaacccctagcactaccagcccaagtatgggacgaggttacaatggactttatagagggtcttccaaaatctgaaggatgggatgcaataatggtggtaatagatcgtctctccaaatatgcccattttatcaagctaaagcaccctttttctgctccaaattctttcatgagagaggtggttagattacatggacttccccaatctatagtttctgatagagaccgaatcttccttagcttattttggagtcatctttttaaattgcaaggaacgatcttaaaaaaaagtactgcttatcaccctcaaacggatggacaatccgaggtgttgaatcgctgccttgagacatatttacggtgtttttcatgccagcaaccaaaacaatggtccaaatggcttgcttgggctgagtactcctacaatacctcctaccattcgtcactaaagagtaccccttttcgagcattatatgggcgtgacccc

SEQ ID NO: 90233 - DNA, 962 bp, Cannabis sativa
  modified_base (42)..(53): a, c, t, g, unknown or other
tttttttttttttttgtaatcgtgtatattataattatttannnnnnnnnnnnaaattttaaaaaattcagaaaaaatttaacacgccgaaaataatgtacctgtgcattaatgtagtcctacctgtttcttcattcgagagattttttatagttgtgtacattatagttttttaagatatcctgtaaaattttaaaaaaattcaaaaaaaatttaacacgctgaaaataaagtttaaattgtctattgcatgcgtgactcttttatttggagggatgcattgttaaaatacttttgaatttattgtatttaaatttaaatgtgaatactatatttttttattttattaaaattaatataataataaagaatatttgtttagtgtaatttttagtattgtgattggagtaaaaataatttttgacaccaaatttaataatagtgaaacactaaatttagtatacttctttgatgctctgagctttaatttataaaggcaagttaattaattttccaaaataatttattgattgattttttttttttttttgagataattgatttattgattgattgaaatccctttttttatacttagttataacaagtcaccatgttaccgcgttattaatttttgtaataactatcaagtaatacttgtagaaaattagtctacacatacattaaaccgaagtaataaaaaaatagtttcttatataattatttcttgtattaattaaagaaatagttatataaaatacataaaaaatttacatttttatgttcaagattttttttatattttaacagtattttataaaaatacaaaaaattaacataaaaataataataaataatattaaaaacatcaaaacaacagaaaaataatatacaaataacaataaaataataaaattacaacataaaaatatactaaaatactgtattttatataaataaaa

SEQ ID NO: 90234 - DNA, 511 bp, Cannabis sativa
ttattttttttttttttgcatttgcagcggcgaaattcaaattcttcaaattagcaaaaatgaagtgaattacgtcgtcttcaacctgaacaggcctcagttttctacctaaaggggatgacctttcagttttcttttgtgtttgtttcttaattttaggttttgagttttaattaatgatttattttaattgaatttaattaaaatatgaataataaatattaattattttattttgattttaaattatttttgttttatttttaatttttaaattaatttacaaataaaaattaaaaattaaatgatccggactaatcacatagtaacacgtggacactaacctggtatataacggtcaagtacctacggaagttccatactagtgacgaaaggtatttttaccgccaaaaatacaacttaggtatttatctgctactcggtataaaacttaggtccataattttaagaactcgatagagaatataaatcattcgtttctctttagtct

SEQ ID NO: 90235 - DNA, 593 bp, Cannabis sativa
ttgaatttaataacgcgcaaaaaataaaattcaaatagcttattaaaaaaataaataattagcaaattaatgaagctaataatgacaacgatgaaagcgagaacattatagagcgtgacttaaaatttgaatatttattagtaaatatttaaattttaatattttttttatttaattatctataaaatattattaaaacattacataaaagtaatgaaaattataaaaataatacatatagtttagcaattatttattttttaagaattaattatagaattttattaatgacaatcaacaaaaataatagcctacaatccaatatcttctctgttagagacacgaccagaaatagaattaaaaaaacgagtcagataattaactgcctaattttcgatcgcttgacaaaagaactataataaaattagaagaaaaaaaattacaacatcacaattaaccttaagaatacctatattctgtttcatccatcacttaaaagatacaacagtagaaattgttgcagcaggttcatttaacctcgtaacttgagctctcaactattgtataaagtatgtaattacacttctaacaac

SEQ ID NO: 90236 - DNA, 564 bp, Cannabis sativa
attcccttttagctcagtccaagtcgttgacatttgaagttgatttggagctaagccaattgatccaagctatatctccttattgctatttgtcacttaagttgctaaagttgttcacacgcacaatttccaaaagatatcaattatcttcacttggtcaataccaattcaataacacaattaattttaaatattttgttttgaaagcaagaacaacgattatggagaaaaaaaatctgatattgcattaaccaaatcaaatcaatttaattctatttatttagaatttcattgagagatttttacctaccatcttgagtgagtgagattttataaataggttgatattgtaaaagctaagggaccttagagtgtgtaatttttcattggcaaaaattatagaaaattttagtcttattttatctatctcttcacatattttctctttacattattgtgagaatgactagcatttttggctagtttcctagataaggtaaaggatgatcttatatgtgaggtaatatttatttgtgtcaagattcaccaagtgcttaaagttta

SEQ ID NO: 90237 - DNA, 678 bp, Cannabis sativa
taatttttatcggttttttcgttttggtttgggcgagttattcggtttgggcggtttacgaatttttttgtacagccctatgttgaggatgggattctgtgggtgtttggtggagctagtaatggagagtgtgaccacggttcggtataatattcagcatggtggagaaatatgggtcctattattttttactaggggtattcgataaggggatcttatatctcttcattatcttcactgagggtcttactaataagtataattatatcaaaaggtgaggttaattaaaacttttcaatttgaataaacacaaaattttcattaaaggcaattactaatctttacggggatcctttgttatcaaaatatttacaaccagtttaacagtgtttttacagcgtaagtttatatttcaaaatacaatcaaaatggagcaccctgttcactgggccgtaacacgcggctgatatgtacattgctgctacgatcttcaaactcatggctacccaacattggcctttcctttacctgcatcatacaacacccgtgagtcacagagactcagtaagaaaagtgaataaacagtaatcaatatatcatttatctattcattctcacattatcaaacttaaacaactacataatatcataattacacaatcctggtacttcataaag

SEQ ID NO: 90238 - DNA, 739 bp, Cannabis sativa
  modified_base (136)..(138): a, c, t, g, unknown or other
  modified_base (186)..(200): a, c, t, g, unknown or other
aactccaacaatgacaagaaaaagaagccatggtgtaattgttggggattgttttatcaggatctagatttactgtcatgtatgttgtttaactttctaaacaagaatttataaaacaatagaatttaaacacatnnnaagtttaagaaaccttacattgattgcagctgaattaaatgactcctnnnnnnnnnnnnnnnaacccttgtatcctttctatcacagagtattatcaagatctgagcccaattctcattcagttgttggattcttcacagccttacacactatgattgagtactaacttgctatatgtgggtatgtactcaatcactaaggctcaaaattttctgaagaacacttaagggatttcgaaatagaagaaaaagaattaagaaagaggtctcaaaactctctagttgtctgacaaattgtaaactaggtaatgagtcattagttggattatgagaccatcttattgttgggttttgtgccctacataaaactcatttcaatataatcagatttactaataaatataagattggaaattatttttatgttacatggtgaacatgatttatttaatgattatgtttaatgtatagattttattaagtccagaaaatatataactatatatttattcatgattatagtgtcgccagcatagtgggatataatcatgattatatgttcaaaaatttaattctcataatttgttagttcactggattta

SEQ ID NO: 90239 - DNA, 1181 bp, Cannabis sativa
aagacttttaattctaattgacttattaaatatagtctacaagatgatattatcctagacactgtggggacaatgagcctatgtaaccaagctcccaataagtaaatctaaaatttaccaagtaaagttcttatcttataaattcatcctgactccactatagatttagaattacactcctgattacatagaatgctctatatgctaaatatatagagatactatgaattatctattgttacaatctaaataaataaatgtattgtgggccaatgaacatgtggctgactctcaaactgttacgtattttggtaaaaaaaaatatgggcaatatttaccccccaatttccatcttgcaattttgtaagttgggacttgttattacttgaccctttagtttcctctcggaggggttgtgttatgatgttatggttatacaaagcacgcatgtttgtaagaacatgccacatgctctgatgtggatggtttacatatgcttttttttctattagggtttatgccctgaaaagtcagtaaaaatatttttgattattaaataaaaagttatatatgtgtaaatgttaaattgttaatatttattattaaataatttatattaaatatcgaaaaatttcttattcataaatgaggttgtggcttgtagttgtacaaataactaagaccacttaactatgaataaaatagtcggaaatatattaaagttatggattctttaatcaatagttgttagtacagttcactgatgcccgttctttggtgcaagtaatcttggataagactatagagacatcgaagtgaaggtattgtatataatagagagtatatatgacaaggatcgatatgaataaatttattaacatgtcgtttatcataaagacctaattcataacataacaatgatcaatagtagatcgacctaaatcttgagttatcatgaactcctgttcatgttattagtttctttgattcacccgttaaagtttctcaaagaagatgattcttacaacttttattttgagaatccaatagcatggatggctataatcatgatgtacaattatgaaattttgactttcctaacggatcgaatgttggttccctttaagtgttaattctataactggaatattgtacacaaattgagatgagatcttgaatta

SEQ ID NO: 90240 - DNA, 652 bp, Cannabis sativa
cttttaaaactctttgtttgagattaagagttgaaaaatgatgtaatattaagaaaattgttcgaattcagagtgatcatggtaaggagtttgataactcagtttatgatggcttttgttagtctacagtatacacatatctacaatagtattgagctatgcaatgtacttatgttaattataaattataaataatgaaataaaacaatatgtaattttgatgaaaagagataagagagggagtgatacgcaacataatttatttatatttatatggaatttcgaagaaaagtacaagaaaattattatctttttgaacataaatatcttaactctatgaaatatatatttgttatttatagggaaaatatgagggaatcagactcagactttagtgcgttaacaaatgaatcaattaaatctcgaaattgtaggaatttgttgtagtagaccaattctttagggatattatattatataacttcttggatcataaccactcacaaccctattggggtgcctataaggttttggaggagtaagctcttttgttactttggctagctagtagcttccctccaagtgattcacatgttaagatttgttacaaatgagaattcagctacttagctgagaattattacaagaacta

SEQ ID NO: 90241 - DNA, 1127 bp, Cannabis sativa
  modified_base (459)..(471): a, c, t, g, unknown or other
tgtaagtatttaagtatttatgtaataatgtaataaaaataataaaaattataaaaattccattccattttgtatttttggtgtaaaaatttctaagttatattttagaatttcgataagtatctagtcattaggtataaattattatccacgtgtcattttttttatgggataagttgaagagtatctttttttttgtatccattaactaaaaatactctcatattatattttattaaaatatatactcacttttataagtgatatgcccaatatactctcattttctacttaaatctagcatataatttacattaacctaaagggtttaatagggacatcatctataaaagtgattatattttaaagaatgtgaaaataaaagtaaaaattaaaacaagtaaaataaagtgggtatacaatgcaattttatctttttttttattggtatatttaaannnnnnnnnnnnnaaaaataaaaatttaataacttgaccagagactgtaatgtgaccattgacttgacacttaacggctaggtgcctacagaacatttgaaaatataacttgagtattattaccacaaaaaattaaatttagagtatttatctgtacaaagaattaaaattaaatatttatgctgcaaattactctaaaatatatatcttctttattaaatgatatgtaagtgtggaccattcattgattcaacatgcatgtgattttgtccatttccttttccttacctttcatcttttttaatagagcattgctattagacaccagtggtgcctaacacctttttgacatgtcgcgttgcgattgactagcgatactccttaaaaactattatattaaattatatgggacccaatacttaattggaccactagcgatattaacacataggagggtgctaggcaccactggggccttttagtatttctctttttaatagagcaaatgttctatacctttcctttcattgattgcatgatgcaggtgttggacaattgttgtgctctaatacaaatatatcaaaccaacaagattacaactcaatgacaaataatacaaatgacaaaaatatagattaaataatattacaacactaaacaaaatataca

SEQ ID NO: 90242 - DNA, 672 bp, Cannabis sativa
tccagagtatgaggactaggaacagcaagacaaccttcttgtctccttggcttctttcttctatgtctgagaaaaccaccaataggatgatcggatgtgataccacggcacaaatctgagaacaacttacagagtattatacggccttaaatgttgcaaacacaagtctttacaagactcaattgagaaacacaaagatgacagtgtcactgaatgattacctgctcaagatcaaaggtttggtggatcgccttgctacgatcggtcatcgacaaaccactcaagatcacatcgaagctatattcaatggattaccagctgagtatgatgtatttgttacatcgattacaacaagaaaagatctctatagtgtggcagaaattgaagcattgttgatggctcaatcggttcgaattgagaagaatgccaagaatcttgacatttctaaagctgaagccaatctctctcaagctcgaaacaatggctttggcacttatgggcgttctaactttcctgctcctacggttccacctgggttcaacggctacaactctggttttaataaaaattttcctaatttcagcaaccaaggacaccaatatcagtattctatggcacgtggtggtccccctcctcatcgtggtggttctgcacctaacactacatctagcc

SEQ ID NO: 90243 - DNA, 946 bp, Cannabis sativa
atttcgatcctatattcatattgtgtatatgttcatttattccgcatgttatatacatatatatgtttcagtttatacataataaatgtctaacattgtcatcacaaatcacttgacacgaggcaactagatgttgataatgcattcttaaatggagacttacatgagaaaatttacatggtccaaccaccaagttttgtaaatgaacaatttaaaattcaacccatgtttgcaagctgtctaaggccttatatgaattaaaagaggcccgtagagcatggtttgataagctatatgtagtccttttcaatcttgaattttcctctgcttaaactgatcattcattgtttataaaatttttttctactagttgtttgtatgttttaatttatatggatgacatattaataaatggtataattattcttctcaagtctccaatattttcactgctttgagcacaaagttttccgttaaagaccttgacaatttaaactactttcttggcatccaagttgttccaactgctactggtctcacgttgtcttagcaaaagtatcttcaagacttactttgtgatgctcaaatgcaaggtgtcaaaataaagaattctccaatgtattcagggtagagattatcttaatatggaagtgatccagtaacaatccattgtaggtactctacagtatgcctcaatcatttgaccaaacattgcctttagtatgaataaggtgtaggcagttcatacacaatcctctccaatcacactagatttctatcaaacgaatactaagatacttggctggaacattggactatggactgcatctcaccaatgccttctcttttgatcttcaagcttattgtgatgctgactggtatgacgacctagatgacaaaagatcaacaattggtttctgcatttttttggctccaatcttattac

SEQ ID NO: 90244 - DNA, 980 bp, Cannabis sativa
tatttcctcttgatctttgtagtctttcatattaattaaaatgtagtatcgactctttgctaccgtaaatgtaggcaaataaaatttgttgaactacgtaaatttgtgtcttattttttaaagcaatatatatatttatatatataatatatgatgtatgtgtatatttaaagtaatatatattcatttataaaatgtttagttagaaccctaaacacagggtacactcataatgcaaggtttgatgatgcattggaagtttgtcaagaaatagagtctcttaggcaaagacctaatgttggaacaatggctaactctcgcatctagtgttgtaaatatgaggcgagattctagacacgacacgagctcggaaagcacgagcatgatcagatatgaaaaaatatgggtttggacacgatatgatacgtgctataaattgacacgacacgtaagcacgaatagactagtccgaaagacacagtatgtgacaagtccaaaaagtatgatacgaaacattaaaaactcaataatttaataattataataataatatgtgtatttatcaattataaataagataaaataacaataaaacttaaacataacaataaatattataattgtataattaaaactattgaatttttttttaaaaaaaaataattataaagtaaaaccaaaactatatattaatttatttatagagtgatacaaaaatttgaaatttcataagtaaatatttaaattttaataattttaattttttttatgtgtgtaaaatattgttgaaaaattatataaatataattaaaactataaatatacatatattttaataattaactctttaattgttaaaaaaatatgaaaaagtaaagcacggatttaagctcggatataaaaactggctggcacgattaaagcacgacacgaaagcatcgagttttgtattgtgtttgtgcctaccctttaaaaattat

SEQ ID NO: 90245 - DNA, 2906 bp, Cannabis sativa
atatctacccgtcgaccaagtgaacttgtcgtgaattgagtgattgaataggccttgaattcctttctgcaaactgcaaaatcaaattatgtacatatttgttagataaaactagctagtgtgattgttaatttctttattaaagcaaattaaatacttttttttttataacaaatatttttttgtcacaatacatgcatctatattatatctatacatccatgtatacaaattttttgtcgaatattaatatgcttacatcgtgaacagccaatcgaagttgatgtacttgatccgctgaaattgtcctcaactgaaatgtttaaaattactttcattaggtggagtttagaaacaaattctcaacaatgaagaaaaccagagacacactatacatttattaatagtcaatatatatgtatttattgtgtgtactttaattaatttataatgcatgcaatggcaataaatttcagaattagatcataatttaatagttagttttagtttgattgtttttttttttttgttaaaaaaaaaagatggtataattttctcatacgtacaaagctttttctcttcataaaaattgtttggctgagttttcaatttttagttttcaaaattcattataaaaaataatttttcttattttaaaaagtcaattgtgtttgactaaaattttcaaaaaattgcttttagtaaaattactaaagaaaattctactccacaccacaccataacacgaactcaaccccaccacttatatcgcgataaacctggctctgacttcgatcccgacttcgactctactttggtaccggattccaaactcagacacagaccctagtatcagattccgaatccgaacaataagttttgaaattcggattcggaccttggacccgacatcgacctcgaaccaggagcgtatgtaaaatatatacacatatatatgttacacaaagaaataaaaattatttttgaaaaaaggaaaccattttaatgttttctaatttttagtttttcttttatttttttaacttagttttcaaaaaattaaatttaaaatttttgccaaatataattaagcaagatgaatattatattgtgtatattgaagttgagtagagtgattattaagaattaattaattacctttttgcttaagatccaaacaacaccttcggtacaaggaggaattgtaagagagcctaagtatctataatacttcttctcttcaagcttgatctctgatggatcaattacccccaaatgtttttcttcattagtatcagccattgctgttatatctccaattaactgatcaaaaggaacaatattaataataatttaaggacaatttttattaacctaaaaatatttggaggccacaatatggtagtagtagtaatagtttgggtgataaaaatcctatttttttttttatttaataagacaaaaatcctatatattctacaatttctttattataaattaattaacagataaacaattgtaataattaccttggataggaaaagatcaggggtaccaatattgaagagaacaccaattacagcaattttgttatcttggcttatgtgaaccatatgcatctcagtagcatacctattcaatcacataatgttgccttttattatttttaaaagatcactttcttgagtcttcaatagaaatatatattaaatataaatttgtcaataatataaatcagtttatcattctgattaatttacaatatataaatatattaatggtgtgtagaagaccttgtgccattaagggtgtgttcagaaggtgagtgccaatgacattgatggaggaaatacttggtgccatcaacaatgattgaccctgctttacctatatcccattggacctacataaacaataaatatataacataaattaataacaaaaattcaaaattcatagctcattattaatttaataattaagaaaaaattaaaatagaacagaaagaataacaattatagatataattaattctaaatattttgttagtattatttatttaaaattaattatatagagtaggttggtaggtatattactaaccgaaatatcatggcctctatttttaagggtggcattagaagggatgtaattttctatgaggtcctgttttccaggctgtgaaacaattttgaccctttgattagataaatcaatgggagactgcattgctccatttgtacaggcagaccattctttcttaatctctccccaactatttgggccctttgcaccatcttttgcataatcaaactccttctcatcctctgcattaattattaataattaattccatataaattatatatagataattaattaagccagcaatattaaatatgtatacattatttatatgtacacgtaccaacttcatcatcatgttgagctgtggctgatctaataatgattgagaatgagaaagtaatcacaaagagcagaaaaaagctgggtttgctttgatatttcttcatgttttaatctatggtggcgcgctagcttggagtaagaaatatggtactcctaggatgaaataatttgtatataaatacatggtatgtagaaaaagccataattaatacgggacacatagattttggggacatgataaaaatagtgtggaaattttaaccctataacttaagtttcatggattcaaagtcttgtaaatgaataggagaggctaagttaagaaaggacaggttgtttttgcaattatatatagcaacataatattttatgaaactttaaggaaagggatgagtaggtggcgtttggttggaggtaatgaaatagaatggaaaagaaagaaaataattttaattccattcttttgtttggttgca

SEQ ID NO: 90246 - DNA, 3983 bp, Cannabis sativa
atcagcgtggcaagaagacgatagtgacatagatgagcatatgaatatcagttcctcacatgagccattaacaaaaattggtaaaactcccaaaccactgcaaagatacccatttatgtttatgtcgtgtttgttttatgtaaataatgaagtggacatgtgactcttgaaaaattcagtccattgtttcgtgtgccttgaccggtgactacttacaagaccaatagagactccttttcgtaacaaaatgacaactaacgacaaggaaccattcagacgacagagattcctctggccatctaaaaattttgtctgtttgtagttatatatatttatatatataaaaaaaagagtttggattgtcagagattccctatctattaaaagatgtaatttaaatcattaatatttttttgtctataggaattaaggtttgtaacgtttttctatttgtaggggggctatatatatggcctctcattttcagttaaaggcacaagttttcaaataataaaaatcttatctatctttccaaaaatgtctttctaaatttcctctccaggctattttttttactaggatagatcataagtatattataattagttcaaagattactacctagaagatatataaaagcaaagtctctatagtaagtcaatgttaggaaaatcattgaggttgattctaactatattgattagcgttatatttctttctatatgcatacaactcatatccctgcagcccaaacagtatcagagcacaggtagaaaaatgaatttatgaattatattttagaaaaattaaggaaaacattttcttccattttctccctcatcaatgtttgtgtttctcaatccgacaatctttgcttctaccttgttacattcgctccatcttaccaaaacaatgcttctatgtattgtgaaaattgagtttgattaagttaaccaactttatattggcttaatcgcatcaatgacttcatttttttaagaatttttggacttgaaacctggatctgtccaggtgcaaatgagcattgtactaattaaacgaatgttcaagtgagttaattttgttcaactgtatattctcgaaattgagtttggtgacaaattttgtgccaacaattttcgggtttggaacttagatcctattccgagtagaaatgagcattctagtacaaaagttatagctatacaatattcaattgcactaacatcaagatgaatatcttattaattgatatgaaaagtgaagtcatcttcacattcatgtaaatttgaactctcttaatcattttccaatgataaatgaattaatatatgttcgtattattgaccctattatggattgacacgtagcttaccaacaactctacatcacaagctagtaagctactcattatcgaactctcttagacatcaagacaaactgaatatcaaactcatgacgaactaaacttaataaagaaatggagaaaggcaagtaaagttggactcatcagaaacatgcatctaaagtaaatccaaatgggtacgtcatatctattactttaaaaccaaatcatacaacatcaacaaccgctatttccatatgtacattaacccaaataaaattaatgaaacttgggaaaaccaaagagagtttgttttgaaggagttcttctaacttctaagtcaacacataaattagccaagcatgttaattgcagaaaacttagaagcaactaaagtagacaatggagaaagatccattaaagaagtttattactatcttcatcactctttttagtccagcatcataatctgtgcatcacaagacaacattaaagaaaaatagaaacttatgcatacttgtcctataataaaaaggcaaactcaatgtccttccaagtcacaacaagtctagtcatgtgaattaaaaattgtaccaccacaacaataaggatgaaagtttagaagtaaagtgagctccagataaaaattactccaccaatcagagcatatcattgaggtctatcagtcatgaactgtacatcacctaaactggaaatgacatccttaaaaaaacatgtaagaacataaaaacaatgaagatcctgctggtttgcacttgatgatatagatcgagtattcactgcaaacgggaactaaaacccgatgagggagatgattaatttgtttatgacagtatcatgagagtgtaacaaagctgagactgctcatcaaaattataaaattgaaagatatagacaatcaatgcaaatgcaagcgacaaattttgatgcctcaaagtaagaaaaagtcaagtagacaaattcaccaggaattcctctttgcatctgggtaataattgaggtaccaacgtacaaacttcttcaaaccagtctccaaatcagtggaaggcttgtaaccgagttccctgtacgctaaacttatattggcatgagtaaaagtcacatctccattccttggcatggacaagatcttcttcttagccttaaccttcaaaagcttctccaatattctcaccagttgtgtcactggcacaggtgaagtattcccaagattgaaaatcctaaactgagcattgcccttcttctttcccccagttccagtgcttttcttagccgtgtccaaggctgctaaacaaccctttacaatatcatcgatgtaggtgaaatctctggcaaccgttccatgattaggcgcttcaaagattgagattgtcttcctcttgagaatattcttagtgaagaagaagtaagccatatcaggacgaccccatggtccgtacacagtgaaaaacctcaacccagtaatagaaagtccgtatatatgattgtaagtatgagcaatctcttcaccagccttcttagtcgccgcataaagactcgccggttggtccgtacgatccctttctgaaaagggtaccttagaattgagcccatagacagaactagacgaagcccaaacgatcgccggctgaggattcgccgccttgcagacttccaaaaggttcacaaacccagcaatgttgctatgaatataagacccgggattttgcattgcgtacctaactccagcctgagctgctaaatgcatcacatgggtaaagggaaccacctcgaaaagcttcgaaataagcaaagtgttattaatatctccctctaccacgaaaatcccagtacgctccaaaagcttctgacgatcgcgcttgagacccgtatcgtagtagtcattgaaattgtcaagcccaagaaccgcatctccacgccgcttaagagcgatcgacacgtgtgtgcccacaaacccagcggcaccggtgaccagaaccgttaacccagatttcgaatgcttctgggtcgatcgagtaacgcgtcgttcccactccttgccgccccaagagacaccgagggctcgacgaggcgaatgagaaggcgaaggcgaagagcaaaggtagtatattagtataaaagcaaggaagaaagaagaccagagagtgagtttagaaatggatgtgtgaaatcggagacggtgaatgtatgacggagacttttccgacttaaactttcccggcgtggatggcaacacgctatcaaggtgtgagattggctttaactgggacatttgccaattttactgaaattcccaatttttctttccacaaaaaacaattgggagttagggtttgacttcttggattgacaattgaaatgggttggccttaaatttgttcagattggtctaattcgcaatctgaatggaagggttttgaacgtttggtaggagagaaaatggaaaaggattcttttcctgtctctggttaggaattaatggagggaaagaggtttttggttttgggtactatctatgattataagatccaatgttgttcttcaatgaaagttcactgaaaaagaaaagaaaaaaaccaatattgttaaaaaaaaaaaatctttttgttttcattgg

SEQ ID NO: 90247 - DNA, 874 bp, Cannabis sativa
acgatccaagtgtttgtagaacattgaaattgaatatgcatgtagggaaggtaattagaaatagaatatgatattgtcactacaaaaaaatttaattttagttacaacaaaacttgtgactaaaaaaaaattgtaactaattataaattatcattctgtggctaaaaaatttatggctaaaggtattagttacaaaaattacaatttgttgtgactaaatctatttttagtgactaaaactaaattagtgacaacttgtaactaaacactatattttagtcacaagtacgtgacattttattgtgactaaaattcacatttagtcataaaaaattatgtcgtgactaaaaagttttcactaaaagtagcagttttttgtagtgtgtaaagagcattgctataattaaacactatggtgcacacaaatattatatataaacataaagaaaaaaattcggaagataaatattgttcataaaattaatcttatcataactattaataaagaatcaagtgactaaaatagaaaccacaaatttaaattcatagtattaacatccatagaattacgattatttatgaaattaaaaaataataataataacaaatgtgttgtttgtgagagttaagggacggtcttgcactacaaaaaactgtaacttttaattacaattttttagtcacaccataatttttttgtagctaaacttttaatcacaacaaaatagtactttgactaaaacatatatagtatttcgttacaatttatcactaatttagttttaatcaaaataagtattatgactaaaaatacattgttgtgactaataccttaagtcacggaccttttagtcacaatataagaataataatt

SEQ ID NO: 90248 - DNA, 540 bp, Cannabis sativa
aagaagaggtgctgctgaggctagaggataattatcaggtatcttgaagcagtatctatagagacagagatcaaagattattacccaaccaattttggtgtcagcatagattattattattattatgttaagaataaataggattaatcctccgaactatgacccttgtagatttttgtttttctctgttgcgaaattttttcttttaactataaaaattgttgcaaatatttccctacagttgccttctgctcatttcgttaaataatttgttgatataacagtaacacaacgttaatttagtcctactcaagagtccagacaaaaaataaatacataaatagcagtttaacgatgaattatgagagtatgcatgtgttttattgaaagctataattaaattttaagtattaaagttattaaatactgcaccaataacttatagcaacataagaaaataattttaaaagatgagaaaaatgcaactagagagtgatatttgtaaccataattcaggtacctttgatggacaacaatgaa

SEQ ID NO: 90249 - DNA, 909 bp, Cannabis sativa
  modified_base (41)..(51): a, c, t, g, unknown or other
ttattacattcctattcctattcctattcccattctcattnnnnnnnnnnnattttcattcctcccaaccaaaggcctcctaagttcaccattaatgtgtaatgaaaacagtattccaaccccatcatcaaccaaccatagagtcaagtaacaatcaattttttattagtggaaatttacctaattattattagacagtgtgaattcgatgtttatagtgtcgttcttaacaatttcaaatgttttattcgtttactctcaaaacatattattcattcaaatgttgtaaagtttttaatctttattcttaggaatgagaacaaagttgtctcatgcacccttctctaacttcttactaatcaagatctagttttgattatgttcgtctcccctctagaaggtttaaattttgatttgaaagtaggagtttatggactgttaaataagaacaactctttatattttaattttcaaaaaagttattaacttcaaaagtcttttttttcctttgactcacaaaagttaaccctttactaaaagaaagaagatcgtgtaacaattagtttcttaatgttgataatttattaatcttctttcttttcttttgttggtatttcttttatgttgatgagcaatatgcctctgaccaataataatatatcataaccaccattaattagagtagacagtagtggatgtttcatcatcatcttcttcatgatctttctatcatttcgagttttgaagattatataaatatatacattgggaattgtgttttgcattgtgctaattattttttttatagaatatatccttattttgttttaaagaaaaccttccatccaaaaagcttgagaattgctaaaaagcactactggtgcttagcaccctcctcgttatcatacc

SEQ ID NO: 90250 - DNA, 879 bp, Cannabis sativa
aaataagaaggctccctaaagtgaccaagtacctactgagcggcttatcaggatcagagatggtcgtaaagaggttgttcatccttccgtccaggtggaaggaaaggaaaaagctattgtggttgagtaggaagaagaggactcttctgatgaggatgcttcttctttacttattcaagagggtgcttctgtacatgtgcagggtagacaatttttacatagctttgtttgtccttacttgatttatgttttctaacatatacttcctttatttttttgtacaatcatgtcactgaggatgttgcacgcattgaagaagtggtcaggtgatgcctctggccaaaagtgtaatgatcgcataattagattatagattagtaaaggcaattagcattaattattgatatttaataattatacacgagtttatatttattgtggtcccattttcaaaaatgggaattagagttgtaaaatctaaattcttaagattttattaaactgtaagtgtattatttatgttgtatgcaaaattttacagtttttatatttttgctcggcgacgatggaaaatgtgacgaatgaccaatttagtcacatgggttagtttagtaattttttatttagcggggtattcataagttgatatttggaatattgggattagacggggttatggtgttaaatcattttacccctaagccattttaccatttaagaatttaagtgtgggtattttagtcattttggttttgaggtgtaggtggctttctcttttgttgttagcttgccaccaaaagaaataagataatttaaaattatctttagtttgtaaattaagtgataatcaaagaaagacaaaattaaaaaaaaaaaaaa

SEQ ID NO: 90251 - DNA, 668 bp, Cannabis sativa
tagccgcaaagggcatatttttttatgtttttacattattttagcaggaaaccctaactttgtattctgagtttctcttgaagaagaggaaaacttagaataatattaacagagcttcgactatttaggttgtgatccccccttcgtatggaaatagaagggtatttataggctaagggtgggtatagacatgtccatgacctgcctagggtttttgcaaaaagtccagtaatggagtaaaatacatgcaaaaaagagctgattgttagcccctaggaaggatttgtgccttgcgttgaagcaactggacaatagaggaccactttacatagtggacgcatgtggccaaaaggtttaacatttaaaagcaaatgcctggaaaaaaggtgtgtgaggtgcgtgcactaccatgtccttgtataggggacaagatctgattctgtgtcagaaaaaatataatcgtcgttgggcgatccaggtttgtatccaaggtagatgtccgcgactctttttggcaatcagcgttcgcgataggcccctcgagtactcgttcgggtatcgtttgggaaaacttttgagtttgggccactccgaattctagagtggttatatgtcttccgtgaccgggaagctaaagtaaggcgaggtaaacttctgcatacctctta

SEQ ID NO: 90252 - DNA, 971 bp, Cannabis sativa
caaaatacctcgctgataaaaggttgttatgtcgatgaaacaacttaattttgccagcaaagagtgctaaaagccaagcgcaaacatttggcagttttttttgcttttgtcggcattataatgcgctgacaaaagtctcaaaaaaatagagaaaagtttctcgcgtggtagaaaatatgccaaaaagtatgcgggaaaatacttttaccggcgtaattaagctcgccggcaaaagtaaaacagtatatgaaacacacacatctagtgtttcattttattttatttcttaaacctttgtcagcctgctgaattacgccggcaaaaggtgaccttgatgaaaacccacaaaactctcttcgatctttttctttctatttatttccttctctctttctctccttctctattcccaatcccaaacacatcaccacctccttcaaacacctttgatcacctcctccaccaccgccaatcccaccactactcttcttgttgaaattttatgtcctaaataaaactcatctcaaagtaatcttattgactattaaagaatgatatagaagtgaaactttatattacttggttcacatgattattttatgattatagttttaatatataaattctattaaatccaaaatttatggatagtcatgattattgtattatctacacagtaaaaaataatcatgatcataagcttcaaacattaagtctcatgatatatcagtgcacatgatttaatcgacgtgataatcatcgattagtttacttacacttggataaatggaatatattttgtaaggtattagtaaagtaagctaagattggatgtattggctatatatcggactggactgatatttacaatagaaaagatatcgtaaatttaccgtaatattttttctaagtaaatctctaatagttgatcttagatcaatgatcttaatcctgagatgattgggttctgg

SEQ ID NO: 90253 - DNA, 618 bp, Cannabis sativa
ttttaatagctttaattttgttaaaaatcctaaataattataatatataccattatgaattttgaaagatggttttagaaatcaaataggcaaaaattcaattttctttctcataaaaaaaaaagtcttgtctttttacatggtaatggtttgttcctatattgtattttgaagtgttgagtcatcacactgttgttgtttttgttaccaattttcataacttgtgttcggtttatcatggttcctatgaatcggtttaatcctacattagaagaatagtatgatgtgttaaatatagaggatgatgaggatgaggggacactatatgatgagaggaagatttatcagatatcgatgataggtggcgccttgttggtctcttccttacaaaaagatcaattgattttcaagcaatgcagaataagatggcagtgttatggcagccaggtcaaggtgtctacataaaagaactggagaataatctatacctatttcaattctaccatgagatggagtaatggaagggagtccgtagacatttgatcatgtttcactgatttttgaacgccttaaacaaggagacaatctgtgataagttgttctaaacaagttggattt

SEQ ID NO: 90254 - DNA, 618 bp, Cannabis sativa
tagttcaagccccacatatatttttgctaaaagaaaaattatcttcaaccgttagatttttagtctgtttttattattattattaaatatgttgtaactatttaagatattctatataattttgaaaaattttaacaaaattattttgacaaaaatataattcaaacaattacacttgaatctctaatctctattcatatatgaatattgtaaattaaacttaaaaattatcctatataccaaaataacatgcacctagaataaaataaattttgaacgtgcctacataatattctactaatatgcgattcgattcagaacttactatataatgttataagcatgtgatacgattatacataagaaaaatttaaatttttccagcaaaagaataaacatgattttctccatgtttataagtaggataaaaatgtgattttatgtaagcttttttcgattatatttcatgccccaatcaaattatgcacatctaatctacaatgtatgattatgcgtgtatatttatatttacatacagagcttcactaacaatgctattcaatcaagacagacttgactgctcttttttcaaagatgatgatgcctaataaaattcaa

SEQ ID NO: 90255 - DNA, 513 bp, Cannabis sativa
tttaataattgacttgttaattaattgggatttttacaccacttattaaaatttctcatttttttttattgtgaggcgaatatttttttcaaaatattatatgtttttcaaaattattatgtagtgtgtttagtttttaatgttattctactgttattttttaattattgcattgttgtttttaattattcttttttattgttttacggttgttttataaaaaaataatattttttgtaaaaatttctatgtagcagtaaaattgtaaacttttgctcaaaatataatatttttataaaaaccccaattaaattcaatgttttctttttcttgagtacttgcccattgggccatgatagcccaatttagagggacaagaaggtgatctaataaatccaactctaagaaacttcattcaatgaaggcccaccaataatatttgggaaacatattttggaaaagagagcaatttattccccccataatgttgcagttaaagtcctcaactttttt

SEQ ID NO: 90256 - DNA, 675 bp, Cannabis sativa
gtgcaatatatatagtagtttaattaaaaaagatttatgtatataataatgtgtgagatcataattataatattattgaaaatgttatattattagagtatttttagaaataaatgtgcgaaaaatgaaatagaaaagctgatgagagtgctctaagtaatttgtgtataattataacgtgtgaaataaattacttaaattttgatttcaaaaacgtaattttttataaaaaaatcatacaatacaataccaaataatatatgaaaaatatctagcttaacttccgattacaaataacatataaattataaagtaatttgcggtgtaaataattaaacttaacttccgattacaaataaatatctaagcttaatttttaagataataatatctaaattatatttttagaaagtatcaagtcaatgaccacatggacgttcctggttggtccaagttattaaaattttattttttatttataaattcatttaaatataccataaaaaaataaaacatgaatattcactactataaaagttacaaaaatacaacttattgcaattattcttaattatgactattcaattataaaaaacacgaggatactccattacacctctttttctcattttaaggcagtattgtagacacccccaattgaataatatactaaat

SEQ ID NO: 90257 - DNA, 1305 bp, Cannabis sativa
ttcccgagcagactgctggtttcctcttagacaccctaccccattcttggttgggaacttcaggcacgagtgaaataatgacgtgaaaacctttaagtcatacaaggctggtcgaccaagcattacgttaaaagctgaaggaacatctaatatcaggaactgtgccataatagtcatgctcatcggagcttgtccaacagtgaggggtaggcgaatttttcctagaggttcgactccttgactggagaaaccatagacaggctgggggcatggggttagatccttgagttggaatcccatcttttcataagcagttttgaacaagatgttggaagaggcttcattatcgatcatggttttggctacaatcgtattggctatctggacttccacgaccagcgggtcgttgtgcggaaacctaattttgatagcatcttcatcgttgaaggctatggtcggctctcctgctcgtggaactttgggcttcctttcttccatggtcaggataacctcttcttacttgtgctgcacttttcgggcatacctctcccgagctttgcccgagtctccagcaatgtgtgggcctccaacaattacttgcaaatgcccatttaccggtggaggcagcaaatcttggttattgtcgtctttttgaccctgattggtcttaacctacttctacaggtgtggattgtttttccttattatgaattcaatttcccgcttcaagttgttgcattcgttagtgtcgtggtcgtagtctctgtggaaccgataaaactttgtcatgtccctcttgctggcatctttcttcatgggcccgtaattcttatacgggccaacaattgagttgccatgtacacactttctatatcttcaatcagaatagtgaatgcagtgtatttggcatggttctcccgcggagcttgttcaaatttgccagtgaacttttctttcttcccattcctttgcttgtggttgttgttggaaggattatcacttgagcccgaattacttgggtagtggggaagttgggcggatgttccagtaggaggagcctttgacttgctaggcttttgctcaccttccgctcgttgaatggcttcttcgagcttgatgaagccttcaccacggtcaagaaaatcacttattgagtctactggcctgttcttccttatatccttatagagttcaccgaggacttcgatgccccccagtatcgcggataactttccatcttaagttacctgtgaaacttcggttgcctctgtcatgaatctactgatgtatgcctggagaggctcg

SEQ ID NO: 90258 - DNA, 539 bp, Cannabis sativa
tactcatttaaataccagaatgaaggatctggacaatttggaatctccatttcaataagaatatgagcaaattgtatccttgtatgatccttagtatgtttatcaaccattattggtttcccaattgtactaatgagagcactcaaggttttcttcccccaatattggagcccaagatcgtgaagccttatccaaagagggaaacatttcactaaccttcccgcattcaaatcagaggaccaaggtctaaatatgacaggcttcctgttagattgaataactccattttcaagaacttaacctcgtgtagcttcatcgttgaacttgaccatagtgagttccattgtcatccttgctatctggataatacctagatgcccccaaattcgtcttatgaaaccttcaaaaaatattgctagaacatttgctcctagaaccatacaaatgacagttgatttttagttggcttcctccgatttcacctcttccaaatctacctgagccattttcctaccatacttaacaagaggtttagtaaa

SEQ ID NO: 90259 - DNA, 556 bp, Cannabis sativa
ttccaaattgaaaatattttaaaattggaaatgtttcaaattgaaaatatttaaaattggaaaaatgaatcttgggaaacaatcccatgaaaaattgggtttttgaggagaaaccacaaaaaattgcaatatggggttggctgcccaggaggctgcacgtgcagcctccagaggctgcaaaagatcccagggcgcgcgcggacagaggcaccctgccgaggtttctcggcggatgcagcctcctggaaggaaactgcaaggtcctcctgggcgtgtgggtcggcatcagacagtgcatgtccgaggcatacgcgcgcgcatggcttcctagtccgaagcctggtgtgcgtccgattgaggcatgtgcactcgatttttcaaaattcataactttctcgtttttcatcggaattaaaatccgtaaaaacaaaaattgcttaatttttcacaaggaatcaaaataaaacattttaaaaaaatagaaaaaatctttttcatggaaaaatttcgtacaacacaaacatttatcataaaaacacataaaccaacatgaaac

SEQ ID NO: 90260 - DNA, 557 bp, Cannabis sativa
aatttaaataaattaaaataaaaaccactgttaaagctaaccgaaaaaaataaaaaagatcgttaaaccaaaaattgtcattagatagtcatttttaatatataaacatataaatcaatttattattataaataatccagtttaacagaccattaagtggtgaacggttcagattaaccagaccacccaaaacggtctcgccaattacagtctacaacagttcgaattattgcagtccgaatttaaactgcaatttgataatttctatgaacatcactaatagtcataaatagtataaacaactgtacaaaagaactcatctttactgtgttttgattctattaaatttttttattgtttttcttgtagaatcccgatctggtcatatattaagcttattggttggacataccatatgtttatgaatattgctaaaaggtacttgatacataacttttgctacaagcgtacgcgtacagcgttgttatagcaaagttttgatactaaaaaggttgtcgaacccacagggattgattattaaattttactaattatta

SEQ ID NO: 90261 - DNA, 991 bp, Cannabis sativa
aatatgatatacaataaactgtaagcacttgctaataacttactagaaaaattattatacacaataattttacctaaccaattctattatgctgaagatactatttaaatattttataagctttttaaaaacatatgaaaattgttgtattaaatagatgttttaagtctgtcatccaatcccttccaacttatgccatgagtgtcttcctcattccgttgggtatttgccaagacattgagaaaattatggcaaacttttggtggaaaacaaaaagttccaatggacaaggcatcatctggatgtcttgggatcgtatggctgcacctaaagactctgggggtatgggttttcgacatctccatgatttcaacattgccatgttggctaagcaaggttggagacttctctgttcaccatcgtctcttgctagttaggtgtataaagctaaatattaccctcgcactgactttctaaatgctgaattgggtaacaatcctagttttttctggcgtagtatttggagtgcacagaatttggttcgtcttggggctagaataactatcggtactgggctttcaacacacattctcaaacagccttggcttcttgatcctgtcaacccgtctctactacaggaccgggtcttaatgagtacatggttagttctctctttgatgtatctactcgaagttgggacgtctctcttgtcaaggatatgtttaacactcgggatgcagatttatttcttggaatccctcttagttttgcaactgttgaagattgttggtcatggactggtgatagaacaggcggttacactgtaaaatctgcttattccatgcttcagcttcagaaaaatactaggcctggtgttaacaattcgggattctggcacaaactttggcaccttaaaataccacctaaagtgaagaacttcatgtggagagcagtttctgatgctctaccaacttgtctccaactggttact

SEQ ID NO: 90262 - DNA, 1016 bp, Cannabis sativa
aggcagtggggaagttagaggtacttcaaaacgtcttctttgtccatttggaagattatgaacttcaggacttcgacttcgaacttgagatgcatgagattggttctcagagttgttagatgagtcattgctatcactaggtgagccgttagttgcagtgctagtattattttccagctgctgatacatagcagataatgcatttgaagaagacattttatatgtatgatgtaaataatgcaaccataacacctttatatagcttttgaccgcttctgctttgaaaaatattgataggaaaagtttgttatttagtttttttaatttattatataaaaaagaaaacatcactttgatacacatgtccatttataaagctttctactattaatgccagttattgtaaattatgtgagcacgactttgtttgatccatttttttttttattttttggtctagcatagagatgtaatagcgatgttgtacattaaagtagaatataaataatccagtcttgtgaggttgtggcttttcctttacgttgataggtttatattcgtttattactttatattatcactagaacacaatatttaaaaggtgttagaaacctggtttttcctcgttgacgtctttccaaattcaaaagtaataatctagtaagtggttaagggatatatatttgatccgaatgccacaagaagtattttttaagcattttgctactattttggaaaatggaatgtgactattaccgttttcatgacattacaccgtttcaatactatcctcaagattttggttttgaaatagattcatttgagtgcgcaacttcaagtagtgttaccaaaagggtgtcataattttgacatggcttatgttagaattgtaagatgcatgtacattttaaaatcaattgggaaatttgaatttccatgcttaaataacccatatattattcccctaaactaatactatatataattaattttatatgacactttttgtatttttc

SEQ ID NO: 90263 - DNA, 674 bp, Cannabis sativa
tttccctagctttgccagagtctctagcaatgtggggccttccaataatgacttgaagatgtctgtccactggtggaggcatcaactagttttgtgtgttatctggttgggccgccctttttttcctggtcagtcttgacatgtttctacaagtgtgggtcatttttcctaatgaggaactctatttttgacttcaaattattgtacttgttagtatcatggctgtagtccgcatgaaagcgacagaacttggtggtatcccttttactcatatctttcttcatgggaagggggttttttgtatggcaccatggactgggtcattgtgaaaattgtttctatatcctctgttaggatggtaaaagcaatgaactttgaggcattctcccgaggatgctgttagaagttaccattgaatctaattttctttccattaccctatcagttgctattgtttgaccttttaccaccttggctcgagctactgtgattctaggaattttggttttgctatacggacgtattggcagtagtggtgtattgtttgttctttttttgtccagctatgtccacacgttgaactgattcttcgagctttataaatccatctgtttagtccaagaattctaccattgaccatatagtaagtcttttaatgtctttccacaattctt

SEQ ID NO: 90264 - DNA, 593 bp, Cannabis sativa
  modified_base (34)..(41): a, c, t, g, unknown or other
tattttcttatcatactctctctctctctctctnnnnnnnnctctctctctctctctctctaagacaataaagtcaatatgttttggatttttcttcatattaactcaatctaagcttcatatatatataaggcttggtttataggttatgtatcttagaaaaaagtggacccctaaattagacgtctagtactatatatgtatatgtataatgtatgtatgtataaataatatttaataaatgtacaaatataaatacacagaaacatattgagctgtattaaacaaatatctcaatcccattaattttgattgcataatatgaagaatcataaattatactccttattgacacaatcatgtgcctctcacacattacttaacatgcatatatataattgtcacaatatacatatacatctaatatgttatttgttatatatatatcttaatatacaagtcagttatatataacctatcatctttaactatatatactgtccataatgatgtaatttctgtaatcttaggaaactataattaccatacatacatgttaattgacataggaccttgggatgtgtaattttaat

SEQ ID NO: 90265 - DNA, 604 bp, Cannabis sativa
ttctttctaatttttacaaaatttgtccccatttggtcgttcatcattattttatttagtttattttggttttaagtttgtgttgattttttttttttgttttgcagttaatttttgttaaatcttcataatttttttagggtttttttttttacttttttttttgtgttcaatcggtttgtaagtatttgtgtttggttttgtttgttctttgttttggtctttataaattgcatgcatttcacattttattaatgattttttagtgaaaccgatttttttttttatttaatagattttctttatagtataatagtatttgttatctttaattttttttatgatttttgtattttgattttttgcttttttgtttttgatctttttttttaatcattttttatttgttagtgtttttagtgagtatggtaactgtttttgccacattgtggcagttttctttttgttttgtttctgtgatgtgggttggtagttacattttgattggttctatatgtttattgttagttttttatgtgcacttatttacttgtttatctttctctgtatactttatgttgtttaggtttttatttatttattt

SEQ ID NO: 90266 - DNA, 529 bp, Cannabis sativa
ttcatgcaacaaattataataattatctaaacataaaatatcacaaattctaatgtttaaaaaagtccaacatgaattcaatgacaatacataacattacgaataaattaaaaatttatttttaacctcggtaggtgcaagtgcttctgttgtgccccttggcaacgcacttgccacaatttcgtggtatgataatcctttcaccattataagaagttcaatttgacctaattcttctaacattttgcttcttgggtcgccctactggttgcttctcaacagacactgcaactgtaatgttctttatgacattaggaaatttccaatcatccttgtcaccaactggcataattgtaccttcatatgtgctcttcaaatattcggttgtgtaatatggcgagcatagtgcgcacaagttaatacttcattattgagctgcagcacatgcatgaggacaaggaaacttcatgcactagaacaagtccactacgccaccggtctcaactgttcctccagggtgaacctgcaa

SEQ ID NO: 90267 - DNA, 501 bp, Cannabis sativa
ataaatttacttttattatatattggaataattttttaggataaatatttattatattaataaataattattttttactataacacttaaaaaaattaaattagtcgtgcgaagaacgactatattacctagttaacaaataaaagattagtaacattgcacgttttcggcttgtatcaaaaaattgagattaatgtttaaaaaattaaattatggatacaggattttttttaagggattttttcatttttacaattcaaaaaagttttttttgcatttttatggaattcaacatagaaacccctattgcaactagcgctgcaacctaaattacaaacaaaaatcgtacagaaatccatattgcaactagcgctgaaaccactttagaaacacaaaccgtaaatttaaaaaaaaaaataaaaaaaaatagtatatggggtaattcccatttttaaactaatcttaattttaataaaataaaattaaataaccaaaaaacct

SEQ ID NO: 90268 - DNA, 637 bp, Cannabis sativa
actcaaactcaaaccagaccagcatctgcatctgaaactgaaaaatgaaatgatctggaatgagaataaattaagaacattcattgcttctatttttagaagcttgatgcacttaagagtctgaaaataagactttgcattgtatttgtttcaagatcattaaatagtatcagaataaataaagttaagaccactttatttttcatacaaagtgatgaggtgtctttaagatactaaaaattatattcatacatattttgttaagataaattgaccagccagaaatatagttatccaattagattctaacgtactttactggttatattgattcacgtagatcaatacttaattacgtccttaagattaccaataagttgtatcgtggagagccttaattgttatttccattatagaagttagattcatttgttttgaggatacatctcgtatgatgtattatagagtttcacattaggcctagagctcagaattatatttcagcccattaagaaaattttgtgacaaattcaactacaacatttatagttaataactataagggtactggtcgaagctatcatatcgacattaagtatttagccataaaaaaatgtgataagtggtcattaatcac

SEQ ID NO: 90269 - DNA, 894 bp, Cannabis sativa
ttatggtgccacgtcacgaaactcctcggtttttgtgtaggcgtggccatggctggccgttagatagggcgaccttagggattcttgctgccacgtggcataatcccaatttatgagggatacgagtatttaaactctttcatacaaaataacttcctcattttccctctcgttcttctttccattttccctctttcactgagattcaaagaacagcccatactttgttcagattgctgcctattttccttggatcttcttcagtttcagaagtgatcgagagcaatcgcagggacaaatcatcaaaactaaaggttagttttgaattcattttgcattttttggtttctgttcaaaatgtaaaactgttttttctgggttttgtattttgaggggtttagaaatgcatgtttgtaggaaatgttcatagggctatgttttttctatatagaactgggtaatcccagaaatatagacttgaaatttgcataaccgtgaactttaggaagaatatttgaatgatcgcatctttcctatctgtttatcttttgaatacacgcgattattcaaaggaacacttcgaatactcgcatgcctgctcaccctaggttaaacagagactttatcacttctagtcgttgcttaaaaccttaggattttatactatgtatatttcgttgcaagaacattggttaagtctctcaaatggtgggcgtgtcgcaatattccaatgctcatacgtgtgatcatatgttccttgaggtgccgcgatacgcccagccatatgctcgtagtgcgatcgcaatattctttggctggcagatttgctcgaaacggtgggtgtatcccagtaacttcagggtcatgctcgggaacgcatgccccttgagtcac

SEQ ID NO: 90270 - DNA, 703 bp, Cannabis sativa
gtagccttgaagatgttaaatttacagggtctttttacactttgaataataagtaagaagtaaagatagagcttatgaaaaaattgatcgatattagctaatgatacatggattgaggattttgcggttgctgaagttagtttcttcccagagagggattttgatcactgcccatttgtagttgcagtttatctgcatcaagagataagaaaattgtttaagtaattcaatttttagagttcttttacggattttcatcaaataattgctaaaagtttaggttgaggaggtacatggtaatctaatgtacagattggttgtgaaattgaagaggttacgcgttgttttgagatcgattaacaatgaaggaaaaggggatgtttttgttagagaaactgagactttttcaaagttgattaaaattcaagagatggttatagagaaccctggtgatatttctccatttaataaggagattaatttcaggaagaagtatgttgaggctcatgaggatatgcaaaagtttcttaagcaaaaagtgaaatttacatggctgaaagaaggacattcaaagtagaagaattcaaaatgtaatttattctacttgggatcttaagggtaattattatgataatcatgatggagtgagctaagattttcaagagtactatttaggctcattgcgtatgaaggtggagagaag

SEQ ID NO: 90271 - DNA, 1334 bp, Cannabis sativa
tccaatgactcaagatttatggctttaaattgcttgagctccaaaacacgagtcttatttccaagaactttaggcttgaactatgtatgtcgaactgttatggatgacagtcaattaaccacaatttttttctgaattgattttgattttattgtaacataatccatatatctggcctcagtcaaaaataatttatttccaaatacataaattcaatttatacagatattttctcttctgaaactagtgaatacaaacttcattattcatcccaaacttgaagaatttgtacaactatatggagtaagagtaaccaaagaatataatcatattttcttttacaaattacaagtaaagtgctcttataccttaatattggaccaaaaatcttagctatgcagtactgaaacaagagatgttgaggatctagaaaagcgctcaacgagtgataagaccttggcagctttcctcgtgagctggccctctgcttgaacactcccaccagttagactaacaagatgaaacctggctttggtactgtaaatgtctaatatttccttggacacaaaaaccttttctaagagtcctagagcctcttccttgagatgttttgttccccaatctagaatattcaagatggggtttatggctttagcttcatgcaagacaatggctcctttctgaggacaagattcatcaaccaaagtggaaagtgtttgaattgcttcaaaagcaatttcctcaacctctccatctaaaagttttaccaagtcaggcaatgcatttgcctccaaaagacaaaaatttgaagttacactacagataccaccgtgagctgggcataaaggaatacctgatggtttgaaacaccagcaaaaggaggatttggattcaacaggaagctttggagtactggttgaaagattgcctatcagagcagcagctcttgcttttgctgacactgaattagccttgagaagatttacaagcaaagggtaagcgcctgcttccactagaatacgttgtgactccagattttcaggatctgtgaacctaaagagggcactgagtgcattttctttggcttccattgtaccagtattcaaaatttctataagtgcagtatgtccatttgactctatcagcttcatggtcagtgatttttctgatttaggtaggttggccaacaatccagcagcagacatttttaaatcatctttatctccgttctcaagaaatcccactagagcctccagccttctcggtctgagaaggtattccacaactccatctggctcatgttgtgagaaaaggaataataacttaatggcaac

SEQ ID NO: 90272 - DNA, 790 bp, Cannabis sativa
ccaccttgctcacaatcattagagggactgatacgggaagtacccattgggtctcaaagacattcaacaactttatccaaagtctttgggccagacaacaccccaaaaacaaatgtgcactttcttcactgcttttcttacaacaaacacaccatcccggggacaagcagataaatggtcgccttttttgcatcatagagtgcacgtgaatttttcctaatgccacctaccatccaaagactttaaatttagaaggacacctacttttccataaggtcttcgtccagaacaactcgccagaattgtggtctgaagtaaaccacctaaatgctgacttacaagagaaaatcccaccaggatctggtttccataatctgatatcctctgatatgttaagcagtctaatatgttccagtagttgcagtaaaacaataagattaggcatttctctctccatcaagttccttttaaacttaaaattacagcttgcaacacaatttcctacctctccttcaatggccaccagatcttttatactcatatttttcgcctttgataccactgccaggtccggaaagcgactctttaatgttgattctccaatccagatatcttcccaaaatcgaatagttgcaccattgcccactttaaattttaccaactcctccccataaagatctgaaagatccttctaaggacctcttggagatagcctatgacctgatttagtatcccaacaattttctgctctcccataacggcttttgatcactttatgccaaagtgaatt

SEQ ID NO: 90273 - DNA, 504 bp, Cannabis sativa
atattcttttaattactctctatgaataatctataatctataactatataaaaagtgtcaataatttttgggcttttacattttaaattacttacttaacttttatcctttcttttccattaaaatcttttataatttgtgagtgatatttttaatttttaatcatatattagctaataatcacacaacaaataaatataaataattattgttatacagcaatatgcatacattatatagtttatctagaaatattataattaaaaacaaaaaattgttaaaatattctaatccctaattatataagcataataatctattgttttaagcactctttatgaataattatatattagataataatcacataacaaattattttaataattatatttgtatattgatagatagaaactatttgcaggcatatattataatttaagtataaatttgatcatcaaataaaaaaattagtaaaacaatttaatttctttgtaaaaatta

SEQ ID NO: 90274 - DNA, 570 bp, Cannabis sativa
aataatctggattacattgaaacaaagttttatttagggcataaaacccaacagatgcaagggctcaaattattttcaaacacttctggtttaacaccaaataaaggaaagtctgcagttttctgtagtggaatggaggaaagggagattaaaagggtactggacatgactggattctcgaggcaggaagcaccattcaagtatttgggagttcccatctgtgcaaggaagattgcagcctctgattgtgtcacgcttgctcaaaagatgactggaaaaataagggtatggtcaactagaaatctgtcatatgctgggaggttagtgttggtaaattctgttcttagtacaattcacatgtattggagtcagatcatgattctccctaaaaaggtcattaaagaaatagagggagtatgtaggtgtttcttgtggacagggaagagcataatggaaggggttggagctgttgcttgggaaattttatgctacccgaaaaaagaaggtggacttggcttattgaacattgctcaatggaatgtagcagctatgtttaaacacatatgggct

SEQ ID NO: 90275 - DNA, 2001 bp, Cannabis sativa
cgatcagccaaactgcaccctagggaggtaccccatgtagcccgattcatcctgttgaactaattctactaatttctcaaatctattttctcttttatttttcttcttggcgtactaaattatagatacgctgaattgaaggaaatggatccatcaagagaatttgactacgagtagcagaaaaacggtcatgaagtccttgaagaaattccatggaacgatcttgattttgttgattaatatagcttttagcatgaccacaaatacatgaaggaatagagagaatggaattgagttcatcccataaggatttgagttgagtaaaatttaatgaaatagagataccttcttgcttgaggacagtaattgactgcttcaattgatatattttaggagcatacaaatttgtgctgcaattttagcatacaaaatacttggacgaatttcaggagagactgaattaagaatccaactactgacgaggtcattacaacgttcctaattagaaatgtcgttttgttcttcgagaatgggcaaggatccatcaacaaaacctagtttgcttttttgcacgaagtgccattctgactgcacgactccaatccataattatctcctgttaaaagaggtgtaacaaggactgttgcacgactatcaaaatgatgaatagcgtaagagtcttgtgtgatgtgagaggataatagtggagtagtggaggtttgattattatcaaacatgatgaaggaataagagaaattattctacagataccatgtgaagaaaagatatacagtaaaaacttgtgtttttattattcatgatctgtgcatatatattgattacaattaatatatttaaaatatctcaatatcgtccaaccttgcatgaagctcaaaggtggttacaaacccacagaaataggggatattaccgcaagaattgaactgcaaccactcccgaaaattaacgattgagatattttagcactaaggttgtgtctctcgaagtgacatgcaccaacccttcccctatataaggggtcacacctgacctaagaagggatccaaattttatcacttgaagagcataaacattgtaattttattccttgtactcaagagtctgttcttgacctgtaacatatattaataaaataattcaaggagagtaggttattacaaacacttgggatcgaacctctttaaattttggtgtcaatatttacatttattggttgtgttttgattttatttatcatttattacgactttgcgtcagttgactaaaaatacagtcaataaaaacaaaagatgattatatttaggttatgaaatataaactcaacctaaatgaaaatttgcgtaatttatatggtaaattcatcacaaaaaaggcattaatcttaataactcgaaagctacacaaacaacttaggtatttttgtaatcaaagcataaatgaattttacttttgagaatttcaattcattaacatggttaattaattatcacaccaaaattaaaatagaataagataataatagatgaagaagaacattcaaatgtgcattaagccataataagaattcagtttatttaaattgtaattttaaacaaaattttaactcatacaaatccaattcattctaaaacataaaggaatttaaaaccaaacatatgaacaaagaaagagtagatgaaggaaaaataagtatggtaacaattttcattctattcttttgtttggttgcattttaaaatattaatgatattccaatagaatgttgtttttaccattttggtggaatgacttttctattttaaaaaagaaggaaaaattattccaatgtaataagaaaaaaaaattaatgatttttttatcaatttttgtatgtattttaaatttttttccattccatttctattcttatttccattcttattcctatattttcattctttccaactaaacgccactttagtttttattctattattgatt

SEQ ID NO: 90276 - DNA, 1152 bp, Cannabis sativa
gtaaaaggaagtgggccattaattacaaaaaaaaaaaaaaattgaaaaggatttaaatttaaaaaatgataaatattttagcttttatttagttgggccctatgtaaggtttggccctatgcaattgcacagcttgcacagggttaaggccggccctgagagggacaatatagttagacattgagaatgtcggaataatctgaggatttagaaatgaccattttacccctagaccattttactagttaagcttgtggaaaggatatttttgtcattttaccttgggtgaggtgcttgatttttaatgtggcagttggccactatttgattaaatattggaaataaaaggaattaaggaaaaatcaagataatatctctctttctctctctttttcgaaccatcaagggaaccaacaacaattggatttttcttagctgcaattcagagtagtgtagccaagttttggtgattcaactcaaggtattgtcctagcctctccctttgtgtttttcttaagctgaaagttaaggtttttgtatgaattttagaattaaggttccgtggttgttttagttgtttgaatttgtgttctgaagtttaaataatgttatttgagcaggttagtttgtagcttggttttattgtaagacaaagtttgagttttagaactcaaactttggtctttaatggtgatttgagtttcaggggttgtttctggtttttgttgcttgaattctcttcattatggttctttaaggtattctggaggttttgatgtgatttgggtttgaatgaggttgttgtgtggttttgtaggttttctgcactgaaccgaaattttgattcagggggaacctgtaggaatcgggattctggttggtccctaggaaacccctcagaactgaaattctggttggggaccgatctaccggttggggcattttaggaaaccctagtttctaccgttcttgtgatatttagggtattgccatgttatccattgatagggaaacttttagtttcaagtttaagtccccgaaaagtgatttagtgtgtcactcgtcaactttacgaataatgtgatttaggggcctgtaaatcgtcgagcagttgttccactcaggttggccgacacacttgaattcagaaac

SEQ ID NO: 90277 - DNA, 1281 bp, Cannabis sativa
gactttaccagcttatcatcgacaaagacttccgtattttgtctaatctgtttttcgaacatcccattcattagtcgttgatacgctgccccagcattttttaaaccaaatggcatgactttataacaataaagtcccatatttgttacaaaacttgtatgttcttgatcagggacatgcattttgatctggttatatccagaatatgcgtccatgaacgtcattagctcgtgttctgtagttggatccactagctagtcaatccttggtagtgagagaaaatcttttggacatgtcttattcaagtctgaaaaatcaatacaagtctccaggtgccgtttagtttcgggacaagaacaggatttgaaatccacgaggggtaaaaggcctcgcgtatgaagtcatttgtcaataagttgtcaacctcttcttcaagtgccccttgtctctcagagtctaagggtcgttgtttttgtctttttgctgggtaattagaatcgatattcaaatgatgatagatcaccttaaggtcaatccctatcatgtctgaatgactctaggcgaattgatcatagtttgccttcagaaaattaattaattgctattttagtttttcatcccaatttttcccaataaatacacatttagtgggattgtctagatctaaaataatctcttccagttcttcaattggttttaactggttattctcgtcttggattctagggtccgggtcctcttctttcttcttgccttcttctattatgaccaccattaattgatggttggctcttttattttgaagttctacgcgataacattcacaagccaataattggtcgccgcataccacacccagtcttgctggtgtttaaaaccttagagataggtgtttgattgaactgactgcccctactccaatcaatgcaaggtgacccatcaatatgttataaactgatggtaggtcaacaactaagaactcctgcattagtgttgtagataacgtcgactcccctacagttaatgggagtccaatgatgccttggctggcaacactatcacaagtgaatctacataagctcaccatgcagggttttaattttgcatcttctaatcccactttcttcaatgtatccctatacaggatatttacagagctcctattatccaccaatactctttttattctcttgttggtgagctgaattgtattgacgagaggatcgacatgtggatacctcgtgctttgtatcttcttccaagaatataatcagaggttct

SEQ ID NO: 90278 - DNA, 634 bp, Cannabis sativa
  modified_base (32)..(44): a, c, t, g, unknown or other
agggtggacattcaacgtgtaaggtccacatnnnnnnnnnnnnnaataccgagatttctcaaactacactaacaagtcctccacaatttctggtgctagggtcttcgtccacttgtaaactttttcttttcgcatagcaaaccactattagactttggacctcaagaatgctatagaagaagtgattgaaaagaaaaagttacttgtcattacattgtaacgtacccctggaaagtatgaccgaacccatttctcaaatccaatttcctcaagatattattcaccaacaacattcattgcctgaatgttctcaaattcttagtgaaactctatttttaaatatgtgtaggcacatgtgtaaatatgatttgtcaaaacatcagtcttgaacttgtggttgacgttcataataatgtggtggtagcatgaaccatggtgtgcatcagggaacatggtctccaaagcatgaacaatgctttgatgcctttccgacgcgaaggctaagttctcaacatcaccaatcgcttctttcaattttcttaggaaataggtccaagagttgtggttttcactattaactacagcaaaagctatcaaaaatatggctgcctgcctcccgtgccactgcacacaa

SEQ ID NO: 90279 - DNA, 527 bp, Cannabis sativa
tgaaaggtttggaactttggacttttttggactttggagtttgttgaattggacaatggacatttcaaaggaaggaatgatttagattacaccaagcaaaaaaaaaaggatacgcaaagagaagaacacaatatacacaagggaagtaaatacttttgaatagttatgaagatgaattattgatacttttggttatgaactttgactagttatattttagattttgggactttttgatatgatccatatggatatgggttagatttggactttggaactttttatatgatccatatggatatggattagatttggactttagaactttttgatatgatccatatggatatggattagatttagaatttgggacttttgatctgatccatattgatagattgatactttttgatatgaatatggattagatttagactttgagacttttttgatatgatctaaaagatctatattggattagatatggattagagtttagattgggatgattaatatttttttgatca

SEQ ID NO: 90280 - DNA, 773 bp, Cannabis sativa
  modified_base (478)..(480): a, c, t, g, unknown or other
ttttaatggtctacggttttaaatttgaaactaaattaaatgcaattttttgctgccaatggcatatatagaatcctatggtcctgactcctgaccagttgattctatatttattttggtgtattaattgaaaagaataagtatagattggattttttctcccgcattttaactgctgtagagttttttgctcgtcaacttttcttttgttgtaaatttttttttttttgagaattattgtgatcgttttaaaaaatcatttagttatgaaccataagttacaagtatagttgctaagagttagtttaacaactttaagttatcagaactttaatttattgacattaaatatacaaataatattttgagaagcatatatgcttaggtagagtcacaattttttttttttttctataatgtgtcgctctattattttatatcaataattaaaattacttttatattatttttatttctnnntttttttaaaaaaaaatttcatattaggaaagttacaaatattcaatattgtgggcccttaagtcttatttactaaaagatcttcatatgaggtgtaaatcaatttttatattgattggtaattaataatagacactaatctgacaaaaggaaccgacactactataaatttgggctttagaggtagtttataaggcctttcagcatcagttttggcaaaattcgctaccgacgttgatccaagtgacgctgtaggatctaaagtaaccgaagctgaatggtgttggattatg

SEQ ID NO: 90281 - DNA, 1547 bp, Cannabis sativa
  modified_base (169)..(169): a, c, t, g, unknown or other
aattattttaattatttaatatcatcgtaattggaattaaagggtatttcctttatttaaaggattgtaattaagagattatttttataatattggatgggtcgaacttaaattaataaactcttatgctataattttggcataggtgaaattgtattttgcatttatntttaatattctaaatgtgaaatttttacttaacatctatataataaataattattcaatgcatatacagtattatatattgattgatcatgaattgctattataagaagtaattaattaaggccctttatattttagccacttcttaaaaactaacctcctcatcttttccacctcaattaatttgctctggataaaacagaattagctaaatacagttattaattagtaccattttatatcctctcccattcatttataaagtttccatttagagagaagttttcttttctttaattagaaaactcttttatatcgacgactcccttttcttttcatcattattatcatcatcagaaattaagaaaataagaaaaaaaaaatgagacttgatgatgacaagatcatattattaaatattaccaatgcagaaagatcatcactatcgaaaatcaaatccaactttattccaaacataatataatttcgtataataaataggtagctaggtaggtgcatggaatggtttgaagatgatgagagttgaaggtgaggatgatgaagagagagtgatacatggaaatgtatgcggtgccattgcgtatataggtttcctgattttctatatatgtgccttcttagtttcgaataggattaccaataattcaagcaataagtctccatgggctaccaacaatctattgttcctcttccacttgattggcttgatccttctcatcttcccagcaattttctatgtcgtcattgccttcagagaaaacatgaaaaacaacaggattttccctatatttgaggtccaacaacaacctacaaataattataatgcttaattaattaacgtatatatatatatatatatgctgtacagttcatacgatcgagctctaaattttctcatctgtacctttatgtatattaatacaaggataatatataatgcatattattctttatatcttggttttgggcgtggtttacaaaattttgatcaagttggagttcatgtattgcttttcgttattttgtttgttttcaatttaaattgtgcatgtacgtaaatgataattggataatactgagattgagatctatcaaaaaaaaaaaaaaaaagaaagaaagaaagaattgcgtacgcagatactgttaaatgggagaaattctgctgttcctttagaggatccttaacacactaaatttaatctcacactattattaaatttggtataaaaatataatttctacttcaaccaacactaaaaattatactaaggagagaaccggccttttctctgttaagtctgctgattaaggcttaaatttgtacattttaagcttttaattgtatacataaaattaat

SEQ ID NO: 90282 - DNA, 520 bp, Cannabis sativa
tttaatgtacgattaactttaacgaatactaaaacaattggtatcaatcattcaacatgatcgaaattgagtcttttttagttatattttggtcatgcattcaaggggttgttcaaaaatttaactcaagttaaaattaaagttaccataaataataaaacaaataaaatagtttaacacataattatgtaatcatagacaaaatctagtagtagtatataaaaaggagataacaagtgtgggaaattttctcacctacaccaataactcacagatttaatcaatacaaggccatgtataacctttcaacctcaaccttaatgatacgacaaccagaacaaaaaaacgacacatcatttaatacacacaaccaaaaagaaaaatcaagaaaccatatcgatcaataatcaaacacaaaacctagatctagaaatcaaaaccctaggagagtgagttcattaccttaaactcctctgatcaaccctaaatctcgaaaaatgatcaatgaggaaaacactac

SEQ ID NO: 90283 - DNA, 903 bp, Cannabis sativa
ttgtcaagcacccgtcgtttgtcaccttcacagccaaaggtaacgtggaagattttaggcttgtagtctcgtatggagactgggaagcatcctttccaatgtccagacatttagtccacaaaaccaggtttgtagacagtccttgtggtgagaacatgggcctaaagcacatgattggatcgatcaaagggtagattattagtgacatcatgtaaggagataatagaattctcctcttcggcgagagagagcgtggaatttattgagttggcgagtagatccatcgaaaaattggctacaaaagtagaagcagaaggcaattggcggtagcaggagcatgggcgggaacagttggagtgaaatttaaaagaaaatgaagaaaatagtgaaagaaaagaaaagttaaaaaccaaaatagcagttacaaagaaaacagaggaattaaccaacacaaacccaacaaagggcacctaaccaacataattattgagaatcttatagtgtgctctaaagatattacatagcgcataaaaaaaaataaaccttagtgcaaaataaatataccaaaaatttaaaataatattctattcttaggtttttttttttttcattatttctttcatgatataccatatcacatacaaactcataacttagagcaacatgaatataaaaaaaatttacactaacttcttattaaatgagtttttttttttcctttctacgatagacaatagcatacaaaaattatataccactattaacctaaacatatagaccatagtgaaaaaatatcattcttgatatgccataacacataagaacaatataccctggtaatatataactataccataaacttcaactaatattctacaattttttttctttatttcgttcatt

SEQ ID NO: 90284 - DNA, 3618 bp, Cannabis sativa
  modified_base (1789)..(1789): a, c, t, g, unknown or other
tatatatatattattaatgttttaacaggaaaaacacataatttcattactaaacaaaaattcacattccccataaatattttattttattttacttaagaaaaacataaatttcactaaaaatactcaaatgcccaaatttgaatcaaagagcaaaattatttatttttttttaaaaaaaaaagaaatgtaaactgctactagaatcaaaatccccatcagaatacaaataataatgaaacactaaaacatccaatggtctaaacgctggaacagaaaaagtgaaaataaaacatgaatcttaaagaaaagcaacaatacagttccagaactcaggcgagttgattactctattaaaatctgtataagaacttcactaatcacaagttctttcatttgagcattaataattagcctatcatattctctttaaattgaataatttctccgtttaatctttaggagagatcttatgtatgatctcttgatcaatatgtttcagcttttgtgaggataaatttgttaaaaaaaaaaaaaaaagcaaggaatttgtctaaaatactaatacggaaatctaaatttggaacataaataattaaaagacctgagtcattagtatcacaaaactagcttatcaccattttacaaaaccatagtttttagaaaacgtacaaagacttcattaaggtaaacagtttttcatatatgaatattattgaattggtacctgcgataagaactaacatgaagatgaaaaccaccatgaacaaatatgaagttttcccattagacatgatctttttcttcttcctcctccgccttacttcttcttcttatgattttatctatgacttagaataaagaaaatgaaaagatatataaataaaataaagaatggctattagtatgaacttcaaactaagccaaggttgaacatcttgtactctatttcctttttaagaacaaacgaaggtattaacttctttccttcctcttatatatatatattttaataaaggaagtaatttattgttttcttaagaaaattataaaaataataaaatgttacatagtgttattaatcttcaggttttcctaactaatataattactgagaagaaaaggtttaagaagaatgtgaggacggttgagccgcccatgttgacgggttcagctaaacccggtttaaggttttgactgaaaagggaaccaaaacagagtctatgtttgttcaggaaaataaaaaaattaaaaatatgtgtgtggcctcaagttgatttggattgtagaaagtgacaagttactttttttttttaattattttttagaaaatgaaatgctaaaaacttattgtgggcaaacaaaatatgaataaaaattgtctggttttgttggttggtaagttgcttaatcaaatcaaataggaaagtaattaaaaaaaatatctttattgacttgaaatttagccaatatagtggaaccttattaattgatgattatcaccacgtatacataagaataataaatagtaaaaataacacaagaaaattaataaggatttttttcacttttaaccaaaaaaggtaacaatattataaaatacttccagttggtcaaacaaacaaatatacagttcaaatacattttttttacacaaatacttcttacacacacctccaatccaagttccatgcttcctgggcaaccacgcagcaacccaacgcaaccaaacgaaaatcgaacctgaaagagaactaccattaatttcgatgacttcacctgagaagangaccagaatcaatcaaaataggggttgtttcgaattcatgaaaaaaagtgccgaaaaacaactacgaaactaaaattcaaccagaaatcctgtttaattcgcataaaactaatgtgttgacttcaattttcagatccatgaaatgcagatctcaaaaagttgaactggagttcccaaacaatccaactctagtataatccaaaaaaattacatcaatactatagtaaaatatttatcttggtatattttcattgttttctaaatttctaatggtgaatttgttcatactaaattacgaagagacatgtagatagagttacgtacgtggaaatattgttctgatttttaatatttcataacagtggcattatagttgcattaatattttgctaaaagttctttttccacatattaatattaatgtacaagtaatcatcgatcggtgacaaaaaaatactgacaaatagtttcttacatatgcacattcacattttacattttttagttgcaattaagttgcacgttagttggctcgcaacacatataactgtttcattacagtttcaacagcaacccacgatccatgcttcctgggattaaaaccttcgtctgatgcaaccttcggtcaaccaccgagcaacctccgtgcgatgcaactttcgtctgatgcaaccttcagccaaccacccagcaaccttcgtctcattatgtaagtgatagtgtaagcgggattttggtaattaaaagcacataaaaggtataaatgttttccacaccttatggaggtatttttgtaaataaagtatcaatttttatttttcatgtaataattctaattgataaaggtttggcccccttactccccccttactcccctttttttagttgtattttagttgtattcactcttgagataataccatgtctctctttagtattataattgtgagaataatatattacagataaagaactggtaagatcttatgaaaaacttatgaagaaaatagacttagagtctacgaggctttgatggcatgtggaacttaggaagagagagcactataggcgtgtagaacttaagattgaggatcttttctcatgtgatctaatgccctttatattgtgtagggcttacaatatatcctaattaaaatatataaatatatcactttaaaatatggaaaataacataattttttttatcttatatttgaattacaaaaacggataattaaatccctaaaatctaggataacatctttgagggaatatgtaattttcccgcactacgtgtgctaacttgaggcctgcaattagagcttggaggctttgaaagcgaactttattgccccgtgtagttgtttcgccttggcataatgagggcaatgtctacatcagacaggtggtgagtacaacttcctttaacatgcaagttccagctgaattttcttgctcttgctctcgcttcttctctggctcttgcttttctactgaaacttgagagatttcagaagatgtgcaagttcattcaaccacgaagtcagtgagagcttggccttctatagccactcttatttggtaagagatctcatattggtcgagttcaatggcccacttgagtagtcggccagatgtttcaggtgtttgcaatacttgtcacaatggatggtcaatgtacacctgtattggttgagcttaaggtcttagctttcctgaagcttagagcggaaagtatgtcagcttttccatgagtgggtattgacttttagcgtcaataagtctctcgtagtacacggggttcctaatgccctcttcttctctaatta

SEQ ID NO: 90285 - DNA, 553 bp, Cannabis sativa
ataatcattcaaattaacaataactatgaaaaaaaaaaatacaaccgtttcttgaacaagtctaaggattttctaacaaacaaatttcgagataacgatataaatctcatcctttatattctccaaacagtgcaaaacagattggctgcgtagcaataagagtttcagatatatacccaattagttcatctggagaagaaagatcaagcgattgtaaaatactagatgtaagtcttgtatgtgaaccacggccatcgtgggccttgataactgcagttaatgcctgtgaagctattccatatccactgcaagtaaacaagattatctaaatgaaataacaatgggaaaaaatgagacaaatgaaaaagaatgcagaaataaaaattaccaacagatatgctgaatattggactatagtcttatggtgaaaaaaaagaagatagctaaccaaggcagtcatacaagagcaagttccagctcttttctctactttaaacgatttcattttacttgctagttgttacatgtggaaaagaacttcttacattgttaa

SEQ ID NO: 90286 - DNA, 1483 bp, Cannabis sativa
tttgcaaaacatagggtctaaaatagtacttacccttctattaatattatttaatacaatactatatagtttggtacttgtattaatagcttatgtaaaattatattatattttccataaagtacttgaccccaactccggatcctatctgggtctagggccaagagtcaggtccgaatttgggtctgagtcgagatccaaacctgaggctgaattggaattcgagtttaaatctgggtctaggtctagttcgagtttggagccagatttaggtctgaagtttgggatcggggtcgggttcctaacctcggactcgttgtaaatattttgttatgtattaaaatttacggtcgtaataatttatacaatacaatgttttatttaaatgtaatattacttattatttaatataatacgactactaaatgagcccttatattattagatagggatcacatcacttttagttatatagttaagtataattacagattatattatataggtaaaaattgagtataatttgagggtgtcatgtcaatcatcactcttaaaatacatgtataattatattaatatacagcacatagatctatatgtagttatatttataattaagtagacaataattaatgccaaaaaatactattgcttgtatgaatgtgattactatttataattattaagtgctttttttttttgaaagaatataattaagtgcttgcttactatttttactataattagtgcatgatagtttgcgtgtaataatatcatctgcataaatatatattatgacaatactactaatcctaatatttattatatatggaaaaaaatcacctaattatgtatattgtcattgttcaattaataatatttatttttagtaagtttaattcagagggtactataattgtgtaatatattaaaaatgcatccacacatatttaataatagatgggatattgtttcaaaaaaataataataaatgggatatttaacaattatttttctataaacatttataataattacaaagaattattggatcggtgagggattaattatactaataacagtatagtatttaaaaaaggtattaagtactaatggtactttttagtaattttttttttgaagaaatcttaaatttattattaattattgttattgttagaattgtatgatgtatggggtttatatgggcttaagaccacagatgcctagagtcggccttaagctcacagatcttattttttcatctactttttggatgaggctcttttgactttggttctactttttggattggtttttatgaatttggtgggtctttttttgggctataccttttcttttgttgatttttttaatcagatacttgttggagtttggtttaactctctgtaacgttcctgcttcaagcctccattaggcccttacacccacggaataatatacacgagtacgttactctggc

SEQ ID NO: 90287 - DNA, 752 bp, Cannabis sativa
gggatgtgaaacctcaaggtgcataccaaagaccaaattaagggaggatgaggtataaaatccatataactgacacgtgattcttaaaattgtctaatctattgaagaagtggagaagagatttgcatgatttgatgtagagttgaacatttggacccaaaaatccacccgacccgaaacctgacaaactcgaaaaaaataggtttaaaaaattaaaggttgggtttgggttacacccggttaaccatcgggccaggttcaagtttcattaatccaaaattcgaaaaaacaggttacacccgaacccacccaaaactcgtgtatgtaattttttaattttgttttatacattttataaaaataataacttaaaacaaaacaaaaaaatttaaacaatgatacattatttttattttctttcttttcactttttttttaatgaaaaaatatacaaaaatgatattttttaaaaaagaaaaggtcggcccaacccgaaccaggtcaaacccacccggatctggtttaacccaaattcgacccatttgcactcgaaatccaatcacacaaacgggcgagttcgagttactaattctatataccgaacccaaaaatctgaaactcaataaaaccccacccgtaaattattgtaatatatatagatatatatatttttaaattgattccatgtggtggagaacattattataataagactaattagcaattttcccctcgaattttaacatgtacta

SEQ ID NO: 90288 - DNA, 566 bp, Cannabis sativa
ttttttacatgtgataaaaatataatttaaaaatactataaattacttttattaaacgcatataaatttatactttgggaaaaaaaaataattaaaaatatataaaaaataaaaattttatatagcataaatatttatatatttatgattatagtgaactaaattataactttataattatcattataatagaatattagaatgaataaataatgttttggatcctatgatttgtaaaaattacggattagaccttctgttttgtcaaatgataaatgcgactttgtattttttaaaataatactaaatagtaccataaactaattttttttttgtcaaaataaaacttaataataatatgatatagaggtgatatgacaagattagttatattttgtacatctgttcgcgctaaaaattattttcaagttatttatattaaaaaaatatcgaacattaagctcagcgttctgtttgtactattttagaaaatacagagtcttttttatcattcaacaaaagagaaaatcaaatcagtaacttttgcaaaatacaagatccaaaat

SEQ ID NO: 90289 - DNA, 522 bp, Cannabis sativa
atggcctagagacaatctgagctggaaatccctctgcaaaacattcatactgatttcaactcaaatgttaataaagccaacacattctttaagtatcacacgagttgttaagtacctgttgcttttagttacgattatagaaactttgccaataagtttgttttaaggatcgtctcttctaatacttgttgttttttggaattgcctgttttttaagtattatttcaatattactagctgaaactttgactctttagatatcaacaaaggaaacatgttggagtgttgtttgaggatattataattttattgtctaaattttcgaaagcaactttgttctatgtggctcacgacaagatttctgcagttcataattggcaaaacatgcccttcaacttcagttctatcctgattcgaagaagtaccgccgccgtttgtggattgctacattgttaatcatgtgtaattttgattaccacgtcaaaaaaggaaaaaaggttgacctaatccattgcttattgg

SEQ ID NO: 90290 - DNA, 593 bp, Cannabis sativa
caatagatctcccctataaatacttcatttttaggccttaaaggggggagagagagagagagtacgagctatagtaaaggggtggtagttattgggatgtttatttgttcttatatttttagcatcgatttataatagcattaatgcttagcgtctgttataaattgaccctaatgagtgcttattatcaacaattttacactcaatttcaatagcatcaattctcgtaaaaaattaacattttgatcgatgagaatatttttttttttaattgtgagtggtggttaagcgaataaaatgaaatggggatcaagataagatggtaatgataaattattgaatatgggaaattttggtgagaaaagtaattaatgtttattggagaaatcgaataatatttaggattaacacaccatattttgtgtttgtaaaagttattagttggatcatctgttttgtaaaataataaattaaacttcatattttacaaaatggtacaaaatagtatcatgagcttagtttttaataatttttttaatataaccaacttaaagataatttttagtacgaataaataagaatattatatacct

SEQ ID NO: 90291 - DNA, 1657 bp, Cannabis sativa
tataataatatttaattacataataaattaaacatgattatatagttacctctaattttatccaaatctaattacattatcatatttcaagccaaacggacccttagtaactattatgatataactagttattgacgagaaaccacttaattaattagtactaagcactaatctttaatagcaactatgttccagaatggaaggtttacaaattcattttaagaccataagtaaaatttagtggttcaaaaaaaaaaaaaacaatcaatatcagtactgatctattaaaaaaagagtaatttgtgccgaaactcttttacattttaatttttatacacttaatctttttatttatttatttttttgtagctaaaccccttatattttaatttttatacacttaacctcattatttttatttgtaccaaaactccttaagtttattttttttgtaaatttaaagttttagttagatattaccattaaatactaactggattactacggtatcaacttcgagattttattgttacatatacacaggtgtatacagtggttatatagttgatatttatcggtaatatttaattggcgtgtcaaattcgtaaagaaaaataaatataggcagttttgccataaaaaaaaaataagaaggttaagtataaaaaaaattaaaaataagaagattttttgaaaaaaaaaataaagaatttaagtgtataaaaattaggagttttgccatcttaaaagaataaaaagattaaatatataaaaattgaagataagaatctcacctcaaattactccaaagaaaaatacacgttttttaaaaaaaaaaaaaaaaagatacacgtttaaatattcataaattttctttttcaaaaataaataaataaataatcctaaatttaactcatttgctaaaaccaataatcatcaatcaaactactgctctaaaaaaaacaaaaaaaaacattaataatattagaagaatctgccaggtggcttcatcttagtagaccttttcattttaacggtgaaaactaatgttttttattattatttattaatttttttgacgcttcattaaaaaccctaaccacggtccaatcaaattgcgtcgcaattccaaaatccaaaatcctattcctattatgattaaatgacctaaacagcccctaatatataagggcaatctcgtagtttcgcacgtaacaacaattaacctgaaggtagaggcatatttcttctcaaaaggattccaaagcccaaaaaccaaagagaaaaaaaggaaagagagaaagaaaattcagaagaagagagctctttcgctcctctctctctctctctcatccaccctcatcttctccttaagcgctctctctctcctcactttctctctctacattccttccctgcgatctgatcgccctaatatttggaacaatcccccttttcagtctcacattattcccttctcccaaaccctaattaggttttcgttttttttgtttttagaagaaattttgatcattttttaattccctttttgcccctttaacgcgtcgatcaactcatcgtcgactcgacttaccctaaccctaattgtttttgcttgtgtttggtgctttccatggctgcgattaatacgactgct

SEQ ID NO: 90292 - DNA, 730 bp, Cannabis sativa
cctgaaacggtaaaccgattggcccgagccagttgaccagtttcaaaacaggttgaccgaattttcaaaggtaagaatgtgattttttaagtttacgcactcatcgaaacgctaccagaacctgtccaaaccaccccaactttcatagggcacatatataccatacatactaccatacttgcacaataggaactaaaatcgagcccttgattggcaaacactactaatgttcggacttaagctataaaaagtttcaaacttaatttctaatcaaaaatcacctcaattttagtaagaaaacatcagaactagtcctatgactacccgagaacaatcctatgaggtcagagcctttataactattctaatttgcaaaaccggtatacgaaaccaattattttaaacataaaatggaattaaaccttaccttaagtttttccgctaggagaatttgctatcctgctactaccgcagcttaaaaccacgttttagattaaaaatcaaataaaataaatataggaagagaaatttttttgacagaatacgaaagtttcattttcgttcgttcttatgtttataaacgtattacatataataaatatatataataaacgcttatcagtaaactaataagttttgtataataaaaataatactacaataataataatataataataatattaataataatatagtaattatgaaaattttattatttataattatc

SEQ ID NO: 90293 - DNA, 699 bp, Cannabis sativa
ctaattaatcgaatccctacaccaaatctcaaatttaaaaccccttttgaagtccttaaatcaaaaaaaccagcatatgatcatttgagaacttttggttgtcttgcccatgctttaacacttatcacttctaggtctaagttctcacctagggctgttccttgcatatttttggggtatcctattggtataaaagcttataaacttttagatctaaataccaatagaattttctattctagggatgttgtttttcatgagactattttcccttttgttgactctagcagcttgcctcttgaatatcaaagcttcttttccttgccccagtcttctattgatcatgaatttccatctcactcttctcctcctactgctactgattccattcatcaagataggtctgaaccaattatcactgctgcttctccacctcttcctcccagcagacctgttaggaacatcaccaagccatcttatttgaatgactatcactgttttctgtcctctaataatttgtctgttgcttctcaggacagtaggccagtcactgcatatcctctacaccaggtgcttgattactccaaactttcttcaaaattcaaggctctggtgcttgccatttcaaccatgcaggaacctattagttttcagcaagcaaaaggaatcccagtctgggacaatgccatggactctgag

SEQ ID NO: 90294 - DNA, 627 bp, Cannabis sativa
attagttggaagaaagaaaagttctcaaattagtaagatgatgttatataaccctttcagtttcatatggttagataaccgtactgtgcttggttgaaagttggtcttttcttatattgtcttattgataatctggtccaaagctggatgttattagggcttgttgagcttttgagatttgaagtctcaaagctactttaacaataaaatataagagttttattgatttaaaaaacctttctaaagaagtaataactcaccaacttttttaggaaagacttctaaaaaatatacaggaaactatttttttagtttaatgaatattttataatatctaatttacctttttttctaaaaaacaaaaaaaaaaaattacattttttaatgttatattacggcagattatttcgtattcttcttataatgaaaacctaatagtcctcagctaagaaaaaatcacagcagctaaaaaaacagtcattgctttgttaaaacaattgaaggttagtattctttaacttttttattctcattagaatctattaacaacttgcttatattcatattaaaaagagaaaaaaattcatttaagctttgtgtaaagtcttttttttttttttttttttt

SEQ ID NO: 90295 - DNA, 1393 bp, Cannabis sativa
  modified_base (1340)..(1354): a, c, t, g, unknown or other
cctcagtaagacactaacaaaactaaaaaaacaacacaacctaaatgaaacaagtcaatcaaccgaaacatgatcaattttcaagtaagataaataatatggttatgagcaaaaatttcacctataataattcagaatttcaattcaatcacacccttgattcacctcaatcttttactcaattcatgaaactataattagcacttaactaacaattgaaataatttatgcatgccaattacaactataaatccactaacccaatatattccataagcttgcaatacttactattctccactaataaaaatcaatgcacaaccaaaaatcaaaaaatctttctagacttgtaatgttaaacttaggtacgggtagatagaatgatcatttaggctcacctatacattaagtttctccatttaattcaccaatattttcttttacaaacaatcccgatactccctttttttttcttattccatgagagaaaatttgtttgttttttttttctttcgacaacattgcaatactttatttttattttatttatttttttttttttcgaatttgacacttattgtcagatttttcttttttcttttttttttcttttttaagttgttgccaatcaattttttttgcaaattctctcaattttcacatatattcccacacatatatcacaaactttccatctaaattctcccaaattaaagatccacttatggtataatttagggtcaaattttagatattcgtgggtttatcttatttaggctcaatatgtgtagaaacaaagaaataaacttaatgttcaaaaatggtaactaggataaaattacagggatgatttgaaatgcacaattgatccaaagaatgccttcctagtcatgcataatttattgttttgcctcaaataacaagtaagcaagttttagaatttttttcaaacaaccttccacatttcacaattagcatacataaaccaattcaattgctagaaatttacttattatgattccatagtcttttaaatcacaaaattaaaattagtcaagaatgtaatatcaccaaacacgctagtttttcaaaaaataaataaaatttccaaatcatgctatttacctactttcaaattgactcatatttagaaaaatttactcaaacaacacacaaaaaaaaaaaaaaaaacaactgaaatgactaacatgaaactaaaaatttaaagttcaccttaattgacacattgtccccaatgtgacaccaaagaataggaaaaatagaacttacttggggtgcctcccaagagaactgtcgttaactgttgggttttatgcccnnnnnnnnnnnnnnntcaatataatcagatttgtttattaatatagatcagaaa

SEQ ID NO: 90296 - DNA, 638 bp, Cannabis sativa
gcaagccaatatgttactaaaatccttggaaactgccattattgtagcaaacaacttcctaatagagtaactcatggactgagacatattaacacctaaatcacgtaaaaaaagttatatctatttttttataagctctcttaaatacttattttcttctcttaatctagttatcaaaaatcttagtctagtgtaacactacggtactcaatacttgaaataaacacccctatatcactatgtgttatgctaagggacactttaagctgtcaagcattagaaaaaatgacatattgctattagtataatttattatagaatctcacacattttgatttaataaataatataaaaaatcgctaactaattataacttagtataattgttttcctcatttctacaattcatttctaaaatgaatacaattattgatccagctctaatgtgaaggcaattaaatatcttttcttctcgtactacaccaatgtttttatgttaattttctgcaaaaatataaaataaagagggaaagaaaggaataaagcagaaaagacatgaataatttcttcttattatttttttttttgattatatatttcttattttctttgggaaatttgaatttgtatacttgcat

SEQ ID NO: 90297 - DNA, 591 bp, Cannabis sativa
tttttcaatgtggattttcatgcttagaaaaatctatattaatgtatgaatgtgtagattcagaatgtataatgcatgtataaacatatataccgaaaaaaaatgtaccgtatgtatatatataaatatgaaatgtattatatgtatatatttatgtatagcatttaggtatataaataatatgatataatgaatatatgaacatatatatatagcatttaggtatatcatatatgaacagtatatatttatatatacatatataaatatatatactatagatacgtaatcaaatgaaaagaagaatatatatatatgtataaacgtatatgaatatatatataagcaccgaatatatatgaacaatgtatatgtatatatatatatatgaaacccaaccaaaatcaagacagagataaagctgctctaataccaacctttagaccataatatagtatatgtaatatagcatatacatacgatatgaaatgcgaaaaacaaattgtaactatatcgataatatatgcaatgaaagatcaatatacctccagccattgatctttgaacttcaatccctgcgatagcttcggt

SEQ ID NO: 90298 - DNA, 754 bp, Cannabis sativa
aacaatctcaatagttcatgaggaatttttaagggctaagatgcaaaatgaccctaaatttaaaaattaagatagtaaatgtccccttttataaacatttagcaaaatagtcatttggataaaaatttgatgatgaaattacaattataaccttggataattaaccctaactttctactttcttttcattctctcgtgtgaagaccattttatctcctacttagtaaatgtctcttttttttaatcaaataagctataaattataaggttcggtaaaactttaagggttacattgtgtttttttttttaatcttttttaagttgcactgaagcgatcttaatttccaatgaatttttatattacagtatattcaaattccagtatattactttaatagtgtggtatattatttttatgtggggtggtacatgaagaacgaaaagataaagatattcgagtatattactttaatagtgtggtatattattatgtggggtagtatatgaagaacgaaagataaaatatattacagtatattcatatttgagtatattactttaatagtgtatattatttttatgtggagtggtatatgaagaatgaaagacaaagtatattacagtatattcatattcaagtatattacttggtatatgaagaatgaaagatggaaaaaatatggaatagtagtttaagtttgaggtatggttatattcattggggtatattctttttaggctaattagtaatttt

SEQ ID NO: 90299 - DNA, 872 bp, Cannabis sativa
catctcacccatctctctctattcacttatgacgacaaagcactaattcctctcttagtcctctgcttcagtagctcgttaaacttaagcttgagacaaggtatttgcttgactattaaactatgaattttgtatttaaaatttggttgtcatcattctgatgataacacaattcttttaaattaatttttttatttaattaaatggttagatttggaaaaatcacataccaaagtcctatacagaatggataaactattataagaatttgtttcaacataatacagaatgaaaaactgcacaacaaatcaaaaaagttacaatgaatcatctctttatactataataaattggcaatacaccatattagaaaaattgttcctaagtatatggtgccttctttattccacccagttttctcttaacataatacacatttctaaacatagaatgatactagcattaccaataaaaaatttacagggctatagctacaaatcctttaaaagaataccaatccaacatgaagagaattaattactcttcttcttctattctctttttggcttttggatgagagccaatccttgcagtatcactcaagtgtcgaaacgtttgaaagttgcattgtatcctggtcggtataaattgaagtctttcaaaattttctaactcactggatttctatggtcgggccactttgctatgtttcagatgccctcctaagaggaaattggaggacatagttgcgattcagaccaacatccagtctaaaagtttttccaacttctgttgtggcttgccaattagttgacaggcaaagctggaggatcagaactgattagatttgcccacaaattggcaagcttcag

SEQ ID NO: 90300 - DNA, 567 bp, Cannabis sativa
gaaatacctctttttatattgatgactttatttatataattaatgacccatatttagtttaatatttagataaataacttttatttttctcattagtttactttataaattagtttgattatatgtgataaaaagatgtcaaaaagaaatataagaagccaatctcatgaattctatttgtattttttttttattattcagttacataacatatgaatactagacaacattatagatatactgatatttatacacatcctatattatttacacttatatagtatatataattattaataattgtaatatatgtttatgttatactaggtaacaaaaccgtgctttgcgcggctttataatttttttcattatgatttgtaaaaaatttatactgaattaatagtatatcatatataatatattctcaaaattatatattttttaaaagaaatatattgcaatgataaatatcatacatactgaataattaaaagacataatttcatgaattattgtaataatttttttggagaaatttgctgcatgaatactttatgatttcgctgt

SEQ ID NO: 90301 - DNA, 662 bp, Cannabis sativa
gtactaataagcaattgacatgtgacattttattagtatttaacaaatctgttaaattgcgtaccaattgatatataaaaaataatgaccttactaatactgctaatttttaaagttggagacttatatacattaaacataagtattttttggaaacttatgacgtaatttttctatccaaaaatatgaacacaaagtgtatttatagatatgtacacttgtatagtgtgtacattcccacaaaagtgagagtggacatgagttttacccaaaggaatgtgcttcccaagctcgtctcctttaccgtttgaaacctagatgggaaagcaagtgtggtttgttcccgtcagaagtctacaatgctcttttgctcgtggccggcttgttttcggttgtcctgttggctcctgacttgcgttagggaggggctctttgaggccattttgttatctttattagcttattttgtcttttttaatttattgtttattgttttaattattttttatttttaatattctgttaatttctattttaatctctaattaatatattatcttttaatcttgttattactaattatttattgattaagtttgtaatggttttaaatcagcactttagtcgcaatttttctacaatttatatcataacaaaagata

SEQ ID NO: 90302 - DNA, 554 bp, Cannabis sativa
ggtatcctcagaaggttcttccacagccactttatctcccttctcattctccacagtgtcccaagggaagtctctaacaactcccggatgtcgacggatgattttatgtggtcttgagcagagagaagtagaagactcaaaaaattttcgtttcttgaaaggagtggttctcccatttgtctcggacgttggcttgatacgaatgtcaccacccaattttcgaatctcatataagtcaagattcccaaaatgtttaagctcctgcagcatagtctcttgtgcttgaaagaaagaattaagagcttgcttctcatctaatcccgatagcaaatcttgaccttcaaccgaatcttgagatgggccaatagagcccaatgccgtatgatgaccgtgacaatctatggaagaactagcaatcccacccttcttagtggacttactcattaaaagctttggcccacgggtagcaatctcaggcccaccaatctttaactccttcaaagttgcaccattaaatgagagaatagggcccactgaatcaacatttatctttt

SEQ ID NO: 90303 - DNA, 1092 bp, Cannabis sativa
tagctatttaattaaaaaaaatatcattttttacactaaattaaaaatatgtttatgtacaaaatacttaagctaaatttaactttcttttagtcaaaaaacactttttcttaattttttttttcagcagatggaacaatcgtaactcatataatatacaaatgagagatttttttaattagataaaaaaactaagcataaaaactcaattttttataatattacccatgaatgggtaatacccattaagagtgtaccttaaagcaacgtaaaaactattataataaaaaaaaaaactaaataatgatataataataaaaactaactaataataataataaactaaataatatatacccatattattattattattaacatacctataataatatttataaatatttaaaaattaaattatctctaataatttaattatttatctatacacaacctcaaactaataaaaaataaaataaaagaaattttattgtcactaaaaaaaaatctcatacaccactaaactaataaatattcgaaatgataaattatctccattggcaaacaaaataaaaaaaaattaattacccaagaaagcggatattacagttgggtcgcccatcactgatcggattaggggcagtcagctcgatcaagcacctgtctttaaagttccaaaccccagttggcgtgggggtggtgcgtggcgaccagatgttggctcgcgattgttatcgcatagagctgcaacatagaaaggctagtcatcagctgatgatgatcttggccggagaaaatgagaggaaagattaagatcttgatcctcgagttcaagatgaaagaaacctgctaaaaccaattgaagaattggaggaggttagtctcgacccaggaaatcccaccaaatgtgtgtacattgggaagaacctggacgagcagctgaaatagcaatttataagctttttgaaggagaactaggatcaattttcctagaggaatggggatataatagggatcgaccctaagattatctgccattagttaaatgttgatccaaactacccattgaagagacgaaaaaggaggcccttg

SEQ ID NO: 90304 - DNA, 513 bp, Cannabis sativa
aaatagtcagagttgtatacacctacccaaaaccctatatttcatgataggacaaagcatatggagataaagtatcacaagattactcatgaatggtcaaaattgaaaaggcacctactgaaggactaaaattgtcactcttaataagttcaaacattataaattctaggcacctatcgaattaagacccacaaggactaattaagaataaatctattcatgtttgcacatagtgatgaattcatgtgtatgtgttctaatgtatgtatagaagaaggtgattagatgcatacgagtcgtttaatagtatgatgagaaatacctgagtaaatatttgtaaagataccaccaagtaaagtactatatttaaataagaaataaaaaaaaaaagtgaaaaatatatatatacttcacctgtttcgaagtaccaaagtcttaattggtagacgattgaaaatgaagaacagaacaaagaacctttttgcaagtttatatatatatataattagaaat

SEQ ID NO: 90305 - DNA, 649 bp, Cannabis sativa
tatatagtagtaaattcttatttagaataaaatccatgtaaataacataagtatattactggagagtccatgtatggtttgatcatattttttttttttaaaaaaaaaaagattaaacagacatagctagttatatatattgaacaattaatttttttcataaatgataatatatttgtctaatttaatttaattatgatacatatagctccaaaagaataaattaattaaataaataatataactttttagaataatttaatagctagttatatattaattcacattttgaacccaaaaaaataatgatattaataagtactgaagtcaattcaataaaaatgcagtaaaataatgataatagtgtttctttaagtcacaaacaaggtcttccaccaataataattcaagcggcaacattaaataattctatcaatatctcactaattttagcaaaatatattaataactcactcaaattaataatccagcgcaaaaaaataaaaaaaaaaatgcactcttcgatccacttttatttgacaaattctaaataatttttaatgtataaaatattgttcaaactgtcaatttaacatgtatatgactatttcaacatgtgttaaacttttttaaatgtattaaaatttta

SEQ ID NO: 90306 - DNA, 559 bp, Cannabis sativa
  modified_base (224)..(261): a, c, t, g, unknown or other
gatggtttctcgatgatttccatgtttgtgtgatttattattttatttttttgcattttttagtttcttatcaatggtaaaaaaaaaaaacaaaaaaaatcacacaaccatagaaataaccaagaaaccataaaaaaattgtagattagtgtcttctccaaccttggtactcttaccgtcaataaaacatcgacaaccctaacatattattattattattattnnnnnnnnnnnnnnnnnnnnnnnnnnnnnnnnnnnnnntattattattattattaaatttatttattaaatcaagactcatttattggttaataaatatcaaaattaagaagtagcaacataatcactaaattacaaatacatgtgctaaatatatataaaattaaagaattaagtggcaacaaagtcatatacgaagtacagttacgtaatagctattattaattagactaaaaagaatcttttgggctcgtttggaacgtattattaggtcgtattgtattgtattatattgaattgaattatatatcatatttttatataatactatgttaaa

SEQ ID NO: 90307 - DNA, 545 bp, Cannabis sativa
tccccctaaaaaaataaccgtatataatgtataaaatatttttaaagtagacctcttcaagggtcgttctcgtagaccctttatttgtttcggcatttaaaaaacatttttagtttaattttatttcatgatcgcatacattgtggctatttaagactatttgtaaattttttaaaaattttgtttagtttacaatgccgaaaataaagtttaaataattacttactacacatataagaaagaacagtcacacgtgcaacacaataagtaattaaatcttatttttagtattgtaaattattcggaatttttttaaaaatttactagtggtcctaaataattataacattcataatcatgaaaaagaattgaactaattttttttttttaaaataccaaaacaaataaaaaatctaccgaaatactattttaaaagttgctatcaaatagtaatatacattgaaaattaatccatatatataaacaaaaagaattatacataaatgttttgtaatttaattgttgggttatttgcggcaaaaccc

SEQ ID NO: 90308 - DNA, 1324 bp, Cannabis sativa
ttaaaatataaatgttatgctgctgaaattttttaaaaattttagagaacaaaaatatgcatgttaatttaataatttataataagttagtaatttctttaaaaaatgttaacaagttatatttaaaatgataaatttttgaaattaataattatttaaaaaatttaatgaaattaattctaaaattaagtcatttaatgaagatcaaattacatcgcagacgctgacacaaccatggcagcatacatctcagatgatgccgacacaattaggtcagcagacttctcagatgatgccaacacaataagggcaatagacatctcagatgattccgataccataagggcagcagacatctcaaatgataccaatactacatgggcagcagacatctcagatgataagttcgcatatgccgccatactacccacagatgtcggatgttcctggagatgctagtgatgaggacgatgctactataaacatcttttagaattttcacttcaattttacgaactatcgattttatgtttattaacattttataaacacttaatttatatttaagtatgcagtattgtaatgtttataactcagttttcattgtaatgtttctgactctaaatattaaattttagttaaatgatttatatcttaattaattaaataattttatatattaattaattaaatagaaataattttaatataattaattaattaaataaataatttttatataattataaaaattaaaaattttaatataattttttataatattcattaaataattttaatataattttatataataataattaattaaaaataattttaatataactattaatttttttttcggaaatactcacaaaaataataataataaaaaataaatcaatttttattcccaacgactatgtcgttggtgatattttaaattgccaacgacattaaaagtcgttgttgataatcatttttgccaacgaactattcccaacgacttttcaccaacgaaatgtcctcattgatggttaatactgacgaaaaagggactttttactaacgaaatttgtcctcattgatgcctatatttcttgtagtgataattactaaaatgcccctggctcaccaacggggtcttaacatataattaatcaaataaattctcatttattgaactatataataatataattcctcaattattcataatcatctagttagggttttgctaatccatttcttattctagggtattacacagtatatctctctcctcattcatccataatttatccataaagaaaatcttaacaaa

SEQ ID NO: 90309 - DNA, 1263 bp, Cannabis sativa
tttcttcttttttcttcaggataggcgatgatttgggggcgggtggatcgaccggtgcagctccgaaatcggcgttaatggaggttttctccggcctctgttttgtttactttttttggttgagtataagatatacgttgaaggttgaaggtagagatgaaatcctaaataggtatttgtgcaaaataaaatctaattatggttagttctcaatataaacgtatttttgcaaaaaaaaattgattaaaaatgcaaaagtgaaaagagccctaaaaaaatgtgagctaagaatatttaacaaaaaaaatatataacattgatcgtatacaaaaattatagagatagttttataatattgatttaaaaatagcaagataaataattttgaatatattgaaaaattaaaattaaagatataaagattaattattttttaaattatgtatataattataattcttattaatgcatttatgaaattctcttttgtgttatattttattgaaaaagaaaaagaatggtctacacaacaaaattaaaatttcatagcatatattaatatatttaaatacttaattcataatatttgaatatatcaagagacatgattgtatatacattgtacacactaaatgacaacatgtcttttgaattttcgagaattaaaaatatgagtacaattaatttacttaatagtgatgataaaaaatattaaataaataagagcatcgaaaaaaaataaatggtaattcataattttataactgaacaaaaaaaatatattattaatattaaacaaaaaaaaaaaaaactatccataaatgataatagaatgaattagaaaaatgtaaactaataatatttaacaaaaaaaatataacattgatcgtataaaaaaaattatacagatagttttataatactaatttaaaaatagttagacaaataattttgtatatattgaaaaagtaaaaattaaggatataaagattaactattttttattaaatttacatataattataatattcttattaatgcatttattaagatttcttttgtgttatgttttattgaaaaagaaaaagaatggtctacacaaaaaaattaagttacaaaaataaaacattaataataataaagtgcaagataaaagaaggaaaaacaagactctattaaaattagtgtgacatgcataacatatcatatttgtaaaaaaaaaaaaagaatagtggtattgaaaataagaaagaattgataata

SEQ ID NO: 90310 - DNA, 2487 bp, Cannabis sativa
  modified_base (850)..(852): a, c, t, g, unknown or other
catgttaagctaaagatcagattagatcaaattaatagctttgatgtaagttactacaataacaaacacactttcgatcaataaatgaataaatattgtttttttcaaaattcaaattgagtcgaatttattagcatgatggtaatttaccatcctgtgcgtacaaaaggtttggtcaaacccgaaacctcgaacagacaaaagagcatacttgcaaattattataagtgaccaagagccataagtctgctcgatcacttggggggcacctatacctgtacaaagcatttggtaaaaatatagttgcacgatgatcaaaaacagaggatcaaattcattaaacataacaaaatcatgtaaaatcggtattaaaggctacccggtcagcccattgtctgaaaaatgaaaaataattccaagtttaaagaccacttgcccggtcactttgtcttaaaaaaacaaaaaaaaaaaggccttatggccgaacaaaaaaaaaatcagatagaaagaagaagtattcaaacagctggagtctcaggctctttgtacgggtcttctaggccagttggagctggaggatcagttgtctaagcagggggcatgtcgacattttaaccggaggtagaagtggtcgcctcggattctccatatgccacctgagaagcgcaatactcaagaaacatgtctttgtaattgccaaaggaatcaaagtttgtcttgggattagccttccagaagtcataaaaaaatctcgagacccgcaatctctaaggcgttcaccttccctccaagcctcgccacttcagttctttgctgcttggcctttgatttgtacttctcaacctcagcnnnaagctcctcctccttagccttcttctctgcttccaacctgcgaaagacagatcgaaggacctccctttcttcctggaggctggtcacttctttcgacaaggaagcaatggcagtttcaagttgatcagaagcctctagatctttggtcagctcgaccaccttcttctcggcagtgagaagtttcttgttaacttctcccagttccatccagactgacccaagttgaaccctggcttcatcagcatcctttctagccaagtccacttccgcctgcatggtgttggacatggcagcgttcttggaggcagccgacttagctcgagaataagcataagccatcttcagatcgttttgcacagagaaatgacattaagtaaagaaggataaaaggaaactgtcaagaaagacttatcctcgtaaactacttcaggactcctcccatgaccagctcaacggaaaggtcattatatgctccggccagctgctcattcacctcagggaccgaccgagtcatgtagtgggtgagcatatctttgcctcttttagtctctagaggcagcactgaaggtggggtaggggccttgatctgctcagattcgcttctgaccagctcggattcgcccttcgactactcgagcttgtccaagctccctccttaggagtctttagacttagtcatttttggggtagaagggtctacaacgattggctccttggagagatcaataactgcctcggccggtgcctgctcttgggacggggttgtctcaccgtccctagacttcttggtccgaggagataagcccgagcttcctcccactctcttcttcagagcttcgagtattttttgagacatgtctgtacgaaatgaaaccaacatggttaggaaaaagcatgagtatcttgcacatcaatagaagcatctgcccgagcaagacctgatggagcatcatcatctaacgagtcttcttgctcctccaggacggctttcccctttcctaccgtaagagtgaacgaccgagcaagtaattaggctccctaatctgaattgtatgtttgataggcctgtgctcggttagaagtttcttcttccttttgaccggagtctctggctcttcctcaacgtcatcttcctgctcaagacgctcttgagcatactgcttggctcccgcacctcccttcaacttagcttcacgattgagttaaatgagttctttctccagcactgtatttcctcttcttctcctgcacatgctggggaatgaaatcctttgggtagagcccgtactccgcgaagttgtcctcccaggttaattaagtgatattgatacgaaccacaccaatagttgtgatgaaacctgataccaattatcgtagcctctaagaattctagaaatttggatgtggaaccgcgacccaatgcttagttaagcatgaaccttgatatgaaggaagacgccacaaatggtggtggaaatccgtttgacaagtcaagtttaacgccacaaggaatactccttgataatttcaaatagttctctcaataactcaagaagaaaacctctcaaaattttattccaaaatattctgattttttaaagtgtttacaaggctttatatagcaaacttacaacc

SEQ ID NO: 90311 - DNA, 633 bp, Cannabis sativa
  modified_base (404)..(407): a, c, t, g, unknown or other
gttttactggtgttttataaaaacacagtatttttgaaaaaatttccgtgtgacagtagttttgtaaaagttaacccaaattccagtatttttgtaattcttcaacttctaaaaaaaagattatttcacggaatttttggctgctaaacctttttaattgtcatttcatttttattttattttttaatattaaatttataatgataattttatcctttaaaatatagtttataaaataactactatatactataatttaactcaaaaggataatttagttcatttaagcatttaaattatatttcttgataaagtaaataagataaattactatcattttattttcaagtagttttaataaataacatattacaaatattgattctgattattttttatttatnnnnttatattttttcattactttattcaaattctgaatatcgaatatcgtacaataaaagttctagatggtgcacccccttaaaattctaccatggaaaattactctaaagttttaaaacaatggaaaattctacaatgcacttccttaaaatggatatattggtgcacccctatctgttttagtattcgaaataattttttagtcaaattttttctcatggttatata

SEQ ID NO: 90312 - DNA, 893 bp, Cannabis sativa
agatttttttgttttgaaatttttttagagttaattcatacatgtgtacatatatatgatattaattaattgtacatcatttttttaaaattttaatttaaaaataagaataaattaaggagaaaatatattttatattaattaatatatatatatgaaattaatacaaaattaaagaaatgagagaattaaggagaaaaaaaataactttaaagtatttttagactgtcacgtcatctcctcatacttctcctttatatatatatagatatagatttatttataattatttattttgtagggctttttaattttttttgaataaaatcaaataaacaaagtattaaattagataattagatacattggcttacatttacaccttttctcactcagctactatagaaacagtttatatatacattataagaagggtaatttgctgctaaactcgctgaactttgaagtttagtacggttaaacccttagactggaaaagttatagttgaactccttaacctctccaatcgttttgctatgtagttcttccgtctacttttgtctgttaagtaccaaagtgaactgtcacggtgtacacaagtgtacagtagcaaattttcattagtccacctaatattaataatataaatattagaaaaataatttaaattattttaaaatattaaaaatcaagaaaagaaattctttttttcctttttttcttttctttccttttcttttcttcttcctttttcttttttgtgtaacaaatcaattaaatgtgaacaaaatttcatgaccccagcgaaaaaacaaaattctccttacctccatatctcaacaaacccacttcttattttccaataaaaaaataaataagaaataaaaacaga

SEQ ID NO: 90313 - DNA, 898 bp, Cannabis sativa
ggtcgacctataggctcaccctggtcggcctataggcttctcttggtcggccagggatgtaggtatagccccttgagagcttgctgggctttttttgattgctgcttgacagtttttccataccttgtatagagaccttgacttgctactggcaagattatattccaccgtactctatctttggcttatgtggacatgccatgtcaggttgaaaaaatttgggttaacattttcccccaagttcctgtttgaacatctggtcgaatagggactgcctagctcttgtcttacttgtagtagtctttgctgagcagccttgtctagctatgtgttagcttcctgcatggcatgattttagatctccaatcttctctctttatatatatatctcatcttctcttcttggatatctagtctttgttgaggctttcaatacatttgtttacttgaaaaaagttaattgagaatcaaactaagggcaaaattagaaagctaagaactgataatggttaggaatattgctcaaaggcatttgatgaatcctgtaaaatggccttgctgaaaggatgaatagaactcttattgagagagtaaggtgtatgttaaagtgtgctagtttagataggccctttcgcggtgaagttgttaagactgcctattacttagcgaacaggtgtccatctgtccctttgaagtttaagacaccacaagaagtttggacaggtcatgtacctaagttagatcacctaagggtgtttggttgctctacctatgctcattacaagcaaggcaaacttcaacctagagcttttaaatgtatgttcctaggctatccagatggtgtgaagcattacaatttatggtgcttggaactagggcataagaaatgcatcattag

SEQ ID NO: 90314 - DNA, 591 bp, Cannabis sativa
  modified_base (88)..(97): a, c, t, g, unknown or other
attatcatcacaattttttagttaccttattttacaatcacattatgaattctattataaaaattaatctattattattattattatnnnnnnnnnnattattattattattattcaaaacatcatcattattatttttaaaaaaaattatctcaaaaaaaatttttgagataattttttttttttttttttgagaaaaggctactatattaaaaccaagagttataatacaatagacattagtggaggtggaaattcctccaaccataaacaatcaatatccactgaaagagcaaatttagcaagagtatgagcagcagtatttgcgcctctcttaacatgagaaatttgaactccagggaaattggacactaaaagtaaaatatcaacaagcaatgaaaatctgagattgtggcttgttgggacttcaaaccattaatgactacaagtgaatcagattcaatgtagttcacttgcagctgtaggtcttttaaccattgtaggctatggatcagggctaaaacttccataatttctggtttaaaacagccaggaaaaggccttgacatagcagcgatacaatcaccacta

SEQ ID NO: 90315 - DNA, 1031 bp, Cannabis sativa
  modified_base (34)..(47): a, c, t, g, unknown or other
ataaacacaaggttagtatatatatatatatatnnnnnnnnnnnnnntaggtaggagttacgtgccgaggcacgtaaatgttagttttaggtaaattttagttttttttttattctttcttatgtgaaagtatgatcatatgcgaatgatttgttttatcaaataatatttgtgctattatatttggttattcaaataaatttaggtatatataagtcatatataaataatacttattatttacttatagaaaatttagaagaacaagtcataagtttttcaaattttaaagcaaacattatgtaacaaaaattaaagtgaatgtgcgatcttaaaataaaagaaaaaagtattaaaaaaaatcttaatatataaaatattattagaaaaattaaagagtatagtgaaacttctccctaattttccattagttcaactgcttgaatggtgaattgattgtactttaaactcattgttctttttgaatctacatacaactgagtatcaaaggatggagatttaccaactgagtaaaccaaatggtaaacgacaacttgaaggcactgtcttatggagtctttaggacaaagccttgaagctgttttataggcaagatatttcttccaactctccgtaagattggatctttcattaaaatagttccatctttctcttgtgtccatttaatgaaaaataatataatttttataagttaaaatttaaaagtgaatggatcaaaacataacaattcaaaagtgactatatattatttattattatggacaaattacaatgagtattggcataaacactaaaacttaagctttgactcattacaattaaaccactctcatttcatttcattatatgccaatcaatgaacccacacacacacattttgtattaactcctaagaatataccatcatcttcatcatcattatcaagctttgctgtcaatggtcatggatattgcctcttcctttccctgcttttacattccatcaaaatggatcattaaacaaaacagat

SEQ ID NO: 90316 - DNA, 1259 bp, Cannabis sativa
aaagttcagggaacaaaaatcctaattagccatattagaattcaaatccaaataaatatcccaaaataataattaattattttacaataaataattaatcgataatttatagtatatacatacactatataatatatatacattatatataatgtacatgtatatacatatgcaaaaatacatatatatacaatagtgccggtcgagtttgggtatagggccgaccaccatggccttaccgtggctggcggctccggggagccaccatggccatggtggcaataaccggccaccatagggttcaatcgcacaccagcgacacgaggaggagtagtcacgggtcaagatacccaagactcgattgagtctttagtgtgtcgtcgggttcgaagaaccttgctcacgtcgagctggtgcgggtcgagagggaacaactcgaagttgttctggtctgagaagggtggcttggaccactagggtcctagttcggatggtggtccaaccaccgtggtccatggccacatggaccgaccattgccttaaacccaaaagggtctcctcccttttcaaccgtacatgataaaggacaatagtccttgcatgcatctcatgcatgtttcacgtaaactttgcatggtcggggtccctccatgaactcgagctcgcatacatgtggttgtgatcttcatagtacatggtcgggttttaaatttaaaaactgagctcacatgcaataagcattactgtaatattctaaaaatataattgtgtacagtttaacatattttaataaatatgagattatatcagtatttatgctataatgaataaaattataatttataatcttattaagctaattatgttataattaagaattttagtgtaatgcgtaaataggtttaatttataaattacgaagattttattggaatgtataagtataatatatgtttttggtaaaataaaatatttttaggttcgacacccatggagaccaattggtggttaagatatcacgacagtaatagaatgagttatagaattgtactgggagcggttggattattcggggtagatagctttgatcaaaatatccctaagttataaagttgtttaagtgttggaataaataattgagaaattctcattcaactcttctttctctcttcatcttcttcttcttttcttcttccatattttatattattttataatacaatggtactaattagaaattgttattgttattatttaaa

SEQ ID NO: 90317 - DNA, 881 bp, Cannabis sativa
  modified_base (27)..(45): a, c, t, g, unknown or other
gattaggctattaccgaactactcggnnnnnnnnnnnnnnnnnnntcttgtgtctttacattgctttactatatatcaatttctataaattacttatcggtcaacaacttgcgatcagtgggccttctcgctgataagaaatatacttgtgattataagattcccaagtattcttcttggtagcagattactgttccgcttgaggaccaggcctgggatcgcttggctcaagcacgttaccttcaaaacactgcccctcgggaatccaatgaaggagcatcccgaggtaatcaatgtagtgggtctcctatcttacttagggctaaacgtaatacattagtcaccttccaagactcctgcctgaatttttatatttggaattcacttctcgtggaccgcattgctcataagtttgacagctgatattttagattccatgtccagattaattgtcacaagtcatattatggtatagctgagcagtccggtactatggaagataaggcaggtcacatagatgtgagctgggatttagaaccgatcgagccttttgatgtattcaaaattacaggttgtaggaattttaggggatattatggtctctctaccccttcatctagtgatagctcgccttctagtgactttggtaaatcccttaggtggaaaattatattcctccatttttatcgaccttttttaataattgtaacgcctcgtcttgttttgcaagcatgtattattaagatatcatggactgaaaggggaagaagtgggcaaccaacccttgggtccctacaactgccgaagtggttcctcccaagagacaaaggaaaaccactgcccataagaagcatgttaaatttcctcttcatcactaacaa

SEQ ID NO: 90318 - DNA, 738 bp, Cannabis sativa
aataaggctgtaaatttttttttagatataatcaaagtaaggctggttcgaggaggtgctgctgccgattgtgaattgctgctttgttaatcatgtgtaattttaattaccgcgtcaaaaaaaaattaaaaaattaataagactgtaattatagagagatttataaaatagacttatggccattaaattatatattttggtaaattagtccttaaattttattttttttatatataattaaacctcaaactatataagttttagcaaaggtccttaaattttattttctaataaattggtccccaaattttattttcttagaaacataaagttattactcttaaataatagtattttatttatttatttatttttgtattaatttaaatagtttgatattaatatattattaaattaaataagtatattttttttatttatatgtatttatttatcgagatttttaaaaataaattaaatgaaagttttagaaattaaataattaagacgaaggattttacgtgatttaggtattaattatccctaatctatgagtcagtatattgatcttataggtttttgaaatgtattacaaatagtgtttgtaatattaaatcctctttatttctctaggtttttcttgaagaagaagaagaaagcttagaggatattttggtagagcttcagctatctcttttttggtccccccccccctatgaagaaatgaaggggtttata

SEQ ID NO: 90319 - DNA, 1024 bp, Cannabis sativa
  modified_base (622)..(622): a, c, t, g, unknown or other
  modified_base (773)..(773): a, c, t, g, unknown or other
  modified_base (856)..(861): a, c, t, g, unknown or other
tttttcaattaatttaatttattaagaaaaaatacacttagtttaatgaaattcaaattcaaaataaacaagatgtaattttctgcatttaattaaataaaagaagttataactaataagatttttttggatacttaattttcatagaaaatatatttaagttgaaaattagtttttcaacctaattttggatccacttaaattagaatattttgaaattaataattaagtagaatcttcttgaaaattaattattcagatattctttaaaatatttttttaagttgaaaatttgttaattttggatcaatttaaatatggatatttttccaattaaggtgattagttcaaaatacttaatttgatatttaattaaattttggaaaattatttaagttgaaaattttgttattttggaacaacttaaattagatatttttcagaaatttattttattatattttatataattttgaaattttataattatttataaatagatttttgaaattattgtttgaaaattaatttttaattaattttggatcaacttaaattaggtcatttttattattaaaatatatagattaaaataaatgattaattaaaaatacattatttnaaataatgagctttaatcaaagaggtatttaatctccattgttggtcttacaatggttaaatattttcaatataacctcgagacgctagacttcgtccccgttatggatggttattcgttgtaagcattaacaccgtaagatctcatatgntaagtattttgtaagttttcgtttctgttagactctcccctatggtgactacttagaaataaacttacagaatatgaaacaannnnnnaagctcataaaatgagaataacctggactcttgcctactggtacaacgatggattctcattttgatcgaataaaaggttgctaaaattatatccattttagatgagctgactgctctattcaactaatgttatctttgactctcgcctaccgggacactttat

SEQ ID NO: 90320 - DNA, 661 bp, Cannabis sativa
tggggggctggggtttcgtaccacggaaacaatgaataaagccttccttatgaaatgggcttggaaattcttaacggatgaagatagcctttggcgccagcttatgagagacaaattctcgagaaaccaaaacttccttcaaatggagaccaaggcatccgattctatcttatggaaagcaatcttacggatgcgagatgaacttcaacggggcatttgcaggaaaattggcaatggaaactcaacatccatttggttcgacccttgggttccgggagaaactcgccaaccgcctcctcgtgttgagtccacgggcggtgtgagtctagtaagtaacttcatcacggatggccaatggaatgaggacatggttagacaatggtttagggaagaagatgcaagaagaatactcaatatcaacctcccacgagtactaaccaatgactcatggctctggcttcctgaaccaagtggaaacttctctgttagctcagcttataaactcctaaagaatattgatagtggggtggaaggagatagaaaatggagacttctttgggggtctaaaatccacaatagacttaaaatgctttggtggcgaattctatccaattgccttccaacaagggaaagactaggaatgtccatacccttaacagat

SEQ ID NO: 90321 - DNA, 568 bp, Cannabis sativa
gaagacactaatatctggtggcaaccttggatcccgtggctagattactcggaattcagggaaaccatggagatagctcgggccaaagcttcgtctttatgtagggtggctgaccttatgtttagaaggagcaggacctggaatcgtggcttcttgaactttgtttttggaagtgagatgggggatcggattagttctattcagattaatgcctatgctgaaaaagatttgatcatttggaaggactcggaagtgggtgctttttcggtaaaaggggcttatctgagtagccagaagtcgagacttgctgagaagcaggatttgtggaattggatatggaattgtaaaatccatccgagatagagtatgatgttgtggagggctgtggccggagctcttcccacatctgataaatatggtaagactcatactaatgattgtcttttctgtagctctgataatgagagtcctttgcatatatttgtaaggtgcccgatggccaaagctttatgttttgggggacccttccctctcagatcagaattgacccctggtgccactctttctg

SEQ ID NO: 90322 - DNA, 778 bp, Cannabis sativa
taattatttaatgtaaataattaaagttgttttgggatatttatttgaatttgaatttcaaataaatatcatggttattatttgaattctaaattaaaataataattattttagttattaattaataaatagtaaaataattttattatttttaataattaaattaatataatagaattttgtgggatatttattcttttcaaatacatatttgaattaaataaatataattgattttaggtttaaaattcaaacttaaacctagaaacaaattaagacaaaattgtcttaacccaaaataaataataaatgatattattttaaaacaaaactaaaatataattaatttgtcttaaataaaaagtttatttaagaattaattaaataaaagggtttaaaatgtatattaaattaatagataattaaataatattaattaaagttttttaattatttttgaggcttacgaagatcttaaaaaattacaaaaataccaatactgctacggagattagttttgtaatttagttccttagaaatacccaattcgtcatcattatttatttattattttaaataaatattcattaatagttgattaacatgctcatgcattagtgaataacatgccatacatagaaattccacacatcttatattatcatgcatctcataatagaaacatgatatattaggattgtcctgtgtttatatgtttaccattttttaaactgaaagcatataaactgactaagattaatttataaataacttggta

SEQ ID NO: 90323 - DNA, 828 bp, Cannabis sativa
  modified_base (145)..(149): a, c, t, g, unknown or other
ttcaggcggggatctccactgatccattaatcgtcgggggcgagttgtgggataatttacaaggacgtccggtaagtagcatcactgagttcaacgagagggcgcaggtgcttgtctagaaggaagaagcccgaaaggaaatgannnnnttgaaaacaagctcgggaggtaaacccagcaacgtttcaacaggaactgcttccacgagaattgataacttgagggcttctagttcgaaaagaaaggagagaattagggaaccatcgaaggaaagaaagaaacaaaaaaagcatgacaaatacgtgccagtgtatactatttataccaagcttaatgaaactcggtaaaaggtagagagtacatgagatagagagatcctaacaaatattgtaaattccataaagaacaaaagagatcctaacaaatattgtaaattccataaagatattgggcatacgaccgaagaatgtcaccaattgaaagatgagatagagagtttcatcgctcgaggtcattttaaatagtatgtgaaaagacagggccagggatacaaccagcccagtcagcctaataacccaaacaactaggggttacaacctgttcgtgtagaaggagaggacatcctggttatttcgggagtgctgcatatcgtaggggaaagcaataacgcccagaaaagatatgtgaaggagattaaaaacgagcagtcggtctttgccccagaaccttcaaagaaggtaaatgtaatgaccgaatttttaatttggattagtaaaggcaattagcaataattattggtaattttataattacttatgaatttaatta

SEQ ID NO: 90324 - DNA, 821 bp, Cannabis sativa
taattgggtaagggagttgtatgagtatatgactccttatgtttctatgtccccacgagaagcttatgtgaactatagagattttgatattgggatgaacgagatgggtggtgctacaagcttcgaacaagcaagtgtttggggtcaaaagtatttcaagggtaatttcaagagattagttagtgttaaaagtaaaattgatcctgataacttcttttcccatgaacagagtattccaccggcctcttaaatcaccaaatatggtgatgttttcacagttagaggtgactgcatcagtgtgtcttgtagtccgattccacctggtgaagttggaactaatttagtgcatggacaagagatttggcttccatgatatattctatatatagataaaaatcttaccataaattcaataagacggagtcaattaatgtatttatgttatttctcctgagtaatatagcgtggaaagtcaagtgtcataagtcataaatatcctttaagtttatcaaattttatagtctagtctttttatgtatgttaatgttaatttttttttttccttttagaaaagttagctatcattaaaaacttaaatctagtggcgaaaatgtcatgagaaaaaagaatgttaaaacaatatcattaaccaataaaagttaatcggtaaagagacactaacacaattagggtcgccggacctgaaccataatgattattcaaagaaagagttagcttacccataagtatatgtcgaagtactattagcaatcctacgataaaagaaaaagcaaacatgaaggatagaatatttctaaagg

SEQ ID NO: 90325 - DNA, 887 bp, Cannabis sativa
aacaaaaatatagttcataatatttcagtttatgcttgttaaaaaaactttaaatatattttcgacattgtaaattattaaaaaatttacaaaaataatgttgtaactataaagaataccgctatgaaaaaaaatattttatcctgtgatatttcaagcgtacagattaactaagagattataatatgagattgacgatatcacttttcgaatcttatttgactaaatgcattaactatgatcgatagatgtagtatgattttttttttttttctattgctttcaatttgttttattatattttgttccatttaatgtaatatctgtccaacaaaaccaaatataagtatgtttcatgtaaggtgttagttaaatatgtctcttcatatttcagttgagttcaattcaaagtttgtttcttagcactaaatgaattgagattcagttttacaaagattcaaagaatgtgacatgaaattgttgaatgtatagggaacaaatcattttgattcaaagtattgtaaccgtacttaagaattttcgacctcgtacggctcaacaatcaaattcttttggtgtccctttaccaaaatgaatgagatttttcatgaatttattctatttttttttcctagagttaacctattagggtgaattttggcctttccaaaattttctcttatctaaatacttatttggccaaaatcccatggaagaacaatatttataaaaattaattaacaagaaaaagaaatgggaccctgtatttgataaaagttactgattgcaccctatatggaccctatattttccaaaatagtaaaaataagacattgagcttaatttttgacaactttttttttttaatataatcaacttgaaaacaa

SEQ ID NO: 90326 - DNA, 1372 bp, Cannabis sativa
aagctcgcagaaaagaagtcagtcaatgtcatctatctgttagaggcaccactccctcgccaggaggtcttcaggatagaagaagtgccacataaagacggactagatttggatcctaggatcctcgattatgccgcaactgcccaagccgcggaagacaccattgagatatggtcggaatatctccgcaagtcatgtgtcatcaattgaatattgaccctgaggtccgagttgtccgacaaaagcaccgcaaaatggaccccgcgaggtaccgagcactgaaggacgaagtcgaccacctcttggcatgcggcttcatacgggagtcgttctaccccgattggttagcaaatcctgtactcgtgcccaagcctaacgtctcatggcgcacatgcgttgatttcacttatttaaataaagcttgtcccaaagacagcttcccacttcctagcattaatcaacttgttgatgccaatgcaggtcatgagcttctcacctttatggacgcatactcgagatataatcaaatcccgatgtatgaaccagatcaggaacatacctcgttcattacagatcgaggtctgtatgtttattagaagctagtaaatatgatgttcacagatttgatcggagacaccatggaagtatatgttgacgatatgctcgtaaaatctcaacatgcaggagaccatgtcttcgatttacaagaaatgtttgatatactgcgactatataaaatgtggctaaatcctcttaagtgtgcctttggagtcgattcagggaaattcctcggttttatggttaatcagcgaggaatagaggcaaaccctgcgaagatcaaagcattggtagaaatgcgatcaccgactaagccaaaagaggtccaaagtctcataggtaaagtcatcgcactaaatcaatttatatcacgatcctctgataaatgcgaagaagcttttcaagcattaaaaacgcatttggggcagcccccaatcctgtcaaaacccatatccggtgaagtcttatccgtttacctagcggtgtcagaatatgcgattagttcggtactaatctaagatcaaggacgacaatacccggtgtactatgtcagtaaacgcttgttagatgtggagactcgctatcctcaaatggaaaacttggcatttgccctagtaatatcgtcaagaaagctgcgaccttattttcaggccgatagcattgaggttttaacaaactaccctttgaggcaagtcttagcaaagcaaaaagcgccaggaagattgttgaaatggtcagtagagttaagccagttcgacattagatacaaaccgagatctgcgatcaaggggtaggccttggcagatttcattct

SEQ ID NO: 90327 - DNA, 643 bp, Cannabis sativa
catctatcattaaattgacatccactaattatcttgcctggaaactccagattgaggcaatcctcattggttacgatctctacaaatatattgacggcagtcatccatgtccttctcgcaccgttaccaccaataatgttgaagctcccaacccggattttctaccatggattcgacaagacaaactattgtttggcgcccttgttggttccatctcgccctctcttgttccgctaatccaacgattcaccacctcccgcgacgcatggcaaactcttgcacacacttatgctcgcccaactcgtggacacattaagcaaattaaagaccagattaagaaagttgtgaagggctctcgatccatatctgagtatatgcaatttattaagtgtcgaactgaccaacttgcagcactcggcagaccgatggatcacgaagacatcattgagaagatattagaaggtctttatgatgactatagccgtattaatgatatggttgagggtagggacacccccatctcatttgatgagcttcatgagaaactcattaataaggaattgagtcttcaacaatctcaattcacttcacttcaacaccctattacggcaaacccgacatcaactaagcccaatagttcgca

SEQ ID NO: 90328 - DNA, 629 bp, Cannabis sativa
  modified_base (531)..(532): a, c, t, g, unknown or other
aagagatgtgattaattttttttttatcagtaagagatgtgattaattaattttatttttttattagtgtttttgttctttgaaaacattttattagttttttaagatatatgatgtggcagtgcttattgttaatagtgggagtgatgtggtatttattttaatgacatggcacaccatttggcatattatatggcagaaaacggaaaggtacctacggaagttccacactagtgacggaaggtatttttactgccaaaaataagacttaagtacttatttgctactcggagtaaaacttaggtatttatgccgcaaattactcttttttaaaatccttttattttttcccttctaactgttttttcatttttttcctataaatttttattttaatttctttttctatacctgtaacccgatctaagttttcctcgcctgtagttaaaaaatccaaaaaattacgtaaatctaccttaccccgattgtcaatgggaaaaaagaattttaagttgatttttgaattatatnnaaacttacctcctcagaaattcgatttgcatattgatgatagtataaggtctatgattaattactaatcgttgcctaaatccttctagggatatacc

SEQ ID NO: 90329 - DNA, 622 bp, Cannabis sativa
caattttattggtccacgtaattattatttaaaattaaaataaaaaatttaaaattttatttttatatttttttcttttctttatcttttctttcttcttcttcttcttctgtcctctcagcccctctaaccctagccgaaccccccccccaaatcgtagaaccgcaatgaaaaattcccttgtaattaccggtccggtcgagctgcaaccgggttttgatgatgtcaatgggctgaagacaacaagcctctacaactcctccaaaagaaccgaagatcgtcttcatgtatggagggatcaatttcttggacttcccgtcattgtcgatgttgttgctgttggcaataacatcgtccgattgtgatttcatggcagaaagaaattagggttctggttcagaaatagagaatggaagaagaagagaaatgggtcttcttcttgagttgttgtatttcgtgtggagatttatatatggaggaagccccagccagccaccatgtgagggcagagaagtataaaaatggcggccaggccactctggttggtgataactgaccgagacctaagcccgccggtccggtatccgtgggatccagtccggttcagattgattgtagtagc

SEQ ID NO: 90330 - DNA, 1137 bp, Cannabis sativa
ggagtagactacgtcaccgaggagcttactgaagcagttcctcactggaggcaaggtgccctaggtgccaaatgggtgagtcctccgtccaagatcaccgaggcacgcatgaggaccttggaaaaggagggatatctgggtggtcttgagtgttacgtcccttcttcaaatcactgagcccctaacccacggaaagggatgtatgcttggtcgggtgctcacactaaacaagtggtgatgctgcccttgcacccatacttcaggaaggtggcggattattttcgccttttgtccgacccaattcactcccaagggcattaagtatctgtctgccctgttcatcctctacggcatttaaaaatgggggtgttgtcttcgcacgaggtcagttggttttttgacctaaagtctaccccaagcaaagcaggtcgaggtacttctacttttcttagccagatttcaaatggttgacaggcaccatggataaggtcatgagcaaactcgggggttttgttgaagagtattattttgtagaaggcatgggcaccacttatactcagcttcagcagatcctgatatattactgtccaccccttatactgctcttagagacacagctcacaggattgtcgaacttccggatgttgctcggaatatcattttgctgacctcggaggccaactttatggagtactggctttatccagcaaactttatatccctgcctgtgaaggggaggaagaaaaagtccagtgctggccgagctgagggagcaaagcaagagaaggagctcattcaactgaagtgtgaggctaagttgaagggaggtgcaagagccaagcagtatgcttaggagtattctgagtaggaggatgaggctcaggaatgttcagaggaggaaaggttgctcaaaaggaagaaaaccctcctagccgagcaaagaccgattgaacattcaatccagatcacggagcccgatctacctgctcgaccatccacccctatagaaggaaaggggaaggtcgtcctagaggagcaggaagattcgtcggatgacgatgccatatcagttcttgtttgggaaaatgcccctaccaaagtgcagggtactccatcttgtatttaattttcttgatc

SEQ ID NO: 90331 - DNA, 2423 bp, Cannabis sativa
atgaatttaagaaatgggaacatatgagcgacacgaggatgatgatgatgaagatatgggctggtatggtaactttctaggtttgggctttcttgaaagagaaagacggagggcttcgagagaggtaggcggaggagaagtcaaaatcggcagaggcaggtggaggagaagtcgaattcgaagtcacaaaatgcagaatgaatctaaacagtagggcttcgatgcgtgggtgtattacaatttgggtctgtggaatccttttgtaattataaatgtgtcagttaaaaaagatctaatataaagtatccgactttttataagtgacgctaatagtctattacatttttaaaaattttcctatttcccgtcggttgtctctatagtgtcttaggtacaaacgatgcaaaacacatatttttagtgtcttttgaaaactgacggctcaaatgattgggacactattcacgtcggtcaaccatgtgaatagtagtgttgaccgatgaaaatacccctttttgtagttgtgatctaaaaggggggcaatttgaaaatcatctaacacttccgagacaaaggggtgcaagggaatcatgatccctgctttcaaaatatgatcactaaaagccatccagttgttaggaggctgatcagcttagtcatgattagcaggagcaatcaatttgtactcgtcagggataaggtacgttttaatagcctccgtaatatcggccatctctagggtccttacatttctatggtgggtgaacgtcacctcctaggagagccttagtattttcctgggtgtcattcctgcaagtgggtcaagataatgttaattagacgcaatctttttcacatgtttcttaggactatgcaagcgacacaatagaggtatttttttaattcttttaaatctcaatttatgcattagtgtgagttggctaattgacaccattggccatctcaagagaaatctcatgtttcatgagagatcgaagcacatcgatataaaactctattttatcaaagaagttgtggcaagcaaataacttttcatgaagaagatcaacactgctcacaaccatgctaattaatatgctaactaagtgtgtcactcaagctaagtttagatactgtctatttaatggcaatggatgatgatctaatgtttctagatcaaagaagcattccttacctctataagtaatcaaaaaggtggaattgttgataccttgaccacttaaaagtcaacttaggtcttcactcggataactattatggacattgtcccacatagaattaatggtagagtattgagccatatatataagaacattagctactccacttatcactaattagttttaagatgaaactctttgattctcaacatggtatcagagccatatcacttgagggcatgtgatcctattcgatccatagctatataaatagtgaccatgtccactctgatacggttcaaaattggtgagtaaaaaataaccaccatcttgagagagaataatattgtggacaatttcccacatagaataaatagtagtgtattgagtcatatataagaatataggctactctacttatcaccgattggttttaagatggaatcccatgactctctacaatatatagctctgcaaaagctggttattacaattgcaaacaaatgcttctagatatagttgtatataattaaacttggctctcacttttctggtaataacaaccgacttagagagttcaagaaacaaagttagagagagaattagttaagatcgctattgatagattatgattcctagtgcgagttcttagatttagagggatgttaaagagatggtttattcttgaagtaacttcttttatcactacaaaaaaaaaaggccatctttagtaacaattttttagtcacaacaaaaaaaaattatgactagcactatgtttggtgggagggggagatgggtggatggagaggggtggagggagagtgatggaaggagagactaaatcacttgtttgacaagagggagagaatgagggagaggagagatagagggagacattctccctccaaatcttcaaaatttaatccgttcaaatttagaaggatagtagaaaaagacaaaatacattttgcaaaatataataactacccttaaaaaataataaaattttatttttaaaaggacaattttgtaattttactaatcaactttttcaccacccttcccatctcacacttaataccaaacaataaaggagattaacaatcctctccattcctcttactccccatcctctctatctcatccatcctactctccctccctcccaccaaacatagcctaaatgtgacttttagtcacaacaaaaaatttgtgactaaacataatatttagatacaa

SEQ ID NO: 90332 - DNA, 820 bp, Cannabis sativa
ttaaacaagtttagactccctctaaatctttgccacaattctttgtaattcacttcacgaatctgatttctgaaataccattaaacaccgaactcccttcgtctttgaagtgtgagtgtttacttccttccgaagtaaggcttgaacaagtcttctcccgaagacctttctcttgttcaatcaagttgttcaaatcgatcataaaaccagtataagaacaaatacataagtaataaaacctagttgaacaactaagttcttacaaaaagaacactctcgtcataaataaaaaatataaagaaatgaaaaacttgaagaggtgaattgattggctgctctctaggttctatttatagaacatatcaagcctagagacatccacaaaatcaattacatagttgtacaaatttttctaaaaaaatcctattttgcagcagcaaaattgggtttctgcagcaacaaatcagaccagaaaagaaacttgccaaatatgtgtctgatcataaacatggacttcatacctaccgaaaaaatgtgcttgatctgatattatcaagacacaatcgaaaacattaaagagaaagagcaaggtcaaagtttccaaataaaaccaactttttataagagaattttttctcttacaaaaagttttcaaaacaagaaaatgaacagctgaaaagagcaataaagacacaaaattaaagtgaacaaatcggtttaattgcacaagaaaatcacatgataaataaaaatattttgacacttaaattgccaaaaaaagactttacacaagattgtagttagtattggattcaaatta

SEQ ID NO: 90333 - DNA, 585 bp, Cannabis sativa
catctagaaggctctatcgctgaatcttttgtggttgatgaggcattaacgatgtgttctatgtacttccaagaagtgaaaactcaattcaattgtcctaaacggaacagtgacatcatcccaatatgccagttcgacaattttctgtattcaggcatgttgaccgaccactggtatgaggacagtcgacacattaccaatgataagcaagcataagatagagtggtacatattgaacaactgcacaaaggttgagccgtatacgaagtaagtataaattctattacaagtaagaatatttcacttcacctaaaaaatctttaacttatctccatttttatgtagtcagcataaagagttgcttcatgcaaggggtgtaggcaatattgaaaatgtgcaagagaatgagtttcctgaatggcttaaaaaacgagtaagtattgctgcctctaaatattcataatgccgtcaccataactcttcaattttccttaataactgttattttttctgaattgtagattaatgaactacggttgaacaactatgctacagtgtcaaatgagttgtatgctattgcgaaat

SEQ ID NO: 90334 - DNA, 3314 bp, Cannabis sativa
tttttttaattatgctttatttaattaaagatcactaatcaattaaaaaaaataaaaaataaaactataccactgtatataataagtaataaatatgtattaaaaaacctatctacatatataattttttcagagaaagatatacaattaatattaactaatataatttatcaaaaaaaaaattattagttaaaatgcaaaaaatatcaaaatcctaaatttgattattttttatcaccccctttctctttacataataaaaataagtatttatctattgagaagaatattaggtgagatacaatgatgattattaactttaaatttaaagtaactaaaaatgagatacggtgataataattattttaaatttatatgatgagattttttatagattttaatgtctaatttttcttcactataatgtacattctaaaaaatttatatgtttttttttttatttatataagacattgtatgataatttttctttttaaaattttataaagttctatatatatttatcattttttataataaatatatatatattttaaaattatttaatattgagttttttattcaattaacttatataataatttaactgccgcatgccaaatggaccagtttactagttgggttaaaagagagtattagaaacatacaaaacatgaatggtataaattaaaaatggacgaatgatatgtatataaggaatattcttaatacatatattccttatcaaatattaataagatcgatggatacaataatagtgaatttctattctatttattactgaatcacataaattttatttaactccctataatataaatagattaagaaataagtagtacttaggaattttttaaaaattttattctcaaatggtacgtacaaagttattaattcataatacgggaagtagtggtctaagtcgccatgagtgggttcctaacggctattacctgtcgggtgaaacccaatgtccagaatcatcatggagaccaacttttgtttagccgtgtgggctccatacccatatctatctaaattttcattatacgtaaaatatctttttaattaataaataaataaaacattaattaattaatatatacaaaaatccgggtgaatatagatttcttcttttttagcctttaggtgggccgtcaattccactatcatatcatgtttattttggagatctttggaatcccaagcggtcgttataccataaaaaaggccttttttttcttatagaatatcataaaagttaaagctccaacaaaacttataaatgtttctataaactggttagaagccaatgcctcgcatctattattataaaaatagcttatttattaaatatatatatatatatatataacaataataaaaaaatatgtcattcaaatttaaggtgacctgaaatttatttgggtaacacgttggtcaaattttgcgacccatgctgaagattcttctggtaacaaggtgtacaagaatatccaattagctttatcatgaaagcagtttgcatataccgaccataggtcacgtgttagatatcttctgagatatatcttatatatccttaagcttgcgaagcacgacaattaatatgaattcatgagatagattcgtagtaatgaagaagaaaaaaaacctacctagttaaatatatatatatttttttttattgtaattgtttaccgtgattttatcaatgagttaaagaaataataatttgcagaaattacaagaagaagatttttacgtggttcaggtgttaataaactttagtccacgagtcagtttattagcctttaaaggtgatatcgatgtgtctatagtattttgtaggaaactctaactctttacctttaatttctttttgaagaagaagaagatcaagggtaatcttagcagagtttagctatgtgttttcgtcttgtccctttacatgagaataaaaagggtatttaaaggctgtggcaggtatggacaaatctatgacccgcctaagatgtctacttaaatcccactattatggtaaattacatgcaaagtagagctgtctggatggtcacatgggtagcattatgcccgtgtgtgtagtagctagataatggataccattttgtactacttagacacgagtaacccaaatgtttaacctttaaaagaaagggacatgtgtcactcaaagttttttcctttacaaaaagaagtccatagtattcgtcaggtaaaaggattgttgtggtgcacgcactaccatgctcaaatgtaggacacaagatctaattatgtcagggaaagcttacccgtcactttggtgatctggcatgtggaaaaagttgatatctgtcatacccagtaaaagttgacatccgctttaggtgctccgactatcgtctatctaaacacataccaagccaactttctctttagacccttccgggtatgagagagtgatgtgtgtcgtatgctgtattaaatttactattattttgattccactacattcaattattttagtataaatgtaattaagggtcgatccactaaggactatatttattcaattattcaaaaattataattacaaaataggggtattgatgatgagattaaaataacaaaaataaaaatgaattaaatatgatactatggtatgagataagtagttaaatgttattctccaccctcaacattcattcttaactcctattaatgaatgtaattttaattactttttcaatcaaactattaattccacagattaagttgaagcagttaaattatcccaatcaccttattacatgtaatcaaggtaaaacgctcaataattaactcttttacctaaacagtaaatctacaatgcatgcaatttatttaacttagataaagtataaggatttgtggagatagactaatccaggcaatattttaatgaagcatataattctttgaacgtttgttctattcttcatcacaattaaaatacctttggtaatattagaaattacattttatcacaaacacttagaatcttagactattaagtaaatagtaaccctaagatgaaaatatattaaactaaaatataatttaacaatcgtctaaacaagattaaaatatctatcatgacattaaacatagaagaataaaagcaatttgatataacagaaactagaaattaatattcatcaatgaaattaaaaactcatgtctcggatcttgaaaaaactcttaactaaaaggaaactgctcagaattagacattataataaaaaacatag

SEQ ID NO: 90335 - DNA, 1073 bp, Cannabis sativa
agatcaatatcagtctcttccagtgatttctgatctttgtgatttctgatctttattatttaataaatttattatttaataaatctgattatattaaaatgagttttatttggggtacaaaacccaacagtcctatgtcacaatgtaaaactggtaagtgtttactctagaacacttctctaaaatccgaatagaaacaaagattttccaccaatctacctacgtattttggccctaaaaacaaactcgtgctatagagcttctcaagagcttcaaaacggtatgtagaacatctaaaacggacacccgagtgaaaagttatggctaaaatactaaaggttatcttctcagtaaaccctgcttggaagcctcacaaatgcggaagctcacctttggggaagcttaccttcagggaagctaacctttggggaagccaaccttcaaggaactaatctttgaggaagctaaccttcagggaagctaaccatcagggaagttacctttcagggaagctaaccttcggggaagccaaccttcggggaagctaacctttagggaagctaaccttcggggaagccaaaattgggcagcaagggctcaaaaatttctatttttaggcccccaaagctcactcctaccagaaccaaaagctactaaactttccaaaatagcaatttggggtaatctaaacataacccacaactcaaaagcatctaaaacaacatgcaataaaattcaatatggatgagaaaagcttgagttctcagaacccaaacttcttcaaatctgttacagctactaatacttccaaaaacaagccataaacaactaaacccccaaattcctaaaaattacataagagaaccaagcttaaaacttcaaaaaaaacaacaaggaataaagtatctagggcttacctttgatcttggcttaaggtttctcctcaaatccttgctaaaaatgacttgaatatggaagctcgtgaattgagttattttgacatgatcaatcatatgcaataaattgtcaaataattttactaaaattttttgaagaaccagaagattgttctc

SEQ ID NO: 90336 - DNA, 637 bp, Cannabis sativa
gattaaatgattgagatgtactctattttttttcctcttcaaatacaagccataaaatttcattaatatattgggatatattaccaaatacatgtgtattgtacttatatttttattctaatgattgtttttttttcattttcatttggtatatattttttcttgtagtatgagattctttccccaaagacaattgttaactcttatatatttagttgttacaatgttttattttttatagacaatttcttatcaaaatgtaatgaatattatggattttaattaaataagattaaattttaatttgtcttgtctttgaaattattttatttacataataatggtaatattttttttttcttttaaatatttttataattgtaaatatatataggtgcccgaactttataatatggcttatattaaagagtattttaagaaactttataaccttcaaaggaagaacaattgtatatattataatcttgttaataaacaagaatttttggtgtaatttaaaaccaaagaaaagagcctaagagcatctccaacgacacactaaatttagtattgcactatcaccaaatttagtgtcaaaaaatatttttactccaaccacaataccaaaaattacact

SEQ ID NO: 90337 - DNA, 541 bp, Cannabis sativa
ggctcctagtgttcatcatggtgtttgaactaaagaaagccaaagatttatgaaggttgaccttttggcctgaggcgacttcaaaaacatgtaatagcgagagaacacgagatgcttcttcctctgttgcttgacaatacacataactatcatccgcaaacagcaaataggagatagtaggcgcactcctagcaactttacaccccgtgagaagatgatttgcttcataatgattaatcaaggaagacaagccttcggcacacacaataaaaagatagggagataatggacaaccttgccgaatgcctctagtgggaatgattggccccaacttcacacccccgtgcacaacatgataacaaacagagttgacacagcccatcattaaaccaatccatcgttcactaaaccccattacccgaagaactgcttccaagaacctccactctactcggtcgtaagctttgctcatatctagcttgagtgccatgtagcctttcctaccctttgtttttcttttcagatagtgcatgacttcaaa

SEQ ID NO: 90338 - DNA, 601 bp, Cannabis sativa
  modified_base (499)..(503): a, c, t, g, unknown or other
  modified_base (557)..(562): a, c, t, g, unknown or other
gtaacatcaacagctattggtctaaaatctttaacagaattaggacacttaatcttaggcacaagagtaatgatggtagaatttatttcttttaatatgttacctgagtccaagaaggacaaaatagcttcacatatgtcatctccaatagcctcccagttatcttgaaagaagacactagagaatccatcagggcccagggatttattagtaggtatgctgaaaatccgcttgggccgaactcaccattggacctgatgtgagaatgcactgctccacctgccttctatgttcaagtttagagcccagcaggttccagtaaaagtctaggaaagcctcagaaatgagtgtgggatcagtgactctgctgccttcttgattctcagtagagaggattcagttttgccttatcgtatgcttaatacaagcatgaaataaggcagtatttgcatctccatgttgaatacaattaatcttgtgttagaaatattttaccagnnnnnagatttactaacaagtatgtttcattaaaaccctaatatgaattctaaaacaannnnnnaaacacataagagtttaagaaaactttacattgggtgca

SEQ ID NO: 90339 - DNA, 701 bp, Cannabis sativa
tctgttttcttaattcaattctcattgtaatataaataaaggcattcactcttaagttttgtaatttttacaaacttttgagttctttgtattgactttttaaaacaagattcatagagaaagattttcaacttgcagtaaataaatatcatacatttttatatgaatttagtaattttattgcttgaaataagatacaaagttaaacatttgacgaaatttatttatttaagattataattgtatatataaaatatgtattgggtcatcatgtaaatcagtcgaatttatgtgatttattttgaataaaatatatggctagggtatgattgtcataattttaatatatggataccacaagaataatttctaatttgatgaggggttaaattataaatagtcaataaatatcagcaactattttggcagttggtaatataaaatgtaacggtccttaatttgcagtatcatatctttttactcttgaattcccatcatcaagagactaaagttctaaaagttttgactgcaaatttggaacatcatatctttctataatcaattcaatggactctaatacacttctgttaatctatgttatttactgtttggttctcatgaatcaattaagactaaattcgtatttacagtattttatcatatggtattttcattaaattatattttacatttggtgagtg

SEQ ID NO: 90340 - DNA, 1411 bp, Cannabis sativa
atctatgcacatgtgatttttttttagtttttttttttttttttttaagtgaaatgattttttttagtttaaataaaaaaaaattacagagtcccacacgtgaattaggggccggctattatatgggtttaggttttttgttattgttatggtttgttatttaaaaaaataatagtttttttattaagactatgtgatttaggagtaaacatcactcaataaaatatttttaaataaaaatattaatacataattttatataaatattagagcaaattaatttgaaagataattatggcaaaactctttatttagtttcttttgttacaattaactatttatgtaaataaattggtgagaaaagtacttaaatgatcagttttgttgtagttcactactagtataagaaaattaaaataaagttcctaagttaatatttttttgggactttttttatttttacacttcaaaacagtttttttttcttatatttttacgaaattctacataaaaattcttattgcaactagcggagcaacctaaatcgcaacgaaaaatcgtataacaacccacatagaaactaccggagaaaccaaactcaaaccgtaaatttgaaaaaaaaaaaagttaaaaaaaaaatagtatatggagtaattcccatatttttttacaattaaatacctatataaaaataacttacattaattataaaaaagaataatattaattttaattaaaaattaataaatgcctaatactatgactatttctaaatataaaatatttgtatatatagaccactaattacaaaaaaaattactattttcggtttgccatcaaagtgtttatataagtagttaacttcaactaataaaactatattaagagctattctttagttttatttaaatttagttgtgtaggttattatctatttatttatgtttaaattatatttaaattgaagtgaatacattataaatttatattatttggaaagaaaaaaatatactatatatctaatgtaaaagctcatcaaaataaatctttaaaatataaaagttttttgaacttttagttttttacaataattttataaaaatattattaggaagtaaactttttttttttttgaaagaaataacaattttattaaatttagcattctgaatataagatatccaacatagtagtcgtagcattagactcataaatgctacgatcacaatagactcgatctagcctagcaacagtatgtgttagtcggtttgatgactcttttacaaaacgaattttaacactatattaatagtaaaattggcaactaaaactattttttaaaaataaatacctatatatataaaaaaaaaaaaaaaaaattttttaaacataataataatttaaattaaaa

SEQ ID NO: 90341 - DNA, 515 bp, Cannabis sativa
  modified_base (487)..(490): a, c, t, g, unknown or other
ccccccatgatgcttatggcggcacagcttcctccaactcacccaacttaccccacggttctgattggatcacgaactccaccaatattatttgtatgttgtaatataaatgtaggatatttagtagggctccaaaaaatcttatgggtgggatgtctcggaggcaatcagaatacgccacgtcatttaataaaagtgtgtttggtttgactgaaatttattggatcattttgacattattttgctaatattatttttaaacttatttttaatattttataattacattttacagaagaaggaatcacgagagaaaaaatgggtattattagagcatgtttggtattgttttttgttttcaaaaaattgcttttagaaataagaacaaaaaatagtttttgaagtttttaaaaacaagtcatgtttggttagtgttttttaaaaacagtattgaaactaaaagtgaatttgtgacagtcagtagtcnnnngatccgtaaggggaaacaccgggta

SEQ ID NO: 90342 - DNA, 1911 bp, Cannabis sativa
tgactagaacccatagctgagagcagaaccgaacccaaaccataacccaaattcagataagaactgacagagaccttgactaggacagggaccttgactaggacatggacctgagacttgggaccagaacctagaccgggacgtggactcgacctgctcctaaaccctcgctagaacctgagacccacgacccagaccaggacccaaaccctaacaaggacccgaacctgaacccagaccatgattgggaccaagacctagactcgaacccagaccgggacctagactaaaaccaagactcgagatctgaactcgaacctagacccaaaccaagacctaggaaccagacatagatgggggacatagaccagggacccaggcctcgaaacccaaacctatatctaaatccgatattcgaacctgaaccaggacctgacttggacccaggaattcaaagtcagacccagacccagaacaaaaaccttccctagacccaaatcatgacaagaacctggatactagaatcgaacccgaacctagacctgaacacaaaatcaaacacgaactcgggactcgaactcagacccaaacacaaaattagacccaaacctagacctacaccaagacctatactcgaacccagaccggggtcggaacccaggacctagacccggaactaaaccctgacttagatcgagatcaaaacctgggactcagacacgaacttggacccagacctaggacactaacccatagctgtagcccgatccggacatgaacccaaactcggactagcactcgaacgccgacccaaactcgaaccacgatcccaactctaacctaaactcgaactcggaattgcaactggaactagaaccggacaaggactaggaccaggactaggacaaagacccggacgcgaacccaaacctaattaaaaacgtagagtgagacccaaacccgcacctagatcgggaccaaaaacccgacaaaaactgggacattgacctaaaatcaggacagggacttgggcagcgaaactaggaccgggacccaatacccgaccctagaccttgaattgaacctaggacccagctcgtgacccgacacccaaaatggaatcaggtggggatccggatctttaaccggggcttggaccgaacctgtagttggtgtctagatgtgggaccagcctcggacccgaacccagacgcggaccgaaacccagcaccatagcgaaccttggacctaaactcgtaccctgtgacctaaaattggaaccgaaactgtaagtagaccacgacctgggaatgggactagaaccaggacttgaatctggacttgtaaccgtaaccagacctggaccatgacccggaaccgtagtcggaccatgaacaagactccaacccagacctagactcgaactgggaacgagccccggctccccacccagacctggactcaagacccaaacctggacccgaactctgacccaaacattgaaccaaactcgggacacaaaactttggtcgggacctagaaccgcaccccaatctcggtcccaaaaccaaacttggacttgggaaccaagacctgaaccataacaagatcgggacacgtgtcggggatccagatctggaactcagaccaggactcgaacccaggccaggaccccaacctggaccctgacctagacccgtgacccaaaattggaacctgaacaagaaccgcaagacgaggatgctcgaaaaagactaagaccatgacaaggaactagacccacctagaaccgaactcggacctagcccatggacccagaccgggatcgaaactcggggcctagatccagaccgagaccctgaccctaaccgagacctggacctgcagtcggacctaacctaaacctagacc

SEQ ID NO: 90343 - DNA, 758 bp, Cannabis sativa
agtccattgtttcgtgtgccaagacctatgactactcacaagaccaataaagattcctactcataacaaaatgacaactaaagacaaggaatcattcagatgacagagatttctctatccaactgaaaaatttgtctgtttgtagttatgaataaaaaaaaagagtctgaaatgctagagttttcctttctagggaagaatgtaactaaagtttttagcgctttctgtttgtagagagcctatatatatgacctctcatttttagttgtgagcacacaagttcagataataaaatctcatctatcttttcaaaaatgtctttctaaatttcctatatggactatttctctactaggatagataataagaatattaccattagctcaatattaccaactagaatgtatatcaagcaaaatttttatagtaagtgtcaatctcaatagcacaacctacaaaggctaagagaaaaagccaactttagaaaaagtattgagattgattctgactatatggattatcgttatatctctccatcagtatacatataaaagtcattccatatcaaatatacttccatatcaaataatactaaaatcttttttcttcttgctttgaatttattattatttttatttatttaatttattgatgggaacataaaataacaataatttattttattttgttgttagttatacgaaaaaaaactattttaattacaaaaatttaacgttaaaaagtaaccaatccagaat

SEQ ID NO: 90344 - DNA, 660 bp, Cannabis sativa
aaaatcattttctaatatggtatcagatattctctctctctctcttctttgaccagatcctctttttccggatcaagatccactttttccggatctgtgtctccatcatcgttttccgcgcctacaacgttcatctccttcttcaatcacgttcaaatggccagaactcgaagacctcccatagctgcaccttcagatgtcgacaactccactgttcccgtggtgcctcctccgtcagaccctcccgtctccgtcgtcgaccacgtcaccgtcgactccaccactgctcccgtggtgcatcctcctcccgcagctccaatggaacacgcaagaaccggttctagaccacgcagtaccgtcatcgacgattccaccactgttcccgcggtgtctcctcacgttcaagaaccggcttctcctcctcccactgctccggtttcgtctccatctcagcatgtccgagccgcctctgccattccacctccggtcatcccttcaagattcattcctccgatgactaatggtaacgctccttccactcactctgtcattccaaacactaaccccggttctatgcagcatcctcccgatcgtccagccaacgaagacaatccgtatttcgttggctccggtgatcatcccgggttgattcttgtgaca

SEQ ID NO: 90345 - DNA, 2992 bp, Cannabis sativa
  modified_base (41)..(51): a, c, t, g, unknown or other
aagttcatatttagggttttaaacaacatacttgtgagtannnnnnnnnnnctagtaaaataatttccaacattagcttgtgctctcgtaattttgtagtagtacacaacaaatgctagtcgtgatcttgcataggaaggccgcttaagacttcaacaatttctaaatgacttgggtccaatacagatcaagctggtctatctgcaaacaaggaaaataaaattagcgtctataatgtaatgaaaataaatactaagtgtaaaagtacgcgacgtacgaggtcgccgattgaagtaaatcctgacccctgacatcttaaatgcatagaaccattttgatttccaatctcccttattggaaattgtgccttctaccccatttatttcagagttggcccatactaaagcaatagaagccattgtcatggccaacgctctttatgtcatagaagaagccaaaatctttgattgttggctctcctcgcatatactccatatacatcgcataaaaccctaggattatgcagtagttgtttggggtaagctggaaaggagagacatcataatgagaaagaatgttcttcacgaaaggatgaaagagaagcgtcaccccgcatcgaagaatagaagttgaaacaaccacgttctatgttggaatgatcacaggatttgtaaaggggaggtgagatcgctatgttggcaaaggtttggaggtagccgtgtgaatcagattcaactttgcaaatgttgacaaatcagatttcttgactcgcgaaactagatcctcgtaggagaaaggctcatttaactgagcgttttcaactgaatctgtctcgcttccttcaccttttgttttgtcctccatctcacaatctggtaatttgaagtcctcacccatttctttgacttctgtatctggggccagtcgtgtatgaacaagatagccttgggctgacaccgtagactcgctatcacgcacttctaaggtcactgattctgctaattcctgaaccatcttgtctatcccattcgtagagaacgagccctcacgagctctggctacaggagcttcatcctcggacatcgaggttgggatgaagctgtcgctcttttttgattcatctgtgaaggctccttctccagagtcatacctttgactatctgacaagtcactcatctgaaagatagaagatctttttagtgtggtgcgagtgcaattttgacaaattaagtgccctcacttgcgttataaacatcaaagcaaaaaaactcacagaactggccatgtatctctagaaatggctgggtgtttctcagtgtcataagggtcatgttgctacatgaacattaagtcacggagaatcacccatcatttcaagattctagtaagttccaacaatgaataaaatgcaagaaaaatgaaaactaaccgcatgtctcaagaaatggtcgggcatatcatagtatcccaaggggcatgcgacgattggaagaacattaagttaatatgacacccccaccatttctagaacctagatagttttcatagtaaaaatgcatataacccaaaagctaaaataggcctaagagttaaaaacactaagaaacggggtcaaaaagtttagctattggttagacaaagttattctgagcatacgaatatacgaagtgttcttccaggaactagcgagtattcaagatgctcttcttaaaactcgtaaatattcgaggtgttcttcctaaaactcgcgagtattcaagttttaggcacgtattttccagaaaaataccacattttgcctaaactgcaaaatttaggttttatcatttcatatattttctattcctaaaagcaaaacatgcctacaagtacccaaagaagagacagcgatgataggaaaagtaaattactaacctcgaaatactaatttccttgggtaagcttgcaagagatggaatctcaggaagcaactttcgtaggaagaaattcgaaaggatgcaaaagaatttttggaagatttgaattcctaaggaagagaagaaaataatgaaaataggagggaaatgaatgggaaccattaagtatctagaggtttaaatattggtatccctcatttatagggatggagacacgtgacaaaggaatacctaaggtctctcaatccaacagttacctgtgaatatgcctgcacgtaccccgaagggttttttggtgacgttgcacctcaaagggataaaataataattatagccgtcttttcaaaaccctcaacaagacaaccaagagtcaccatctcgtgacaactactcacctacctctctctcatactttccctcatgacatggttgttaatcgcgaaactagggacatgtgttatagtgtgaatttttcacctagaaactcgagatcaggctcccataaggatgacacgtggactcacatccctcgaggattgttgaggtgtcaagacctctaaagaataaaactcgcttgaaccagactcagtgagatgatgtgaccttgataaagtctagtcgtattattacccctcgcgtaatgtaggaccaaggaggaattatacaagtctcgcatataccgagatatatgctatcactatgaagacttctcctgcagtttagtaaagatcgtttctttacatagcgagttggttcgaatgacctaacatgtttgatgacccgacaatgactcgcatgccctaggttgtcgacgctgacaaggtatctgtatatgcgactcaattaggatgcagatacctaagcgcaagacccattggcctcgttttaacagaacccaccctaagcctgcaagcttgtgcgagtatatgaacagacaacttgcactataaaaattgcatacgttgctctatttagtaaaacagatttaaactgtttttcatttattccatttacgtttttcttaatttaatgctaatattcaatgtaaaacagttcaataattaagttctgtgtaa

SEQ ID NO: 90346 - DNA, 665 bp, Cannabis sativa
atactgttatgcctgctgctgatatctttgattggagtgttaattattttttccagtacattgatgcacagaaaaacattcagacttgtagtgttgcagctcaggctcctggcatcgtttcggatggtgtttctggatcttctttgcaggtatatacggatgctgctattgacattcgtggtcaaaggtatagctttggtattgtggttgttgataacactggaattatgaaagttggtgttgtgaagccttgtattggaggtatccctgcaatcatagctgaagcaaaggcaatttaccatgctcttcagtgggttcaattgcttcaccttccagaggatgttttgaagactgattgtaaaactatagtggataaactaaatgcttgtaattggaatgctagtcctctggatgatattttaatggggattaagaacttgttatctttgagtcctaatcttagaattgaacatgtgtataggaattctaattaacttgctcattggacagcaaagttaggattaggattagataataagttagtttagaatggttcttttgttatataaattaacaattaacccaagatctatttgtatataacatagaacacaataataagatataataattaggtatgtgtacctgattgttccatagcaatt

SEQ ID NO: 90347 - DNA, 1330 bp, Cannabis sativa
gagagagagagagagaaagaatttgaaatagagagaaggctctttctatttgacaaattagactaaggagcttatcagattatgagcctatcactatttatttagaggatttcatctagagttatgatttaaattatatggaactaaaaaaaattaaataatagctaaataatcccttaagtggccgaccatgtaatgtgccccattagttttaattttaggggaatttttagttatatacgtaaatttaaaattattaacaaatataacattagacatttaaatgataaaataaaagttagttgcaccgtatataaataactatatacaactatatgcagttttttctcttactggcagaaaattaatatcaaattgagtgctatttttttttatgcattgaatgaggaatttttattttgactttttttttttatttttttacaatacctttattttttttctataattatatataaaaaaataacaattatcttattaattgtttgatcatttaaaattttaatatgtagaaaatatatttaaaatcaaaaataatattttactttattttatatattgttaacaaataaaaaattaacagatgttattaaaaaaatatgacatttagatactaattagtttatatttgtgttactttttaaggtggtcatttttagatgtgtggaaagcatatatttttctgttggtatcaaaaaataactatacttaaaagctacactttattttttttttttattttattaacatacaagtaactaaatttagttttcaaaagaaaagaaagtaactaaattttaaacttaaacaaaatatagtatattgttaattttatagtagattactataaatgtcttatcatttcatatttaaaagtagccaaatagtatctaaataaatttattttaacgtgtaatattttgataattattttttaaaaaaaattataaagaaacaaaatcgtatcttaagcatcatagaattagtaatattacaaaaaaatattattttatgtaacattatattattttgttatttaagatacttttacgttacttttaattaaagtaataaagtttattaccttcaaaacttagttgcaaatttaatgataatgtacaataaaatataagtacttactatataaattatattaataaaattagtagatgtaatataatgtttaagatactatttgattacttatagatacatattaaatgaatttagtgtaattatatcatttagcatacttttgatataaaataaccaaaaaaagtagacagatctatgatactaatttgtatat

SEQ ID NO: 90348 - DNA, 746 bp, Cannabis sativa
ttatcacatcttagggtaggaatgtccaatcccattcgagattacttacttctatgtcattaaggcatgtctcgcgaggaagaattattcaggcaacttctattacttgggaacttattccagtgattataaaaacattgttagacttcccaataaagagttcgagaatgatttgttttggacaacaagaccacccaataaacaccacccaattcagaattttacgtaagtatctgtcaggcccaaaatcttaattttgagttttagaatttttataatgaatatttttactaatactttgttcttccatatctcatttcagctattttagggaggccaatctcaacaccagtggttcgaaaggaagcatgaaatcatggtgaatctaccctatggcttgcgagcggttgatttactgcttcataatgataattcgaaatcttatggctttcttgcgaaacaccaatgcacaatggacattaggaaccccaagcatcctacttgacaataagtaaattatcttgattttgagttttagaatttttataattggatatttttactaattctttgttcttccatttctcattttcagctactttaaggggaccaatcccaacactagtggttcaaaggcagcatgaaatcatggtaaatctgccttatggcttgtgagtgactgatttactacttcatgatgacaatttgaaatcttgtggccttctcgcgaaagaccagtgcacaat

SEQ ID NO: 90349 - DNA, 759 bp, Cannabis sativa
gctctccaaaaggaacacatccaacggctcaaaaaatgaaaatagtcagatgaaagtggttctcgaaggatatcaacacccaccacatgctatagaaataaacaatgatcaacaaataggataaaccactcaaaaaggaaacaacgacagcaacaaccacaccaacaactgtaccaactacatgcatgaagggtctgtgagaaaagaaaaccaagtggcacaaggaacaactgaatgttggcaagaacagccaaggaaaaccaggaaagaagtggaagagataacagaggcagaagcgctctgcatggctcccaagaaacaaattactaaaccaatagccacggaaaacccctcaacgatgacagaaaagttgcaagaaatgatgtgaaataagttgttggccttgaaagcaaaaaagtcacatgggaatacacagcgactgggcgaggatggaaggatccacccactccccctttgggaatcacattctgcgtgtagaagcttcgcaacgttatgtagccccaaagttactagaatataatggaactggagacccatcggagtatgtgtgtaagttcaaacagaagatgcttatcgtgtcagttcttttggaggatttagaggccataaagtgtaaaaccttcacgcaaggactaaggggccctgctctatgatggttccacaaccttgctttgggtacaataaattcgtaccaagacttgattcttattcactactacaaataacccttttcatgtc

SEQ ID NO: 90350 - DNA, 513 bp, Cannabis sativa
tgccagattctctcaatccgaaagtgacttcaactcaccctgctctcactgatcagaatgtagcaagcctgatgtgtgttgaagaacttaaatgggatactgaaatccttgatgatttgttcaatgacagagataaatttctgattcttggaatccctattagtcatgctagccgtgaagactgttggagttggctatttgaacaatctggaatctactctgtaaaaagcgcttataggttccttcaacaagctaagaacactaacaaccacaactctgatctttggaaagtgttttggagaattcagataccaccaaaagtccttcatttcggttggaaagcaattacaggctgtcttcctactaaagtagaacttcaatacaaacatgtaccggttgacaccctctgtcctttctgcaacaatgcatctgaaaccatccttcatgtgcttgttacctgcccgtttgcaacctcctgctggaatagatccagtattaatttttctggcagca

SEQ ID NO: 90351 - DNA, 692 bp, Cannabis sativa
gcaatctttcttgaaatgccccaccatgccgcactgaaagcatgtcttctggttgcagtcaccgggatgatgtttcttacaacgtgggcactcagggtaagaataaacctggcgtccacctctgccttggttcccacggaaccgcttgctctgtcccgagccaccagatgtcgggataacttttctcttcttatcagtggtggaatcaccaccatccctaccataaactggactacgaagagtgggggtcccaccaacactcagagtcacatggggctcttgaagaaacttaaccgcaccatcagctcgcagagccttctcaaccatctctgcatatgatgttgcctcattggtagtaatcacctgatcatgtctaattttcaaattcaaactggccatatatttttctttcttactgaaatcagtaggcacaatacccgaggcgagcttggccagatggtcaaactttgttgtatactcaataactgacataccctcagtctgcaccaactcagtgaattctttttgcttagcactacggactacttcataataatacttggcgttgaatagatctcgaaactcttcccaggtcattacagtgacgtcccaggtgagggacactaactcccaccatacaatagcgtcttcctggaactggaatgctacgcaggtcgcacccgatcatttcc

SEQ ID NO: 90352 - DNA, 875 bp, Cannabis sativa
  modified_base (750)..(757): a, c, t, g, unknown or other
gatactagagagcttctccattatgcatgctaattaaggttgttaagctggcaagaaatacaattaaattaaagctaattaagatttttttgcctaaccataacatttatcaaatcatttaccaaatcgtgtttctcgaacttttcaagtcattaaaaatttctcttaaaatattaaaattcatggattcaagaactttcattcaattttattaacggacacgtaatgtggtaattgttcatataccgaatcatgcctttgaactttgtcatgtatcaaatcgtgtccctcaaactcacgtctgcgtcaagtgcctattagtaaaattaaacaaaattctttgaatgcaacaatgacaatagttcaaaaaaatttaacggcttagcacaatctgatacatatcaaaattcaaaagaaaaaatctttattaaccttaaattaaagtaacccatataacacccaccgagcagctaccaaatgagacaggtatccaattgtttctatttcacaattcctaacctaagctcttccttgtaagactagaaaattgttatttcacaattcctaacctaagcttttcttagtaagactagaaaattgataaaaggatacacatggtgctcagcaatgctcctaagtcctcagaatatttagtcaccattaaaaaaaaaagtaaatactattttggaccctgtgttttgcaaaagttacatattggaccctgtgttttcttaaatgacaaaatggacnnnnnnnnttctaaaatagtaaaaataagaacctaagcttaattttaacaactttttttttaatacaaccaacttgaaaacaatacttaatacgaacagatacaaaaaaatgtaaacagttttgtc

SEQ ID NO: 90353 - DNA, 1100 bp, Cannabis sativa
caatatagactcatatctgttcggaaacttgtatgttcttggtctggtggatgcattttgatttgattgtagcctgaataagcgtccatgaagcttaatatttcatgccctgctgatgcatccacgagctaatcgatctttggaagtggaaaacagtctttcgggcatgccttgttgaggtttgtgaaatcaatacagactcgccatttcttgttcggcttgggtaccaatacgagattttcgacccaagctgggtagaaagcttcaattataaaatggttgttgcgtagcttttctacttcttcctttagggctaatgctcgttctttatccactaaccttcacttttgttgtactggccggaagttgggatcaatattcagaacatgtgaaatgatagaaggatcaattccaaccatattcgcatgtgaccaggcaaaaatgcctaggtttgctctcaaaaattttatcaattctgattttacttcgagcaacaaaccctttccaatctttagctttctggtcgggatatctggatcgatctcgatctcttttaactcttccacaggtcaaacattgctgcttgggtccccaagtcgaggatccacatcttcatccccgccttgggaagtttcctacttggaaatgttctttcccttgtctgtgctctggctggaggatactttcttcttagccttgccaactgcaaggttataacattcccgagcagactgctggtttcctcttagacaccctactccattctttgttggaaactttagacatgagtggaatatcgatgtgacagcctttaagtcatacaaggccgaccgacctagcattacgttaaaagctcaaggaacatctaatatcaggaactgtgccatgatagtcatgcttgtcggagcttgtccaacagtgaggggtagacgaatttgtcctagaggtgcgactccttgaccggagaaaccatagacatactggagacatgggtttagatccttgagcttgagtcccatcttttcataagaaattttgaacaagatattggaagaggctccattattaatcatggttctgaccaccattttattggctat

SEQ ID NO: 90354 - DNA, 2599 bp, Cannabis sativa
aatagattgaatacattaaattgaacatcactctacacataatattaacataataatatatatatacacgtagaggccatacggtatctcttgtttaatagcaaaacaaccattcatcttattaaagtacacataataattcagcacaaaactaaaataaaaaagtgtaaacactattaacacagtagcttgcctcttatcacagtgtaaaaccttttacaaagtgccaattctgaaatttaaacacacacgcatttaattatatataaataaagttctaaggagtgaagaagaaaatatcatcaagcctatcattactaggagaattcccaccgtacaccaaaaggccctctttaccatttaaaagcccagtagcataggcacaccacccacgaggtccaggatgattttcctggcccggcccatcttccagcctcttccattccaacgtgtccgtgtccaacgcgtacacctcttgagcaaattttcctgcacccatgtggcccatatcgcttgggtctacttctccaccgtatataaatacgtatttcccaatcccagccgtagaaaatacacttcgagctgtaggcttttcaccttttgtctcaacttcggcccacttgctttcagctggatcatagtaatgaacatcatctacttcacatccagcaaagccatacacaacccatatctttccttgggccacaacgagcccaggcccacctcttcccttacagttgtccccaggcgatgggtacttaatccacttctgatcaaccacatcataagcccaaagatcattaagtcgtccggcgttgccacatccaccgaagacataaatgtaacgatcgtccgccgtcattgagtggtagctgcgatgaggaggtcccacatcgccagtagatagaagagtccacttgtttgaacacgtgtcaaaagagtataattcgtttagctctttgtgttcgctatctctaccgccgaaaacatagatggttgatccaacggcttccattgtgacacctacacgtggtggaggaacctcgcctgttgcattgaccacggaccacgtggtgtcttgaagatcgaacacgtggatgtgattgtctacagggacacgtggcgagaactcaccaccaaatacataagctttttgtgctactatggtaaccgcatgtgaacttcttggtccagggcaagttcctctttgatcaagctgcaaaggaacaaacatcattaatgtctaatattaatatgactccactgtaacaaatcgagtgtcatttttttttttttttttttggaaatggaaatcgagtgtcattttaaaaaacatttttctcactaaatttctctttattcccactagactcatttaaatatttgaataaaaatagaattggcaaatgacgagataagaagtaaaaaagaaaaaaaaaatgtagtattgacatctgactcagataccaccacaatttctgacctgtattatataagcataacaaaaacaaaacaataaataggcctttgtttgtgatgatctctttgtaatttattaatctttcttgtctaatagttatatgaatgaccacctctgaatgagcatttctttttcctgcctatgatcactctgtggcaagtcatttatggaaacagtacgcaaaagctaagaaaaataaattaaaaaaaaaacagtagatcaggatgattaagctaaaatcagagatgaagaacacacgaaagctagcgtgggaaaattaaatgaaacaaatcaacgaattgaaatagaagctattttaacaaaacaatttttccatttaaaaaaaaaataatgactgtaaattctgtaactgttatcatttccccttatatatttatagaagatatggaggtggtgtgattcgtgaactagtagattttggaagaatttatcaaatatatggtaccaaaaaagtataataagtggataaaaagaatcttgatagagtataaattcagcaaaagatactctgatccatttgcctaattaaataggttagagagtaacttgaaaattaccttaacccatttcccttgagctgaagccatttctggttttactaaatctaaactcaacaaaataaatctaccagttttcactataaggagctgactccactactatctctatagcctctattatatagcctttttgtttttggtttttaataaaaatatacaattgccaaaatcaagccaaacattatgatgtaatatatctgagtagtgctttttaaaatatggtgaaaagaaaggcatgaggagtgccttcacgtccactgaaactacaaagtacgaagggaataaagttatcaaattgaataaaagttaggttaaaattggtttttagtatatcaaacattactcaaccagtctatacctccctcagtttcatactttatctccaaagtaaatcaatttaatatgtttttctgttttggaagttgatttgaggctttctacttgtcatataaatttctgtattttgcaaaaattattaatttgacttctattttattaaataataaaatagttaatgtattttctaaaattgtacaaa

SEQ ID NO: 90355 - DNA, 660 bp, Cannabis sativa
cattctagatgcagtctgctggtgctggtgagcatgaaatcaggtctggtcagtttggttccttccaacttgttgactgttaaaacagccaagaggagccattgttgtaaacttcagacataatgtctttacataaattctatcaacaccatatatgtatgcaatatgtacatgaattctatcaattctatcccagtttatccattccctatcagcgtcccttatcttccccatactaagacaatgtatcctagacttaatgacatattttacctgtgtaacaaaattatttacaatgtatcctagacttaatgacatatttcacctgtgtaacaaaattatttaccgtttgaacctcttgattccacacagctttgtttcgtacgtgctttccatatcatgtatacacatgaattaaattgaataccgtgatataaatatcccttctcagttcactcatcatgcttcatctaatctagttcaatatccctttaaatctatataggttagtgccaaaaaccagactatgttaatactctcttgagacaatattgattaaacgcacatttgaaaaaccgatgttcgtgtgtctcaaggtaagttccttacatatatcgcaattctacataataagattttactattaattagtgggtttta

SEQ ID NO: 90356 - DNA, 1179 bp, Cannabis sativa
tatatatatatattttcttattagtctcgattgatatatataaagtattcatttcttttgatttttttaaattattttgaaggtaaatgtattgtactacgtacttttgcatgggatcaaaaaggtcaaaattaataacctcgatgagaatagcttttcaaaataatttagactacctcgatcaaattcagaaccacctctttataaacttataatgtatatatagcacaatgtagaattaatacaaacaaaaaaaaagaaaaaaatacaacttttatcataacgttggcattcgtgatatcataaatataactctttactcatattattgtttattgtactaatgagtaagaatgagctcttcctccaacggttaaatacgtacacaaatttttgtttcatgaagcataaccactatatatatatggctactgaatggggccacctctatagccattactgctgtagcggccgccaacaccgctttctccgactacactttcgcttgtggccccagcactgccttcatcttggcttgcaccactagttataccgcgagagacaccaacaccaacaccgaggcctacggcatggtgatcggttaaagcacccttaagagcttcctcagtatgaaagagagctctagaggcgtaagtgccaatcaccaaacccaaaaaaattaacaaaacaacacttattgtaactctatgtatagccattttgtttggaaatgaatagttgttatgtatggttaacatgcaagaaatggcacctataaatagggaaagaaaagtacgataaataaatactgataatatgcagtagtctgtaaatataatcaagagatcatgatggtttattatttgatgataaaatatatttaataaacaagacatgaaaaacaatatataagacacataggatttgttataaatatatatattttgagtaacttgccattcacaataagtaattgatgccggcctcctttgtattatatattattaattacttttattttatatatatatatatacacacataaaaaaaaaattatttatattaagttgttaattgtatttatcttgaaatgacttgatcgaccccttccccatacaactttcaataatcacttatatatatgatctttatcacgaaacttctaaaaaaaaaaaaaaa

SEQ ID NO: 90357 - DNA, 914 bp, Cannabis sativa
gaggttgctagataaagagcgtgcacaagcactgaaagaagaggtagaaaggctccgcacaaataagcttatcattgaagctttgtacttggcttgggtagctaaccccgtactagtacccaagccaaataacaaatgtcaagtatgtatcgaattcatcgcccttaataaggcgtgtcccaatgactgttttgcactctcaagaattgatcaacttgtggatgcaacagtcggacatgaattcctaagctttatggatgtctatttagggtacaaccggataagaatggatccacctaaccatgaacacacaagctttcgaacagagaggataatgcgggaaccatgtaagagggtaatcaatgtcaaggaaagtattgaagcagggatactactggcctagcttggaaaaagatgcgacggtgtttgcaaaaaagtgtgacaaatgccaaaggcatgctagatatagcaggtgccccatgctgaactcacgagcatgcccagcccgtggtctttccccatgtggggaatcgacttaattagggccttaccaacaggtagatttgggtcaaaatacattgtggtggcaatagactattacaccaaatgggtagaggctgaggcattggttagcatcacagtttaacaagtgatatacttcatcaataagttcttgatatgtagatttggggtgccttacaaaatcatcactgacaacaggacccaatttgaaggatatttgttgagttcttactgctttgagagaagcattgagaggggattctcagcggtagtgcaccctcaggctaacgggaaagttgaagcagcaaataaggtaattaagaagaacctcaaaacaaatttggaaaatcataaaggaagatgggtgtatgaactaccaaatgtaccctggg

SEQ ID NO: 90358 - DNA, 556 bp, Cannabis sativa
caagttgtggagcatttcctcaaccattttagaaacttcatgggtaggcaaagtactgctacaaagaggcttgattgtcatgttctttctcagggtccggtcctaacaatagatcaacaggctagacttatcagaccattcaatgtgaaggatgttaagaaggctatgtttgggattcatgttacaaagagccttggccaagatggttttggatcaggatttttcaaaagtttgtggaaagacataggggctgatgtttctaaggctatccttcatttttttgaggagggcactatgccaatctctatgaaggatgtcgtcattactttaattccaaagactttagatccaaaagaagctagtgattttcgcccaattgcctgttgtaacactttgtataagtgtgtctcgaagatgatttgctctagattgactgaagtgctccctagcctagtgagtgacaaccaaggagctttcgtcaagaacagactcctcgcccataacattatgattttccaagatcttcttcaaggttacactagaagaaatgtctcag

SEQ ID NO: 90359 - DNA, 790 bp, Cannabis sativa
taattgcaatagcaaaaattgaatagtagtaacaaaacacacccccgaccaagccgttcctaaaccgagggaaggctggtggcttggccgcagaaaaaaagtaacattcggtagctatatatttaggaatgagaaatcctaattttttcccttggtgtagcccatgttcttgctctttttcattgttaagtaaaatctatatcaaataatcttgtttctatttccctcttctttaggtctcttgaacctggaagttactggtaactagggagaatctggtcgtgaagttcatttccaagttctttcctccagcaaaacttgccaggttggaatcagaagtcaataattttttccaacacgataatgagtctctttatgaagcctgtgagagattcaaatacctagtctttttataaagataccgattgtattcaaaaaaaaatgtaaaactattttataaatgaataataaataaatgtttgaaaattagggatatttcgttgattatccatttgtgttggaattaggatacatctcaaaattaattgacaatgggagaactataatggtattttatttctacacattaacaatgtaaaattatttataatagcacaattgttgatactaacaatttatattaatcagctagataatattaataatttattaattaattcctatatcctttcatgtaacaattggcgtgtttctttagacattttttaaaggaaaacttaaaaaaatattgaaatttgagttaatttttataaaaatactgtcacacaga

SEQ ID NO: 90360 - DNA, 569 bp, Cannabis sativa
gttgcaaaataaatactttacaagttgactgggtgtggtgaataccgacccctcaaacctattcttcttaaacttggctttgttttcaaacattcttgtccccacacacatcaacagcaaggaaaagttgagagaaaacatagacatttcactgagatggctcttactctcttagctcaaggtgagttacccctaaaattttggttagatgctgtcacttctgtagcatatctaatcaatagactacccatccaaaaacatgaattcaaaatcccatttgagtttccttttcacaccaaaccagactacaattttcttaaagtttttggctatgtctgttttcctttctgaggccatatagatctctcaagtttgatttaaaagctcaacatgcttgttaggttacaatcctgctcataaagggcatagatgtctacacccttctggaagattgtacattgctaaaagtgtcacttttgatgaaaaatgttttccatacaaaaccttgtttacctatacctacattcaataatcctacttttattcatcaatctctgccttttccacag

SEQ ID NO: 90361 - DNA, 645 bp, Cannabis sativa
aaccagtttgtcaactctcttttcaaaattaatgagcgtgaatgggatgaagaggttgtgaaagatctttttccaactcaggaggcaaacattatccttggcattccattgagtcgatcggcaggggccgatttctggtcatggacagcagaccacaaaggctgcttcacggtgcgaagtgcctacaccttgctgcagaaggaaaaaccagcagccccagcccttgataactcgggattttggaggaaactatggcatctgaaaatcccaccaaaggtattaaattttctgtggcatgtcatctccgattcccttcccacttgtgtaaatcttgtcaccaaacatgtgcccattttcaagtcaattgtcctgtttgcaacatgcatcctgaaaccgctattcactcgcttcttacatgcgactttgccaaagcttgttggtcccttttcggttggccaatcaatgttgctgccccttcaagctttggcaattggcttgataatttgatgcaagtttgtgatttagattttgtttgccgtgcctctatgctttcttgggccttatggaaatcccggaacgaggttgtttggaagaaacgtaaatgcactattaatgatgttctagcttcagcctccaccacacttg

SEQ ID NO: 90362 - DNA, 1013 bp, Cannabis sativa
gattatcgaaccccattttagtaagaacaacctgcaaataaccccattccactctatcgtatgctttgctcatgtcaagtttgaaggccatgccatgactccatttcttcatgtagtgcattatctcaaaagcaaccataacgttatcggtaatcaatcggttaggagtgaacgcactttgagtttcagatataaccttattaagaatcaactaaaattattgctaatagtattaagagtaagatcattgctaatagctaccaatgaggtcaaggtcaatcttgagattgggtaggtcttaaaaaaaattattgggcccgattttaaaaaatatgtggtatttttaaaaattaataaaaaatatatataaatttaaatgaaaaatattttttcagcccctaggttgggtggaccctaggcacgtccgctttagcccagagtcggccctgcatgaaatgatgccttaagaatgattatcgatattctataaaaattattatattgaatcatgaagaacctaatacttacttagtactaatagtctaatagtgacgtatacttaattaatattactggtatcttttaatagagtaataatatatgtaagtatttatctaaaatatgtatcaaaatattattcagtgtggtgataatttctttatgctaattatatttattttagatgaaatttattgtctaataaagcagtgccacatcaatgtgtgtcataacaacatacatgaggtgacatctagctatttttataataattattaaaaataatatgttaaatctgatattaaattataccaataattttataatatatttaacactaaagacagagaggtgtgttttattatttctcaatataattagtataatagtagtattaagtctagttataatgagctaattcaattacactcttttcaacaaaagagaaacgctaaaaggtaactattatgtcaagcaacttcaccaggtatcatatttttattggtagagttgta

SEQ ID NO: 90363 - DNA, 637 bp, Cannabis sativa
acttctgttaaagcatcactgtgttctgccaagattgaattgaaccatcgtacaagattctgatacttctttgacttcctcaaactttcccatctaggcccagttcctgaagaatacataatactaagcatatctttcaagcacaacttgataaacagttgattgttctactttttaatcagaaattatatacctgcaagacctgaccaaattgccatatctgcaattgacaaacaatgacccaccagaaatgtacggctctctaaataaacatcaacatatttgcatgcggtctcaaatgcagaacctgatgaaagaacaggagtatattccagccattcatcaatctgaaaaagagaggaaggggaccaagtaaccaacaaagtaattaaaaacggaacactaaacaaaaatgcaattgggttatctataaggaaaatcacctggccagattcatatgcattctgcccatagaaattaggaatggtggaaatccgagcaacatatcgaagtagtacatatgttccatgcaactttagcctaaatacattaaagtttaacagaagtttaggtcagattgaaaattgtttcttacacataatgtttataagtaacaacagagagaggagcaaggata

SEQ ID NO: 90364 - DNA, 778 bp, Cannabis sativa
caaaaggacggggacatgagtctagatttggtggacaacaagtgcaattactcgtaatgacaaagtaaaaacggtaactgcacttacaaagctaatccaaggagggagtagcattggattagcagcttcgaaagttctcaaagcaaaggctccattggcagccctcaattaatgaagagcaattccccatcattgaagttgaatcaaactaccaagaatcggtcaacaaatcctacgaaggagaatcgtacatttttttagtgacgtctctaaacaaatcaatttggcattgtctttctcctcttaacattttgctaaaacatgttcacatgattgcaataaaatggcagcacacattacaatatgcagttgggttagtatcttgtattggttggctgatgaacccttccctataaggttatgattttgaaaggaattgtttaccattaaaaaaagagtactatatttttaaacagacaaaagtttcaaaagattaacaaaactccttaccaaaaaaaaaaaaaactaaatatcaattaatatcatgctctattcaggggagaatacaatttgtccaagggtccgtttggtacgcaggactggactgaattagacaggctaatttgtccagtgcagtgtttgggtatgttggaagtctggataactaatccagctaatctcatctgtctttatcccatacagcaaggtgagataaataatctcatgcaggtgagatattttttttaatgtttttttaattttgattttattaatatat

SEQ ID NO: 90365 - DNA, 669 bp, Cannabis sativa
atccttgttctgaggacgctcatattttggaaccgctcaagcatcaaaatatctcgactgttaatttctttcgaaaaccctacaacgaagacgacaatatcagaaagagatgcaagaaatatcaaaacggattgtggcaggccttgccatctacaaagtcaaacgtcagaacaaaagaacttaccgcaagagccccaagcggcgattacaaatcatctcaaaggttataacaccgagaaattgcataggccaaaggacaacgcggtttatacagaggccatatgtagaaccatcagcgaagacattaaaaaaaaatcattgaagatgaaggattttatggcaaaaccgacaacaataaaaagtctcacagattttgctggtcttgcgacctataaaatcaaactaagaggtggttcttattcttgcaaggagaagcaagcaacatcagagagtccagaagaaaaaattcttaccgagaaaattcttaaataatgatctcaaagctagaagagcctcgagctaagaacagagtatgaattgcgaaacccagggatgaaggaaaggccgagtaaggtccctgcagcaacgataataataaactttctaaatcagatttctaccttgtgcaaagaaagcataatcgtacaaaacaagtaataacaacaacaa

SEQ ID NO: 90366 - DNA, 659 bp, Cannabis sativa
aagttaatagtgggctcattacatccccttttttaaaatgatctcccgtgcatgtaaatacttgatgcaaaattcaggtgcacatcaaaaagtaacaaacaacagctttaataagaaaagtactgaaatccttgggataattatcaggcaaaattttcacaagcacctactgtactattttaatgatagatttatgctaaattaaatgtacgcttgtcaacaatttaagaaaaatgaggaggcatctagaaagtagttatatttttactttaggcatgtcaaaaagccatgaaaaagagtactatcgttgtatcttttttcctttgataatttttagaaaacaccaggatatcagaaatagttagtactgctgcacaatatcttttttatcttccccgcagtatctcataaccggagtcatcaaaacttaagaaaaaactaggaagaaaactaaatacatcttgcagttagtaacaatacaatcttaaaaaaatattacaatccaaactgtagttaccacaaaacagcatgagtttttatagtcacacataaaacacaaaaagaatgttatatgaagagaaacccatggaacagctccagcagccaacacaatacttgcatatacatcacaatcatctccaagccagataatttgcata

SEQ ID NO: 90367 - DNA, 1271 bp, Cannabis sativa
  modified_base (568)..(569): a, c, t, g, unknown or other
  modified_base (657)..(661): a, c, t, g, unknown or other
tataccatgtaaatttcccttgatcaaagttagtctttgcaagcttgtaataaattagttaaggctcaacaatgtaatttcattagatcagtatttttttttaattttattttttaaacaaaagaacattaattttattgaaaaataataaaagtgtaatacatcatgcataaataaacgagatctcatccaaactagtttattgttcactcttaagagtgtatgcactgctataattcatgagtataaacataattaagggatacctcatgaaacataaaaagtaaactaatactattctctaacaatgatgctaattcagtataaaataaatagaggattttgcaaagaagataataaaataaacatacactataaaaaatcttacttttacttttagtcacaataaaatatatgactaaagataaaaaaaattgtgattaattataaattatcattattgtgatgtgactaaagagtctgtgactaaaagtattagtcacaaaaattacaattttttgtgattaaatgtgtttttagtcacaatatttattgtgactaaaattannttagtgacaacttgtaactaaatgctatattttagtcacaagaaactttttattatgactaaataaagtcacatttagtcacaaaaannnnntgttgtgactaaaaaattatcactgaaagtaacagttttttatagtgatatcatcgaaaaaaatgaagacgaaagccaagcataagagaccagtctaacgcgcctactgccatcatcaaatatgataagaacatggattgaaccaactcaaacaagaatacatgtgtatttatagtgagaccatttgtaattttttgttatttatttattttttgcacgtattgtaaacattgttgttttgattataattaacaacatactctatctttagtacaaaataaattaaatatatattacaagttttagttgttaattataatgattgtaaacatttgattatttgtttattgttttgctaatagagtagtatatagttctgcaagaatttcttgttctttcctgaatcttcagtgaaagagctgttgttcttgttgaatttatgcgtattttattagacgatttattttcttaatgaactcctatttttattaaaagaaattaaatattacaagttaattctcattcttaaaaaaattacatttagtgccactcttttagttataatatatatttttttttaattaaacatgatttttagtcacaataaaaa

SEQ ID NO: 90368 - DNA, 1080 bp, Cannabis sativa
ggttttctgaatttcatactcagtcagccctatgtatacatcagaaacaaaatttagttaaccacaaaaagaagaaagagagaaatcaaacatttaattttatatatggttttgattgatgaataaaaataactgataatatacaagtgacttgttttatgccaataaatgataatccaaatcaaggaaataattttttttgaaactaaattaaggaaataattaatatgtatgatatgagcacatgataaatttttatatatatatcaattgcaagttcatagttatatcatatgaaatattttttaaaaataaaagacattaattaatgcattcatgtttgatcaataattaatattaatagagaaatcggtagagtaataaaagaaataaattatatatatgtccacaaaacttaattaaatattttagaaatgatttaataattagatattaattagaatgcatatttattattacctgcagagttgggaggcaaccacttactaatctcgtcaaccactacacttacatcatagtcgtactttataatctcccctatatttattatatcatgaaatagcataataacataaataaagttaaataataaatctataaattattaaaataataaatgaaccaaacaaaattaatcttactcaatatgttttcaaaaggaatggagtcccagtccaattcaagtcctgtgtgaaataaaaataaattgattattaatataaagttattggataccaaataaatataaatatatatataaaacatattttactccaaatctgaaaataacactgtacgtctgtcttattacctcgtatcgaatcaaagataggtgtcaaccattccaatcggcacgaccgccattctcgatcgactctgtattcaagttgaatgtgtggtccagcacttttgaagatgttaaaattttggaacacaatgaaagttgtgggcaattcttccaaataaacattcttcaggtttgttaattgttggaatccacatgacaccttctttagttgtgggcaaaaccagatatccaacgtttcaagattacataat

SEQ ID NO: 90369 - DNA, 835 bp, Cannabis sativa
aataatttcataattaatcacaatcaactgataatttccaaattaactaagcgggctttacagatcccttcgttgggggaaacagaggcttgtgtcctagcgctttagatagtaactgcgtggagggagatttttgttatcattgagagcgattcagaaattattatcaaagctttaattggggattgatcaaactggcgcattgataattttgttcttatttgtaatagactatcgcataattttttgggttgtaattttatttttatctcgagattatgtaattttgttgctcacaatgttgctaggtgggttttttctaggaatcttacaggcatggttgatgtgtcaactatttttgaaaatattatatgtaataactacgagatctaatttctttgtttaatgaatatccttctttaaaaaaaatgagaaaatctaccacaaatgtattctgaatattttgaataacttttctatctataggaacattttggctccaaagaacatcatttctaccaattcatataatatatacaacaacattaagtataagtatggaaatatagacttgcttttctaaattttgaagccttacaattcttgcatgatccaattctctttttaattttgtattcggtgaagccaatgatgccattagtccaagtaaccataaaatatcaaacatagtctatttagagtcaaactactattacatatacgcagggttatcaacactacataaaattttactttttatcacaataaaatttgtaattaaaagtaaaaaaaattataactaagtataaattattattcttatattgtgactaaa

SEQ ID NO: 90370 - DNA, 607 bp, Cannabis sativa
cactctttttttgatatatttttgagggccccaaaatttaattcgtcttgggcccataaattttcagggccggccctgttggttagtatgatacattaaatatttgaatcttcatttagtattgttataatttctttgtagtatataattttattattatggtatattaattttcagtgatataatatatcaaatgcttttgtataattaataatctaatatatttatttatttttgttacaatataataatatgccatactaaaaaaattattaatttaattattatatattattttttaaaaaaaataatatgtagtaaatatatttttataatttttattaattaatttattatatttgactattttcttaatttttttagaaaatggacacttattaatttagtttttaaatttagaatcattttgcattttagctcttttcttaattctcatatcggcatgtaatatttaatttattttattcttcctactatgattatagaattatgattagtgaataagtttgtgaaaaatgtattggcatataacaaaatgcggtttgtttcctaaaatctataaaatgtatggtaacacactctaata

SEQ ID NO: 90371 - DNA, 1111 bp, Cannabis sativa
actgtagcgtgccttagcattagggcgttacattgaacatcctccttgccacaactaaaaaactccctaatgctcaaagaccataacaaaaaagatgtagacaataagggcttttccaaactgatgttgggtacaacaccaatgaacattgttagctcaaggatgagattgagaatctcattaaggtggggaatttccacaaatatgagagggctccacctactagtgtacctttaatcactttagagcaattattgtcaagacaagctcttctaaatgtgagggtaatgtgttgagagactaggaagccatttgtgaggaaaaaatagtcattcacatcctttgtctgcttctaaatgctcttgtggactaggccatcaattgaggtgagtttgtataggtaatgtaaccatcatgacctagatgcttcttttagaggacacaaatgagattttataataagataatcttagtcaaagacaattcaggctacccattttctttgtacaagacttatataccaggtatgttggaattaattagaatggagctatctccatgaatgtgaggaaaatcactaattattaatgtaggggcaagaacatcgctgacatcaaaagggattgattctaggtgtgacaccgactcatgctctcgcatgtgtgctcttatctctatcacagattgttgtagaagaatctattggcagattccatgtagtatacttcatcaatgctcctaaggatgttgagattcatgagctagatgattcggtgctctaacttgttcttaacccccatttggacactatctagacccaaaactaataatatcatattaatataagagtttttagtgagccttaactagtatagacgagcaaatgctataatgatcattccacaaaatcgggctgtggaagggatcccatctgatatgttttagatgcgcatggcttgcatgcaacctgacacaaaggacaattctactgtacaagaggttccctttgtatgtacctaggaaacatatttttttatatatagaatacaataaatctaagaattcatgcactcactgttctaacacaaattagggctcgtttggaacgccg

SEQ ID NO: 90372 - DNA, 686 bp, Cannabis sativa
ttgttaccatctgaacaattaaaacctaaaatatctttgctgacgtggactaacactaatagtacgacctccagacaaaacactacgagtcccagacgcaactggaatgcaattggacataatttgtcactacagaaaataaaggttcttacaaatactaatatttctgcttagacaacttaaaaatttcctacaatatactataaagcaaagaataagttcatataaaagaaattgtattaaaaatggtaaaacatatcctaataagataaatatattaaaataaagataaaagaaacaataaactacctaataaaaaaatagctccataattccttcacagttagtatgtaaaataaactacctcgtataaacttacaaagaaagcatactccaaaattctaaccagtataaatcttatagcaaaaaaatcatagaagtctttacattcaaagtcataagaaaaaatcaagtgttaatcacaagaaaataaaaaaaaaaggacgacaattatagaaacttaaaaatccacttacaccctaaaaacaaatacccgaacttgtctttaaaaccatcaacacaaataattactccattcaaaaaatgaggacaacaactcttcaaaaaaaaaaaaaaatacatatatatatatacactataaaaatgttgggaatattttatcagga

SEQ ID NO: 90373 - DNA, 937 bp, Cannabis sativa
tatatatataatatgcttaccaaatcttgttgtgaaatgttgtaatgtaagaatcgttctccccaaatatttgggtggaatttttttgtaggacgaacaattatatttgggttgtcatttgaagatgatgatactaagatttgagtgggcatgatgatgagattaattagggttttaacttggaaatataaaaaatgttgggaaacgacaactatatttatatagagattgtacccatgttatgtgtctagattctatttactttggctttttttttttaattttcaaaattattatttaaattatatttaagatattcaaatagttggcctgtgccctgttgtaccttaaaataaaaatcaataattattttaaaataaattatgagaaataaggaattgatcaatacatgatttcggtataaaaaattttacttttgatcacaaaaaaagttgtgactaaaaataaaaaagttgtgactaattataaattatcgtttctatatatgttgtgactaaaaagtttgtgactaaaagtattaatcataaaaatttcaatttgtaatgactaaaaattatatttagtcacaaaaatttatattttgactaaaaattattactaaaagtagctattttttaaagtgtttggaggtaaaaataataaattaataaaaaatattataaatatgtacgttttaaaaataaatttaagttctcaaagtaattgttgcacaaaccccaatcctactagctgatcagctataataccactaaataatataaaaatgtcttgttttccccatatgagattttatgagagtaaagattaaaataagaattatttcaaaaaaaaaaaaaaaaaagaagaataaaatatacatatatatttatatactagatagatgttacgtgtcagttacgtatgttaattttatttt

SEQ ID NO: 90374 - DNA, 742 bp, Cannabis sativa
tgttaaatttataatttttttaaatatttataaaatatttaaataattacaatataatgaattaacacttatcaaaaatcaaaataaaacaagaataaaaaaattataatggttaaatcaaccaataacacaaattaaaaaataaatactaaacaaacaaaattcatcacttgtttgttttcttcaaaattaaaaattcacggaaggaattgtcatttagcgaagcattattcgatcatcatcaataatggagaaatactaaagagaatacaagagttgagctcatcaatattggtgtcttgtacctcaacaatgatatcttacaccttacaaataaactcacttgagagagtagtgatcaaacacacatcctctttaacataacaactattcttactccttacaaatgtagttatcatctaaatctctagatcatcacctaaagaagtaatgcacaaaattttatataggtaacttaataaattgaaataactaactgtggagctaattggacaaacttgcaaatctataaggtcactccatgaaaatagcactagcagtacaccaaattataaaaatctctcatagataatgtacattgtcttataaaaataattaaaattaattaatattatttgaatgttcaaattaaacacaaaatgggtgcatcagtactaggggtgttcgcggtgcaggtggtgcggtttttaaccattttttcaaaccaacccgcacatgcagt

SEQ ID NO: 90375 - DNA, 1158 bp, Cannabis sativa
acttgctttgctcaagaataagacctggacctatgtgaaacttccatccaacaagaaagcaattggctgtcgttgggtatacaagattaaactcaacagtgatggatctattgaaagacataaagcccggcttgttgcacaaggctacactcaacaagaaggattggatttcttcgataccttctctcccgttgctaaaatggtgactttcaagttgcttcttgccatttctactatcaaaaaatggcatactttacaacttgacgtcaacaacgccttcttgaatggagatctacatgaggaagtgtatatgcaatttcctaagggccttgatttacctcctgaattttctggccaaaccgatattgtttgcaagttaaataagtccatttatggactcaaacagtcttcaagacaatggtatagaaaactgttcgacgccttaatccaagaaggcttcactcaatctcaagctgactacaccttgttcaccaaaggatttgaaaacaacttcattgctctcttagtatatgttgacgatattatcatcacgggtcccaatctctccttgctgcatcaattacaatccactctccataacaagttctctctcaaaatccttggcaccctcaagtatttccttggttttgaaattgctcgggctcctgaaggattggttctctcccaaagaaaatacactatgcagcttcttgaagaaactggatactcaggcagtaagccaactaaaacacccatggaccctcggctcaagttagacgatcaacaaggcgaggcccttactgatccatcctcctatcgtcagattgttggcaaacttctttacttaactctatctcggcctgacataacctttgccgtcaatcttttgagccagttcatgtcttcaccacgtacaccccacttacaagcagcacatcacttgcttagatacatcaaaggcagccccggtcaaggattattatattcagccacatcctccctacaacttcgaggattttctgattccgattgggcatcttgtcccactacacggcgttctactactggtttttgtatctttcttggggactgtttaatctcttggaggactaagaaacaaccgaccatctctagaagctctgctgaagcagagtatcg

SEQ ID NO: 90376 - DNA, 605 bp, Cannabis sativa
gagaacaatggaacacctgaagataaaatgaattcagcaaataagactaggggccgaactactttggccaatcttacaaagagaaacaatgacttaataaaaataaattgcaatgaaaaaggccaaccggttagtactaactcagtgcaattttcttcttatgttggtgctcttgtgagggaggtagttcctcatactatttcagattggaggaaaatgtcaccaatcatgaaggatattctttgggcatctattcaggtagccttcaggttatatagttgtattttttttccttacactctgctcctcataacatatatataatgtcacttaatatgcattttatgtaggcataatatgatttatatgatgattggcaaaagaagatgtgctttgaaatgatggcatctctatggagatctggaaagtctagattagtcaaagagcttaacaatgcaaaaaatttgaatgagagactagccatgaagccagattgcataaaaagtgacgctgaatggagatcatttgttactcaaaaaattagtgaagcacatatggtaaaatttgaaataagtactttaatattagtgtagattaagttaatg

SEQ ID NO: 90377 - DNA, 709 bp, Cannabis sativa
ttgtaatctacttgtgaagactcgatttgactgagtctaactttatttatatatataataaataaatataatatgtatacaaaaaaattattatatatatacaaatcagatctctatcgtccctctctctctctctctctatctatctctctctttttctctctcttcaaaacacaaaaaaaaaaaaaccacaagctccatcaccggtggactctgacgacccacctctggccaccgaccagctccacacaccggaccactcgaatcccctggtgccggcaacctcaacccacaagcggtgccgctcctttcgctgtcgttagctcgagatcgcaagtcaaagtttggtggttcaaactttgaacggattttccgatcacctccggtgtccatttgacgagtcgtcttcaccactagactcagctcgtcgaggagaacaacctacactaagctatttcacctagttcgctactttttccagtgacatttttgtagctccgccgctttttggcgacattgtgtactgttttcacaaacggtcggcataagtgtgatctactcgtcgaggtggtcgttttgataatatacactacccctatttccgacgatgttttcagtacaccaatttttactgccactcatagttaatctgcaccgcttaggtgaggcttcggaacctcaaatcttaaatatagtcatattatatgtc

SEQ ID NO: 90378 - DNA, 737 bp, Cannabis sativa
ctttatggagaacctaatagagctattaggcataaaacatgggatttattgagatcgttaaagtcaaaatcatcccttccttggtgtagcattggtgatttaaactatactactagtcgtgcagagaaaagaggaggaaatagatatctgcaggtgctggtggatggttttaatcaagctttgtctgactgtgatcttgttgatatggagttaaccgggtatccttacacttgggagcgtgggagaggcactgattcatgggttgaaattcgtcttgatcgagctcttgtttgttctaactggtttcagaggtttcgtatggctcagctacataatctggaagtatctgcttcagatcattgcccgatgcttcttgaaccgacggtgcattctgtgacggtgccatttcgtcaattctattttgaaaatgcctggcttcgtgaaccgctgtaccgccaggttgttaaagatagttgggacatttgtgaaggttagcatgttatgaagaaaatctcttattgtggggaatctcttcaagcgtgggggtgagattatacatgcaattttaagcaaagaattagccattgcaagcgggaaatcccgtattggaagaaggggcatgatgctatatccattcagaagttctgtgaagctgagctgaatcttagtgaagttatgaaccaatgagaagtgttctagcgccaacgctctaaacaattgtggcttcaagaaggtga

SEQ ID NO: 90379 - DNA, 723 bp, Cannabis sativa
aactaagcgggctttacacatacacttaaataccacatcttttttttaacggattaaataccaaatgtaagttttcatctatttccattactacaattctgttaaatgctgactgtaattattagagtgacacatgtaaatatataattagtccaacctcatttttaattaaaatttatataatctaatttaaaataataaaaagattcttcaaaaacatttaatcggtttccaaaaaaaacaaacattaaataaataattcccttaaatcttccattacattctctcttcccctataatctcaataaaaatccagtccaccaaatcaaccaaattaggttcgtctcccccctctccagccaaaccaggttcgtctcctccctctctttctctctctcctccatctgccaaaccaggtgccatctcggcgatcccagccccaactgcccaaagatcccagccctagcccaccgcagctccgacggcaacaaccccagcgacacccccgagttctcccctctctctttctcatgaactttgctgtctctcccgatcttacaccctccttctctgttcatctcatctctatatgcttagattttttctttttgcaggtttctcaatggcacacacatttaaatgtgtgttttttttttttgctaaagaaaatatgcccagatttaagtttaaggttgtgtggtggagtttttttttttttttagg

SEQ ID NO: 90380 - DNA, 1238 bp, Cannabis sativa
ataggcgtgtatgagtaattgtgtaataaattgtgtaaaatggatttttcatgtaaaaatttcaaaattatattattagttatcattttatataaagaaaagaaaacaaaaattagttatcatgatttttttttctatttttactcttctgtgaacttgttttatgaagaaagtttgataataaatatttaaaaattaaaaactattttactattataatatacattataaataaagtgtattttttttttttgaaggaaagtgttctttattaaatcgagcaatcactcgcaagaatagacatcaattccgtaggaacactattaataggaaacatgcgttcagcaagggaaatagagtgccgggcaacaaaatgcgcagcacaattcgcagaacgcttaacaaacaaaagagatacattactcaaactcccaaggagtttcttgcagtcgtccaccactgaaccgaaggaggaggcgaacacctctgcactacgaatggattcagcacacacaaggctatcggtctcgacaatagcttgggagaagtggtgatttttcagccaactcaatgcttcccgaatgcccatagcttcggccaactccggggacacgctgccagttttcacaccagcaaaggcagcggtcaatgtacctgcagtatctcggacaacacacccgaacccgtgcgatgaagatctttcaaaaatggctgcatcgacattgagcttgattcctatattcggcttcgaccaaagctccgcaccatctccatctttgagaggagacaacaagggaatgttaccctttccttgagctttcaaccactgatcaagactcaaattagcaaaattaaccacgtcctgcacactacgagatcgctgctgccaaatgagatcattacgagcacaccaaattgcccaacacaccatgataactctgctatgaaggtccccttgcaggcggctaaaagaatcgctcagccaatggccaagagaggaggcttctcggtttgcagctgccagaccagcgtattcccaacacgcccaggcgaagttacatgtaaccaggacgtgtaattcagtttcagcaaagattccgcacatggggcaggtattttcaatcaagaccttcttaatgcaaaggttggctttggtagcgaggcaattagaggccgctctccaaacaaggtccttagctttcggtggtgtcttaagagaccataaaatcttccaattg

SEQ ID NO: 90381 - DNA, 1851 bp, Cannabis sativa
ctagtgttgtgagatggataataaaacatgtaacatttagaccttatagtatttctgatgaaatgctcctttattgtatttgggcctatatctatcctttgacaattatattctaaatgtatactaacatttttaaaatgtgtacatgtcataaaatcagtttccaacctaatcacaattcaaaatatatttgagaaataactttagttagaacacgatccgatatgtacactcccgttgaagaatatcaacctacaaagatttaaaaaaaaaattacagtttgctatgcagactcaacaatgctcagtttcttaaacctgtcacacaccattatttgggtgtaccaggtgtatgcattgggcagtgaatctttgcttttaaagaaactttgcaaatagactaggagtttatccatcctcacgcattttaatgtagtatttttcatatatatttaatctcactttcttaatatgcaaaatgtattctttctctacttaaaatttaaatgtctttgaaacataaaaaatatttatttttgtagacatataatttatgtgagttattattaaatgagatgattaattttttaaaatgtgagtccatatatacaagtttaattgactttaatgatttttaatatgacaaaattccattgtgcaccatttagcttgttagtatactttttcttggtacaattcacgcaagctctaaataaagttagaaaaatcaagtgtaatgagtattcctactatttactaatatttattctatttatagagatatgttccataatgttcggtgccataatgtaaaggaattcttattaataacatttgtcttatttccatatttaacgtacatatctttataagtggtatcattttataaattaatgtagtaaagatctctttgacaattgatcgctgccttagggtcggtatcgagtcaatttcattaagcctatgagacacatctcatctttattattttcaaacttaaatatctcatattttttttcaaaatataaattaccacttcttgaccaagttaacaactaaccactatgaagcttagttgcactttgtgagtgtaacccatcatttcaaatttcatgacttaacttagtgtgtcgccttaagggtcgatgtcactccaaaatacatcacttcctcttatcttagtcaagagatcaatcttgagcaacagtatagacacatacctttcttagggggatgaaaacaaagttgtctcgaggccagtctatactccatcggtgttaaccaataatggaggtcgtagattatattgacatgtactccttctcccactcactattttaagctaatgtgtttggtttatttattcttaaaaactttaatgattatgattaatttacctataataaatgtctcaaattataaataaatttctcgttataattattaagtctgaattaactctttaattaataatttaaaactctttaaaattaataggttaattttaaaatttaccaagttatttataaattaatcctagtcaatttatatgctttcagttttaaaaatggtaaacatataaacacaggacaatcctaatatatcatgtttctattatgagatgcatgataatataagatgtgtagaatttctatgtatggcatgttattcactaatgcatgagcatgttaatcaactattaatgaatatttatttaaaataataaataaataatgatgacgaatcaggtactaattgggtatttctaaggaactaaattataaaactaatctccgtaacagcaatggtatttttgtaattttttaagatcgtcgtaagcctcaaaattaa

SEQ ID NO: 90382 - DNA, 764 bp, Cannabis sativa
gagtctactgcccaatccgagaacttcgaggaagtccctgttcctacagatgcttccccctcggctttctgtatatctgcttcttcctttcctcaagagtcacctcgggtggtatctgagatcatacgccctccttctttttccaaccgtcgggggtggcttgcaatgcggaggacgtttcagcagagggagagtttctccgtgtagagggtatccttttttctttccttcccctttttttttttttatatttaccttgtaggcttacgtcggcgccttttcatattttgggtttgtattttgtaaattttgtaagtttgcgccagcgttatataacacatttatcatattttgtacgggccactactcccccagttttttgaaaatagagtaagtactcttttttcataaaactttagtttttgtgtaaggaggggtagtgggttttctgtttcatgctctcgtagctcttttttaatgctaattttactttatattctgttgtttcacgacgtgtacttgcttatccatacgttttaatttcgaacggagtttttattttttatattgtacttgctggatgtcctcttatggttttcgtgctttatgtattatcgtaccgaacggtcttattcatgccttttgtgaaaaggtcttttatgttgcctttcttgaaaggtcttttttgttgccttccgtaaaaggtctttattccttttatttttgacttggacgattgttttccgaattcccctcatttttat

SEQ ID NO: 90383 - DNA, 1147 bp, Cannabis sativa
gtgagtcaattaataagcgattacgaatgtaattaagacatagcaaaaatcagtaaacaataaagaacacaggattttttaaagaggttcggtctctttagtttggtaataacatactccccttagattgtattgacttgagaacaaaaaacacagtgtttcctctctcaaagctctcacaatgaaatctctaagtattctctctttgatctctctctaaagcgattatttcgaccccttttacaatgagaataaatcactatttatagggctaaatgcatgaggaaaggtttcccttttgcttacaatatctataattggcaagaacatacattacatatttagaatacataaaatgggggattgagacagcttgagtatctttctagtatgatcccatgattgtagggattgcttttgtgcttgagcttcacgatatcaaccttgaagtaattaagtcttgatacacggctcgaatcactctttgctcaggtcatctacccttgccctactcggtcaagcaggctttatgcttgcagatgtattactcgaactctgtttagaacatttctccagtcaagtgtaaagaataactaacacgtgtcactagtacatattgccacgacatagtgtaaaaaatgggataacatttgcctcccaagtctacacgggacttccaaagttgggagtagacttcactcgatttgaattcgtgtttgaacgggtggcacgtgttcgatatgcatgttggtgattcgatgtgattctgaccaaaggtctcgtcaatattcggctcataaacactaattgattcgtacctcgaacctttccaaaaatttgcacgcttttgatggttgctcttctttaggtacttgattacttaatttcccaacgtttacttttggggggaaatcgaggcgtttaaattttaaaatgattacaactcatcactaattttcttacaaatagggcaaaaagtcctaataaaccacttttagcatttttcttactttgacgatttcagagcaagaacacctttttctctcaaatactttaaagaatttccagaaggtagtggccaaaaatcatcttcataaacataatattccattgtcacgagctctttgacttgaggaatgcaagaatg

SEQ ID NO: 90384 - DNA, 912 bp, Cannabis sativa
ttgttgtagcagaattactttctgcttctgcagacgcatactgttttatattttcttatatataattgacatttgcaaaaatacggtttttcattatttttctttgcagggaatggtgaacaataaatacatgtcttatgtctttaaataagattggtcgtgttcattgttattcctatactttgatgttttaatgcaatttttttgaaattcttttgggtattcaaaattcactataaaattgcatcaatattcaatgattctttagttgtatttatataaatacaatatttttgataaatataaaatatttacttaaagaaatatttacccaaatctataacgatattaaattattcttcattgtcatcaaagaatataaaaacatatatatgaatatgtgtattaatctcttttattatatttcagtcaattatatgacatgtttgcataatcttcaggatatatgcaagattttctcaatgatacataattttctaaatatatgcataatttatatcgatttttcctatcatatcataagcacaaattatataaaatatattataaatattgtaaataataaaaatataatatatataaatgaatgtaagaataactatacgagaataaaaatatatacacatgtataaataatatatacatacatatataatatatagatatatagataaaaaaataagaaaaaatggttcttgaaattattttagtcagataagtatatataaacatatatttagtgtatcgtgactttaaaacaatttaaaaacttttacaaaatatttatcttagggtttggacaaagattcgtgctgataacgtgttataaaagaatatagaataatataaaatagataagaagaaaaaagaagaagatgaagagagaaagag

SEQ ID NO: 90385 - DNA, 611 bp, Cannabis sativa
  modified_base (101)..(117): a, c, t, g, unknown or other
aaggagtcattatattccgctgaacccaatgtaaggttttttttaaacccttatgtgtttatttcattgttttagaatattaggatgttaatgaaatatannnnnnnnnnnnnnnnnatcttggtaaaataattccaataaaagatcccttggagttgggtgaaggcgagtgggaccctctaggaccacgaggagctcccagaagaagtttccctctgggagatcttttcgcttggtttatctctcgtgatgatatatttcttctaagtgggccaattgccatctctcagggtccttggcattcccatcatccaagtttcatggcaacatatccaactaaacaaaatcttataaatttttaatattagtttttttttttaaaaaaaaaaaaaaatagagttatacaatttatgatatttagaaattagacttttaataacaaatatgatattttttattattaaaataataaaaaaaattagattacacaattataaacttatgaaagttcaattttaaactataaaagaattgtttttatgatatgtcatttttctagtttgaacaattttactattgtctagttatagaattttaaaagatcataattt

SEQ ID NO: 90386 - DNA, 1493 bp, Cannabis sativa
aggactttacatagtctatcttaactgggtctaagttaagacttatctcgtcttagtttgaatcatgtcctttctcggtctggttcgagttaaatcttatcacgacctggtctaggttaagattttcaatcttaatttttcatgtttgttgttatcatcttctttctaatcgacttttgcaggttttgaagatatcgtgtcatagttcttttcactttattactctattggactttttcctcccttaatggactttgtaaaaaactatttttcttccccaaacaatcacttgtttttcttaagaaaaaaaatacatatacattaaaaaaaaaaccattaatatatatattttatatagttttgaatttatttactttaattgtagtcaccgaattcttttatactttgttgtattccttacgccattataactttccaagcttaaatatataggctatatcaacaaggaaagagttaaaattttgtctacttttaggaaactagtttaattctcaagttagattccctccatacatatatatatatacatatatatataaatcaatttagtaatcaaaatgtttgaagtacatttactaataatatttagcaacctgcgatcaaagatggaaaaataaaatgaatatttttagtaattaattagtttgagaattagttttgtgcatgtgaggagagagaagcactttaatcaagatatggagatatgtagaaactgcctatattaattgtccgacaagtaaacaaccaaatcgtttatgctctttcctttgtaggcaaaagcaaagccaaatgttacaaaaataaataaaagaagatgaagataaaagaaacatgttcacccctttaactatatttttatcattgtacttcatcataatcttattaatattttgagttatttatacaaaaaaataaaaaataaaaataattaaacttccatgcaaaacacaaaccaatttcggaaattattgtattcaaacatgtctagtgttaccacttaccactcctatatatatgttacctctctcatcaacttgttaataatttcttgattacctaaaattatttccaccaacccaataagcgtgcaatctgatccccttaataaccatatgcatgtgattcgaatgagttacctcaataacatggccttttttttttgttgttgggtaaagtatagtttttctcaatgtttgaccaattaactcaaattaaaaaagaattaaatataaatttgttgaaaaatgatgtgcttcaatagaaataataaaccaaaaaaatacaactctatgacaaaaaaaataagagaacataatattgataaaataatattataattctatagtataaataaacataaaatagaaaatagtgaagataaaaagtattataaaataatataaaatagatgagaagaaagaagaagaagaagaagagagaaagagaacgtgaatgagaatgagaatttctca

SEQ ID NO: 90387 - DNA, 1711 bp, Cannabis sativa
  modified_base (1220)..(1223): a, c, t, g, unknown or other
gaaatgtgtttattacctgtaaaactaaggagtctttctcttgttttaaggaatcaaattgagataccaaattgtcatactcagctctaagatttttaaaatcttgttcaatttgtttcgatttccatcttgctcttcgattttgaaaccatatggcaacttgtttaggctgcaaaccaagctctctagccaactgaatcttcttctttggctcgagtttagtctccgattcgaatatggattccaattgcttaatttgctcatcactaaatctcctttgattattactattgttattctttttcttctttgaaataggaataagagagtgttgaaatgaaggaaattgatctccactctccattatggttttatttggataatattaaaaatgttatgagaaagtgttatggaatttaaagagttgatgaattgaaggaaagaaagaaagaaggaattccacgcacttgttttttattttttggtgaattaaattaataatgaatttagagtattttgattttgattttgattgattgattattgttctaaccaatgagattagatttcttgtgctactatccaatcttatgccttgtggacatttcttatctttcaatatattttttcatgcctaagagctttacatatttaatttaatcaaatatgaatataatgatatgtgcccacaaaattaaatactatatttaataatgtgataatattttttaaccaattatatccgattaaaatgagattcttaatataaaaaaaatactattacattaatcaaaatattgatttgattttgatatattttgtgtgcatatatcgttactcataattaggactgtgttaaggaccaacctaatattaggccaaaataatgttttttctcttttaaaaatgtatataatttctttttactaattttaaaaatattatacatattttttttttcaaataaaagtttttttttttttttttttttaagttcactaaaattcagaaccgaccatggttttaattaaatccatacatatatttgctttttcttttagtctcatcactttttgtaaaaccataattaattagtcatctcattctaaaggaaagacattcaactaagcttgctaggtagcctacaatttctgagtgaacaaaaagaaatggatatataataataatatcactccctttcaaaataataataataatannnntaataataataataataatatcacctttttcaaaagattacttatatgtgttagttttttttaataaatgaattataaacactttattattattattattattagtatgttgtttgctttaattttttttttcttttcatattattaatttatttaatacaaaattatatgtatatatatgttacagtattcgataaatgtggctcgtataaaattaattatcatgaatattaattattaaatataagatatattatggtattgattaaaccatagatgggtatatataaaaatgaaacaaataacaaaataataagatagtgtatttctttctataaaataacattatcaataataattaatttaattaagtactgttatatttttattttatttttgcaaatattacttagaaatggacctgatttagtaatgtagggtcattaaacaattggatgcatatgcatgaattaaatatatatatatat

SEQ ID NO: 90388 - DNA, 563 bp, Cannabis sativa
ctttacaacttatatgatcgggctataaaaatcactaagtacacatttatacaaatattctactatacatatatattcaactagattaaaaaaaataagtttttaaaaaaatatgtctgctacatctactttttctcgatgatgactgttgatgttgtatctctctgcataaataaataaaaattagtgtactaacaaaaactataatagctaacgaaaaataacattacctctaaaacaaacatatatcttttaagagatcaatcaaaggtagaactctattgtacatgagtgagaaatgaacattaattacatataatttcaatgtcttgaggttgatagctttgccattgcacctgtccaatcccttgatccattgattcttcaggtttggtaaagaagtaaaaaagattcagcaaaataagagagagaaattcaagcgacaataagagtaaaatattcagaaattacaaatgaggtgccaaatataaaaaaactgctcaaaactttttacattaacccacgtcccacttttagaaaagttttttatttattattttttt

SEQ ID NO: 90389 - DNA, 501 bp, Cannabis sativa
atattttgagtccataacttcaaacaaaaaaataacatagaggaatcatgagaaaaaaaaaatagactaaaaatttttattagatatcgaaacagataaaaggtctattaaaattaatgacaaacactttatataaagtcatctccaatgcaaaatgtatatatttgtaattgtgctctaatgcaccataacattttaagaagcaaattagtctaaagaaaataaatatctttaatgactattcttaaattaaacatttaaaaaattattgatgagaatattgtaaataaaatatatgtattaaagtatgtcattagtaaataatggtaaaagtgtaattaaaaaatagtatttattgtgggttaaatttagcacaatattatattttatttaaaaattaaatatatattttttagtttaataattatgctacaaaataataaaaaaggtcctataaaactaaataaattagacttaaattttttttatgacaattatgct

SEQ ID NO: 90390 - DNA, 551 bp, Cannabis sativa
attctaatactaacaaaaattttagacgctgctttattgattggttttataaaattgaaataatttagggtaaataccgttttagactctgtgttttacaaaagttaccgattggaccatctattttgttaaatgataaaatggaccatgtgtttttcaaaatggtaagaacaggactctaagtttaatttttctattttgaaaaacacatggtccattttgtcatttaacaaaacagaaagtctaattagtaacttttgcaaaacagaggatacaaaatggtagttatctaataatttatcatacaaactttttttctattacatgggtgtttttatttttatattttaaagtattttgttttttttttttttttgtatttttacatagcaaccacataacaatttaggaagcaattaaattccaatcgaaatttacataacaacccaagcaatcatagtagccacccaaattgtaaatttgaaaaaaaaaaattaaaaaataatgtataagtaaatccactaaaatttctcaatttcaaaaaaaaaaaa

SEQ ID NO: 90391 - DNA, 732 bp, Cannabis sativa
ctccttcaccaaaccactgatcttctcagcaacagcactaaacgaatctccatccctaccaaccaattgctctctcatgttctcgtaattcatcttgaatcctacgcagttcccaaagtaattgtccggcaccggagggattaaacggttcctataatcagcagagaatccgaacataactttctttttactttcatctccttctgtagcttttagaatgcaatcgaagacgtaagcaaacgtaacaacaaaagttgataaatggagctttggttttgagctgctatcccaattggacgataccctttgccggagtttatctatatcggagcggcttagttcaaaagtggctcgattataaagtcggtgagttcatccaagattgaaaattgacggaattcaaacagttttggattatttctacaatcagataacgtcgatccaggacttgatcgcaagaattttatcatgtcaaacccaggtgggtctttaatgacattccggtcataaaagggtgtgagctccggcaataacggaggattttgtttagttaagtaagcccacgccttcataaacatggttgtggatttcccatctagaacagcgtgatgggttgtgatgccaatagaaaatcctcgattgggaaatacagtgattcgaagagctattaccgaagcccctgtttcagaaacatgtaaaggagaaaccagaggacgaaccaaggaggcatgg

SEQ ID NO: 90392 - DNA, 686 bp, Cannabis sativa
ggcttcgggacggcgtctccagtcgatgaatagctgaccacagtacatgtattcgcagaacctacttcactatggatgaatatttaagatattcaaactccactaagcatgcattgataattaatataataacaaaaagttagtgaatgtatatacctatagcacgttaaaatccgttcaataccgaaatatgtcgaacctaaaaaattagctcacaacctacaatataatacaatttacgacaaaattagaattttaattatttaattacttactaattattaaaaaatgtaacaagttactagttactaaattctatagttaattttttaaaaaataacatgtacatatacatatataatcaatcatacttcacactaacataattttaaaaattttatttctaaattaattaaattcctacaacctcattctcattcacaacaaatatatatacaatacaaatacacaaaatacacaaacagtatatacacaatatatataaagacatattgaataataaaacacaaaatatatacatatatattatatattaagttaataaatatttacattataaaagtaatctggcgataaattgcgacaaaaattcggccacctatagcacacacacaatataatattactaaaataaaaaaatcccaaaaaaaattataaaaacaaaa

SEQ ID NO: 90393 - DNA, 871 bp, Cannabis sativa
tgggttgataaaaatatgccataaccagaccaaaccgaccgacgtacacccctaggtcataggttcgaatctggaccttagtctggtccgagcctgggccgagtctaagctcaggtcttgagttcaagtctgggtccaagtcccaggtcctaagtctaggttcgggtcttaggttcggtttgggtcctaggtttggtctgagtctcggtctggatctaagtttgtgtccaggtctcgtatcctcagtcctaggtccaggtgcaggttttggtccaggtttgggtccaggtctcgagtctaggtctaggtttgggtatgggtctcggtctgggtcttgatcctaagtctaggtctgtgtcccggccctaggtctcgactccgggtatgggtcttggtcatgggtctcgacttcgggtctaggtttgagcccaagtttgggtctgggtcccgagtctcaggtctatgtcctgagtctgggtccgagtcataggctcaggtcttgatctcgggtatggtcttagatcctaattttggtcccgatttgtgtttgtatctgggtttgggtcctgagtcctaagtctaagtctgggtctcagtctcagctttaggtcccgggtgtggggtctgaggttcaaggtcccagtcctggtctaggtccgggttcgagtctaggtccaggtttgggtcttgggtccaggtctaggtcttggtcctgggttcaagtctgggtcctagattctggtctaggccccgagtgtcaggtttaggtccaagtctcgagtttgggtcccaggtcttggtctgtgtctaggtctagccccgggtgcaggtctaggttcatcctcgggttcaagtctaggtcccgccccgg

SEQ ID NO: 90394 - DNA, 513 bp, Cannabis sativa
gattatgatatggaagttagctctccgatgaacatcaaacagtaactaggagaatgcattaagaagtacatctagcgaatgatgaatgcggccgcaaagactaaggttaatgatgatatgaagctggtagctttaacctcaggaatttctattagatctttcctatggggagatttacaaagaaaatggtcacacacattgtcccatttcttggccagagctcaaggcttcataaacgtagaagaggtgtatgtccatgcttacggagtgcttccagtaccatccacaatgtcagtggaacaactcaaactccccaattatctatcacagctattgtccctctgagaagtacactcactactccaacagtgtatggacctggcacctctggtcaaatagatgcgtggataagtttttctggcttcagagtggcacaaaccagatacactattgctcctgcacagacaattcaacaaaatagaagttttcaaatcaaatgtaagtcattcatgg

SEQ ID NO: 90395 - DNA, 516 bp, Cannabis sativa
aaattattttttatcaaatgtatataaatttatactataaaaaaaataattaaaaagatataaaaataaaaattttatataacatatttattatatatagtgatcataaaaatgaaaatattttttaaaaacatattttataattttaaagtttataattttaaaaacagaaaacaaaagtgtgttctataaagtttatttatatttttattttatgattttatttaaattgggtcttggtctgaggtcggattcaagttcgagtcagaggtcgggttcagtgccaatgtcgtaggggaatttagattcgggtctagccagagtctaaaatattattttaaaaaaaatctatttaaaaaaatattaaaagtgatttttgtttttgtaaaattttagttctgaataaaagaattaaaaaataaaaacagttttatttaacatgtttttaaaaaatattttcatttttttcaaattttaaaaatagatttaattaaaaaaaagtattaacaatcttca

SEQ ID NO: 90396 - DNA, 588 bp, Cannabis sativa
aagatacataacttgtacagtaaatatcatatgctgtttgctgatgacaactatgttttttgccaagctaataatggttctgctagtagcgtcatgtctctccttagacgatttgaacatgcttctggacaacagattaatcttggtaagtcgtcagtttttttcagcccaaatgttaatggtcagctccgccacagtatttgcactactcttcatatgcctgaagcttccgaaaacagcttttacttgggtctgccaaatattattggaaggaataaaaatgctattctaggctttctcaaaaataaagtcatgaatagaatcaatagctggtctggcaagttactatctggtgcaggcaaggaaattctcttgaagactgtaatccaatctcttcccacttatgccatgagtgtttttcttatccctcttggcacttgtaatgagattgaaaagctaatggctcgcttctggtggaaaactacgaatagcaaaggcaatggaattatttacatgaattgggaccggctttcccgtccaaaagatgaatggggttataggttgtcgtcttctccatgattttaactt

SEQ ID NO: 90397 - DNA, 608 bp, Cannabis sativa
  modified_base (290)..(296): a, c, t, g, unknown or other
ttttctaatcaaaaacatttttctaaatattttttctgttatcttaacctaaaactaatacctaaaaagctatagtaatccaaaatctaaatatataaataaatacatatatatattgaacgtgagacgatgggcagcggaggtggtggtggtggcagtttgatggtggttcagagcccaagatgcaatggtggcctagtggtggtcgctcagtggagttttagggattaatggatcaaatgtgctggtggctaagtggtggtcgttgctaagagagagagagagagagnnnnnnngagagagagagagataaagagagagaagtggcggtggtcgtcgcgaggagggagagtgaaacgagattggagattggtggtggagcttcgatcggcgcatagatgagctcagacggatggtgttggttcgtgttgaatcgtcgaagtgaaagagagggttttgagttgatagcgcagttggaaatttgaaataaaaaattagttttttagatattaattaacgggtatccgagacagtttaaaattgttggagatacccattaaactggtttttcaattttaaaattttgattttttataccatttgaaatt

SEQ ID NO: 90398 - DNA, 662 bp, Cannabis sativa
cgaaacatcacaaaaccaactcacttggaaaactacatctatgacatgacagtcacctctactgcttatcccattaccaacaacatctcatatcacaaaatctctcctacacttcgagcatcaatactaaatgcttgtctcattaaagagcttagatccttcaaacaagcttgcaaaaactcaaaatggcttaaggccatgaacacagaaacagatgccttcgaggcaaatgaaacatggattatcatccctctagcccctgaccaacacaccattggttgtaaatgggtatataggattaaatataacccagatgggtcagtagaaagattaaaagtacgattagttgctaaagtttacaatcaataacatggcatagattattttgacacatatgttctagtggaaaagttccatacactcaagttgcttttagcacttgctgccattaaaaattggcacttacatcacatggatattaagaatacttttctccatgatgatttaaaagaagatgtctatatgaaactctctccttggatacactccgaaaggaacaattcctcctaatgcaatatgtatattacaaaaaagtctctatggttaaaaacaggcttctcgccaatggtatgcaaagcttagtagaactctcattcaacatg

SEQ ID NO: 90399 - DNA, 974 bp, Cannabis sativa
gtatgcagctaagtcacctcatttcttcacaccacccctcaaacgataaggtgattctttcacttggaatttgtcaatcaaaaattgaaatttggcaggtgacaatcctttgatgaggcaatctgctatttaatcatgagagggtatatagcgaatctctaatttcctttgtatcatcttatctcttatgaagtgaacacctaacttgatgtagttcttgcatgataaacagggttagaagctactgcactaacactcatattatcacaccaaatgactggtggagcagagagatacaacttcatttctttgaacaattcttgtaaccaagtcaattctgaggcaagttgagtaagagccttggactcagattcagtgctagagcgagcaacaacaaattgcttattagatgaccaagaaatgagtgaatcctccatgtagacacaataacttgcaatggataatctatcatctgggcagcaggcccagtctgcatcggaaaagccaaccaagttgagttgagtgtctggtgagatgtgaatatcgtggtacatagttcctttcaagtatctgagaactctcttggtagcattccagtgagcagttgtttgagctttaaggaattggctcagtttgtttactgcaaatgagatgtctggtctggtgtgactcagatattgttaagttgtaattatgcttctacaggttgtaggtgagttgagtggttctccatcagacaaagatagaggttttccagcaaccatgggtgtacgattaggctttagattggttgattcaaccttttgcaacagctctattatatacttcccttgagagaggtatatccctatgttgtctctaaataactcaatgccaagaaattagttgagtggtccaagatccttgagtgagaaaatcttgttcagtttggtaataaacagatctagctgttggaagttattttaccaggaact

SEQ ID NO: 90400 - DNA, 830 bp, Cannabis sativa
ttaattcgcatataataaattataatataatataattctacaataatactcaattaactagttagggctttgctaatccatttccttaattccagggtattacaacttgactctcgggatgcccaccataagcattggcataaaactctctcaccacactagtgtttgctcctataaccggttcacacaattgttgccatagtcgagtaataatcatatcaagtaaaacaccatctttcgcacttggacaaaaataaaattcaacaatcaagctcttattattagcggttcattccttaaaccttgcttgtgccccagtagtgacaaaagtatgatcaatagtgacttgtgatgacacataatttctttttctttttttgatcttggagtcatatcaccaaatccaaataatgaactctcagaatatattctaaaacacccatcaattattgatacgacacctatcaatcaaaccaaagcgaggtatcacccaaaacttcacaaaatcacaacttttcttcactttggcattttaccgaacaattggagcgcgcacttagttactttccaaatcactctcaaatcttctctaatctatccccaaacttaaaaggaattcttacatagaaaatataaattgatactttatttacaaaaatacatccataaggtaaggacaatatttatacattttatgtgattttatttacctaaataccacttacaatatcacttacacaattagacgatggttgtagggtggttgcatcaaacgaaggtttcaatcaaacgatgggtgcagggtggtttctgggtgattggccgaaggt

SEQ ID NO: 90401 - DNA, 510 bp, Cannabis sativa
cctttgatacacattttgactagatctttttcagccatggtttcggcacagtcaagagctttttctcgaaaattttgaacataattaacaagtctttctctgaagctttctctttctcctgacaagtcagctatgttccatttatcttcaatcatgaagaatttggcgcagaattgagacaccacatcgtcccaactccttacacttcctgaaggcaagcttgcataccaagagtaagcgcgatcagtgagagattttgaaaactctcggatccttagttcgaaatcaagcattcctgctactggtatagtttaaatatctcaatttaacaacagatttgacctctttgcttacaatctcagccaacttacatttttgttcaaacacgcagctattacagtttgtccaaactgcatacaaggttgctaaaataatagcattcaacacctactccctaacattgtttgaaggcctagacaaccaatttctaatgttgtttggccagctgaa

SEQ ID NO: 90402 - DNA, 2446 bp, Cannabis sativa
  modified_base (547)..(563): a, c, t, g, unknown or other
aaaggccgataacgcaactgatcccacgtttcttccaaatccctaacgtcgattgagatttcttccactattgttccactatcgttctcatctgtatcttctactgtcacttcggtaactccatgactttcgatatcttgaactcccattttctgcgtcacttgtacatgtgtatgctttaattcaaccttttttcgtgaacattaacctcatacaaaagtatatattaatggagaaaaataaatttcaattaacgtaccttaggttaggtatcaaagaaaagctctgttgacaaagcaatgatatgccgttttatatttctttcaatcctcgggaaacgagtggaaagaaaccaaagagaaaaacaacatgcttcatagaaaacaacatgccgttttatatttttttaatttttttttttaaatttaaagtttgggtttctaaattggttgtagcgctagttgcagtaggaatttctatatgattttttgttgcaatttaggttggagcgttaggtgcaacaggaatttctatgtagaatttcgtnnnnnnnnnnnnnnnnnaaaaattattttaaagtgttaaaataaaaaaaatctcataaaaaatagtagtatataagtaaattaatcattcaaaaagtagacaataaatgagatgaaaatgaatttttcctaaacatactatcaacaagccattgaaagtttctagcaacataatgtgaagctcaatttgcatatcatttaacaaaaaaaataaagaaactgacccaacaaatttttacattcatcaattaaaacactaaaattggagcacatatataacggagtacaaacaatctctaccacaccaccaaactatcgattttaatgaccactagcgtactaagatatgtcttcaactaactcaacacctctttgaggcccaccatctcacctattttcggagtgactttcccataaaaacgtctcacatgagctgccactaaacaacccaacacatcacagacaacaaatccaaccccgtacctcccttccccatcaaataaaactgcatttacgctaatcttaatgcttaaaacgagtttagaccagagctctttgtcatcatcttcatgtgaaggacacaatagaggaatgtttcctcttccttgagttttcaactattgatcaagaatttttaatagtgatttatgcttaaatttgtacagtttaagtcattaattatgcatataaattaatattaattaaatattttatagttttaatagtaattttatttttattggaaatatttaattcattttaatttttgtgttatttttcaaatttgagtaagaaactttaagagttatttacgtgagacaattaagttatttacgaatttattgtcgactatttaaataccagtatattctaaatatatattagacgcgtataccgaagtaattgaatttccatcactccacgcataagcttcaccactagaaacctttttatattttatctatttattaaattcccatcactccacagtactccaattttatttttgggataattgcggcaaaagtctccaaaaatttagagttgatgcagattagtccacaacttcaaaaattggcggtaatagtcttcaaggtgaccttttttgttagtccgttggtcctctttttaactgatccgttaaactcaaataaaatgacacgtgttaatttttttattggtccaaataataattttaattaaaataatttaaaaataaaataaattaaaatatatattttaaaatcataaatttaatttaatttattttttcttttcatttttttttgcttcttcttcttctaaacctcctccgatagccagcgtacatagccgaccttaaccacatcccgagtgccaacattcacagccgaactcagccctagccacctctactctagccccgatattgtcaatcggcttagtccccaccgtcagttccttcatgttcacccagatctaacaaaacggaaaattaaaaaaaaaatagtgtttgggtagaaagaaaatgagaagagaaaatgaatcatctacttcgggagtggctcatacactataaaaaagtgggtcttaactgagaatgcagacatgattcgcaacaagatggaatttttttcatttctgtgaagatttagcgaaatgggtatttgagaacaagctcaaaagatcccaacccagaagagaaaatttaagaaagttattctgagaagccaaacatgaatttggggatatgggtttggagcgtgaaaaaaaaaggtcaaaatttaaaaaatccatatggatttgaagagaaagtttggttgttgattgaagagaataacaaaggaactaacaggtagagatgatgatgatgatgatgattgaagaagagtgactgtgaagaaataagagagagagagaga

SEQ ID NO: 90403 - DNA, 540 bp, Cannabis sativa
aagaaaagcaagggagtgaggcttgaagacaccactccatcggatctcgcatgtcatctcagcatgactcagccattgacgacgccattggggccctacttggcgccctccccgagatctcgtcgggtgtgggcgagggtgagggcaattccgcggggtgttggccccgacgggacctcccaatctagggcctcctgatcaggaaggtctttctcagcctgagaaccttccggcggtcacgctgggccataatctggggctttcatccacttctcctgctcggacttctgcttctctccttggggtgccgtcgacttcccaccttgccctttctcctgctctgacacatcctatagccttttcttccggccggggctccccgcctctactcagtcatcccctgcgggcctcggctgaatgggacaagatccctgctttccgaatcaaaaaggatgttccgttcgaggagtcggccgaaaattatttcaaaactctcctagatgccgtcagaaaacctgacgatgatttttacatctctca

SEQ ID NO: 90404 - DNA, 727 bp, Cannabis sativa
aaaacaacaaaatcaaatcaagcagaatatataatatatatcaaagtgaaaatatatatttaaatatcctgaccaaaaagcaggtcctaaaaaaatatcaagggcctggggacgggccataataactgtctccccttagaagataataatttaaattatctgaaaggaaaggaaagagactctaaatgtaaaaaaaatatatatagttgtaatggtgagattggtcggactgctcggcctattcaatacgaggaggaagacgagggccccggcgttcttcgagcaaagcatcaagcctcttcttcttctttcggaacttggcgagggcttcctcaggtttgggatagaagtcaagcttgatgttttggccattcgactgccaggcgatataaacgccatcatcaaagcgcttgacacaatgcttgcagacaactggggtcaggagctcatctcttttggcctttttcaaggcctgatctttaaaatctcttagctcctttacctccacagtcaggttggccgtcgactgcaagtcagcctgatgcaactcctccaaggactttaacttgccagccatttcgtccatagcctccctggcttcccgaagcttgcgcttggccctagcagtagcctcgccctccgccttcagctcctcctggtgccttgcctccacctcagcctccctttacttggcttcctcccggtactttgcctccgcaagggcctc

SEQ ID NO: 90405 - DNA, 699 bp, Cannabis sativa
tcaatcataatctctactataattcgtatttaattattttaatgatattttataatttaatttatcaaatttaaattaattttataaaataataaaaaagtaaaaaaaaaattaattaaaatactattaaaaaggtttagcaggaaagtatggagctccatacatttagagttcatttggtacgccgtataagagtcatattgtattaaataataaataacactatgtttagataaagcaatgtactgtattgattattacgaccaaaatttttaatataatgtatattgtatttaatacataataaatgctctatattagcttgtattataatatttacaaaacattcggggtcaacactaatctccaactcgaactcaaacctggctcccggacccaaacccaaacccaaacccggacccggacccatacccatagactcagacccggaccccagaacccggacccgggacccagacccggacccggacacaaacccggactcgagacccgagacctagactcggacccgaacccaaacctagacccggacctagacccgagacccaaatccaaacctggacccggatccagactcggactcgtaacccagacctaggaccggaaccatggacctagacccgaaccggacttggatcgggattgggacccgatctcggacccgagacccaaacccgg

SEQ ID NO: 90406 - DNA, 562 bp, Cannabis sativa
aggcatggggtttagacatttgcgagacttcaatgtagccatgcttgctaaacaaggttggaggttactatcccgtcctaattctcttgttgctaaagtgttcaaggtgagatattactctaatggctcctttttcacggccaagctagggtctaacccaagctatgtgtggagaagtgtgttagaagcccaagatttaattagacaaggtactcgctggtgtatcttcaatggggaagagataaatgttcttcaagaaccgtggctgcctagtgaagatgacccttttgttcattcaagccatcctagtttgattgaagctaaagtgtgtaatttaatggtcatggagggtgggagttgggatgttgagatagtgaaagatttatttaatgagcgtgagcagcagctcattttggatatccctttgactataggccacggcagtgacaagcttacttggagctatgaagcgtcaggtaattactcggttaaaagtggttataatctactccaaaagcttcatggaagatggagtgccaatgaagatgatctcaccaagttt

SEQ ID NO: 90407 - DNA, 548 bp, Cannabis sativa
tttttttttgttgcaaaaattttctaaactatacaaatcgttacaaatatcctcctttgattatataatgctcattttgtaaaataatttacttatatgaccatgagttacaggtatagcttcagtataatggtctatttaataattttaaattatctgaaatctaatttattgatattaaacatataaacattagcaataagaatgcatatatatatatattttcataattcattattagattattatttatgtatttatttttaatatagactcttaaactaggccaaatttaaatcgtgttagtatgacatcaacaaattatttaccgaaataaatagaatgtaattataaagagttattgcaatgatttttatagtttagagaaaaattttgctacaaaaaaaaaaaatgaagaaacaaaactttataataatcacaaggaagacaacttcatatctattcataaaattataaagtacccatcattttacctttgtaattaaatttaactttgataaaaataagaaggcatataacttaggtgg

SEQ ID NO: 90408 - DNA, 1067 bp, Cannabis sativa
atatcggctttatgcttaagccgcactgagcccaacaaccgagctcaccaaatggttaagaacgttcttaaggaaagtacgacctctgtaccaatcgcacaaaagtaccaaccctagactcgtgttggtagagccattattgtactctcgggaattctaagtgtcgtaccacatgcatgacgtaccccctggtactcgtgttggtaacaccgtaaccacattgatatcctacaccatactaacactcttaagattacataaataattagtgttagtagtgtaaacaattaatacaagcatatatacattattatgctaccttacctcgttctgtgctaagtgtgtcgttcagcctgagtggaaaagttgctcgacgctttacagggccgtaaactataacgttcaaatctcaatgagagacatgctaaaacacttatcaggggtttaaaattgaaactaaggataaccctatcgataaataggatgcaaacaccctaatttacgtattaactagaaaaactagggttcgggaaaaagctccaactggcagaccggttcccaactggaagctcggttcctgggtaccaaccggtcgaccggttctatgatgggaacccaaaaattgagcccttacccctcaaaatagttaccaaagaaaggtttctaagggcactttggtcataaaaatatcccgactaatatccgatactatcaaaactaataatgatgccccgaaaataataaaatgctataacacacaaaatacgactctttaaaggccctaagtcgctttccacagcttccgaacacaaacaccaaaattaggaaatttacacaaatagcatatttaatatatatatgcaattaaataattttaccaatatgtaatactataattaataattcaatgtcataattatacccgatttaataatccatagtgttattcttaggcggtctttacatatattgtttcaattttatttactttttcctttcaaaataatcaaatatttttttttgaataaactgaattttgttaaacaagccacacaaatacaaaccaa

SEQ ID NO: 90409 - DNA, 590 bp, Cannabis sativa
ttttttggacaatattgttttaggggtctattttttggacaatattaatgcattcattgtgtaatcttgtagatccaaacaactcttgttggcaatatttacaatgtatatgtaaatgcaaaccatgctgcgggatcttgctgggcctttgctaaggaatttttgtctatgatcaaggagtagagaaaagaattcgacagctcctatttagtttggtttgatagtttttaagttgtaaagctgctatgtttaataacagtggtgattattaaagtcaagttctgtaattcttttcttaatgtttggttctttaagttacatttgtattgattcattcccccaattctctcaacacagtgcaaatacaaatacttgttctctagcaaatattttcccctttgcaacaaattgagctacgtagtttaattatattggatgaacaaggctgctgctggtcctggttatagaaagtacactggattgtgtggataggccaattgtttatttgcttggttaacgattcggatagaatttggaaccaaattgtacatattttgaacattactaaaagaaccaaattgtaagaaata

SEQ ID NO: 90410 - DNA, 1394 bp, Cannabis sativa
ctatattacatacactatatatatagtctaacagatatttgttggctttagttgggttgcatgcatttgtttattcctttcagtctaaatgctccaagaaaacatacaaacaaactgctccaacttaggcttaaaaaatttatcaaaaactcggaataacatagacttacatgaattattgtatcccaaataattatatagttaaaagccatagagtcaccaaactttcctagctcgcttacactcaaaaagggcatggataactgtttcattgtgaaaagagcttaaggagcattgactcgagttgctaatatgcctccaatgcaacgtggcagtgattggtagaaagtcatgaataggggtgttcatcaaactgtcgcatcgcataaaaaatgtagttagaaattttttgcggtgcgattgtgatttgtacttttttcaaaccacgtggtgcggtgcagtttacgattttgaatttgataattgcagtttaaaccgtaccgcaccatatattataaagttaccaatttttacaatatgattttaattttattttcatttaagaataaatatatgtaatatatgtacatattacattattttctaagagacaacttaatataatgacttgatgattagtatatatgttatgatgttaaaattttaataagaatatttttttttttgtattgttaaaagtttattgattgattttaaaatttttattataatattcgataataataatagtataaatcgctcaaatcgcatcgcactacattgcattttcgtagtgttttatggttttaatattttgcgatgcgattgcgatttgcgaaattacaaaaactgcatagcgattcagtttgaaaaaaaatgttacaacccgcactacctccagacttaactgagtagaggtcatctgagctgtggtgccatatttgctggtccgaacgaggtgtaaaggaaagtggtaaattagtgatacgttggacattaggtgggaggaaaagctgatataacatctcataattccaatctctatcctctagaattaacttagaaactctcatattacgatcagctccgaagaacatcaatggtcaaaaattggtaatacttgggagccactgattagaaatacataggatatttgggccataccccaccttctatcgaacacttttttaaagtaattcacttccccatgtaattctcctccaagtcatagaggggtgcaaacctaaatcagcatctaaaaagccagagtgtgcaaagtaccagtgatatagtaacatgcttagaagtgaagttagatttgagaagatttgccaagcttgcttaggtaccagtgcttgtgtaataccctgaaattaaggaaatggattagcaaa

SEQ ID NO: 90411 - DNA, 683 bp, Cannabis sativa
gcttcactatattgcattttaaaacgcactttaaaatttttcccatagtttaaaattacatgatttacttagacatgagtttaatgtttaatagatttgtaccattgtttacggtatccatataattgttataaaccttgatgttcaatatattgcattttaaaagtacactaagtgttttttttcgtagacttaaattacatgatttagaaatagtcagattattatgaaagaaattgtgtcaacctaattggttcaataattaattcttatttctcattatagtactatacttacactttatgatccaaatttataagcaaggtcagaagtaatgccttcgccttcatctcactacaatggcaaagtacataagtatagtgtcaacaaataggtaaaattggttaataatattttctcaataatgtactttacatattgttatggtaacaatatttccaaaagctaatagtaatgataaaagataacaacagtaataataatcaccataataatcacaacatagtaataataatttgttccaccaaattccaaaaactatcacaagtcttaccctatatactaaatgctaaaatcaccactattagtgcaattccatatcacttaacgctaacagtacagtagtaagatgcaaatatataacataactaaatataatttat

SEQ ID NO: 90412 - DNA, 546 bp, Cannabis sativa
ggataaaactaaagaacggttgggcaattattagatattatcccacgtgtgattaaatgaaacgtggggattattcacgtttcatgagcagttgtatttgaattaatcccaaaaaagggtaattgacaacctatattcctataaggggcagattccatgagaaaagggacggcaaaattaaaagagaaaatattattattcaaagtttgagattgtattctatactcaataaatatccctaataataaggactcgttgagtatgtagattttaactacaaaactacatataatatctggtgttatctaattatttattacttatatatatttttgtagaaaatttattgcataaaagctattttattttagttgacgaaaagtctgtgttaacagtttggtgctttcattgagagccttgatgataaaaacttagaaaaatctctccttacaaacacaaatctgtccatattcaatggctgataacaatcaaaatgacagtaatcatcccgaagaaacaactcgtcgtcttggcaaggagcccatg

SEQ ID NO: 90413 - DNA, 1200 bp, Cannabis sativa
attgatagcaatccaaaatataagacaaatgatcatttttacaaatattcacgaaagataaaatgtttattaaaggggaagcttagtttagaagaaaaagaaataagtagtgtacatgtttcaattgcttagtttaaattttttataattaaatatatataaaaaatgtataattcaattagtgaaagtccaaaaagctattctcactattatataggttatagatatattatgttgcacatttattttgaagacatcgataactaatttcataattgtagaattcattctatatattaatttttatctacttttattatatttagatatattaataaatttcaaaaaatagtatttattaaattttacttattgtttatttatatttatttttgaagaactataatttacaattacttattcacgagtttaattcatgttcaagagttttatttttttttcttccaaagatcaaatttccctcattctccttatgctatttgaaatttaatttttattaatctactaataaatattgtttgattttgtttatttgatttgttgtaaattaatagaaaaaaataaatgagttaaccaaatttataagaaaataaaattatttttctaaattataatagaattaacttaaaatatctctatattttaaatttttataataaatatcatttataaatatctaatttaatctatacatacgaaatataaatttgaaattaaataattaatccactctattttgtgcgagaattttttatttttctattatttttcattataatagttgaatgtatctttttgtttgctttcatttttagataaaaaatgttatgattatttttttttataataataatattattttttttatataaaaaactagaataattacttttattattaaaaaattatataaaaaatgattaaacatattggaaaagatattaattaataataacgtgagataccacaataatatctactttaaatatagtgatggctacaaagtgatcagatatggtgataacaattattttaaaattttatagatattttattgtctttttttttttgtttttgttttagatctttctattttgtgtgagaaatattctgtttctatttttttttttttactataatgtacatttgaatatattttttttttgtgtgtttcttttt

SEQ ID NO: 90414 - DNA, 503 bp, Cannabis sativa
atggttagtagatccagaattaataacccaaggggataataattctctaaaacacatgagtttatagcataaatagaaataccttatttctttgcgaacatcttaggacactgtggtttccaatagcccttttcgttgcaatagaagcactttcctttttgctttgcattggaattagcagcctttttcttgctattcttccaattcttcttgttgctgggttttgaagcagaggcaatgtttgcctcagccttggccgtaccattagcagtgccagaattaggagctttagttcctcctttctgtggtcctccaatcaaattttcaaatctgaaggttgttgatcaacttgtggaagtcaaactcgaacttgttcgtgacataatttgatgtaaaaggcagaaaagctggagccaaactaatcaagatcaaactcacttgagttgtctgatctataacagctccatgattctcaggctcttggaagtaactagtcatctgga

SEQ ID NO: 90415 - DNA, 586 bp, Cannabis sativa
  modified_base (519)..(520): a, c, t, g, unknown or other
ttgttccattggtgtatatatatatagagagagtgaaggctggtaagtaaagttttttcctttctcatattctcaacttgggtataaggcttaatattaggtatagatgttaaagattaaatatttttcgattatcatgtgaactgcattaacatcaattgtttaattataataatattcttgttatgctagctgcacacaacgtttgtaaatttgtattgcattatatataattatatatatgtattatagattgattagactttacaaaaatagctcaactgagcttatatatagtaagcaacatatcgaccaaactataacaacaaaaccaatacagcaccactaattaactggcatataacagttcaacaataaccacaatttgctatatcaattttcatttatgataaatcatgttagcaaacaaattaatatcaactagctagctagttgtagagaaataataaattaattaaggctaattaggatttttgtcccttgaactttgacatgtannaaatcatgccccctgaatttttaaggtcattgaaaatgccccctgaactattgagatagttggatt

SEQ ID NO: 90416 - DNA, 1120 bp, Cannabis sativa
  modified_base (266)..(268): a, c, t, g, unknown or other
tataaatatatatatattaatatcaatcctcaatcatcaataattattaataaatacatataaatattgggacggatgttatagatttttttgttatactttctaaataaatatataaatcagtatgtttttttttttttactatgatttacattttttataatctataataaaaaaaaattatacaattcaatatgctcatcttttgagtggtttcttggacctcaaaagcagcatgtatttatattttacagctctattatttnnntgttgcctaatttatagtaagctaaatagtaatgaatattatttattttaaattacattttaaataaaatgtaaaaaaattacattaaaataattaaaagaattataaaaagtgagatcgaaccccgccgcgaagcacggcttagttccctagttaatttatatgggaaataaattcttaagggcaaaatagtaatttatgaaatttgttttgtttaattatgaattgtataattaatagtgtttaactatttaattttattggattaaactatatcatttagttaaatataatattattcttaaataatattaaagagataaatatattattttagaaaaaaattatatttattttaatccttgtgaaataagagaataatgagaattaatcaattattatttattagtaaaataaataataaatcttatttatagaaaaattaagaaaataatttttagaccttaaaatatggccattatataaaggcccgtgattaatttagtttaattattttattgttaaaaataattaagattaaatttactaattatcttttaataattaattaaatgaattattagataattatttaattaaaaaaataatagttaaaataaaagatttaactattttttattctgttatagatatttatatttgaatctaaattttaattctaattaaattaaatatttttattttaaataaatgattaaaagtgtttatttataacactatatataggatgtatagtaacataaatcaacaaaccaattaatagacaaaaagcaactgaaaagcaaagaaaatagaattgaactttcactcctattctctctctctctctct

SEQ ID NO: 90417 - DNA, 534 bp, Cannabis sativa
agcattaaattcagattctgttgcagcaaatcaagagcaaaaaggaaactttcgaaaatagaccaagatcacgaattggtctttaatacctaccaaataaagtttatttgatttgctataatcatggaaaaactgaattcaacaattagaaaaagaaaagtcaagtttcccaaaattaggcaactttccataagagaattccttctcttgtaagagaaattttctaaacaaattaagtcagctgagaataaaactttccttagaagaaaagatcaaatagagccatgaaatcaacaccatagaatcactttattttcacaataaaaacacacattaatctaaaaatattttgacaactaattttccaaaaagaactttacaatatatatttattaacgatacatatttgcttttatttacaaagtttcatttattgttaacgaaattttgggttaacagcttcaaacattgattcttcttgacttcttaattcaaaatactcaaggatggtgatgtagaaataacttggcggga

SEQ ID NO: 90418 - DNA, 791 bp, Cannabis sativa
tttctctattttatagatcactattttccgaaatttgtccaatttatacatcccaagtgtagaaacctgaaatcaaagaaaacaagaataattctattaaaaagataataataaagaagaaaagcaactataaaatgtgacccgaaacttaggctaaaaatagcctaacatgtccttaacagaactttgtgtgggagtagaatcgacacaaacattcttctttaacaaagtcacaaaaaaggaagtaaattcatctggcttcttcgcaagtgtagacaaaaagtaccttgtacgtttatcatttccaataatttcagggcgatatattaagcctttcatgtacttgtaatttacttccaatatcaagtcatactgtactttgtaaatatccagttcttcatacaaaagatcaactaaacttgagtagcttacattcgaatcaatgtcaaatgttaaattttcggtcctgttaaaaacccaatctctacccttaagctcccaaacaccaatatacataacaaatgcattaacagatgaacctgtcacatacattaaaaaaatataattacaatttagaacaaaaatctcacaaaaaagttatccaaattcttgaaaatgcaataaatttgtacaacattggacccaaattgggccaccatcggtcccatatcagaccccgtcaaaaataaagtcccaaaaccatgtttgaccaaaaaatgggccaaccatcggaccctatcgggccccatcggactcaataaaaaaattgccccaaacccatttttactccc

SEQ ID NO: 90419 - DNA, 861 bp, Cannabis sativa
tactattttagtctcttattcaattttttattttaaaagatatcagggtatagttttcataattttttcacagtggggtttgttgtaattatgacattctttttgtaaatttttgaagatttttgagtagtttataatgttgcaataactaatttcaaacatatatatatatatatgtgataataaacctgaatatatattaggaactttattgttagtgctataaactattcaaaaaattttgtaaaaaaaaatcttaagatgtgaatttttagaccgagcaaatgggaatttataaagttagaggaagaagttcagcgagtggacatagttggtcagaaaaaagcggacccaagtcctgcactccaaacaactgcagctaatacatacgtccagcaaggaaacagttccaaccatagtagtaaaaggtcaacaatagaaacaatcacgtcaatgtgaaagggagaagttcaataacagctctaatcaataatactgtcgagatagggcatcaaagttctttgctttcacctttctcactgaggagcgagaaactatttttatagcgactcaatcagttgtgtcatacaagaaaccccctatgatcaagaaagatatgagcaagagggatatcaccatatacttccaatttcataaagaatttggccatgatacaaatgagtgtaacaatctaaaggttgaaattgaattcctcattagaaagaataatccacacatacatcagtacgttaagaccaacaagttagccaaactgataacaatcagaaccatctaatgcctccactagtggtcggacatttacaagtgatcattggaggggtcccatattgttgttgattc

SEQ ID NO: 90420 - DNA, 721 bp, Cannabis sativa
gaatttattactggacattatcatttctttgtttgtttgctgtggaagctctggaactgcaggaatacttggctacatgagggtctatccctctccccagatcagattattcgtgaagcctccacctactttgagcaatacaagatctgcaccaagaagattccaacaccttctccagcccatgatgatcatttcatacccaatgatagccgcacatcttctccaacattccatcatcggcttttcatggacgctgcccaagattcccaactcctcaaaatgggctttggcatgaccatccattccaatacaggtgaagttctcctaaatttggccaagcctagaagtggaatcactgcacctttacttatggaagcacaagcacttcattcagctttagcttggtcccatgaacactcattttatccggatagtattgtttcagattgtaatatgttagtcaattatatttgtaaaaatgatactcataatctgcatcttaacccatttgtcattgagattaagagcttgctctcttatttctctaatgtttctcttagctacatcccaagaggggcaaatcatgctgcccattgtttagctaagacagctttaggcttagagcaggaagctttctggatgaacccttctgtccaatcttatttgtatcatgtatcttgtacttgatgttcttattaatggatacaggttcttttcaaaa

SEQ ID NO: 90421 - DNA, 756 bp, Cannabis sativa
acccccacccccaaccagacccctaccccctacgacgaaagcatatcgccatggaagccaaactcaactgaccaccaccaggaactcccttcccaaaggcagcaccattcccaccccgaccctttttcttctctcccgctttgtctcttccttctagttacctccattggccaaaaactgatgaataaccaggagctccgatgagagggcttgaacgattgagcttcgtggacgtcttgtctccttcaccccttgatgagttttgtatttttattgatttgatctctatactggttttttttctgtgttttatttcaggttaaaggaagaagaaaacctagaatctaaggaccctaatcctaactgtgactaagagaagaagaagagaatttgaaacccattagaaccctagccttatttttagcagcaagaggaagaagaaaatagaaaacccatagaaccctaaccctattttttggtgcaactgttagaatagaagaagtatttttgggaaactttgaatttcttgagagagagaaatgaggcttccgtatattgaagaaaagaattagggttaattagagttttggtgttgtgtagggttaattaggatttgtatattgaagaaaataatctggattttgggttggctttttgggttgatcgtggtcgacgctttgggtcagacggtggtcgaagggggtcttaaggagagagagagtggttatggtagtggtggtgctagtttggggttgg

SEQ ID NO: 90422 - DNA, 592 bp, Cannabis sativa
catcacatgaactacatagagaggtgtgttaacaaactctgccaatcgaatagctcgagcggttgcctctccttccagctacagaaattatgtgaaatataaggatcaaatgcataaaaatatcttttgaatattctataagatcatttcaagcaaacataatatgacaaattcaaagaaaaaaaaaatgagcaatgactttgtcaaactagtatggtagaataaagggattatagctatccttctatagtgcatcacatcccaccccccaaaaaatcctacttttttattgatgaacactcctccgttcaatattaatacttactatacaggaaaaacagtaaagtgccgcaactgtgagcaatggatttacatgagctcaacttatgcaagatcaataggacatcaataatgtatttaatacatctgaccataaacatggcccctaaggaaagcaaagttatcagcaaagattagtttgcataaagaacatatttcataattaccactgggggccttgaaagagcatgtccctcgggaccagtaataccaagttctatcattcttttctgtccttcatacacagcatctc

SEQ ID NO: 90423 - DNA, 546 bp, Cannabis sativa
cggtgcccggtaacatggaacgcgttgtatggctcagtagaatcacaatctaatattttagtatagcggggcggtattgttagacattggaaatgtcggcattggtcgggaatttagaatttcccaaactacccttagtatcctttaaattagttttgtgtgggcaagggcattttggtctttttttgcccttttagtgttttttctttatgtagattaaataaatgaagcgttattaattttgattaattagttttggctgaagtaagtaaataaaattattttatctatcattttacaaaatttaaaaaaaaaagaaaagaaaagaaacaaaaaccattttctctcaagctctctctctttcagcctctctttgagcagcaaggatttggttttttcctttgtaattcaaactgttttctcaaggttttagtaagatcgagttcttggtaaccttttgggttttatgccctaaataaaactatgtttcaatgtaatccagattattcaatatcaataaaataacataagtatttttcattcatt

SEQ ID NO: 90424 - DNA, 672 bp, Cannabis sativa
tttttggatagttagtctagttaagactctacaagcagtttatgggggaggacccccagctccctaactttctatgctaggtagttagggtggctaactgcttggattatcttttttttgtatagaaattatgcctaagcatccccgttaaaaataggttgacttagaggaggaggcaatagagcatcgagaggctcccaagttagtccttaatgatagtccatggaaattggaccagcatgtcaatatgtttaggaactacaacaatctgaggaagtatgagaccctgcacggactcaaaaatgttctaggactattctagaataggctctccgtcctaggggagaggcccaacaattgcgcagaaggaggcttcaccctctggagctaggctcacattgaaatgggggcacatctacctttaaggtgttatttctcttagttctgtgctatagctggaatagaaccttcccagcttattccacaggcatactgcttgttatctgggtggtacgtcttctgtgttaagcacggtaaatccatgctgacactaaaggaaatcttgtatttctaaaagatcaactcccaacctatgagaggtcacaaggagaaggtgggcttctacaggttagaacggtacaacaggagtattccttgccccactagttacac

SEQ ID NO: 90425 - DNA, 505 bp, Cannabis sativa
gttaccaaacgccacctaaattgtaacaaaaatatcaaaattatgtggtcaaatttatgatacgaggtgaatgcaaatttagtttaaggttgcaattggaattgattaattcgaagattgaattttcaaaaaataacgttaatgcaacaattatatgatatcttattttttaattatattaattttattttattttttttcttcttaactcgtattcttaaaaaatatatttatcaaataaaaataaattatattttaaatattataacaaacaaaattgtataaaattttatttaaaaaaattatgaaaataaaattaaaacaagtaataaaattaacacaaaataatataaaaaaaaaattctgaaaaaatatgaagaatgattcttaaaaattattttcaccttaatttttgctaaatattaaagtgttttataaggtgcaaataaaattctcttttgtatatacatgtgggtgttagtatataaatagatatttttttttt

SEQ ID NO: 90426 - DNA, 635 bp, Cannabis sativa
caatctaatacaccaaccatattaataatacttacagcaactcaatactatacaagacaacaatctaaaactatacaagacaacaatctaaaactatacaagacaacattttagcaatctaatctcatatatagaaaacatgttaacaacttaatttcatacatcaaccacgttagtaacccttaaagcaatcatgttagcaacccttataacaacccaattttataaaacaatataaaaattaacccttacaacaacccaatcttatacaacaaacgtgttaacaacccttacagcaactcaatctcatacagaatttgtgttagcaacccttatagtaatccaacctcatacaacaactgtgatagcaacctttacagcaatccatcatcaattgtatgagattgaattgctaacctgattattgaagggttactatcatagttgataccagggttgctaatatggttgttgtatgagattgagttgttataaaaattgataacatggttgttataactgttgctaacttggttgtggtataagattagcttactaatataattgttgtaagggttgttaaactaaattggttgttttatgcaattgaattgttgtaagggttgttgcatgag

SEQ ID NO: 90427 - DNA, 856 bp, Cannabis sativa
ggtcggttttaattggatcgatcaattttctcattggattggatcgatttatgcacacccctagtggcgatagtccttttggtcacgggtttgttggagcagtgcgctttgactgttaggtgctagttaaggtcgttaaatgctagttaggagacatatgccgacatattattaggtcacgtgctaaataagtttaattttttcaaaaaataaaaataaattttcttaatttaacttaataagaaatatgttaaaattcttaaaaaattatttaaaaattaaacatttaactaataaaaataacattttttttgagcacttcttcttcatctttgtctcaagaaatgaaattacaaacctcaaaatcctaaaatctaacggtcattcacacaaagctaaactaacacaaaaaatattgatgttcttcaaaacctagattttcaaagtaattaatggggataattatataaaccactattattgtaaattttttatattttttacgttaaaagattttttttacattttagagtgttctataaaaataataaaaagctacataaaagtaacagaaaaataatatctaaacaacatcaaaataataataataaaaacatacaaataacaaaaaatcaacaacaaataaataagagaacaacataaaaatatatcaaaatatcgtattttttataaataaaattataaaaactgtagaatatttaaacttccgtctaaccataaatttgtaattttttgatttttttgagtatttgtgaaatattccctaattgatgacttgcatcacaaagatagtccagacctaccaccttattattattattagggtaaatactat

SEQ ID NO: 90428 - DNA, 1125 bp, Cannabis sativa
agttcaattctatatttatagtggagtaatcatggaattaataaacaaagattatttgtttgatgagactcaataaataatttagtttattggagcaaagaatataagtctatggtccccaaattgccacctcaaaatacagtcatggaaagggatacatagtggtataatattgtttgaaaaaatctattttgaattagcaaaatagtgattatttatttttgtaaaaaataaataatttttcaaattaattaaataaagaaaagacaaaagttgttaagacaaaatttatcaagattatatttgttgagacaaaagttgtcaggataaaagacatcattgttttcctaaataagacaaggtaggggcctaccctagtgtagggtgttcctattggttttatattttttggttaattaattatttaattaattcaattagataaatatttgaatttaaaaaagtggttaaagatgttatccaaatttatacacgatgatgtggcatccatctaggtgacacgtggaactgatttcataacctagacaggcaatcctattcctaataagtcgtatagggagatttgatactcaaggtcataaacagaagttgtgatatctgagcagagtactcgaagacacccgaccatctttcgttaagcaggtggctcgtatgcattgaccaggggatgcgggttgaaaagcgtcatagatatattctatatatcttcatgcttacaagtcacgacactatccctaaattcatgggatagattcctattattgagtagaaagaaaacctgcataagtttactattttgctaattataattatagaaagtaaatagatttcccattttatttcttattgaatgtgagaaactaatttgatgtaattaatccctataaatagtggactcatctcactattcatggacatggatttcatttagagaaaacactcaacaaagaaatctagatttaagagtcaactactcgtagatcgttgtaagagctttagagagaaatcaaggctttcttacttctcttctcacaagtaaatacagctaaacgggagtaggctattaccaccatcatgggcctgaatctctataattctagtatt

SEQ ID NO: 90429 - DNA, 898 bp, Cannabis sativa
tattattaaataaggatcttttagcaatttatttttttatactaaaattatttaaagttttacacatataatttcataattaaaattttattatacttataattatagttttattttttatgatttgttcgggattacctacactcgaatgtatgctacctgaaattgtgatattttttctaagatgctcatttttcagttttttttacattattcttcttgtttggttcgagagtagtagttaggattaattgttctgttttttttttattgtcttaattttgggaaataaaattgccataatttgctacaactaaaaactctattataaaccattagcaagcatcgtcaagttattggataattataatgaaatggtgttattattttcgctttctagtctatgagctgtaattttattgtcaatgtttctttcaattttatcttgtattaattttatgttattgttttgtttgattgggaaaaattttctacaaggaagacagagagaccttaagcttacagtgggaatataagacttttttttttttttttgagaaataagagtgatcgctcaagatgcagcttctacaaagaagaagcaattgaagcaattctagtagctttggattgtcaagaatgtcatgaaaaggttcaagagcaatcaactaagctctcctagtgctaggtgggtggttctctgactcaggtgaggcttcaattgaaagttggctcttagaacaatatctaaacaggttatttcactctaatagttgtccaactgtaaatacaagtatcaatgccactttattccattcaagttgtgcaaactcaaatttattacaatatctaaacaaatattattaaaaaactcttttttaatgtttcattcatgtac

SEQ ID NO: 90430 - DNA, 615 bp, Cannabis sativa
  modified_base (44)..(44): a, c, t, g, unknown or other
tttgtaaacgggatcccagtttaatataagtatattattttagngtttataattaattaagtaaagttttaattaatcacgattttcgataaactcgtttattagcagcgagctgcgcagttagttaaaaatcacattaacatgcctaaactagtagggtattacataattacaccattgactcaggaggatattcaccaggctgttatggccattggcgccactaaagctccgggaccagacgaatatcacgctttatttttttttagagattttaggatattgtgggtgaaagggttagccatgtacaccttgcaatcttaaatgatggtgctttggtgtgacagtttaataagtcaaacgtagtgttgataccaaaagtacaaaagtcaagattggttaaagagtatagacctattactttgtgtaatgtaatgataaaatcattgcaaaagctttatcactgaggatgaaaagtattcttggccccctcatctcatctttccaaagtgcatttgttcaaggggttcgatacatgacaacattatggttagttttgagctacttcattcattgtttaaaagaaataacgggagaaggggatttatggcactc

SEQ ID NO: 90431 - DNA, 818 bp, Cannabis sativa
tggccccgtggactaggagtgtacaaaagaacactgatactgcgtacaaatctcttgggtcaagtgattttattttctgttgttatttttaattctgctgaatttattgttctgatcattttagtttgtttctataagactgagttctacagtaacataattacattctattgctgcagacaattacagttaaatttttactatttccctgtaataactattggcattagcaaaaactcaatttttcaaatggtaagagagcgggacactaaacacttagtgtggtcctttaaaattttagtgtgtttctgtgcaatatgtcattttttgcagaaggaagttccatttcttgactaccattgctcaatgattctaattatccttattggaaagttagaatgagggctttcatcaagtctcaagatgagaaatcttggaggatggttctatcaggatggtctcctcctattgcggttgattttgaaggtaattctaaaaaaaaagtctgaacttgaatggtctattgaagatgataaacttcatgcttacaatagcacaactttacatgctatatttaatggagtaggtaaatgttatattaagcttatatcttcttgtgaatctgcgaaagatgcttggaagatccttcaaactcagtttgaaggaacatctaattaactgttcttagtttattatgcttcagaccaaatttgatgagctcaagatgtctgaaaataaaaccttgactgagttttatgaaaggctatttgatatagctaatgaatattttgctcttggtgaaaagcttgatgattctg

SEQ ID NO: 90432 - DNA, 532 bp, Cannabis sativa
  modified_base (211)..(216): a, c, t, g, unknown or other
aaatatttaaaattccgtgaaatcgtatttttattgtttttgtgtatttgtaaaattaaccctttttttattgtatttttacgaaaattgacataggaacctatatagcaactaacagaacaacttaaatcgtaaataaaattcgcataataacctacataaaaactaccgaaataatccaaactataaatttattaaaaaaaaaaaaaannnnnnaaatagtatataaaataatttctcgctttatattatgaagaaatttttggttagacaaatatactcttcttgtttgagaatcaacacccaaaaatgataatttaaggccacaattgtacttattttaataattttttttattggtaaacataacataaactccaccaaattactcacatataaaataaaaattctacaaattattgatgcataaacaatgtgggacaaaacacacatatacaatttctttttcttttgatagattttaatcacacacataatatttattgttataaatattaataattatgtggat

SEQ ID NO: 90433 - DNA, 731 bp, Cannabis sativa
  modified_base (694)..(706): a, c, t, g, unknown or other
aatttacataaccataagaaaaaagttgactaaaaaattatttcaaatactaaaacagatagagatgcatcggtgtatccgttttaaggaggtgcattatagaatttttccaaacttttatatcacagaattgatattgaatgtcaaaagttaaaaggggaattaccccatgtactattttttagttttttttttttcaaatttacgatttgagtttctaaagtggttggagcgctagttgcaataggggtttctatacgatattttgttgcaatttaggttgcatcgctagttgtaattagaacttctatgtaaaattttgtaaaaatgtaaaaaaaaaaactgttttgaagtgtaaaaataaaaaatgccctaagttaaaatgaagtcatttaccaaaaatacttctctgtcgctttcaaaattaatagaattaaatgctgaacaaaatgtaagacaattaaatgtggtgagcgtggatcgaacacgcgaccatcaaatcttcagtctgacgctctcccaactgagctatccccgctttatgaaacattctccaccatcaaaggaactgtcttaaataattgtagcaaaatgaccagagatcttagacaacgaagggttgttgcttgtgtttcatctctttcaagtgactgactgacgggtagatgttggtgttgaaaatattttaccaggnnnnnnnnnnnnnaccaagtatgttttattaacatcct

SEQ ID NO: 90434 - DNA, 761 bp, Cannabis sativa
  modified_base (688)..(694): a, c, t, g, unknown or other
tgctgggaacatagcaaaaataaccctggtagcgagctaaagtttttcccatgtctttccgaggttgataatgtaaatctcgttgtttctgtgcttgaagacaactctccacctgacaatctcagttcttggtgacaaggtgaacttcagtagtcaacatcatttgaatgttagcttctatatgagagagctgactcgacggatcagtggatcttattaaaagatgtctggagctaattagtgtaggtaccatgagtatgtctctttatagtgagatgaatgcctcgctattcgttgttcaagttcatccaactgttatacttagtttgtataacgtacattatacactaagtgttctaacagttaacatgtctcgcttacttttcttcatacgtagcgaggttgatgccttgctttgcataaatgatgtcatccttgcaatcacatctttatatacgaaatggttttctcgtcaatacgtaaattaatagtttgtacatttgtgtctcatccaagactctatagtaagcgagttatagatatactctgccagttcagtatttaatgagttattctattttaacatcttttaatataattactattatatttgttgattcgtattctcccaagttgacacgtgtccttctctgaagaccagctaaatttcaggtataacaattgcccnnnnnnnagttctttttaataaaaagtgctttttaaatgattacagagggtatatttgtcataatcccttttga

SEQ ID NO: 90435 - DNA, 1106 bp, Cannabis sativa
tctctctctctctcttacatattctctttctctctttcttatttctctttcttctctcaaactttaaaaataatttttgatcacgttactcaaataagcctgaaaaaaaatatcattacgatttactcttcaatgtgaacatttcaagatgtgagaaacatatattttttcgttatttctaaaaattgggtttctaatatagtgattagttactattttttaatttttttaaatcttagttaacatttattttagaattttgttaattgaataatattatattatacgataattaattaactttcaaaataataaaaatgtatatataaaataatcgatatatataaaaatagtaacttgttatattacatggcaactcattagtttcgatatttttttaaggttacctaaatgtattttaaattatatctaccgtaatataacttaaaaataactagttggttactaagatgtatacaaataagttttaagagagtaaccaaaatgtatcacaaattgtatgatataaaaataaaacttttatataacagtaactaactggtttcttatcaatactattagtaacaaaaaagttacttttgaaaataaaggaaaataaaaaaataaataaaaaataaaagttgaaaacatcataaatgttagatttggctgacgtggcacgtcagtaatagtagtaatgttattattgtaaattagtaaacttccttaatttttaatatatatcatgcagtatttaattaggctccagagccgaccctagacacagttagactaagcttgtgtctatcgtccacattttttgagggtccaaattaaaaaaataaaatattttattatgcttttatttaagtaaaattaaattattgtaaaacacaaatattcatagtttggttggttggaatgtatcatattacacaatggtatattttaaagttttttcaacctaagttattcaattcaatcaaatgtattgatgataaaattttgtgtatgtgtaattaatttattttattgtgaaatcagttctatttactttatgtcctagtatagatggaattgattctctctctctttttctttttttt

SEQ ID NO: 90436 - DNA, 754 bp, Cannabis sativa
gtatcatcaataccaaaaaatattttatgtaattaccatgaagtttaatttcattaatttatgaaaagttattttttttttaaaaaaaaaaagactagggaggggcaatgaataattattctttgaagtgatgtttacactttcaacctttgtaggctatatttgtcggtggttttgaaaatggtaaaaacttccaaatttataaaaatatcaaaaatttaaatttaatttatatataagttatttagtttttacttttttttatgggataatttcaaaaactatagagtagaatatttttagaaaataaaaaatatatataataaaaaattacaataatatagttacagaattttaaatatttttacgatttttatgcttttatttacagaaaataaagtattttgatgtagttttatgctgtatttaatttgttgttgattttttgttatttgtatgagattttttgttagtgtttgaatgctattttcttattactttcatgtagtttcttgttattttcgtgttatttttatagattaccgtaaaaatataaaaaataatctttgaatgtaaaaatataaaattatattaaaaaaatagtattttatgtaatattcaatttttataagaaaatgtaaaaaaaacataataggagtaaatatctgtcaaatgatgaagcaagtataatctaggtgttttttttaatgagtataatttttatgcttcaatttgatgttttatccaatttaaa

SEQ ID NO: 90437 - DNA, 650 bp, Cannabis sativa
tgctgaaagacgaaaccgtactcttaaagatatggtaaggagtatgatcagtcattcaaccttaccagaatcactctggggagaggcacttaagacagcaaccttaccagaatcctctccattatattttgaaaagatggacaaaagatgcaaaatttggagatgaattagaaaataatgtgcaacaaccagcatgatggaattattacaacaggtacaatataccaatcttgatttggtaattcaattctttagtcacttatgtatataaatataattttaattgtttgttttatgatgtctagacacattcattctctacaagaaaccatatctaaacttcatcaacttgaaaatgaaagacaataggtaatatttatttacatatatgtaatggtaatatatattttatatgttcttatttattctttttaactttgaatatttatgcagcttttaaaggtgcaagtggcagcatattgtatttcaagatttgattataaattaaacaccccttaaagttgtgaaagactagtttgttaatgtattttcttcgggtctcgttttgtttttagagatattattagttatttgttatttttttttttgaataaagagatattattagttatttaaaattattggatgat

SEQ ID NO: 90438 - DNA, 509 bp, Cannabis sativa
aaaaaaataaaataacctataaccctatagtgttatttatttatgccataaaaaagtaaactataccctcagtttccatatttatgaaaattccccttaaatctaatcataaattaggtagtacatgaataatatggaataagtcgaaaattactttcttttttgtaattacatattaattaaatataattttaaaataattttaattgataaatattatcttttgtaattaaattatcaaagctcacataatttattaaaataaatttttttaaggcacataattacataaaaagtaaaaaaaatgagaatacagtataattttctgtccaaaccacaaaacattcaccattttccttctctctccttgattagatcatatcttctcggcaatggaggcttttgccatcgacattctcgtgctatctggtcactgccaatggatgacttactccagtgattcgctcctaacaatttcttcggtgacttgctccaatgcatatcagaat

SEQ ID NO: 90439 - DNA, 939 bp, Cannabis sativa
gaggttgtaggagccatatcagcatctgcagaagcaacagtagggtctgttgcaggaacattaccagttatagcagcagtgctattattgagagcaacagtggggtctgtggcagggaaacatgtaggggaacgatgtataccagtaggtacctgttcaggagcatggagaggatgtgtaatactggtttgtggtgttgaagatggattaggagagagattgggtgaaggaacaggggacaaaccagtgggtaagagaggtggtataccataactgaaaataccaggtggatcatgcttggttttgggaaacatggcagtagtagagtaaggaaacttgcattcatgaaagaccacatctcttgagatatagagtctcttatctttagatagacacttatagcccttatgagacaaactatagccaagaaatatacaaggagttgacctatattgcattttatttcggttatagggtcttagattgggatagcatagacatccaaacacctttaattgtgtataatcgggtttaacagagaaaagcaattctaaaggtgttgaattttgaaggacaggtgtgggcattcgattgatcaaataagtagctgtcctataagcctcatcccaatatttgagaggtaaagaggcttgagcaagtagagttaggccagactctacaatatgtctatgcttcctttccaccacaccattttgctcatgagtatgtggacaagcaagtttgtgaatgataccactgttttcaagaagggtagtgaaagatctatactcacctccccaatcagattggatagctttaattttgtgtcctagttgcaattctacttgggttttgaatttattgaaaataggtaatgcttcatctttggttctgagaagatagatccaagtatagcgagaataggcatccacaaaacta

SEQ ID NO: 90440 - DNA, 1090 bp, Cannabis sativa
ttgggaggaactttgactttccatagagccctccataattcagactccaactgaaggccccattcacctttcaactcttggagatagtgatataagaactcttgaccaagtaaaaacctatcggctccttactccaaaaccaagaatcaacattaacatgatcacttagtggaacctgcattatcaagccaatatcccttgccacaaacaaatcatgtaaaacctcaagatcccattgcttacgatcaatatgcattttatgttttaattaaatatttatacatctgaagatctattgggactatggtacaataataatcaaatatacgattattctgctgcgtacttaatttagtaccataaaaccaacatttatttggatggatttattctattttttgtacactattatttattttaatgatatgatcattatcaaaaaaataatttatttatataaattaatatttttttctttctaatttgagggttttttttttggcaaatttgaatttacactacaaaaaactgttacttttaatgataatattttagtcacaatataatttttttgtgaataaatgtgacttttagtcacaacaaaaagttacttgtgactaaaacctagtatttagttacaagttgtcactaatttagttttagtcacaataaatactgtgactaaaaacacatttagtcacaacaaattgttatttttgtaactaatacttttagccatagactttttagtcacaacataataataataatttataattagccacaaaatattttaattttaatcacaaaatttattgtgactaaaaataaaattttttgtagtgttgtgatttgaaacttataacattttgacaataataaatggaccacatatgtgatatgtaagtttaattcgaaaaacaaatgattgtgtctcataattataatagattttctaatttgagggttcttttctttggcaattttaatttgaggcttgaaacttaaaacattttgacaataataaatggaccacatatataatatggtaagtttaattcgaaagaaaaataattgtgtcataattata

SEQ ID NO: 90441 - DNA, 566 bp, Cannabis sativa
taactgcttctacatttaccaagagcttatcatctatccatttaggtagagatataagaaaagacaccatcctttttcttcattaaaggtcttatatttatcttatgtcttttatcaatcaacaataccaaaatgtgtacttacaagtttcaattgtggaggatatgggcatgccccaggggacccataagtaatacccaagatattaacaccatcctgcagcaaaagaaggatactgtaaagattactcaatcatcacaaaacatatatatccttagaagaaaaaaaatggaacttattgcagtgctagttggatgttatctatcttttctgatgcacatgaatcacgtagcaacatcttttaggcaatgaaacatagaatctgttttaatttagaaattcactaatctaaataaacaattttcaattaagtgtactcgcacaatgtcatatgtaatgaaggagttgacatgaatttaactgtgcctaggagagaaataaagagagaaattagaagacattggtgagattgaaacttacaatgttgataacaatatgctcatcca

SEQ ID NO: 90442 - DNA, 1077 bp, Cannabis sativa
ttttttttttttttataaaaatccaaatttcagttttcggtctggattggtgcaatctgaaaaccgatcgaccaatctagaaacctatttagaactgaccaatcaaaactgcggtttgatcggttcaaaccgctaaaaaccaaatctattttttttttaaaaaaaaaatataatctaatatattatgtaagcatatttataagtgtatacaaattagaatatatgattaaaagtctaaagtctataacacaacataatacaacacaaataaaataaataacaattgtacatattaaatgattctcccacaatcacacaaatcaaatacattaaaaatgtagagataaaatagagaaaatttctgcaaaactcaattttttttcttgaatctgctctagtttaagttctgtaaaaattaaaaaaatgagtgagagatgagtttgatattaagagaaaaatgagtgagtaaatgtatgaagaaagaggacgagagaaaaatacttaccatgattgaatctgggatattattttgatttatttttgtgagttttgtgagttgtgactttgtgagattaagataaagaaagaaaaaaatggacgaataaggatggaaaagagaaactctagcagatttaaggctttttttttatgtgaaatatagaaagaagagaagactcattagagagtcagacctagataatagataagataagacaataggagatgagagagggtagaagaaggtcagtaaaaattttgatttattttttgattgattggaagttggatgacagatgagagagaatagaatatttttatttattattattactttattttatttcttaaatattaatattattaaagtaataatatatatattgtataatctaaaactaaaaacagtacaaacgttatatatatttatataaagtaataaatgattaaatggttggtttcggtttttttggtcggtttggtaccgaaaaaaaaaccgaccgaccacttgcggttttaactattggcggttttttcgattttcagtttttgcggtttcgatttcagcggtgttagata

SEQ ID NO: 90443 - DNA, 642 bp, Cannabis sativa
aattagtcacaactttttttatttttattcgtaagattttttatagtgacccacatagcaattatcgaaataattactgaagcaactcaaatcataaaaataaaaataaaaaataaaaaaaagataaaaaaaatcatataggatgattcccctttcaataatattatgaaaaattgaacattacaaaatgaattggtcaattatatcttactacttttattgtgtttgaaaatttatgtggaggaaattgtaagtcaatttctacatgcttagttgtactgtactatataatacatagactatatatttaaatgcatgcatattgttgtatgtataccctactatatataatcactgaaacattaaatagaaaagttatatcatagacacatcacttttatctctattggtggaaatatctttatttttagcacttatatttggtgaaaattacataaaatataaaatttaataagaaagttataaaactataacacctataagcttatcactcttttatgttagtttttttacatttacgatttttttatagtatttgatatgctatatttttgtaaatctaatatccaaactcatactctatgtttttgtttctagcccaattgattttatctttttctt

SEQ ID NO: 90444 - DNA, 636 bp, Cannabis sativa
tgaacatgagttcatgatagctcaggatttaagtcgatctactattgatcattgttatgatatgaattaggtctttatgataaacgacgtgttaataaagataaatctattcatatcggccattgtcatatataatctctaatatataaaacacattccctttgatgtcacactacaaccgtaatttgaaccactattaattgcactaaagaacgggcatcagtgaaccgtactagcaaccgttaattaaagattccataactttaatatgttgctgactattttatttatagctaagtgatcttagttctttgtacaactacaagccataatctcatatataaataagtaattttttgatatttaatataaattattcaataataatattaataacttaatattcatactgttggagtatattttaccataacctagacttactaacaagtatgtttttaacatcctaaacatgaaattctaaaatgatataaaataaacacataaaaggtatgaaaaaccttacattggttgcattagaattaaatgactcattttgctcagatctctaacccttgtatcttttctgtagcagagtatcaccaagatttgagcccgacactccttctgttgttt

SEQ ID NO: 90445 - DNA, 810 bp, Cannabis sativa
ttttttttttttttttatgtgtgagataaaaaaatttacttatttgactaaaattacaaacttgtaaagataatattcatcaaaaacattcacacaaaaaaaaaaaaaaagagcaaactaaaaaaaacaattaatcatgattttgatttttgtttttgaattttaacatgtaccaatgtttcataaatttttaaagctgttaaaaattcctaaattattgagattgttgaatacttttgtctaattttagtaaaaaaaatctaatatgaataaaagtttgggagaaataattttaatacatatcgaaattcaagagacataatttggtaaatatcaaagtctagagatcatcatttagtacatttaaaagtttaagggaaaaaaaatcccaattagcaaaaaaaaaaaaaattacataaaacactattttttttgtaaaaaatttatatttttacgttcaaatatattttttttatataaattacaattttttataaaactaacacgaaaacaacaataaaattacaaatagaaaaataacatccaaacaaaaaaaaaaaaaaaaccttataaataacaaaaaaaaacttacaaaaatttaaaattaagtacaatattatttttataatttttgtgtatttgtaaaataatcttaaaaaaaactatttataaaaaataaaataaataaataactaaatggaggatcacacgtgtgaaaaagcccatcctcatacgtatttcgatgttgttaatagccaatcgtaatcgattgtgttttctttctttgtattatttattcttacctatcca

SEQ ID NO: 90446 - DNA, 847 bp, Cannabis sativa
  modified_base (262)..(288): a, c, t, g, unknown or other
tttttacgattttttataaaaaatacacgaaagcaataaaaaactatgtaaaagtaacagaaaaataacatctaaacaacatcaaaataacaacaaaaaataacatatagataataaaaatcaacaataaattaacaagagtacaacttaaaaataccatattttctgtaaataaaatcataaaagttgtaaaatatatttaaaattctgtacaatcatatttttatattttttttcttttgttatttttgtgtatttgtgnnnnnnnnnnnnnnnnnnnnnnnnnnntggagaaaagttgaagtattttttattttctttctaaaattagagttgggaaataaaattatttattttaaaaactgctttttgatggtgctctcaattttttgactttaggggaggttagactgatctcttttttgtgaggagaagtgtgaaacaattagattatgctcatttcaattaatttcaaattacaaatgaaatacatatatgtttttgggtaattctacaatagacactttaaaattggacctatcagtagacaccctaaatgtcaaaaggtaattggttgtaatatgtatgtgcactatattttgtgtgtctcatcacattgaatctttaatcttattttacttaaaaaaaaattaaatttaaatagaattaaccgtgaaagaggagattatctgatttgattcgatcccagaattttgtttgttgtgtcttttttgtaagttttctctttaatttggttcgtaagcatagtaataaaaaaccttacaactatagagcaatttttttttcttttttctttttctttttctttataatctttgttcaatgt

SEQ ID NO: 90447 - DNA, 1561 bp, Cannabis sativa
  modified_base (88)..(89): a, c, t, g, unknown or other
  modified_base (685)..(687): a, c, t, g, unknown or other
aaataatattttattattttatcaaataaaaataaaaagttacccataaatttctcataaaccaagaatttcagttatataggcacannttatatagaatagatatgtaatgaaaataaaacttaggatgtgcaaaaaccttggtggaaaaagagaacaatttactttagatatgtaatgaaaattagaggtgtgcagaaaattatccaatttaattataaccgaccgatccaatcccaatcgatccaataaaattggatatacaatcaaaatcggatcggttcggatgtaaattttgaaaatccaatcggatcggatcggttgttggatgagacatccgatccaatggataaccaaccaaactgatccaattatcatctaattatatttatatatttttaaaatatattcataattttacatatttaatatattttatttaagaacattcttaattgatttaatatacatttaacacatgagattaaaaaaaaaaatcttagatttaaaatattaattctcatcttcctaaacgctaataaaattatcaatgcgtattgaataagttttattttttggtagttttttataagatcatgagaattaggttggactaaactaatgtttattatatatgttggattattaggttttaattatgttttttatatatatttttcttttnnntgaaatcaacttaaatggtagctaaaatagattggatggatccaatccaatccagtagaaaaccagtcaatgcatccagtagttggaactgatccaatccaatacatccattggatcagatcggatcggatgactcaattcaattggattggatcgaatgacaaaattcaatatcgaataaataattggattagatcggttgggtccaaattcattgaatgtgatccaataaacacccctaattgaaaatatatcttactcaattttttgtattttattgattcttcatccatctaacattacaaaaattttatatttttaatcacaataacatttgtgattaaaaataaaaaagttttgtaattataaatcattatttttatgttgtgactaaaatgtatgtaaatgtatcagttacaaaaatcacaatttgttgtaactaaatatatttttattcacaataagtattgtgactaaagctaaattagtgataaatactatatttcagtcacaaataattttttgttgtaactaaaaatcgcatgtaatcacaaaaaatttatgttgtgactaaaaaattatcattaaagataattttttttaaggtaataaaatttattataaacaactaaattaatagtagttatgttaattttttttttttgaaatgaaatatcaacttcattaaaattagcattcagaatacaagataatttgaagatcagccagaatattatcctcaagaatgctatgatcagagtaaaagtcgagagcgtctagcgtctaaattgatagtagtttaattagtttaaattaaggatgcaaattgaagaaaaaagcacatcaaattattattatttttatttatatatat

SEQ ID NO: 90448 - DNA, 806 bp, Cannabis sativa
tttgtaggtctaattaataaatatatttaaattgtattttatttgataattatttataattattaaaataaaattgatatttaaataattagatgagataagtgataaaataaaacaagacacttaaattttattagttgaaataaaatgacaaaaatctaactctaaagcccataatatattgagccctatgagttagatatcagcccaaatctttatttaagcccgtctcatttaaacctaattctatgtgaatgcttataaaaagaagaagaagaagattgaaaaatctactgtctgatcttgatgttctcttccattcacatatttcgaattgcatacaccatggaatttgaattctcactctcaaaatctgtttcaaaggtgatttgagtattagcccacactattcaaggtgatacccaggcctttgtgaaagactgtgatgaacataatcgaaggaggagaagatccaagttcagatcttgataatactctgccatagatctgaacggaaggagacaatttatttcgctgcaaccactataaggatttctatatcccttgatgtgtgtaatttattattttaggaatttctatattaagatgttagattagtcataatcaacatacatgaatcgtaaattagatcttgataaaagattttccaacactaactgtctcgatatgtacaatcatcattgtaatatccaatttaaaatagtatttaatttttttgtttggatattaattgtgcgaggataattatctcatttatttgtgttgttagtgagttgatattattg

SEQ ID NO: 90449 - DNA, 936 bp, Cannabis sativa
  modified_base (879)..(884): a, c, t, g, unknown or other
ggcttattctatttcgctccctttgtttttttatctctgaggattttggaacaataggtcccatgttcctgatttaggttctgaccctaaagctcctctaagagttgtggagattgctagtcttccatctcagcagaaaaagtgagttgtcgtttttaagtttttttatgttgtataatagttgtttaactattttgtttttctttcttgaaaatagtgattgcagagcatttgtggttgcatttgctgagttcttcatccatgggaaagatgtccctggtgactttgacattgaagtttaccacactcgacttgctgccctcttgtttttgtatggtcaaaggaaaaatgatgaaagtattgatagtgaggatgagaagcagaacaagtcttctaaggcttctaaattgaaaaagtagggtccttttttgggaaactttgttgttcttggttcattttcatttaagataatatttggttgtttaatatttttaggtactctatacgttttatataatggaactggttatcaaattataggatatttgaaattaaccattatactatgttcatttttttatgttttaacaacaactgtgttatgattttacaattaaagttgttggtttatttttaggcgtacaactataaaaaactattatgcaactgtgtacaaactattttggtagtcaaaatgtttgtcatttaatttctgacatcttatctcaatagattaccaactattatgctatttttttattcttattattatacaacttataaaaactcatatatatctgacttttacccacgcccaaattccatagctttgggtccgcaatcccgatcatcattattgcattctatcttatcgtatcnnnnnntgttctgcaatatttgagaatcgctgtcccacgaataatcaactcgtttacc

SEQ ID NO: 90450 - DNA, 661 bp, Cannabis sativa
gtgttagaatgtcttgataaattttgaaattaaaggggtgggtttgaataaaaaagaggatgaatgttattatattattatgtggataggtatagtttggaattaataccagaattattttctattataaatgaatttaagttcagttaattcgttataggtttttgttttttatgaagtcaatcttgtaatcggtgtaacaactaattgaaaactagcataactcatttcaacggtaaagaacatgctaaactaaatcatgggctatagaattaattaattaaataataaattaaagttaaagtttgtatcaaggtgttagtatttacaatataaaattacagaggaaaaattttaaattatatgtaggcatatacacaattttgatagaactgaatacaactattaacaaataattttctacaatttgataaagctagtgtaatcataactatagttattggatctaaaattttagatttagttgtatttaaaattaatatttttaaaatttgtttcaatgggtattattttacaaattataacaccaatttgtgtttccactctaaacacataaaaagaaccaatttaattttccaagaaaaaattttattgccacaagattaaacttgaggaaattagactctataccctttttata

SEQ ID NO: 90451 - DNA, 1110 bp, Cannabis sativa
tcatctcgattactttagttcagatcacagggctatctccgcttcttttgctcctattaattctcgggtacagcacgacaagcgacgtagtaggtttcgctttgaaaaactttggctctcggatgaccaatgtaaagatatcattgttgctagttggaaatcatcatcaacttctgacccgatctctgttgtccttggtaatttggatgaatgtgccgttaatctacagaagtggcattttgataaatatggtaacatgaagaagagaataactgatgcacaattgcaagtggaaactctcaataacagtccccatcgaacaccagcaactatgaattctttgaaaaattcagaggctttgttagatgaattattggagcaagaggagatttattggcagcagcgctctcgcgttgattggttacatgcaggagaccggaacactaagttcttccacgctaaagcctcagcaagaaagtcaaataacacaattaaatttttgcttgatgagaatggtaatcaggtctcttctaaatctgaacttgcagctgccatccacgactactttgttgaaatttttactgcttctacattggatgaagttgcccttgttaccactttaaacaccatcccttcaacagttacagctgagatgaatgccacccttctaaaactctttgaagctactgaagtcgaggctgctttgcactcaatggcagccgataagagcccgggtatcgatggaatgtctccactattttatcaacataattggggtgtggttggtcacttagttacagagcagatcctacaagtcttaacaaaacacttattacactaattcccaagatcaagaaaccacaacgattgcaagactttcgtcccatcagcctttgtaatgttatctccaagcttgtcaccaaggtgcttgttaaccgctttaaacatgtccttccttatgtcattttagaatcacaaagtgctttcttgcctaatcgttttattacggacaatgttctagtagcctttgagttggtcaatgctattaagaacaaaacatcgggtcgaaaaggtgttgcttcgttgaaactagacatgagtaaagcattt

SEQ ID NO: 90452 - DNA, 1129 bp, Cannabis sativa
  modified_base (445)..(448): a, c, t, g, unknown or other
taatctggattacattgaaatgaggttttatttagggcataaaacccaacacattgttcctaaagcctttatttattgaagtgaatgtagaatgcatgatggaatggtcatgttttaacattggaaataggtaagtacttttcattaacttgtgttttcactacaaaaaattactatttttagtcaaaacatattttttttgtgactaaataaaatttttagtcacaacaaaatgttaattgtgactaaaatatagtatttagtaaaaagttgtcactaatttagttttagtcacaacaagtattgtgacttaaaatacatttagtcacaataaattttatttttgtgtccaatatttttagttattgaccttttagctacaacataagaatcatgatttataattagtcacaaatttttcacttttagtcacaaattttgttgnnnntaaaagtaaaattttttgtagtatttgtaaatattaccgattgggtcctctattttatttaaatatcaaattggactctacattctctaaaatagtgccttttgagacaattttttgtcaaaataaaacataataataaattaatgtagaggtactatgacaaaactaagtatattaatttttgtcttcatgttagttttattaaaatatatatatatatatatatatcaaaaattaagcttataatatactatttttaccatgtttaaaaatataggatccaactgattatttaacaaaactataagtgtctatttaaacccatatgtaaatttaatcactaaacaacatgaaaatctcactatgttcatcatcaatatttaatccgaccggtaataatcaattcaaagttttcgttacttttataagttgacaaaaaaccatgtaaacaaataataatacatataattagtaattaattaacagtactatttcattctcctctgttggtttcataaaattaagtatgcaataaaattattgaggaaaaaaaaagtagggcatgtgctagttttttgttacaatttatgttttgagtgctaatgcatataataattaagtaaacaattttagttacaattttttcgtgtccaccatcaagtaatattagttgtttcataa

SEQ ID NO: 90453 - DNA, 500 bp, Cannabis sativa
  modified_base (157)..(157): a, c, t, g, unknown or other
ccaacttcagaccgacctgcacaaggaaaattttttatcatctgagttaagtatggaagattaaagggaagtattaaaaaaatacttgccgtggtgaattccttcaagactccgaccaccagcaattccaaagaagaatcattgtcagcaccagccngttgctcgctgacctcaggaaccagccggttcatataatgggccagcatctccttgcccttcttggcctctggaagcaccgacaaaggtagagtagctgcccgcaaccgttcaggatcgctcttgaccagttcagacccaacctttggtggtccagattccttggacttagcagctttgggggtagaggggtttgcagtagtcagctccttagaaagatcaatgacctccccagcaagcctcttttccttagtacaagacccctcaccgcccttagacttcttgaccagaagagaggcgctagagcttcatcccattctcttcttcagagcctcaaacatctg

SEQ ID NO: 90454 - DNA, 893 bp, Cannabis sativa
attagtatatttaaactaatatttaaataaaaaaaataaaaatttaatgatttgaatcaattagaacattaacttgacacttgatgactagatacctattgacgttttaaaaataaaacttaagtataattttcataaaaaattaacctaagttaaacttaagtcaaaattaaaactttaatatttatttgtaataaaaaattaaacttaaatatttataccacaaataattcttaaaaaaaaatatatctttgttatttttttttaaaaaaaaattatatcttgttattattatttgtgaacaaattatttatttatttttcttatatttttggtggggaaacaaacaagttaaagaccttttgtttgagagagagagagaagagaacaaaagggagtttctcagttttgtgacatttctttccgaaaaaccctaaaaaaccaatttttatttcgtctcttcttctctcctcatctccacacctctccactataccagatccatccagatctgcttctactccgccattacaccaaggtatcgctaaaatatactcctaataatatacccattatttgaaaattttgctctgataaatgttaaatatttggtttttgtgagtgtgtttgatctgctttattgtataatttactcatttgaatatcgaatttgcattctaatatttcaattgattagtttttttttgggccaatgctgattccgattgttcccatttatttttctagctttgtttatttctttcttttttttttggggggaagaatttctattcgttttatatgaaattttattttaatatttcgatatgtttggcgtttttacatatgtgtattaaaaaaagcttatgtgtattggtttggttgaaaatttg

SEQ ID NO: 90455 - DNA, 953 bp, Cannabis sativa
  modified_base (918)..(928): a, c, t, g, unknown or other
agcaaatctttcctaattcaaaaaaatccaatccttccaaagattgggggattgaaaataacatatttatcctcaattaaacattaattttatttttgttaaattaaaatatttttttttttggtttttttttttttttggtcttgatatattcatatatatatataaattactaactttataaaagtatcattttgaagtcaaataaattaaataattatatgcttgtatttattagtgtaataactaaaaatatataaatataaatatttattatttttgtgtattaaattaccttacatatatataattcatatttttttattactattttagggagtgtaattatcaagattataattagacagtttaataattattttatcttttaaatataaaatttatctaaatatgaaatggtaattacatatgaatttttgatatcttgtttcacaatataattagtaaatacacaaaaaagtaatattttttagtagttaatatttaaaatgaattttttttaataattatacagtataaatacactaaattctcttaaggtcataagaattggagagtgtaaatatataatcaaatatcaaattatataattatcttcaattacacataaatgacttttcaaacatgcccctattttttaggagtttctacaaagatactggattttaagtaaaagtttacaattttactatgcggtagatttttttttataaaaatactatcttttctataaaacaaccgtagaataataaatcagaacaataaaaacaacagtggaacaactgaaaaacaactgtgaaacaaccgtaaaactcaacacagtacacagtatttttgaaaaaaaattcggcccaaaagtacaaaatttgaaatttaaaaagggttaatttcacaaannnnnnnnnnnaacaaaaaaacaacaaaaatacggt

SEQ ID NO: 90456 - DNA, 510 bp, Cannabis sativa
  modified_base (443)..(472): a, c, t, g, unknown or other
ttcattattcaaagcttctgaaattttttccctaactctcgaaaatttcaaacttctgagttttgactttttcgtcgaatatttctatccttcaatatgttgagtactcttggtcgacatattttcctgtttaacgttcgatatgccgagcaaccactcatctcccgtgttgtcttttgtagatgaacacaggtgagttttggggaagcgaacaccgaattgaccaggatttacttcaactcttgcacgaggatcaccctcgtcttttctagtccaccctcttcaagcgacggacattttaattcaattttcccgtccagccacaagatgatggctcgcactaaacagatattgcgtaaagtcaacgcgtctcaccctcatgtggccaaccacaccgccttgcccagcgtcgaatacgcccctgttggaaatattttaccagnnnnnnnnnnnnnnnnnnnnnnnnnnnnnntaacatcctaatataaatttctaaaacaatgaaataaa

SEQ ID NO: 90457 - DNA, 833 bp, Cannabis sativa
gttcaagcttaaaactcttggcaaccttaaatattttctcagcttcaagattgcccgtgccaaacaaggcttattcatctctcagagaaaatatactcttcaggttttggatgacactggatatgcaagcagcaagcctgctaagattcccatggacccgaagctcaaactcgataacgaacttggtgaaccacttgaaaacccgtcatcctatcgccaattaattggcaagctgctctatctcactctctcacgaccagatatcacctttgtcgtgaattgcctcagccagtttatggcaacaccaagaacgcctcacctacaagcagttcatcatttactcagatacctcaaaggaaaacccggccaaggtcttctatactcgtctacatcagccttaacactccgtggcttctccgattctgactgggcctcttgccctgttacacgacgctccacaacagggtactgtgttttccttggagatagtctcatctcttggaaaacaaagaaacaaccaacaatatcaaaaagctttgcagaggcagagtaccgtgcattagctgctactactagtgaagtcacctggttacaatatctgctccacgattttcaaattcctcaacctcatccagcattcatttattgcgacaaccagtcggcaatacacattgctaacaacccaacttttcacgaacaaaccaaacatattgaattggactgccattttgttcgagactagatcaaaaactccactattcgccttgttcctatctcgggttcacttcaacttgcagacacctttacaaagcctctatcatccaccatcctca

SEQ ID NO: 90458 - DNA, 1052 bp, Cannabis sativa
ctgttacaacaagtcaaaatgaagctttaattgcccttgtcaccgatgatgaagtttggatagctcttttccaaatgcactctgacaaatctccaggccccgatggtatgactccgggtttttaccaaagatgttagagtattgttggatcggatatcgttacacttgtaaggaattttttggctaatggtgatatgccacacagtcttaatgataccaatttggttcttattccaaaaaccaaaagtcctacttctatgaatgatcttagaccgatatcactatataatgtcctttacaaagttttgtcaaaagttctggccaatcatcttaagatggttctaccgcaacttatatccgataatcagagcgcatttgttcctggaaggttgatcgtggacaatatcatgatctcatttgaggtcattcattacttaaaaaggaaaaggcagggtaaataaggctttatggctttgaacctagattttagtaaggcttatcatcgagttgagtgggatttccttcgtgacatgattcacaagatgggttttgctgatcattggattcatttggtgttgaaatgtgtctcattagtacggtatactattattaatagtggtagagagatgggccccattgtccctaaaagagggattcaccaaggggatcccttgtccttttatttgtttctcatcaatgcagaaggcttctcgtctttgataaagaattttgagagtacaaagcagattaaagggtgtagagtggccaatggtgctcctgttatctcacatatgttattcacaaacaatagttatttgtattgcagtagggctaagcatcgagcaggttgatcgagtttcgggtttgcgggtttggagttcaaaaatttgtactcgaacctgacccgtgaaatgttttgcgttcgtgggtttcgggctcatgggtttgcgggtctgcgggtttgggttgactggattggccgggtcaacaggttgacccgatcaacttgttaatgttttttttaaaaaaaatcaaattttatataatttttt

SEQ ID NO: 90459 - DNA, 639 bp, Cannabis sativa
tttttggtcgagagttttgcataggagggagagagttgaatgcagccaaggatgacttgccggtgtgctcatcaacattttgtttctagttgatattcaattcggcaagttgtctttggctacattttcttttcttcttcacatgtgaccctcttgagaccaccacttcatgcattattatcttctgtgtaatatatgcttaaaaatatattgactactgccatcaaataaatggtatgcttttgttgttacgtaataaaaatttctaactaaataatattactactaatactatttatataaatcatatgcatgttgatgaatattgttcataatcataagtatgtatgttatagtcttctataataaaatattttgaccatgcatttagaaatgatgaagacatacgtaggcgaatttgtcttctatttagaacgtggctcgcaaatatcatttataaagtaatgtattaattcatttgtaattaagtagtataaggtaatggaagacatttttcccttctgtgaaaacaaagaatcctattttaatcatataaattgtaattagaaaagaaaaatgattaagagtatatatgcacacatgacacatgttgcatcgcaaatttaataatataaagta

SEQ ID NO: 90460 - DNA, 719 bp, Cannabis sativa
  modified_base (674)..(676): a, c, t, g, unknown or other
acgatcatcgaacgccacctcctctccctcattatcatcaccaatcaagatcccttcctcctcctcctccaagcttatttgtgcatattccttgtttaagtcaaatcctgtacgactactggaagtcatatccaataccaaactcttacagccacatagatacaaaacaagcagcccagaaacaaatcattcaacagcaacaatactttcagaaacaagtcaaaagactagacttagtaaatattacacataatgacctttagttacccaacatttttttttaatttcatataaatatgatttttagattggatcgatttagttattttaagtaattagtttttgtgtattaatttttaatttattcactttacgaaattgctttttattttttttttctgtaatgaggttactttaacttttgtagtattttgtctattgttcattttaaatttctcttattattttgttattatatggtagaaactggttttataaattatgagtttatgttatattttattcaacctaatgtaaaaatcagattataaaaaatttaagtgcaattcgccgaattaaggaaaaaaattagtaatccaccaataaaattgttgggtttgctcaacttaacccgtccaaaccaaccactaatatttttttaggctaattagtannntttctccctgaactttgacatgtagtaaatcgtgctccctgaa

SEQ ID NO: 90461 - DNA, 548 bp, Cannabis sativa
taagtaatggggacatatatcttttatcttctttatgataaatgctaaaatggtaagttatacaacactagaaatgagtgatatcttcttatttttttttttatataaataagaagactccaacttgggatgggacattttgtttacaaggagtattacatttttatagtgtaatttaatgctaaatttctcaaattttaatttaataaataattaaaaaaataaattatttgtgagatgccacctcttataatattagctaataaccgtgagaggttttatgataattaatatgtaaaataaaatagttaagagctcaatatcatgctacattaatattgtacttggtccaacctttttagagcagtgcttttagtatttggtgattgagatttttcttttaagaaaatctaggttaattagcaatttttgtgcctgaactttgacatgtactaaatcgtgccttttgaacttttttggccgttaaaaattctcctcgaactattgagattgttcaatttaaggacttttgtctattttcattcaat

SEQ ID NO: 90462 - DNA, 661 bp, Cannabis sativa
  modified_base (50)..(51): a, c, t, g, unknown or other
tatttgtaaatcaatttaaaatataaaaaataaaacaaaaaatagtttanntcaaaataaaataataaatatttaatattcatattttaattaaatcaaaataataaaaaaatcattaattaaaatcaaaaaactaatactctaactaataaaccctaaaaaaaatgcctcttcgtcatcctcttcttcttcctgctgaaacccatgttcatacctttgaaaaaaaattcatgaaacccatgttcatatacatttataagagtcatactatttcatcatcatcacctccttcattatttagttacagtaaaagaaaaaggggcaaaaattcacaaacaccaagaacaatctccctcgcgttcttcactctctctccatctctttctcgacttctctcttctcagagccgaatggcgacactctgattttctgtgacctaaacaaacttcaccacgaggttcgcaacccttgaaaacccctagatctagatctccttcactctctctacctcctcgcagtgtccctctctctatttctctttgcttgatgccggacagagcatctcaatggaaatatagaagaggcttcgatgggacacctggtgaagatcgggtcttggtagagatctaggcaacgccgtcattctcagcatggtgaagac

SEQ ID NO: 90463 - DNA, 1665 bp, Cannabis sativa
gccacaagtcctgcaccttgcatcgtgctttggcccttccaaaggaaggaacaacatattgcttctagtccagtaattactttccttggaagcttcatgatttgactccaacaagtgtgtatggatagtaggacagagttgatgagaacagctctacctacaaatgaaatgtttctagaactccaaattttaattctagctgccatcttttctgcaagtaaagtacattctttccctgaaatcttcttagacatataggaattcccaagtacttgaaaggaagaacttgcctaccaaaaccagttgcattgattatcctctgaatttcagcttcttgcataccactacaataaaaagctgactttgatgggttcggttgaagtcccgatgtgagagagaacaattttaaaccttgcatcatgaagtacacactcttaaaatcaccatgacaaaagagaagtacatcatttgcaaagcttaaatggttgagttgtaagcttccacatctttcatggaacttgaattcctgcttctgcccaatcttagtcataatccttgagagatactccattccaagcacaaatagcaagggggagaggggatccccctgccttaaacctcttttagattcaaaaaatccatgcattgttccattgaacattatagagaactttggagtcctaacacagttcataatgagagttatgaacttattaggaaacttaaaagccctcaacatctcttctaagaaatcccactcaatggtatcataagccttttgtagatccaacttgatcatacaactaggctttgtgtttcttctcccataactcctaattagatcttggcaaatcataatattgtgctctgtgaatcttccctgtacaaagcccccatggttctgtgccactaactcagaaagaacatgtttcaatctggaacagatcactttagttgcaactttgtatatgacattgcaacaagcaataggtctgcagtcacttacagtatttggacatttcacttttggaatgagagtaagcacaatggagttgatctccttcagtatctgccctgagtgccagaaattctggactgcagcacataaatcttcttgaatgagctcccaagaatcctgaaaaaaagtaacttgagtacccatccggacccggggctttgattcctggtattgcaaaaacagcagatttgatttcttcacatgagtactcctggcacaaccaattagcatgttgatcagatacaacagcccctgaaatgtaccaagtttgataaaacatgtcttcccccttgcattgtattgcccaacagccctttataatatgccaaaaggcttttgatatctttgtttcttttgttaatctttccccctcctgattctgtattgataacactctattttgtcttctccttgctttaatacttgcatgaaaaatagctgtgttttcatctccacttttgagccaagtcaccttagatttttgatggagataagattgataattttttgaggaggcaatataatctttttgggctgctaattcctcctacaacaaattttgatttaacgggtcctactgtactctattttgaatctgatttagcaggtttttagccttctcatttgccatctgtatatccgagaga

SEQ ID NO: 90464 - DNA, 1016 bp, Cannabis sativa
tttcctggcgaggacaagcttctaggagtgatggacctggtggagacctctctaagaaattttaggggacaccttccctgatgctcatattgtcatttggatattgggtgtctaattgcttggttttccttttctctttgttttccagtgatggatttgaacgaggagtttcacctcgaggtggtggatatttaagagaatccaatagttactctcgtagaggaggtgattactgagcaggttccaacaaggaatcctgtcgaggaactacaacaagacattaccttggagactactcgagagggtactccatccaaggtagccgtaaacccaaattaaaggggaaagtcaaggctctgccttttgcgcgtgtgcataatgcttcatttgggagatagaccagaaatcaataactttcgttcgtacgatatgatggagctttatgccactgaagcttgagtgtgcaacattccagggctaatgtggcacaaactgtctattgtggaagagttgacttttgtgagcacagacggggtcagtgcttggagctgggaacacattgtgagtggggcacaccttcccttgaggacttacttcactatattcatcgcatagatcaggatggcccccttcaaattgatacctctggcttacaagctcctagtctaatggtacatcgtttacaagatcaataagctagaagttcctaccctggaggagatcctgtatttttacggtgtgaagcctcaacctatgtgcataaattgtaagaagattggattttacaagttgaagagctagtcaaatgcacattaacccaccagattcaccttacgctgccccgacctctgcgagtattggttcttttcaacttgtttcctagtgaacaaggtgcctacactccatttaagcttttaaatcctacgtaaatatttttattgttttttttccttcgtttaaagtcttttctagtttaactgctaattgggcatttctatgtgaaacgaaagtattca

SEQ ID NO: 90465 - DNA, 1077 bp, Cannabis sativa
gttatcgtatggtaacattttattttatttttaatatttttaattattatttatttatttattttaaatttcatatttttgttgcatattttttgcagttatttttaactattctctataatttttcaaggaagttataaacatcaattattcttattttatttattttttttaacagttattttataatagtattatgatttcattttttttatgaattaattattgtaaattggtgtaattttgcatcaattattttatttatcaattatttataattattatttatttttcaattggtgattcatatttaatattttcaaatatagttttaatttggtggttggatagaggataaaatttatttacttgcctaagattttaatgtaacgttatataagatatcccactatatatgattggtgtttatgtttgcaatttttggaataattttatatgttggtagatttttattttttattttttgagaataagatctgctattataaattcaaagtgtcatttaaaataacagaaaatatagtaggagggatctctcctaaccaaaaaaaaaatcaaaatccatcgctaaagcttgtttagccaaaccgtgtacaacttgctttgcatctctacgaacgtgagatacacaaacattagggaagttggataattgatttttaacatcgagaatcaagtcacgaaaagacaaatcactcgatgaagaggcatgaattgcattgaccagcatgttggtagatttttatgagataagtattggtagttattaaggtaaatatattattttaggtagcctttcttatttcttattgatttattattttaaaatattgttatttatttatttttagttattagattattttagttttcgttttcttattacacttttacaatttttcatttatgtcgataagttttatccaatttttcttttaataagttattttattcgtcttaacattacaagtattttttatatattgttgtgttattttgtacggtgatattattatgttatgttaatgttcattagtttattatgtaaaattttat

SEQ ID NO: 90466 - DNA, 704 bp, Cannabis sativa
tactcaaatgcagatggtggaggaaagccaccatttttgttgggttcactggatgatcttcagccccttattgatggactccaggatgaaatgttgaaagtgactgtgagtcagggggtcggttacttgcatgagggcttgtctaatttggaccaagaggttgtttctcagcttttccaagctggacggattcaagtgtgtgtcatgagtagttcaatgtgttggggaatgccattgtcggctcatttggtggttgtgatgggaacccaatactacgatggccgtgaaaatgtccacacagattatcccgtcacggatttgttgcagatgatgggtcatgctagtcggccgttgctagataattccgggaaatgtgtgatcctctgccatgcacctcgtaaagaatattacaagaagttcttgtacgaatcattcccagttgaaagccatttacaccactacttgcatgataatttaaatgctgaagtcgttgctggaattattgagaacaagcaagatgctgtggattaccttacatggaccttcatgtacagaaggcttgcacagaatcccaactattacaatcttcagggagttagccacaggcatctttctgaccacctgtctgagcttgtagagaatactctgaatgatttggaggcaagtaagtgtgtggttattgaggatgacatggatctttctcc

SEQ ID NO: 90467 - DNA, 1518 bp, Cannabis sativa
  modified_base (914)..(934): a, c, t, g, unknown or other
catccacataattactaatatttataacataatcaactattaaataattaataatgcgaaaaacttttgtgatgacattaaaccacattttcacattctaaacactttaatttttatgacttttaataattaaaatcaatcaagaaatagaaatgttagaatggtatatatgctatcttgaccaaattgaagaagaggaagaaaagaataaagtaattgggagtgattcctacttattattttaggctctatttttaatcaccactagattaatatattatatatgctactttatatatagtttagataatataagggatctcccactacacctttttttttttttaaaaaaaataataataaaataagcaaagtataacaagatgttttgtttaatcataaactatattcaaatcttattatttaaaaaataataatgtcaaccttgccggtttattttgaagtgtaaataagttagagataagggattcctcttttcatagtaaaataattataagtatgtctatagtatacttttaaaaaatctatttttttttttttgaaaatcacgtatgttgcaactatataagattacttattaatttttaaaaaatttcgaataatttatagtgttgaaaataagttttaaatattttattgcacatatgactatttttttttatacgcgtggtagaaaactatttgaactttttcggcactgtaaatttacacataatcctaaatagctacaacttatgtgatcataaaaaaaatggattaaaaaactagaagtctattaaaataatcttttaactgggtatattatagaaattttcaataattatgtatccattcctattgctattatcttgcatattgtgtattgataatgtgtttattattattattattannnnnnnnnnnnnnnnnnnnnttattattattattatttgaattacatcatcaatttataatctaacttttaagagtgtggagagattgaaagttaaatttattttctgtcaaaattaaggagagatgtgtgatatcactacactataagcttaaaataattagaatgatacatacttgttaatctataattatatatgtgatgtgatatataaatttataattataattaatctatatttatataatagtggcctatgtatatatataaattttatggggaatcactttatatattattttttattttttttatttttacagtttgggttgttctagtagttgctatgtgaatttgggtggctttgttggttgtgatgtgggttgctatgtgaattttcgtaaaaatttttttttttttaaaaaaaaactactttgaaatatataaataaaaaaaaaacccaaattttattagagatttttacacttggtgtcacattttgccattttttttttttacatttttatcattatttggttatttaaacatttataaaaaatttgattttcaatattagatttttaaaagtttgataattacaaaaa

SEQ ID NO: 90468 - DNA, 1047 bp, Cannabis sativa
gatcctggtaaaatattccctacagttgagcccattcttctagccatctcttgttcttttttatggcctttttttcttcatcagaagtttttgagattctccaagagcatctttaacttgataggtgtctatgctctagtcaggagcaatcagaccaacttgcctatagttggctgtagtgatgagattctccaccttcaaatcccttggaagatagcttctgtacatgacctcccaagaaagtaagaaagggatggatgttggatgtacaatctcatctaaaaagggaagaaataggagaatcctaatcaaagactataataaaggtaagggaagaaaattagactgcaaaggatagctccacttacttgcagtattgaaatcaaatgagagggtcaaaacccttttcaacaggaaacccgtggtgaaaaattggtaattccagaagtcacacttgtacttcacaatgctagttagacgaaatgccccataacgcttctcaagtcaaaagaagccaatcctgctcttattcttcttcatggggttagatttaacttggtagaaataaagaatttcttctggagtcaggacgtcaacgttcttggcccagcaatgtataaaccatcctgcaagtagcttataaacttcagaaataaattttaaaagggaaacacccacatccacatagaagtttatgaagtaatttctgagtggaagatgtgctcccatctctgtattggtccagctctagacaccaaagttgttcgcacacttgcatggagattatctaagaaaggagagcctcctcctgaaaagaccaggaacactcttaaggtcccaacaaactttgtacctctggagagcttcatagtttctaaatttattggtgtactgatcaatctctcattgagatgaatgaattatatactacttttggagcctcgacatctttttgttccatgatctccacctcgtatgctagaatagcccaagccatgacagaaactagacgagaaaaagaaaaggaaatccctagcagttagatac

SEQ ID NO: 90469 - DNA, 639 bp, Cannabis sativa
accctaattaatttggtttcaatagtatgaaaaatatcaccatgctatgaagaactattgcactattagtgagaccctaattatgcatagtatgaaatttcttcacttgttattttattatttttcaaagctagctccaattgactataatctcatgacacataaatacataatcctcaaattatgctacatagagattttgtgagataataataaggatttaggatagtggggcccctcatcacaattcagtccatatgaaaattattcatttatttattttgctaggaaaagtgtatttggatattattgatattatatttctgaacaaataccaacatttttgtttttgcagtaactcaaagaagcaaatcaactttagattggtgtttaacaaagtcaaaagaaaaaaaaaaagtcttttgacactcaatgattttgctatgtgaaggtagaagctaattaacgatgttgttcatgattttggctaagattgctcttaatataatagggttagattgttgatatgattcggtggggtcatgatcatcatattttaataatgattaaaatagggtaaatataattttggactatgtattttgcaaaaattaatgattggaccctgtgttttgttaa

SEQ ID NO: 90470 - DNA, 1734 bp, Cannabis sativa
agcaggatgattcttgctcttgtcatatggagttaaaaggtaatcatctattctctgcccaacatggaatgatttgaatgcctcagcaaattccttgactgtcacatacctgtaaggttgctctcttcttgcccaatactgagcttgatctttccttgatgttacctatcattacaaaaataataataattttaacgattttgattttatggtactaaatatgtacaatttcaaaatacaagtaccaaatgtgtatattccacccaaaaaaagttacatgatgaatatatgtggagtttagttacctcttgaagaaagtctgctacaccttttctctcaggacatttgaagcccatagattcaaagaaagaaagcacattttcacgaggaccctgatacacaatctgaccatcagatagaagaatgatatcatcaaaaagatcatatgtctctggtgctggttggagtaatgagatgacattagttccattgaagatgtgaacatattgcttcagtgagttcacaatctgaaatgtagttgaactgtctaaaccagttgaaatctcatccatgagcaatactcctgctggcccaacaagcatctcccctgtaattcaattgtccaaatcaaagattaagtttgagtaatactatgtgtattggtactttcactttcagtattttcagtttgaaattctattttattacatgacaatattagacttagtcccacatttgttaatgtatgaaaataaaatataacgtataagataaatggactacattagttttgagatgaaactcgtgcattttataaaattctaacaattttaaaaaaatctcatattctactaaatagatatttttgctataatccatgtaccaaagtcttaaaaaaaattagaagagaattaacctcataatatctaaaaaaatcttatttttctttttttttttaaatatgaaaagataaataaatcattgcaattgccagaaatactaagctactaaaagaacaaaaatagcgagtcacatttaagatgaacgtgtcagtgttcattagttttgacatgaaactgttttcactttatatcaaattctaataatttttaaaaaatccgtaaaatttaagatgtcaaagtttagatatatttatcaaatatattttttaaagatattttcatatttcctaaaatagtttaattcgttaatttgtttatatataccagttgtgacacgcttcctctgtcctccagaaatacccctcagcatttcatcacctaccattgtatcagcacatacttccaaaccaagaatctgcaattcatctcatcttaaattaataactccactaatttctttttgatctgtaattaaaatcatatatgtaatgtaaagactttgttctttcaaaaaagctatttttaccttaagaacataatctgtcattacacttgtctcttggccctcaagctgctgcctacagtacaataaaattaagcttcaaactttgtataaaccaaaaaaatatcaatgattagtaataatttttcattttttgcttaccttcatgtacacatcaacatcaggatcaggtttgatatttgcttctctttctcttctagacaattcagataacatgtctgaaaaatatacacatatattaatatacatacataaagagaattaatgatgaacatttcttcatcataaacacaaaaatataatatgaac

SEQ ID NO: 90471 - DNA, 690 bp, Cannabis sativa
tactttctcaagctacctacctacagaaagtattgaacaagtttggcatggtcaagtgcaaactagttgcaacaccacttgctcaacacttcaagttttctacatctcaatcaccaaaaacagatgcataaagcgccaagttgagcaatgttccatatgcaagttatgttgggattctcatgtactccatggtatgttccagacctgacttagctcatgcaatgagtatggtacctgaaatggataatgaggtacctgaaaggtactttggacactggtacacagttcaaggaagaaatcactgattttgtggactcatattttgcaagaaacctagacacaaaattaaggagcctaataacagggtctgtgttcactgctgttgggggttgcatcagctggaaatctaacctacaaaaagtagtagccttgtcatctaagctaaatacatggttgctacagaagccatcaaaaaggctatatggcttaagggattgcagaggagttaggtttcaaatctgaggatatcacagtttattgtgataattaaagtgctttatatctcataaaaaatccaatatttcatgataagtcaaagcacattgatatcaagttacacttcataagggatattgtgtcatccaagaaggtgaaagtgaagaaaataagcacacatgataaccctgcaga

SEQ ID NO: 90472 - DNA, 1570 bp, Cannabis sativa
actgacaatgtgtctaagaaaggacacctgagatagccaaaactcatacttcttgaatttggcatacaacttacgttcttgaagacgatgtagaaccatctgaagatgtttctcatgctcctattctgaatgagagtacacaaggatgtcatcgataaatacaataacacaaatgtgaggaaaccaggttcataaaagctgcgggagcattggttagtccaaaagacataagcagaaattcgtaatgcccatacctagtatggaaagttgtctttagaatgccctcctctcgaattctcaactgacgatagcctgatcataggtcaaacttagaaaagaccgtcttcccctaaagctaatcaaaaagatcatcgatcctaggtaagggatacttgttcttgattgtcaatttattcaattctcggtagtccatacacatacgcaaagatccatctttcttcttgaaaaatagtacaggagctcccaagggtgacatactaggccgtaaaaaccctgggtcaagtaacccctgaagctgaatttttagttctttaagttctgctagagccattctggaaggggccttagaaactggttctgctccaggtgccaaatcaataacaaaatcaatttctctctgaggtggtaaacccagaagtttatcaggaaaaacatctaaaattcccaaaccaccttgatgtcttcccaaacccttagacatccatcccgtaacaaattccctaggtgccagaataagagcccaatgcccaggttgaattttgtcaacctgggccatttctgaggattgtttttgagaagtattccaggcatattctcaatttttcaacaaagattaagattcaactatttctggggtccaaacataacttccaggtgacctgaaactagaccgagcatccaggttgacacctggcagtgggcccaacgcccaggttgacatattataaacctgagctttctctaatcagctttctaaaaaagtattctgggcattttttccaacattagaaataatgagatacaagcaaacatgcggagaaaattacaatttggagagcctggaaacagagcccaacacccagattaacctggtgttgggcttaatgcccaagtcgacaatcaatctggtgcgctggttttgatcactcaaatgccaattctgtaccgagaattctctctgatatggtcaaaaacggggtcaaagaccttgttctcaagttctagaatcttggaagtatcaaaacagcatctgaaaagctctgaaataagcacccaatgcccaagttgacatatggcctaatgcattgtgttctacttatccgattttgattccgtcttgaacattcatctagtttttcacaataactaagagacatgaagttaaagttgtcaaattcacaacttcacattttcacatttttgacaaggtgatttactcaaaaactggataatttcgagtttcccatttctacagaacagtatcatcttagagaactagtgaccagcttcgtcagagcatagaaatggtctaagtgatgttaaaatatca

SEQ ID NO: 90473 - DNA, 652 bp, Cannabis sativa
  modified_base (391)..(410): a, c, t, g, unknown or other
aattttatctttgatccatggtattgtatagttaataccaaaagaaagatatcattagagatattagtacagattaacaaaaatacaattttcattattttttttaaatgcatatattgtatattaaggataattacaactatcattattttttaaaatatgtttttttttatgtttaagttgaaagatattttttgtattatttttacatttatagatgttttttttatatatttttacaatattttataaaaattatacgaaaaataacaaaaaaaaaatatataaaaataatataaaaaaataacgttgaaataacatcaaaataatacaaaaaaaaatatacaaataataaaaatacaacataaaaatacattaaaagatcatattnnnnnnnnnnnnnnnnnnnntttaaaattttatacaactgtatttttataatatttttgtgtatttatgaaataatccctatattttatattggttctgtaattaatatgaaaagaacatgaaacaggttaattgatatgaaagacacattataactaatttaatgaaacacaacatttgaggtaataagtgatcgataattaaaagatatttttataattagaaagaataatataatttacctattccaagatcaaagcca

SEQ ID NO: 90474 - DNA, 587 bp, Cannabis sativa
aaaaagaccaaaatcttaaatgaaactagcaatacgtggctcggcacgtacattcacctagtttatatataagtgttgatatacaataataaaacaaaactgccgtttaccacaagaaattgcattgtaaaagtcaaaaggctatctcttcccctagttttatctttacacattttattttgataacattttacagtctacacttatgggtgctccaatttaagtagcacacagaccaaactttgagacagaaatcagaaaggttcaatggttaagaaaagagcatgatttttgtaagataaaaaagaatggttcttttcaattacaaaagcacttgtgtttgttgttttcacactcatgtatagagtcaaatctaactcttcaacttcacttcaacacttcagtggctaaaagtccttacatctatccatcaaattatccacacctgcaattaaaacttcacaaaatcaagcactaaccgttctgtgaatggttcctggaattaaaaaagaaaaccaaaaacatttacataataacaccgatgcttattcctaacattcatttaagtgtggattccacccgtgtag

SEQ ID NO: 90475 - DNA, 1773 bp, Cannabis sativa
ttttttttttttttgaaagggaagctttgtagccatttaatttgcttgacttccacaatcaagatataaataattattgctctatgaatctatgtcacataaaaaaaatcatatatatagtgggagtattacttttttatttgattatataatttataagtaagagtgtatttgtttggtacacatgaagagtagtgagccacactttttagtagggcaacaataaaattattttgttaaaagaatattaatgaaaatataatttttatagaggtaaaattaaaacttaaatatatacacatatcggagtgggttcagggcgggaatctattcccccgccctgccctgaacccgactcagatatgaatatttaaatccatacccatcctggccccaaaattcgacccccgcccccactcccaaaattcgacccctgcccctgtcccattaggggccggttgctgcgggtacctaaactcgcgagtataatagtcatccttattaaatactgtattttaatcacaagaaattttttgctgtgactaaaagtcacatttagtcacaaaaaattatgttgtgactaaaaattacgtgggataaaaataaaaaatacaaattttatgaaaataaagtaaaaatatggaagggtataaaaaaaaattaatttcatgtggcaacaaatagaatatttatgagtaaattatagtttaatatgtttatgtgacgatttatatagtagtaagagcatacattggatggttatggattttttttaaaaaaaaaacatcatgtaattttattaatagatatctgctaaaataataatctgcaatctaattgtgatatcttttttgttagaaacacgatcataattagaattaaaaaaatgggtaaaataatcattcgattaattcttagatcttttgacaaaaaaattgaaaataaaatcagattaaaaaattacgcaacatcttacagctcagaagacacaacagtagaaattgttgcagcatattcattcaacctcgtagcttgaacactcaattattgtacaaggtacgtaactgcactactaacaatccactcgtagagaacttgttaattccaaccgctaacatcgatttgatggcaagctatcgaaaaataaataaaaactaacaacaaaacaaaacaagatcacgtcacacaaataagactaaaacattcaaaaccatgtcatatagagacacactaattatattagcaaaaattgaatcgcaatagtaaaatgcaatcccgaccaaaccgtacttatgaccaagaaaggccggtatgggcttggacagagagaaaatacaacttcctgtaactataaatttagaaacgagaaaacctaattttttaataaattagttcatgtttttttaattgatggtcaaggaattagtttgcctttgatggttaagtttacttttatattttgaatatggtaagatttaaacaaatatagaccttgtataggatgatatgcgtagattaattattttttattataaattattttaaaaaaaaattcaaatatacattgtgatcatataaaagaattatagagttcataatccctatgtaaaaaaaatgcagcatagatatataataaaaatagcgtcactatgtaaaaagtcaccaatgtataatatatatagtatgttagataaattaacaattaacccaagatctatttgtatataacatagaacacaataataagatataataattaggtatgtgtacctg

SEQ ID NO: 90476 - DNA, 592 bp, Cannabis sativa
ttgtaaaccaaaatgtcatcaaaaaatactatggcatgatgtcgtaggcccagttggaatagacagttcatcactgcctgaaatgtggaaggagcattggtcaaaccaaatggcatcactataaattcataatggccctcgtgtgtccgaaaagcagtcttgtgtgtatctcgggggtccattcggatttggtggtaacccgcacgtaaatccaacttcgagaatacttctgcaccccccaattcatctagtaactcatcaatagtgggtatgggaaaatgatctttaacggtgatattattcaaggctctataatcgccacaaaaatgccatgtcccgtctttttatttgaccaataaaactggagaagagtacaggcttgtactgactttggcaaaaccccatgacagaagatcgtgcaccattttttcaatgacatccttttgaaagtggggatatcaataaggcttcacatttataggggctgaaccaggttgaagaaagatttgatgatccacacttcgatgcggcagtagttgttttggctcttgaaagacctcccaaaattcagagattaattgtctgcccattg

SEQ ID NO: 90477 - DNA, 1963 bp, Cannabis sativa
tttaaaaatattttttttcttatcttccactatagcttgccgttaaagcttatatatatacacacatatataagagtttcctatagagtagaattttgtttctattttatatatctacttgcttacattcctcacgtttaaaatgttatatatctcactattttttttaggattaattttagtcataaattttttacttttagttataaattttattgtgactaaaaatgagatttgttacagtatataaatatgagaattcgcacatccactattactatttctgcactatatatatattgacaatatcttacacaagtcaagtatatatcatatttttaatctttctattcgtgatcagttaatcataatgattacagttggcttcaataattaatacaatacttttcaatctttcaatttgtgaccagttaatcataatgattacagttggcttcaatgattaatacaataatagggattcaaaaagtaaactttaaatataaaaaataaaaatgttcttgttgaaatttaaacccttaacatttattattatatatactataagaaaacttaaccattatcaaaaagctacaactatgtatatatagaaatatttttttaattataaatatatgttgtgattaactaaaatttatgtatatgtatttttattttaatttttttaaggggcgactaccccttcccctctatgtgtgcccgcccttgtcctaaattaattttcattaatatttcaactacgtaaaatcttttctttattttgtgttgtccgtgacttttatcattataatttatgatattttaaaaaaaaagttgggatataattattttagttattaaaagtataatagaaaacatccttacaactagagtaaaagtgattaatgatgccccacctaaaaaaaattcaataaatatttattaatataagctgttgagcaagtccggacatgtgcttaggatccacctataatccaggggtctaaaaaaaattgtttctttttaaaattatacattttttttttactaattttaaaaaatactatatttttctctaaataaaagtttaaaaatatttcttttttttttatgacccgctaaatttcaagacccagataaggcctatatataacagtacatcctatacagtagaattttgtgtctatttcatataactacttgcttagattcctcacgtttaaaatgttatatatctcactattctctctagggttaattttcacctataaaataaacacttctcaactactcatcaatcacttcattcatattcaaaaagctcttctataataatataacatcaaaccctaaaaatgttgaagcctcaagtttttcaagagtcaaagctatcctcattattcatccatggagggaataattataattacaataatctttcttcatttccagtctgtataataacattaccagcttgttattatgaaaaaaattataaccacagaaattttgggaaagtaattagagctgtttcaagagataataataataaatattataatagtagtagtaatagtagtactaaagttgtggaaaagtcaacaaaagtcaaagctgttgtgactgtgaagccaactgtgggaggtgttttgtctaatattggtttgaagagaggagttgatgatattcaagatttgcttggcaaaacccttcttcttgaacttgttagctctgagctcaaccctagtaagtattttcataatatatatatatatatttatatatatatatgtgtattcatcttatttttattcttgacttaaactttaattatttttgcttgcttaatttcttctatataaattttacaagtttttcttattttaagaaagaaaaaaaaaagtgtttttaagtcatgttacgtgaattgtacgtataattagttatatttttgttaattatg

SEQ ID NO: 90478 - DNA, 611 bp, Cannabis sativa
aataaaaaattattatcgtaacaatataaactcaatatcaatattctacctaaagttgtccccaaatataaatatttcgtccaaaaaatatattaagtacatttataataattatacggattggattggtttgaatcgctaccgagatttttaaaactgtgaccgaaccagaaaatttaaaacggtctgaactgatcaaatcattcacatcggattcatttggttcggtctcaaatgatttggtccggattagctggggtttggaaccacatattgcagattatatgaacacccctagttagatagtctaagtacaacacattagctgtgctttgttgttctttgtaaaaagttagtagtttgcaataaaattcttacttaccaaaaaaataataattgtatgacaactccattgtaatatgcaaattaagtaggcaccataaaacaacccaatgattgtatcaactccaagaagaaaacaaaataccagtattctatttaaaaaaaattaaaagctactacaaaatatttgtatatcaactcaaaaatatatgtacccataaaaaactaaacatatactttttttgttgttgttaaacaacttaaaaaaa

SEQ ID NO: 90479 - DNA, 522 bp, Cannabis sativa
agggggaatttttaatggtcaaaaaagttcagagggcataatttggtacatgtaaaagttcgggagaatcctaattagccttatttttaatgattgttccattatgggcattagctattgttacagatgtttagaattcttaggtaatcccttagcttgctaatgcgaacccctctagtgaacatgtctgcatgattatctttagtgttcactttgctaacttgaacctcatttctggcaataatgtcttggatgaaatgcatcttgattcaatgtgtttcgacctctcatgaaatatttgattcttcatcaagtgcaaggcacttttcttatcacaatacactgtgatgttgtctggcatgaagtcaagttcattagttaaacccttcacccaggtgagctctttgatagcttcaattgttgccatatattctgcttctttggatgacaaacttactaccttctaaagggttgattaccaattgatatatccacctggagctatgaaaacataacctgtaa

SEQ ID NO: 90480 - DNA, 908 bp, Cannabis sativa
gagtcaacttttcatcagtcatgtaattagctatgtggtgagtccctcaccctcttttcccacataatcaaatcatcacatggtctttcttctcgagtcacacttggaaaaaccaaaccattgtttttcttgcagttgaggctttgccttgtaaaaattgagaggatctcaatagtgaagagtgatatcccagttactgattgtgcttggaattgttactgtcaaaagattgtcttcatttctgtacttaaaatcctcagtacttcaagagtttaccgagcaagacttgggttttgtactaaagtaagctccaaacctgtcaggtcctcttcccttaattcttattttacacttagaggtatcactaaagatgtcaacttcctcaacagctccacgagagttgtacatgtttagtgatccatagctgcaaattcaatattcttgttgtaatccatagctgcaaaaaagtaatcatattatgagaacatattcaaatttatgtgttagtgttggttttaccgtttaaagttgtaagaaaatcaaccttaataggagatatgctaagatctttacatttaagaactttcaaggtgatgtttagagattcatcttttggtattcgagatagagaccctgaaagattcaatcaatcaaaactggttgtttatcatcaatcaaatgatgtctatacagacttaaacaacaaaaaatttcacctatcatgaaacagctgaacattttttcaagagcagaagacaattcttgataagtataataattataatcgcaaaatctactacaattctgaaaaaaccttgtaacacaccgaaacatgaatccataattcattatcccatgaaccaacaatgttcaagaaagtagcgtagtcaacactctcacgaagacgt

SEQ ID NO: 90481 - DNA, 583 bp, Cannabis sativa
ctaaccaagtccatctctatagctagcttttccttccgtcgtgtggaaaatacgtacaagcaattactattccccaattatttttaaaaaaattatactatgtatagtatatataaactttataaaacaaacttggtcaataaatagatcttatcctcttagaaatttatattatttttatttagagggaaagataaaataaaattatactccatctcttacacttcgttactataatacgtgacaaaattgcctaacaaactatatatctcaatcgagtaagatatactcaaatacattaaattcaagcttttcatgatctctctcttttcttttctttttttcttattataaaaaatgaaagtaaaataactaaaagtttttaataagtttttatttttaaaaaaaaattcctggactgactaggccccgtcgagtagtgactacactttgacgacatacgtatgtgactaaaagttcttcactttgtattaattgtaataaagtcgtacgtacgtttaatttctttctttctttctttttctttaatttgtgtgtaacaaacaatcatcattattccata

SEQ ID NO: 90482 - DNA, 587 bp, Cannabis sativa
ttgtagaccatgaagtctcaaaatttccttgtgatgagcgtaagtatctctttaactttgcatgtgcactttcaaccctgtataaataaagcaagataaaaataaattaaatatattttaaataaacatttatatacaaatgcactcaaaatataataacaaaagaaattataatgtatacctatttgtagtagtagtagtgccaaaatgcattattgaatctgtccatgcgaaaaaaaaatgatttatatttattcaaccacacatctttaacatagtcaattgcttgtgaatatctaccataattttcttcaagtactttgagtcttttatcatactcactttccgatgatgataaagtgagtctgttccaatcagaaagaaaattatcccacttttcttttgactccaatattttttgacatttagtcaacacattatttgatatatgatatcgacacaaaagatgttttgcagcagggaagaccttttcaatagcattgattaacgctaattctctatctgtgacaactacattaggaagaaagtcaatgtccatcatattttttaatctatccaatgcccat

SEQ ID NO: 90483 - DNA, 925 bp, Cannabis sativa
tattaatttacactaataataatatattatatttcaccctaatatttttcaaatatatagctaattagcttttttttaataaattgatcattaaccacgtgttatgtatttccatttacttaattattatttttatattaatggagataatcataaaataatcagtattacatcatttgtgttcaatcaattaaatcggtaacattatttttaaaggtaaattgaatatttagtagaattagttggacaaatgatctgatcatttagagttgtattcgtgtacaatggtcattaatactaatgtgggaccttatcataaattaatatgaataacataataaataatgccattagtgcggaattatgatcattacatgacatattgaaataaaataaaataacattatggttttgatattgtttgatttttttaatgtaataataatcattttttctgaacaacaataaagattatatattaattgatagacaatgaattgaggaataattagagccacaaaagattgtgaatggggccttgtattcatataatacctaataatttttgattgatataacatatttaataatttgtacgccgaggttagaacatgaaacacgagacagaacatattatatgtttatacattacgtataagcaagttcattcaaatattttaaccaaaattaaaaattaagtcataatcaaatttatatgctacaaaaaaatggactcttaaagagaatttgattttatcttggacaatatagggaaaaaaatctgaagtgaagactttccatatatattaagcattcaaatagataataagtagagataattacatcacaatacatagttttgaaaatatttaggaaaatgtgctcaaatattttattgatatcaatacctgaattctttccaata

SEQ ID NO: 90484 - DNA, 1323 bp, Cannabis sativa
tgattatattgaaatgggtttaatttagggcacaaaactcaacagcttggacatctcttactgaacctcctccatggcagcaagacgattgttcacttgaagaacttctttcttgacctcctagacttctgcaggagcagaactggaacttgcactagcagcagcaacaacaccagctttaggacgcttgggaaaagttccatcaaagtactctgagggttgaaagatggttccagtgaggggaggcttaagtatctcatgagaataggcgacatccgtctgagaggaaagacttttatagatcaagttagaaaaaacaagcttatgagtacgctttttacctctccaaaatgaaacaatctggtccaagattgaagaagccagatcaatggatgccctcgaggtgatacaaaagagaaaagatgccaaatcttgagacaccactattttgttggaattgggaagccaattgctaagagcaaatctcataagtgttgcatgagcatatgtgagatgagtaatgcgaagactttgcccaaatttccattcaactcgtgcaccagtgagttcagtgagcattagatgacgatccatagacatgacagcattgaacacaccttcgggtaattgcaaagccacagaaatgtccttgacagtaaattaaaaccaatgcccccgaacatagactttaccaaaaaacttagagttctcatcaagcaaatcattagacaaatttgtatattctttaacaataccttctatgtacccttcaaaactagtaagggtattttcccatttatgatattgaataaacttaacaataccatacacccgatgagcatgtaaatcatagtttccctcacggtttcctagtcacttgtttgggaatccgtttgggcttgaccttcacattctgagattcacgctgaggaagcgatgaatctccttggagaggagcagttgtaggagtagggagcgaaattggagctgcataaggtgcatttgagggggcaggtttgaattccaccaccttttttggttgccctaaattccttgtcttagccatggagattctgaaagagagattgaaaaataaagaaacaaagaacaaggaagaggaatcgggtagatggtgaaattaaatgacgaagaaagttggtttaaatatacatgtgagagtggagcaaaaaaggaaaccaacttacaatttgaaaaactaccaacccacaatcacaaagaaaccgccctctttttccaaaaccatatatttaaaaaaaaataaaggaaacaagaataactagtatactttcaaaaaaaaaaaaa

SEQ ID NO: 90485 - DNA, 1434 bp, Cannabis sativa
tagatgctggggtggcttacccaatttcagacagtaagtgggttagcccagtgcaagtagtaccaaagaaaggagggatgacactgataaaaaatgcgaaaaatgagctgatccctacaagaacagttactgattggtgaatctacattgactacaggaagcttaataaggcaaccaggaaagaccattttcctttgccattcattgaccagatgttagatcggttggctggacaagattactattgttttttagatggctattccggttaccaccaaatagccatagcaccggaagaccaagagaagacagcctttacatgtccatatggcactttcgctttcaggagaatgccatttggactatgtaacgctccagcaacatttcagaggtgcatgatggcgatctttttagacttgattgagacttgtatagagatctttatggatgatttctcaattttcggttcctcatttgacaattgtttaaggaacttggagaaagtgctaatcaggtgtgagaagtcaaacttggtacttaactgggagaattgccattttatggtgacagagggaattgttttcaggtgcaagatttcaaaggcatgcatcgaggtggatagagccaaagtgtctacaattgagaatctacctcctccagtttctgtaaaaggagtaaggagttttttgggccatgcaggattttaccgaagatttatcaaagacttctcaaagatctccaagccactgtctaatttgcttgttaacagggtaccttttgagtttggagaagaatatttgaaggccttctaaggtctaaaggagaaattgatatcggcacctatagtcacttcaccaaattgggagttgccatttgaattgatgtgtgatgcaagtgactacgccattagagttgtcttgggtcaaagagttgacagggtgtttcataccatctaatatgctagtagaactctgaatgatgctcagttgaactatgccactacggaaaaagaaatgctagctgttgatcgaggttttcgacaaccgattaaataatatgtaggaaaacctgtaggaagtttaatacatgagatttttacgcggttggggcattaatgagccttagtctgcgagtctttattattaatgagagtatttattacagagaatgttcttggtgaatttttctctctttcattcctctgaatccagaatcctcgacccctttctcagtgtgtttgtggggtatttatagtgttgttctggggtgatccctaggagtgaatcacttgtctttctatgtaggcttcataggggcacatattcccagcagatacaaaataggaaatacatgacctataccgtaggtatcttaggggttaggtggatataatctttgatctcctcttgattgatgtgattcctcataaagtag

SEQ ID NO: 90486 - DNA, 500 bp, Cannabis sativa
  modified_base (474)..(475): a, c, t, g, unknown or other
catttaaaagtactgtgggacccccctgccgtacaacggattccaatccgtgttttgcacatataggcacaaaatcggctgcctacatatatatacctacatttatgaaatttataaatttctaatagtttattgctaaaattgttagttttttatttactttttaataatagtttaggattatttttattcattaacttctcaactctctaactttacatctattctttctcattttttttaggtaaacggtaagaccttaaccctattaattcataaacatttaaataggttctcatctcttcttcaatctatttacataatcattgtctctttcatagctatttcaaaaatatttaagtggaacaattatatgcatctaagaatgtatactattacttgatcggtatatgattgtatctattctatataaagtgtgcctatataactgaattattggtttatgagaaattnntgggtgactttttatttatatttaa

SEQ ID NO: 90487 - DNA, 692 bp, Cannabis sativa
  modified_base (227)..(237): a, c, t, g, unknown or other
  modified_base (503)..(504): a, c, t, g, unknown or other
aatctagatcctggtaaataatctccaacatatattcccctgtgatcattatattttcaagttgttcaattgtcttggtagtttcctattgaatacttgctaatataagtagagtattcgcagtttcttttttccttttatttactgtctgtataatttttggtctcggccccagtcctggacacagacctgttggattttctgccctaaataaaacttatttcaannnnnnnnnnnttactaattaataaaagatcagaaatcattctgtgttgtatggttcacatgatttatttcatgattatatttaatgcataaattctattaagtccagaacatatatatttgttcataattatggtgtcgtcaacacagtaaaatttaatcaagattatatgctcaaaagtttatgtcccatgatatgtcagtgtactggatttagactgacatgatttgtcagtgttatgtcctttctagagtattggcaaagtttaccagtatcnnatgtatggagtatacattggattagactgatattaaacttggataaaatatcataaacttactgttacatctttctaagtcaatatcttgagttgatcataggtctaaaatcttaatcgtgatatggttaggttcgatcttagttgtattatttatgttcttagagttgttcgttaatgtttggttgg

SEQ ID NO: 90488 - DNA, 555 bp, Cannabis sativa
gggcataaaacccaacacttggacacaacaaaagtaacttggtattcgtcaagtgttcttattgtgttgaaatttttctttatctgcctcatccacctttcaactaccatggtgtcttgtccaccaccaaacttaggcacttggatataaacaaatatctaaaaatgatgactctgttgagcggcaggatctatctactgagtgggcactactcttaaggccttgagaagagcgttcatagggaattcaaattgtggacgtttgacattagctagagaggtgtcttctccaaccgttctccttgtcttccttccttttggaggcttttcttaggtctgagaaccaaaggctaattagttagtgaagattggatgctaataatataaatgtcttatacatatatatatatatcaagatacttattacaatcatcatttaaaataaatctaaactatttggtgatactctgagataattaaactcaatgctctgaatcatatttaagaactatagcatttcgtgattcattggtaaatctactttgattctctatca

SEQ ID NO: 90489 - DNA, 1009 bp, Cannabis sativa
  modified_base (266)..(269): a, c, t, g, unknown or other
ggtaggaacaaattgagtgaggacttaatacacatttataataaacaaaaatttaaatacatatataacataaaatctttttatatattataaaattgagtgagggcttaagtccctccgtccctgagtataaaactttacatgggaaccttaactttgacatgtactaaattatactccttgaatttttaagtttgttaaaaatacctcttgaattattgagaatgttagatttaaagacttttttttttaattttagtaaaaannnntaacatggatgaaagttcagggaacataatttagtatatgttaaagttcgaggtgcatgatttggtagatatcaaagtctggtgagcataatttagtatatgaacaatgactgaaataataaaattgaatgaaattagataaaattcatagcaatatttctttatttcttcataaaattcatttattatacatagatctctttcttattcatgtaacatttcgattacaatccaaatgaacatataaatcagagataattatttcaaaataagaaaaacattaaaacatgcataaaataattaacatgacaataccaataattaagtagtagttttcctaagctgaatagtaacaggcaagccacctttcatcccaatagtaaaccaaaacgaaatctgaggaactctttccttatcttcaagactaatctcaaacctctcaatcaaagaagcagcaatatatttcatttgaatataaccaatgtctattccaacacacattcttggtccaccattgaatataggatacttataaggattctcaggcttaaacactaaaccaccactgatatcgtcttgccctagccacctctcgggcctaaactcgcaacaattctcgccccaaagcttctccattctcgccattgcataggcattgtaaatcacaaccgaacccttctcaacaaatgtcccatctgggaaaacatcgtctcctgagcaactcctagaagttgtagggg

SEQ ID NO: 90490 - DNA, 880 bp, Cannabis sativa
tggcaagggtagtcgcgatcgagatgagagacaccactaccagaacatcgtgtgcgcctcagatggaagacgcatcaaggcattagaacaagtaacaaaaaatatgcatcttgccaatactgggatgcataatgggcatgtcgatttacaaggcaccctaaatgacacgatagaagatttttatgcgtgtgcgccatggtagaaaaatctgtatttctttttctttttttttaaaaaaaaaaattctcgacggtttaaaactgttccctataacagggcatatgtgacagtcttaaaccgtgccttatactataataggatataggcaacggttataggcgacaattttaaaccgtcaggaagttcacattagcgatggtttttaaccgtcgcctatttcgcccgttttacgaaggtcgtataggcagcggttatgaaaactgacaggaatactttaaacgactatttaaaaacatcaggaaaaattatttttgtagtagtgtgtgaatcagattttgagtcatcagttgatgtgtttgatgacaagtctacttaggtggcgtacttaattagtggcacttgtcatcttatgattggtccatttttcatacgtaattagtgccacttaggaccttgtcactagcatgataggggctcaactgtgtactatcttgccttatcaagtcatataataataaaacgatatttatttatatttccttgtgtatgcttctatgttgattatgtgtttcttattaatttgttgcctttgttgggctattgagagccatttacttatgtgtttgcttgttggttgtgtgagattgagcattggaattagttgtcacacgtcgcatttacttactgtccaaatagccag

SEQ ID NO: 90491 - DNA, 1021 bp, Cannabis sativa
tactaaagcggtcattacagtaatattgtatttatagtattgtactgttctgggaagtttgaacaggtttggaggagatttgtgtggtttttggggtgaaaatcaggtttaccgtttctgctagctgagaaaccggataattgttttactgtaaaactagtcaaccggttttgccagtagggaaaattttggttttagcctcgaaaccagtttttgctcagggtattttttagaacttagattagggtaatttagtgatatttgaattgttctgatacagtgggagttagatgtcttgttatagagattagggtttgattcctgagtttgcataagttgtttatcgtattttgttgttgtgacatagcacccgagatcgtcgagcataattccactcaggttggcccgcacacctgatatctagactgaggtaagaaaagtgttacgcatcacttaagattaagtgattattgattgtgtttgttatagtctcgattatgatcgagattctggttatgtatttgttatgccccatttatggccgagggttggaaacggtcattaccgttacgagtaattattcctaaaattgcgtttagatttcttacttatcgttcgctgtatcgggcaacgatagtgacatacgtagctcgtggttaacgagtggtaatggtactttatgaagtaacgagattgcgtgattatcagtatgaaattgtataagcatgttagtgtgcaatgtgttatacttgcgtgcatattgttatgatatgattaatatggttttatactgtttatggtttaatcacttttcttgctgagtctctgtgactcatgggtgctaaatggtgccggtaaggggaaagccaaagttgaacagccatgagtctgaggtcacagcagcaatgtacatattagccacggtgccacgacccggtggacaggatgttccattttgactgtattttgaaatatgaacttattttgtaaaagcacatttaatcctgaatgtaaatatttt

SEQ ID NO: 90492 - DNA, 547 bp, Cannabis sativa
gatgggagtgtcccactcccctggaaattatctacctctattcagttaaggcaatccctgcgagaaaacattgtgcaagaggcttttactaccttgggactcatacaaacgatcgtaggatcattgttgggttaccaaacaagaccactttcaaggaagacttcttctggacaagtggtctctccccaatcaacacaactacctttcacataatacgtaagtaactgtttgttccatacttggttttaaattacttcatgtttttaattttggcctcgttgacctatcttattttttctcttttaatagcggtctcgaaaagaccaacccccactcttgagatggccgaacaacgcaggcttttgctgggtcttccttttggtcttcgatcagttgagtttcttttgagcgaagccaatctgaagtctgttggcctcctcgctagaaacgagtatagttgtgattataagtttcctaagtatacgtcgtggcagcatgttctagtcccagctgacgaggaaacccaagattacgcggctcgggtaca

SEQ ID NO: 90493 - DNA, 565 bp, Cannabis sativa
aaataaagaacatctatattttaagaattccaattgtatataaataaagaataatgacaaaaaaaataaaactataaatataaaatatcccaatatatgcaatttttacattatagagaaatatcgttaaaagaaaattacactattaagacatactgaatatatataattatctggatatcgttaaaaatggtaaatcacttaaaataattcttaaaataaaattgggtcaaatgagatatccacaataaatagaatattattaatcaagtttgagatctaacacgtttgaaaaattgaaatctgattattatctgctattattctcaataaataaataaataaatgaataaatatatctgctgtaaaatgacgcgtcaataccaacagaaatttttggtcgtaactcggtgatctacgtgctctcatgaatttatagtttgataatccaaatgtaatatatttagcactaaataaattatattttaattgagagattataattaaatagagttacactagaaataaaaaaaattaaaaaactaaaaaatattaatgtaacaat

SEQ ID NO: 90494 - DNA, 617 bp, Cannabis sativa
ctagcagataacaccactgttgctacattagatgatttgtcattctagaccttctcattgcgggcactccaaattcctaaagcaaccacaacagcttcttcaaccacaccaatacttgaatgagacatcaaattggctcaccaatctccaaaacttgaagtaacaatacccagagaaactgaagatcgaagccagcaagatcttgcaaaagtgcatccaacaagaacatgaaaaatagattcagcataggcattacacattggacacaaattaacaagctccacatgcttaattctcagttgagcccaaggcaattagaaatggcatgctaaagaaagtttcgagcttttgggagaattttcaaattccaaattttgcttcaaaagcctaaattattctttaaagaccacgacccttttaactcctaaataaaatggtaggcactcctaactgaatagatacctgaaatttccttcttccaataccactcatcatgtacaacagtagagctcaactgaatgtttaaaataagctcacgatctcggacatcaaacaaatcatgaagtatatcagtatcccaaactcgctcattaatctaaaataaacttgagacaacc

SEQ ID NO: 90495 - DNA, 539 bp, Cannabis sativa
cttggatccaagggatatcagccccatggaaatatttttcaacttcctccatgtcccaattgccttctgtggtaatgaatttctgaagcttagtattcggctgaatgctaggcctttgagtgagtattgttcccgacggtctaggaagccatttgtcttcccaaacactgattgtttgtccattccccactcgccatcttgccccttctctcaggatctgtcgtccccaaataattcctttccaatcccaagaagcccacggggggcattttgcatccataaatgttgagttgggaaagtagctttgtttgagaacccgagccaacaaagattgcggattatggatgaggcgccatccttgtttggctaaaagggcttggttgaattcagttagacttcgaaatccaagccctccttcctcctttggtttgcacagcttatcccacgtactccaatgaagtttcttattatcttttgtatcacccccaccaaaagttggttgccatggtatggatgttcttgatgagttttttggggag

SEQ ID NO: 90496 - DNA, 556 bp, Cannabis sativa
acaattctgtggtggaaaaaatttcaatctgtggggaaaatttattacattggggaaaagactttactggtaacttcaagcttcggattgctgaatgttaaaaggagataaggaagattaaaaaagccagtgatattggctcgatacaaaaaggcccaggagcaactccacaaaattttcactcaaaaagaagttttttggcatcaacggtctaaatagttatggttataagtagtagaccaaaatagtaagtttttccattcgaaagctacttctagacgcaaaaataatctgattcataaactgcaagatgcttatgggtgttgggtggattgggatactggactaccatcggtgattattgattatgttactaatcttttctcgtctagtgggtctatttcaaatgatattgtggaaggtgtgatgctattggtgtccttttagcagaatgaaaaccttctccgagatgttactaaagaggaagtccgcaaagctctcttccaaatgcacccggacaagtcgccaggccctgatggtatgacactgagattct

SEQ ID NO: 90497 - DNA, 584 bp, Cannabis sativa
aaatttaatgtaagcccaaataaaagtctaacagttatcaccagtttaggattcgggaagaggataattcgaagactactttttgcacttgatatgggtattatgagttcctcgtgatgtcctttggactacctaatgctccagcaacattcatagatttgacgaatcggttattcgtggactttctcgataatcatgtgattttctttattgatgatattttagtatactatgaatgtgaggaagaacatgaggagcatatccaattagtgttgttgtgccttccagagcacaaactttacactaatttaaaaaagtgtaaattctatttaccccatgtgagttatttgggacatgtagtgagtaaggatggaatcctagtggatcctgtgcagatagatgcaattcaagattggccaagatctaagaagtatattgaggtcagaagcttcttagatttagcgggttattattgaagatttatggaagaatttttcaagttatccactccattgactaatttaacaagaaagaataacaaattcacctaaactgatcgatgtcaatgttggaaattattttac

SEQ ID NO: 90498 - DNA, 841 bp, Cannabis sativa
  modified_base (667)..(674): a, c, t, g, unknown or other
gttaggaaaaatcatttttgtcagcactttttattattttgcatgtgctggcaaaagttctattaccaacgttgatttgccaacccttttgccaatacattagagtaaattcaattttactagcgcaataccgaacttttaccaggacaaaatgtgctagcaaaagtgacatccttgtagtgagggtagtttgtagtccaccgtctaaaaagatgttgtggtagattattctctatttatttcggtacacaagattattattaagtcaattatttttatgattatatatgttatagttatgtaagtacatgtaaattttttagaaattttcgaatactttactatatatgtatgctaaaaataaaatttacatattttgttgtacacgcaacttttttttttttatacacatgacaagtaacactacaaaaatagctacttttagtgacaattttttagtcacaacattttatgtaacaaaatataacttttaatcacaacaaaaagttacttgtaactaaattagttttagtcacaacaagtatgtgactaaaaacacatttagtcacaaaatttttgtgactaatacttttaattacgaccttttagtcgcaacataagaaggataatttatatagtcagaatttttttttacttttagtcacannnnnnnntgtgactaaaaataaaatttttttatagctaactatttaaattttattttcggtattgtaaattattcaaaaaaatttaaaaattataataatcctaaataattacaatatacacgattataaaaaaaaattataataaaataatttttaaataccaaaacaaataa

SEQ ID NO: 90499 - DNA, 597 bp, Cannabis sativa
gtcccttatatcatttaaattgacctccttgccacccttcctatcctccaaatcaaagagagagttaaagtcccctgtaattacccacggtttagcatagaccttgagattgatcaaaccctcccacaactccttcctttcctcacctgtgttaaagccatacacaaaagtgacattcatagcttctgattgaccagccattttcacatagcaatgaataaactgagggtcttccctaacgacaatgacccgagcgaagtttttcctccaaacaactagaattttgttctcaactatcggactagtataccaattccaattagtgaacttcctagccatcatctcacttattttattttccttgagtttggtttccaacagcccacaaactccaattttattcaagcaacataaatcaaaaatagtattctgcctttccattttattcaaccccctcacattccaacaccctatgttattattatccatagacaacagtagtaataacagaatcaatgtgttcagtagatacctgcatctctaccctgtcttcattctgatcttgtaaaagattaaacgagttactgctgctctcta

SEQ ID NO: 90500 - DNA, 3661 bp, Cannabis sativa
cttctaaatgtgtcgacttgcaattggctagcgatactctataaaaattattatattaaactatatgggacccgatacttaattgcaccaatagcgatattgaccagtggtgccctctagcatttctcccattatatatatctgtatgtgtacacaaatcaatagctcctgctttgttaacttttggagttgtttgatcaataatggtgtaccatttgtctccaaactaacttttggggttatatataagttttagtcgttcattatatattaaagaattgatagtgggcataataatattataataatcatcattagtcattaatctatttcaaaagaaaaaaaaaaaaagcacgcctaggaaaaaagcattggaaacatgaaaagaatcatttgaaggaattaaagattcagaaattactaggaaatttaaaaaaagagaaagcatttgattggatatgatttgtaattgtacagaaatcaaaattaatgtttttatataatacacaaggctagcttgagtgtttttccatcgagaaataggaataggaatgaaaatggtactagagtagtgatatttgaccattggacgtgccatatttcaaaactactctcactgattttctctttctttttcttctttgtttgtatgaagtttattaattaagtgggtaagtgggtaagtgggtaagtgggttgtattatggaatggaatacaacctgtgcagttttgggccttgattttgggcaacacaaactcagcacgatacgaaaattatgagcttaaccagacataacatgaaagcacgaaaattaaatacataattatacattttttttttaatttttcaattcataaaatatagtttagttaaaaagatatataaatctgtgtcttaattgaactgatgttctagccaaaaaaaaaaaaagaaattctagttattttcaaataaatattcatatatacatagtcaatagttacttcactaattttcaaaaaattgttagttggacgagtatgaaatgaaacagttttgtgtgcaactgactggatgaatcttattcgagcactgtaaaccactcatcatagagaaaatataccataatatagatgtacttcaaatactatgcaacaacttttaaatgagcacttttagaaaggactaacaacttttagtttatcattagctcttgtaggaattcggacaattcttcagatgaagtgatttaagaagagagaataatatttgaccatcttcaaaaatagcttcactattaaatgaccaatctttcaattcccacatatctaaaatatataacatttctagacatctgaatagaggacctttgtcaccaagaatctcatcacctattgagaccacactatcacatcctctgattgtaagatctttgagaaacggtagctgcccaagtgggagtaaaatacacccaattaatatacctctaattgtaatagtttttaaatgaaaatatatgggattcgatattaaatcaatatacctcttaccaattttccatttaatatacacaaaatgcacaatgtaacaattttacaccattaaaatttattcatctcatggatggtacaaatgcagaatcttttatgtgtgtatttctgtacttaatccttgtttattcaatactcaacacaaaattgtcttgtctttgacaactgcaaaatgggataattagtaactgaaacaagcagcctcattacacatttaattccccaatactactcatacactcaccctatatacctacttattcagccatgactaccccagcaacgtcacatttggaatgttcgaccacgaccacggtcctctcattgcttatgaagatatgaacagtgatcttcttcttgctcgtgatcttaattggtagtaagtaaataagataaggctttcgaaccagagattttgttgttcagactcacacagtgtctgctaagcactgcctttcatcatgatacaaatataacagttgtactttatttcaactctaagttttcatattcatattcatattgcagtggttttccaacaaaatctgaatttaattgcataattcaacaactcttgatgacaatgacatgagtactgagtactgtactctactaccttaataataataaataaaagaagcaactgtaatgagaaagagagagatcaatgcagatgcagacacagcatttagttgatatgttcattcatcatcatccaatcttacttttgtgatgttttgaatcttaggccaatcttaagagtccatttttctggtgaataattaaatggggagcctgcacagacatatggcagaagaaagtgtcatgttttctaaatgagaatactactaaaaccttaccctcaaactctataagcttaccacttttttcactatctgaaaactcagcacccgaagcaaacacattaaataaagctcagtaatgagttataaagacaatttgaatgtgaatttcatgattggattgatcatccatcattgatgataaataaataaaactcaatttctaataataaattaaacgaacaaacacaataaacataataaatgtaatcttaattacctatccagttaaattccacatgtttggtgtgttgaatcttaggccaatcttctcctttctctctcttgcaccttctttcacaaagcaaaatgttttattttattttgtattgtatttccaatgggtgggaattgtcatatctaaaaagacaagagtgtttaaataatcttctttctttttcttactttttgacacattgacttatatcatttcacattttgagtagtctctccaagttattttgccaagcttacaaagtttaacaacacatgatatagcagtacttaactagatgagtaatttgttcatttggggcctttctttgtatattgtgacattttaccttctcagtattattcaaattttatgatgccattacagaacatttcttggagtttgatcatcaacattttaacaaaatttcttttactgactaaaagtcatttgagctgctgtgaattcataaactaactaatgaagtatttgaagttgtagaaaagaatgaaatgaaatgacaacaaatctaatgtcccttcatcaatctgagatctttcattttcttaatcccaaatattaccaaaaaaaaaaaaaaaagtagggaatactaaaacgaagtagtttgatttttgaattatgatacattgaattaatagcatttggtagagcatgcacaaaatttaattaatacatttccaatcaacttccacttgtttgatgtgttgaatcttaggccaatcttctcctttctctttctcacaccgttgctttaacaaaggacattcattgatacttaaacgagtaagagatgtaggcagcccttcttctggcaagcaccgcaacccttcacaattacgaatatacaaataagtgagggacgtgagttcttgaaaggcgttgctgtttaagctttcaagtttactacaatcaaaaatcataagtgtagtcagagtggttggaaggatccctttgtcatcgggaaaagtatcatcttcccaaccactgatatttaaaaatttcaaacacgagagtctctgtagatcccattgc

SEQ ID NO: 90501 - DNA, 508 bp, Cannabis sativa
tgtaaagggttttatttagggcacaaaacccaacaactacgtacatgaaaaatagcctaacaagtaatctataacaaatattaactacataaacaaacattatcgactttattgggcagcaagctgcataacaggaaacaaatagtgttatctgtcataaatcaaggccttataatctctggacagcatgctgatattcttctttccccagtttctttggaggaagtaaaagctgcctttttctctattcctaggaataaatccccggggccagatggttttagtagcttctttttccaggataattgggatctcattggagctgatattgttgatgctattagtgctttctttcatccaggtcagcttttgaaagagattaacaccacagttctggctcttatccctaaaattaagtgtccgaatctggtgagtgattatagacctatagcttattgcaatgtactttacaaggcgataaccaaactgatatgtgcaagactcaaag

SEQ ID NO: 90502 - DNA, 594 bp, Cannabis sativa
tttcaaattttaataatacatttttttaaataaaagttgtcaagcttgtaacagagttttttttttttttttttttctttttgtaaataatatagacattcattgaaaataattagaatttaatatattaattaaacaaaataaaatatcattcatccaaactaattcaccatcctcacattaattatacaagagaacatgaatcaaatttgtcttgtgaaagttaaacattaaactagcaatattttaactactaatgtcgtaattacttttaaattatgcactttttttattttcttaaaaaaaataaacgggcgtaattttccaataatttttaagtttataacactatatctaattataacttttttcaataaaagagtatatttgccagggaatttccaacctcataatttccttttttttttttttgaaaaacctgaacctttattaaaacaaacaaaaacaaagaactcaagttacaaaggaaggtaaagaaccatttcatatatactcattgtctaatcctagacctaccctagcacacacatgagcaattttattaagctcacgaggaacatggactatgaccag

SEQ ID NO: 90503 - DNA, 653 bp, Cannabis sativa
ttggaactgacacataaatttgagatgtctcttaagtatcttgaaagcactttctgatttttctatatttttataatgtatatattttattttcattaaattatttgtcccaaccaatcaatgtcagataacaattaagtttctggaaaaaatataaataccactagaaggttggttgatatagaatcatatacttggataggacactttttgcattgattgcttatgttttcatacatagtttttagttttttttttttttgctaaggtttatacataaataattatggtagtggttttcttgtggaaagtccaatttttaatgggcatcatatatgcacaccattagtatatcaagtcaaacataatattaaattgcatatggtcgtaagtttaagcctaatgatatcacacctgaaaagtgccgagttcttagcaatttttatttaaaaacaaattaattaggatttttactttcgaataagattattaaatttaaaaacttttatttaaatttaataaaaaaagtcttaacataaataaaagttcagggacgtgatttagtacatgtaaaaattcgaaaaacatgatttgatagatatcaaagactggggagcataatttagtacataatcactaaaaatagtaaaatt

SEQ ID NO: 90504 - DNA, 528 bp, Cannabis sativa
gtgggatacttaattcaatggaagatgctactcatcctacaatcattgaaggaaaggattttcatgcgttatctgaaagggaactggaacaaattgctaagaaaataacgctaaacagaaaaagtagcagctttttcatgctcaccttttgatgtagataccacttgtttacattatcagtgtaaatacgaaaattatctgctactccttaaagtattacccaatactcatttccaccttttcttgtatttattaaatttctgaagatgcatagttataaagcttaggtttttctgtttagatttgtgttgtgtataatttcaatcacttgctttctttgtttcataggatggttagtggctgcaggtggcctttttggattcaaatctgtcagcctttcaccaagaagtgaacactagctccaacgttataaaattatagttgaatttcttattcaacagattgatctctatgtgttcaataaaaagattcaatggggtttggtttcatagtcgaaatttaacaaag

SEQ ID NO: 90505 - DNA, 849 bp, Cannabis sativa
atagtttttctgtgttgaatcatattcgtgaggctcaatttcggttaacgaaaatctgcgtttgcatgtatcattatgtaactgttattttttaggaagagttttttacaaggtgtatattttagagagcaaaatcaggtagtgttgaaagttcaggaagcaaaaatacaaattatttattattttttcgaataagataaaaaaatttaatcaatcctagtttaattacattgcattcaagactattgtattacaatacaattgcccaattaaaacaaactattaaataccctataaataagatatattttttaaattccctaccttaaagaaaaaatcatatataaatattttgttttaatttcattccaactatatattgaccatatctgagatttgattttaaaatttttatatatgttcaaattcggagcattgaattattattattatttttttatatattaacagagcattgaattattgatgctggatagcttgacagaaaattgttgatgaataagtcatattggctcgggacaaaaccttctccaggaattaaaagattttactttttagaattttaatttgttttattttcttacaaatacataacataattaattggatgtgtcatttcctgaaattttttatcgtcgatcgagacattattttattttgtaaacgaaacattgaggaggcaaaaggtcagagctacatacatatatgtcatttagtttataaaaaattgaagttgctcctcgttttactgtatctaaatacatatatatagggtacatatgaaaagagaagacaatattaatgatccaactgagggaaatagagagt

SEQ ID NO: 90506 - DNA, 781 bp, Cannabis sativa
tctatagagggtcgaacccatcaagcactattctcttaggacatttgcgtcgttttgacgatccaagcttctcacattcttcctcatcggtttcttatattgggtaagctttctattcctgctattccacttgatttagttgatttttccatggatgcctaaatattattctttgctttgaacatcctttgattatcgtattttccatggatgcttaaacattattctttgctttgaacatcaatggctgttggagcttctatatccaaggcatctgaagcactttgatggaccaacaatcacaggccaaaatcattagcaccattgaacttatcaatctcaaacttcgagctcgacattcttgatcttcttggtgagttccttgaagaacagttttgattcttaaattgctgagaaaagctcggataccaatttaaaaagtctcaaactccaaacaagaacaaacacaacactaaaaacataacataatcatcaagattagtaattgaacaaaccagtaacataaaccaacaacaataacaactaatgaaagcataaaacaacaccaagaacttatgtggttgggctatacaatcaggatgatcatgagcttaattcacgggagaaagcaaccttaaattggttgaggagatgatctttattggtctgaacagaggttacaaaaacagggaaccctatcactcaatggagtcttgctccttacaatatgtctcactagtgacactctcaatcaaatacatgagaggccatttacaactct

SEQ ID NO: 90507 - DNA, 865 bp, Cannabis sativa
  modified_base (824)..(833): a, c, t, g, unknown or other
agaggagaaggtgaaagtgaagagcctagttatgattataggtatcatcattggattaggtggtgggattcttttgattgccttttgcatttgcaggaagacacacatttttggtaacatgactcttctctacattttacttaagtatcacataagacactaatttataacacatctagatatggttttttggttattttatttgctaaacaattctagctaattgtctaactaaaacattcttaaagctcctataaagctttaccatttatagtatataactaatattacaattagcttggcccaaaatactaaaaacatgaagttatcatataatctctaggaaatcttagatggtcaaaaggttgttttgttttctatttgttttgagcctttaaaccttaaacaacttgtaattttccagagagaaacgaaaacaaagatgatgaattggagcttccatttttccatctacatacaattagtcttgccactgataatttttcagaggctaataagcttggagagggtggttttggacctgtatacaaagtaagcttctctctcgaatctgctttcgaaaattctctttttcttttctttctaaacatggtaaataagtatcttcattgtcatataaaagggtacattggaaggaggtcaagaaattgctgtgaaaagcctatcaatgtgttctggacaaggagccagtgagttcaaaaataaaattaaactgattgctaagcttcaacatcggaatcttgtcaagatatttggttattattaagagttagtcccccattgctaatgtgtggaaataaatnnnnnnnnnnaagatgaatgggctactcctcccattgccaat

SEQ ID NO: 90508 - DNA, 583 bp, Cannabis sativa
aattcgaaacccttgagtgatagagtagtgcccacacacatcaatacctcaatcatagtgtgtaagatcgtaaagaatccagattcaacagaaggacattcggctccgatgtgttgtggtatgcaattcctcaaaaagtagaagtatatgaggtattacataatttgccataataataaagacaaattgagtggtatacacgctgggcccatgcaatatcataagaattaacaatttaaaaatactaaaaagtaagggaaaaagaaaaaagcttgagctttacattgcgccattggaatggaatttatgggaatccaatttgtactctgtgaataaataccacatctcatcattaactgcgtagagaccatatccacaccatgaacgacatcaaaatccgattcatctcaactactctcgttcagccagcgaatctccatcataaggatgatgttgatattaatcacagtgagttaatcggtgaacgactagacctaactccttgcgatcttcaacttctcgatctgaatcacattcaaaggggtcttctttttcatagcaagccaccgtccgattccgatac

SEQ ID NO: 90509 - DNA, 826 bp, Cannabis sativa
aataaataaatatttaatattgagaatattaaatgattaataaaataacatgaacccgaaagaaataaaagattgaataaactaaatatacgagaatctaattctgtttatttgtccaatgataatgtgctggtctccaggatttgaaactacattatgtagagggtttcgttcacaagacttgtatcctaaatagttgaatgagatacaacatctataagagttatagaatgtgcaacacttacttttagtgcaagtgggagattgctaggatttatgccccaaaagcaagttattaatagataatatattacagaatatattaaatacaattataacataaatgaatacattaattatagaagcataattaataaatatatttgaaaattctttatttatatggagaaggtataatcttgtaaggatgtacaagagaactaagattatacaaaataaataaaacaagtccgtagtatattaaagtaaaaaaaatctttaatatgaaactactaagtacagtttattatacacgatattctagtgtgtgtgattttaattcgtatcacatatgtgaatagatatgtagtaaatgggttgtgtataatttgattatgcatgattggaccggtatgtaataacatctttcattaacgtgtcgtttaccatgaaagagttattcataccatatcaataatcattagtagatcattctgaatcttgagtatacatgaactcttgtttgtgttaattgagttatttgattcactcgttaaagtttcttagataagataattcttataacttttattttgggagcttaata

SEQ ID NO: 90510 - DNA, 888 bp, Cannabis sativa
  modified_base (823)..(844): a, c, t, g, unknown or other
gagagagagagagagaagggttttagacttaaagttatttggaggctagaattaggcttagtgacttaggttttctagggtagaattaaggcctttatgtaggaatcctaaaaccctaatttacaatgaaacctttagatatttacgtattaaatttattaaatacaaaagactaaatttccccttcaatgtagatattttcattagtttgttgggttgttaacgatccaatttacaggtagcttgctttccacatttaaggaggtacatagagtcctgccaggttaaccctggttgcccatagacctacaggggaggtcttattggccaaggcctacaggttgaggtcttgccggccatgctcctaccacaacttggcaggtcatgtgtgtgctaggatcctgtaggtcatgtgtgtgctaggatccttcacgtcactatagccttaccaagaggaggtcagacttttgatgtggaggcctgccttttacaagttgatgataactttgtaaactgtttccttgtagaggccaggttcctttggtcgaacagaagctcccttggtccgaaagttactttttggtcagccaacttatgcccagatcttggccgacctatatgctcaccctcgctagccttaggcttctcttggctggttagggatgttagtatagccctttgagggctcgcttcaatccattcggttgctacttgacgattttactatatcttgcatggagaccctattctgctacttgcaaggctatactccacgtgtactctgtctttgccttacgtggacattgttgggttttatgccctnnnnnnnnnnnnnnnnnnnnnnatcagatttacttattaataaggatcagaaataacattttatgt

SEQ ID NO: 90511 - DNA, 501 bp, Cannabis sativa
atactatatattattttttaatttatagtttagattatttcgataacttactactatgtaaattttagttgccatttaaattattcccttaattactatataaatttttatataaaaaatttaatttttaaaatacaaaaatgaaaaaaccccttatttcttccataaacccatattacgacatatgccattataaagaaaattaaactagaaaagtcagctgcattgcatacgaaaatagggtttatcctttaggtatctatctatctagtatagaaattttctatattttatatcattactaattgagtaccaaaaattaacaaatattgtctaacacgtcagtcacacgattagttcctagttaataaaatataaaagagaagagactacgaagctttaggttaaaaagactgtattgaattgtataaccaaacccgacaaaaccaaacccacccacgccacactcatacattacacactcttactcacctcacctcc

SEQ ID NO: 90512 - DNA, 1467 bp, Cannabis sativa
ttaaaatgtacaaatttgagtcttaatcaactctcttcaaattacatgatgaatgcttgctttctcccgatgcaagacttatagaaatcttctcctgaaaatagcgatgcttgcttcctcccgaaataagacttgtagaaataatctcccgaagatagcattgcttgtttcctcccgaagcaagacttgtagaaaaattctcccaagatagcagtgtttgctttcttccgaagtaagacttatagaaatattctcccgaagatagcagtgcttgctttctcctgaagcaagacttgtagaaatcttctcttgaagatagcggtgcttccttcctcccgaaacaagacttggatgaaccttcctgaaggttattttttatgtcttcactttagaatttacttcacataaaagtaatcacaaagacacacaaactcatcaaggaatagtagaacaactatcatttacaaaagaaacactctcttctaaaaaatataagaaattaagaagtggaagagttcaacctttgttgttggttaggtcatatttatagggaaaaatgacaccaaaactgagctctaaaggtctgaatacaaaaagaaaatattaattagtttctttacaaaaactcattaagtgacgaaattatgtttaaacagataaggaaactgtgcatatgaaatcttgatctgtctagttagtattgtgaatctagactccatcaaagctaagttcatccccacaaaattttccttggacatcacacaaggagggattaatgagatcatatcagaaaatgaataaaataaaacaattacaaaaaaatatgcaatatttattatataaaaccacaacctaagtaacattatattcttaattaatacaccatagatcgcgctttacaagtaagaaaacaatcaatcaataaatgaaaaatattctataagaaagtcgaattctgttcaaacaaacaattagtctattaaaacagatatattaaacctgaacaattttttaacaacttaccttatataaataagtaaccatgataaatattatctatacaacttgtacacagtttcttaactaagaaattagataagaatgaataaaataaatattaagactttctttaaaaaatataaagtaaatatcaaatattttaaataagaaaattacatatttattcaccaataaagccacaatctaatttgaaagaattttcacactaagaaaaaaaaactattttcaaaaaatattaaatgcaagagaactaattttgaaaataccaaatattattaattttatcatcttcaccaaatataccagctaaaaactttacataatattttgttatatataaattattaaagagaacaagaagtaaaaggagaatttgggtgtgttgtgtttctgttatatacaaagaagcaacagattttaaagcatgtctctacaattttcccaaca

SEQ ID NO: 90513 - DNA, 702 bp, Cannabis sativa
atatatggtgtaatataaaagtatatggtaaaataaagaaattttattatgtattttagagatagaatagagaaattgttaaaagtgttcttaaggttagcatttctttatttgttattagcttaaccatcataccaaattttctattttccagatacatcttttctcgatttttttaaaggatgattgcccctgcttctatgtggataagtatcaggtatcatataattttatttaataaaatgagtaattaattgcaaggcgccacgtaacaataccattatttttagagtttatatttggtcactctcaatacactaaaatttaaacttaaaaagcaaaattccaaattttaagcaaaaataacaacttttgggcggattttttgggtttggttttgtactcaacccatacatacttttagagtatgaattttagtttgtgcgggcgggtgtggacattttgggccccttatagtctcccttccctacagtttcaagtcgggtctcatgggctttcacctttttttattcttccaaaaataccatacctcttaaaaaatataattcttttaagaggaaattacactctataccatttttacattgttctctttttatttttatcctcttttttaaagtctattatttttacctcttttttaaacattgtaccaattttacccttgtcacttcaagatac

SEQ ID NO: 90514 - DNA, 926 bp, Cannabis sativa
ctaaggtgactttttggtatttttctaaatttattaattattagatatttttggtatctaaatagttaagacacttaaatagtagatatttttcatgaaacttaattaattaaataaattatattcatgttaaaaattaatttcttaattaatttttgatctatatgagttagaataatttttctagttttattttattttattttaatgtgtaatttaaaattatactttttattggatttcgagtttaattagatatatatttagagaaaaaaaaattgagttgaaaattaattttatttaattttggaccaactcatgtataatatttattgaaaattaattctagggatggaaaatatatatttttttttttgagatctacctaagatataatttataaatattaaactaaaatttatgtttggagttatctaaattagcaattttaattgaataaatagattaaaataagtatcaaatgaaaatacaatcctttcaaataatgagctttagtttaatggtattccatctccattgttggttctacatagtttttattttaatgagattcatccctaatagatgttcagtcattagtaatttaacaccatagaatctcaaaagataattattattgtaaatcttttattctttgtaacgatcaccctaatagtgattgctaagagtaggactgacaaagtatgaaacaatggtagaagctcatgaaatagattgatcatgactcttgcctaaacaggacaatatcctattctcatgtcgattgaataaagggttgctaaaatggtatccattttagatgatctgacaactctattcaattaatgatatctttgactctcgcctaaacgaaatattgataacgatttgttagaaatcttggaaatttttgaaaatgtgtttgt

SEQ ID NO: 90515 - DNA, 929 bp, Cannabis sativa
caggggttcggtatagacagtaagagaagctttgggaaatggcaatttatgaattttgcctaaacaacaagcagaacatattgaaaagggcattttattattgatttggatattacacgactgaagtacagatttgacaaccctttctgaagggtgtccgagtctgttatgccacaactcatagttggaaagtggagattgattacaatttgaacagacagagacatgatgctcatgttgctgtgacaaagatgctgtgttggcacttggagagacatctgaaggtggaatttcaacttggaactgggatggattaaaggtataaaggccattctggtgtttcccagtaagaaggattgctcgagtgacctgatctttgacaaaacatttgtcagcatggaattcaaaaaatacattgttatcataagcaaatctagagacactcaacagattttttgttatttcaggtacatgtagaagattgtttaggacaagaggatgagatgaattggaattaataaaagatgtaccaatatgtttgattgacagacctgagccatctccaacatgtagctgatctggtccttcatattctgtgttgacagtcaggttgttcatgtttggagtgcaatgattcgttgcacccgaatctggataccaactggtgtcctccgtttgagttgtttgagcaagatttgcttggtttgtgggggagtttgagctgggaaacacccctgtgaagcttttatcaaacctgtaaaaacaatccaggactgtgtgcccaattttgtggcaaagttggcactgaactcgattggttggtgtggaaaacctgcctcctctgttgacattggaaacaccacgattgttagtgaagttggagaatccatagttgttacctgtgatagcaactcgagttggatatccac

SEQ ID NO: 90516 - DNA, 548 bp, Cannabis sativa
atctcctgccgagaagaaggatgaagtcgagaagtacgaatcgcgggttaaggaaagggactcttgggtagagaatgattttctgtgtaagaattttattttgaatggtttgtctgatgatttgtatgattattataattctgacaaatctgccaaggagatataggaagcattatacaaaaaatatgataccgaggaggcgggaataaaaaaatacgctgtgagccgctacctgaagtttcaaatgaccaatgataaatcagttgaagtccagtctcacaagcttcagaaaatagctcacacgaaattctgtctgaaggtatgactattgacgaacaatttcaagttgttgttatgattgataaattacccctttcgtggaaagttttaaaaaatactctgaagcacaaaacaaaagagtttttgttggaaagtctgatcacttgtctttgaattgaggaggaagcttgaaaacaagaccaaaaggaagaggtgcttgttgttggaaacaacaacaacactaataaaagatccactgctgttctgaa

SEQ ID NO: 90517 - DNA, 1363 bp, Cannabis sativa
atactaaatgttactaattaataaaaaatttagtaatattagaccaactccatttatttttaagtttattataggtctatattaattcttgttttttcttttattattttaattgatggttctctataactttctttagcttccatacactaaaaaaaagacaagacaagacgagactatacataccaaaaataaaaatgatacccccacttaatttttagaagtctaaaacatgttttctcttttttgatcattacattttaattatgaaataagatttaaccacacttaatttctcattaattatatatacatttacagtatactatatatagcctcgtgtaattaatgattatttctataataatattattaatataacatttgttgttatatgtgttaatataataataatattattattatgcagatgggaataattggagagaaactggatatagattttgtgatatcaacgggtgataacttttatgaaagtggtctgaatggtgtggatgatcctgcttttcaagaatcatttaccaatatctataccgctccaagtttacaaaaaccttggtacactggtaattaattttcttcatatattctttttttttaaaaaaaaaaaatcattataaagaatttaagtaatttgtgaagatttatatatttttttaatttaatttattcatttgtttaagataattagaatttttttatatatattagttctcctagggtatctctccatgctcttagaatagacaatgaactgttatagatggaagaaaatcctcctctgattgcgtaactttgttacttttgttattttaatctatattttcttttaaaaaaaaagataattagaatttttggctcttaattttgacatgtactacatcatgttcttgaactattttctccgttaaaaattttctctgaactattaagattgttagattaaaggatatttgtcaatttcatttaatattactaattttgtgatcattaagtactaaaatatactatctagattttaatatctactaaattatatgtctttcgaactttattgacatgtaccaatatctagttagctaatcttctgaacttttattcatattagacttctctttttaaaattgaaaaaaaataaataaataaccccttaattaatctaataatcacaataattttaaaaaaaaaaattaatggccttaaaaatgcaaatacagtacatattacaattcaggaaaaaaaatccaaactttccttttagataaagtgttggtgagctggtgtggactgtggagtgtacatgcatatgcatgtggagtatagtacaatatattttaattgt

SEQ ID NO: 90518 - DNA, 1779 bp, Cannabis sativa
tttttattttttattttatttcatttagtgaaaaattgaaatttaagataatttttgaaaattaatgttaatcttttttttttctttatttgtgtttataaacaacaataagaaagaaggaaaaacactggaaaaaaatatataatgtaaaatgataacttttaataagtgatgaaatattaattgctaatatgtggatctcatcatttctcatttgagatttttatataaatttagaaaattttaaacttaattaaaaaatatggataaataaagaaatattttaaaatctggaaaaaaaaatttaaaaactaaaaagatggaaatacctagattcgtatataagtggtatctgatatatatttcaacccattctttcaaattgaacagttcactcccttcctctcttcttgtgcgattttttctctcaccattctcctacaattcttcattcaaaaatcaatctcctttggtgcgattgttctcagatattttcttctccattagactgttcgctgatgacattttcttctccatcgatattcttcttcttcaccatgtttcttttgccaagtcaaaaaaaatttatttgatctgattaaaaaaaaaaacagagaaaattatgaaacattaaaatttattgagtgatttcttcaaacaattgtaattttaaaatcttttgttatttttattgttaacacacacatgcaattgtataatttattattttaaaaatgtatctttctggttgaatcattgtataataacaaatggattttttaaaataaaaaaaagaacaaaacattaaatatatggaacgcacgacataaattaataacaatctcctacactataccatattgtaatggccatgtggcatgtacccctttttatatccacaaaatatagtgagatccattttataataaatcctcacagataaggcattttcaaaattctacaccttaaaaaattcttctatatttatatatatgtacctgaaacaacaacagaccatatataatttattatatatgtgagaaaatgtgaagacactaattaaaactgtaactgaatagattatcttcaatgatgaatttagttatttttttacttggcaatatgaatttataaaggatccattatttttttcaaatagctaaaatttaattcactaaattttatttgtataaagtacagattaattaatgcattcaaaaaatttagggtaaatactattttaaaacttatattttgtaagagttattaactagaccttttgttttgttaaatgacaaattagaccctatattttttgaaatggtaaaaaatagaaccctaggttcaattttcagaaattttattttttaatataaccaactttaagataatttctaatacgaacagatacagaaaatgtaaccagttttgtcttaatatctctagatgaaattattattacgttttattttgataaaaattagttcaaggtcctatttgtacaattttagtaaatactgggtctattttgtcatttaacaaaacaaaaggtctaatgggtaacttttacaaaacataatgtccaaaataatatttatccaaaaatttaaaaggagatatgaccaccctataaaacataatagttttgctctagatcactcccataaaaaataatagttcacaaatatttttcttttacgaaaaatacttgttattataaatcaaaaaaataaccgtttacaatagcagtgttgctaattctatttttggcatatttaa

SEQ ID NO: 90519 - DNA, 580 bp, Cannabis sativa
ttgattgaatcaattttataattggttaattatacaccaaactatttaaaaaaaaacgagtaatatttagtttttgatattaagaatattaaatttttaaataaaataaataaatgtaatggatttgagtcctccacgtgtctatatttatgataagttaacggaagtgttagtaatggtgtaagagaattgtaacattatgtatttttacctcaaaaaataaacattaagtatttaaatgtataaaatttaaaacattaagtatttatgccgcaatttacccattgaattatatctaatttatcactcgattggatttgattagatatcaaaatttaatctaatcaatttaattataattaaattgaattgattttataattggatctataattagttaattatacaccagactatttattatataaataaactttaaaatatgaagaaaattacatcaaatttaattgatattgaaaacaatttaaaaaatgaaggagctattaggtattttcctaggaatttaaggctatgcatacatgtttaggaaaatacagtaagtcaaacatgttattttttt

SEQ ID NO: 90520 - DNA, 792 bp, Cannabis sativa
ggctgactcaccactcacacacacctcacactctcccatccggcccctacggtccttcttcaaaagcttctatactgtgtgttaacctcacttgtgggtgtactgtgcacccactcttagtgcaccaagacataacaagggcctctgttaacctcacttgtgggtgcactgtgcactcactcttagtgcaccaaggcacaacaagggtctctgttaacctcacttgtgggtgcactgtgcacctactcttagtgcaccaaggcacaacagctattactctattattattattttaaatgattaatttaccgtataaatatttaaattttaattttatttataaataaatatttaaatttaatttttataagtaattatctatgtgttattttttattggtatatttaaattaatcttttataaaaaaaaaaaattgatgatttgaaccaatcaagaattggcacgtggtaattttacaatatatttttatattagaccagcaagttttcgtatttttttataagtattatatttttaaatactttattaattaaaataataaaaatactaataaagagagaaacatgaaaaagaataaaaagtaataaaaaatatttaaaggatctctaattttataaatatagagaatgagtaaaataatttaagggatctctaaaataattatagagtttaaaaaagcaattaaagggattaaaatgtttgattctataaaatttaaaagaaaatgagtgcaagagcataaaagaagagagtgctcttaaacctttggta

SEQ ID NO: 90521 - DNA, 587 bp, Cannabis sativa
tgattctgcttatgagaatcaacttggtatcaagagcaggcgaccatggcgatctctgcaaatacctacaccagtcctactgtggttccaaccaccatgttcttacctccattaagattagatcgaagcaactattttttttggcggtcacaggtccttcccgccattagagctcacgatcttgaagatatcttacttcgcagacatccacggcccactccaaccgtaccagagtctcctggttcttctactatggtacgtaatcctgattttcatacttggatgcgtctggatcaatttctcttatcttggcttatgtcatcgatttctgaaccaatgattggtcatattgtgcattgtgaatcggctgctgatatctgggaaacattggagcaattattcaatactcgctccaaggctcgcatgattcatctcatgtctctcctccaaaacacaaagaaaggatctctgtccattgatgagtatatgctcaagatgaaaggctatgctgatggtcttcgagctgctggaaattcggtctctgaagaacaattaatcttgtatgttcttgctggagttggccatga

SEQ ID NO: 90522 - DNA, 1733 bp, Cannabis sativa
ggctcacgggtgctctactgtgcaggaaagggtaaatctgtgtctgatcagccacgagtgcgagagcttggcggtgcctgtacatgtttgggccacactagaccaagcgggttggggtctaccagcgatgtacttttgtaactctgattttgcagcttaggtcggcttgtgaaaaggacttgtaatagtttataaatttttttttttttcggatctcaaaatatgtcacttttgattgtaaaatttaaagtcattacaagttttattttcatgctgttttagataaaagtttaattttcgcgcgcttatctttcaagtaatccttgtttaggggattagggtttcataattaggtgttgtgacgtgcctaaatgttagggcgttacagccaccctccgttcatgttgggactcagagagaggacacaaaaaaattctccaactgtctgaagatgctcggaatatcactttgttgaccactaaggccaactttatgaagcacaagctctatccggaggattttgtgccaaagctcgtgaaggaggaaaagaagaaatccaagctcaattgagctgaggatgccgagcaagagaaagatctcattcaactcaagcgtgaggctaagttgaagggaggtgttggagccaaacaacatgctcaagaatatttagtgcagaagctggatgctcaagaataatcagagcatgagagggtgagcaagaagaagaaagctcctccgaccgagcaagcaccaatagaacacgctatcaagattagggaacctggtatgctttctcggccatcaacccctgtagagggaaaaggaaaagtcgtcctggtggaacaagaagactcttcagatgataaagctccgtctgtgattgttttggaaaatacccctaccagcgtatagagtagttcaacttgcatttatttctctggtttttatacattcacatattttatatctgcttctaactgcgttgttttatctgtgtagagatgtcccaaaagatgattcaggctttgaagaagagagtaggagacaacttgggtctgtctcctccggccaagagatctaagggtggtgagactccgtccaaggagaagacgccagttgacgaggtcattgatctttccgaggagcgacacgtggtggatcgtctagctgagaaggtcttgaaatccaagaggtccagaggagggagctcggatggatctgaacaagttaagaccccttcaacaattgtggcactgtgcacaaaggttgggaaaggcaaagacatgcttcaacactacctgactcggtcacttcctgaagtgagcgatcagctgtccagaggggacaacgagttatccttggaactggtcttaggaggagttttgaaggaagttactcaggtaactctctttcttttttatttcgttctcttttaggtagctcggacattaatacatttgccatgtaggtcggggtgaaaatggcttacgcttactcctgagccaaatcagctgctatgaagaaccttgccaccaccaaaacaatgcagagggatgtggattgggccaagaaggaaactaaggatacgcggagccaactcaaggtcatgaggaaagaacttagggaggtaaacaagaagctttttgctgccaacaccaaggttgatgagctgaccaaagagcttcaagatatgccttcgaccacacaactggaggctgacaatgtttctttat

SEQ ID NO: 90523 - DNA, 568 bp, Cannabis sativa
ctgcacatcacacatcaaatttattccatttaaatgaaacaaaaaacttgaatggagagcatttaataaaataccacgcagacaatatgtttatatgtacatagagatcttttttctagctccacccaagtactatccatcctattctttcatagcaaaaagccaaatatatatatataactccttatatatttcacgtacctccaattaatttgagtggctaatatacacagtagcttttatcaaatcagttatcgtgttttttttttaaaaaaaagaaacaaaaggagtactgatagaatcattttttcaacctaaatatatatgtgactcttatcttcctatcccttcatccctttcaaattcagaactattgaatttgaatgcccaataatactaatatggaggaattgaagccaaggtttccaaattcatgtccattgaccccactaggattcctggaaagagcttcaatcgtctacggcgactccatttccgttgtctacaacgacctatcctacacatggtcacaaacccacacccgttgtctccgtgtggcttcatgtat

SEQ ID NO: 90524 - DNA, 991 bp, Cannabis sativa
aaattgaaaattaatttttttattaatattggaccaagttaaattaagtaattttcataatatttattggaatatttactgcaaaataagcactaaggatggaaaataaatttttatctttcaaaacttcttaggctataattttataaatattaaattaaaatttatatttagagtcatctaaattagtaattttaattaaataaataaatatatatatattaaaataaatagatcaaaataagtatcaaatgaaaatacaattctttaaaataatgagctttagtataaggatattcgctccattgttagtcctacatggttaatcgttttcaatataacctcgagacgctagactttgtatgaaacaatatgaaacaatgaagattttatcaaataagaatgactttgactctcgcctaccgggacatcgttggattcttattttattcaaaattatcctttattttttcctcttagcattttcatttagaatttgcttaaataatatatcattggatgaggtcaatagtttggtgctttcattgagagcgagttggtatcataactgatcaaacgccatggttaacatgaggagaactccagttgcaccatctgcatcatcgggccttcctcaagaccccctgattgtagatcctgatgtccatgttccaactactactggaattcccatgaactctgtagatgtggtcaatcctgccaccacgacagccacctcgaatttggtcactacagctagccaaaatgacataaacatcctggtgtatctgaacaggtggcccttgcctccgagggaggaccctccactggtgcctcccactgaaggaaggacccttggggaacagcccccaagaataacaattggatctcatctatagtactatgctagagagacaggaccaggaatttgtgagcctgctattagcgagccccatgtggacttgggagaagatctcgagttggctagact

SEQ ID NO: 90525 - DNA, 3495 bp, Cannabis sativa
  modified_base (2000)..(2004): a, c, t, g, unknown or other
ctagactctgtcatggtcacatcatcccgctgagtctggttcatgcgatgtttatactcaagaggtctttcactaacatctcagctttcctcaagaggtctttcatttttataagagtgtggtttctagtttctaagtgagaaattctcactataacgctaataaatcatgggactaaataatttgaaatatataatcacaattactttctactgtgataatatcattgtaattctaaataagattataataaaattagactttatttaaggcataaaattccaacaccttcgtaccaactacaaaaatcttctttaaaataattcaaatttttgaatacatggtgtttgcaaacgatacatttagattcaccataacacatattaccaaaacattaactttacaattatattccacaaacttaaatttaaattgtcaaataaaaaagcatagtaaaatataatttttctcatcaatctatagctaccacccggttgcgaaaccataatacaaactaaaaaaaaaaaagcatttgctatactctttaaaaaaaaaaaaaacatttgctatactaaaatattatttttctcatgtgaggtgtgcgaaatttcgcagtgagatgaggttttgcataaagttgaaagaaaaaggaaaaagtagttctatcaaatttgctcaactacctagtcctgacttatcattgcactaagtttccacgtaccccattttttatttttccataaaataaaataaaatgccttgaagactaggttaaagacttaggtccacatgtcactgtcttaaatatttagcttccataatatatatcatctactcgttaaaatcaccaataaatacctaaaccaaactaataaacactacacataaaattgtacaaataatacaacaacaagaataaaaatttggcattcgatccaatcaaatatatattcttatctaatttaattcaattagtaattagatttgaaaaaattattatatctaaaaattcaatctaatctaatttaaataattgaatcgttttttaattagatatctaattatatacctaatttaatattaacttaaaaatgtaaagaaaaatagataaaaactaaataacacattttatttaaatttaatactctataattataccatcgttacaaatgtaatgcaactaattcaaagttaaaaataattaaaataacaaaattgctaagtaataaaatagaacaaaaaatcataaaaataaatacactaaacaataatatgttacaaatttaacacacacaaaaatccatttaaaatataattaatatatattatattttaatatttttgatatataaataaatataaataattttttaacatatatatgtgtgattggattagatcggcttttaattgaattttgagattgatattcaataatcgattcaatctaactagaattcaattttagtatccaatccaatacaattgtaattaaatatctaattttttgtaattagattgaattggttggattcgattcaatcaaattaaattagatgttacccacccctaacaaaatccctccattgccatatatgagtcttctcgagtggtcaccaccactcactatagtttttccaaataaaattaatttaatcaaaccctccataatcctattcatgtagagtaatattatgggctaccttaaggtgccaaatactataaaagatgatacatatactgttgcattttaatattaaattttatatatttttatttaataattaatatagaaaattgctaacctatagtatcatatctatatggtattagataccttaaaatgtcaaatgatgctcatttatatatatatatatagtaaattttgttatcacataattattataattagatgagtcctaattacaacctcatcatattacttcttagtcaaattttacgtttaaaatcacatgccaaaatattttttttcatagcgnnnnncgttatagttacagtatcattcttataaatttttgaataattttgaatagtttacagtaccgaaaatagaatttctgatattttaatttaccacgtgtgtttaaaaaacttgaaacatattttcggcactgtaaactatttgaaaattttcaaaaatttacaagaatgatgttataagcataacaaagacctccgtgaaaaaaattaaaaaaaaaatatttcgacatatattttcgggcagggggttaactaaaaggttgtaacacaagaggttgacggtaacactcctcaattaattattggatcaacattaaattgatctaatggttgaaaatcaaagtatatcaaatcaaatttaaagcatactacatcatatttaaattacgtcaaacaaaatttatatttcatcagataatagttccacattaaaattataaaatagagtactagttacacccttttattacaatttttgtactattttggatcctatattaaaggttatttattggaccgtctgttttgttaaatgacaaaataaacactgtattttttaaaatagtacaaataaaaccttaagctcaatttctgattttttttttaaatataaccaacttgaagataatttctagtacgaacagatgtaaaaaaacgtaatcaattttatcataacacttctatatcgggttattattaagttttattttataaaaaaaaaacattttagggttctatttaatattattttacaataatacagggtcctgttttttcattaaaaaaaaaaaaaatagaaactcaagttagaaacttctacaaaacacaaggtccaaaatggtattaaccctttattttttttaatattttttttatagtggtatttgttataaatacaatatcatctctgtaaatttttgaaaaaactaaaatagtttatattactaaaaacagagtttccgatattttagcttactacgcgtattcaaaaaactccaaacctgttttggacactataatgactttaaaattttttaaaaaatttatagagatcatgatgttaaaactataatgaatatcaccataaaaaataattaaattttctttctaacatatgtttttgagcacaaaagttaactaacatgattgtaatatgagtttaacgattttcagggctggccctaagaatatataagcctaaggatattttggaaaaaaaatatttcaacatgtgttttcaggcacagaagttgactaagagattattaagagatttctaataaaggttaacgacagccaagaccgaccttgagaatatataagcctaagtccatttaaattttggggcattcgctttcaaatatatatataaaaaaaaattgaaaatgagtatcatgagactcacccacaccattgtataatgtgtcatacatcttaactaataaacactacaaaaaactgctatttttggtgacaactttttagtcacaacat

SEQ ID NO: 90526 - DNA, 566 bp, Cannabis sativa
atatatttttttttaattttcttaattttcccttttcccttctccttcttttttttttcttcttcttcttcctttttatttttttctctttaaactgagagcccatcataacccaccactaacacccacatcactcaccaccataaccccatctcttccccgtactctctcacttaagagtaggtatgaacattcatttaacctaaagactaaaatcccagaaatgaacataatcacatttggaaaaaattagaaacccatagtcgttcaaatgggaatctcacaccattcattccgaccaccaccacataatcgtgaatgagattcaaacggtaagatccaacgcccagatctcttcgcacgacaccaccacctccttcccaaacctccctcgaacataccacgctgattctcccattctggatctctctcactcctcttcttcttagtgggcatcgaggacaacgagatctaggctcttgggcagaggaaggacaaactaggctcctcttcttcttggttgggttttgattattatagggtccgattgggttttgagtagtgtt

SEQ ID NO: 90527 - DNA, 702 bp, Cannabis sativa
tttaaagttgtccaagaatgacagtgattagattgttcaagagaaccataaaatgcagtgaaatgcatagtaggaccatcaccatacgccaaataacagtcaaacaaagttgcattataatttaaaagtgttacattgacatcatccttccaaagaagtagtaaacccccgcctagacctaccctagggacttctagtccattattaaaatgtaaagcttggcgaaaacgagaaattacattagaaataagtttagtttccataagaaatagtacatgaggagattgctctttgacaagcaaacgaagatgacagaaggcgctcgggttccccagcccccgcacattccaactaacgattttcatggctgagagcggggctgagagccagcctccgctgtattgtccatgaaacccatctaatcttcctgttgttcagaaacagccaggtttgtatcatcccagtagacaaagttggagagtacgtagcttgtgttggtcccctgcatcgcttcaatgttttccttagtgaaatattgtcagattgtctcttaatgaatcggtttgggagcatattttctttgtccatagtctgcctgacagatgaacaaataatagcatcgattgctgtatttgttgatattttcagtggctgggaacgattgtcatgatgtagtgcataagtcaaagggggatttggagg

SEQ ID NO: 90528 - DNA, 529 bp, Cannabis sativa
gtttttgagaagttggatagggtgttggccaacccggattggtttaaaagatttcgggcttctaaagtcactctccttccttggtggaactcggatcatcgacccctgaagcttagtttcagcaaagaacaacaacttccaaccatggtgcctaaatggagatcttggtttcactatgaacaagcttgggtgggggaagaggattgtggaaagattgttgaatcagtttggcttgatggttccaattggggtactctttaggggctgcgggggagaattaatcattgtggagaggtgcttcacgattggaacaaagataaaaaagtggacctgggtgctagaacaaagaaactcaaagaggagctaaagaaactttcttcatttgttggagagttggattggaagaaccgacgaaggaatgaaagagagcttaatgttgccgaggccaaggaggagattttatggaaacaaagaagtcgggatctttggcttgctcacggcgatcgtaacactaagtacttccatcata

SEQ ID NO: 90529 - DNA, 641 bp, Cannabis sativa
accctaattttgaatttcgaatttcgaatcacaattctaagtattgctctgataccatgtagaaaataatgaatcgaattgtatgtctatttcataaaatagtacatatttatatacaaagctaggagactaaaaataggaaactaccaacaaaataggaaactactaaatacaagttaccctaattctttaacacctaatttacagctaatattctaacaaaaaatatgaactccaaccatacaaaaaatgactctctataatagagaatggatagagagttctctaaatgtagggagatctctactttttcgctaaatttttttaatagtattttaatctaaaactttattactttttcattattttattaaattattttatatttaacatatttaaattataaaatattattaaaataatcaaacactaattaaaatagggtgattggagcaaaaataaaaaattggctctatattttaactctttagctattttagctaaaatttggctaaaaaatagagagtggttggagatgctctaatagcgagtataattatgatggtaggtgacttgactacagggttgaatgtttcttagaagtcaaggccacattgttggtgaaagccttttgcaaccaa

SEQ ID NO: 90530 - DNA, 626 bp, Cannabis sativa
ttataccctttgttagttgtgatttgtcaaattgatccttattgaaaaggaaagaggttttttcaatattatacttaaaattgattttatttataaaaatacttttaaaaaattatttgtacaaatactattataccacgtcagcatacataccgaaatttaaaataattaccgaaaatagaaaaaaattagaaaaatctcgtttccaaagaattgaaaaaggcaaccatttagttacttttgatgtgaataagatataaattggttattttttcattaaaagaaacttttttgtttcattttttatatttttaagctatattatattattttattgtttaaaataccttgaggttactttttttttttttttgagtaatttgcggcataacctccataagtacatatttagtttattgcaactaacccccaattttaaaattttggtgataaaactccctaaactcgtgttctgttactagtttaacatttccatctatttttagctattaactgccatggtggagtgtctacgtgtacacaatgtatacatggcacaattttattggtccacgtaaataaatatttaaagaataaaaataatcttttcctttaaaaattaaaaa

SEQ ID NO: 90531 - DNA, 564 bp, Cannabis sativa
gaactgtaatggaatggaagtgttgttcacaccctagaaacaaactcctatgtttctttcattatagtatttgttcctgaataagctatgggttttcttattgatgatagttggttgcacgatttctatagtttggacaaaatatacacctaaacttgtcaataatcaatataatgtattgattacccagtctatatttattaaaccatagggacaaagaggggtaataattatcagcacggtacaaatttaggaggttttaacataatggccccatttttgtaactatcaagttaaatccactacatttttatcataaatttatcaaaaatggcgttcaacaaaaccatctagtcataagaagcatagttagtagatgagtagtatcaacatggatattaaagaaacaaaatcattaattttaaatgttatcccccttttttttagtcggggagaacgagtttttattaaatttaatattgaattattattaggtttataaagcaaatggtgatgtacttttttttttttttgaaaaaaaaatggtgatgtacttaagctgtg

SEQ ID NO: 90532 - DNA, 628 bp, Cannabis sativa
acttgtgtaattgtgtccatctaatcccctactaataggggtattccatatgagtggtgtctctaattttgtccttttaaaatttaatgaaaattcattaaaatttataaaattatttaataacaaaaataaaattaaacttactatttcaaaaatctatgactacccacatgtaaattacaaaaattatacttatactatacttattgcattcaatttaagaacacgttgtgattattagcacattaaaaaaattaagtaaaaaaattaagaaaacataacataatttttctgataaatttgcatacaatatttcttaataataaaccataatgtttatgtaattaattttaatattattattaagaaaaaagaatagttaataatttttttttaaaaaaaaaagactcacaacttagtgggcaatatccaatccaatttaactgaattgatctaatccaatttaactgaaccgatctaatccaattcaactaaaaaaattagatatctaattacaattgaatttgattggatattataagttgaattataattagattggatcagttattaaatatactaacctcaaaatctaataaaaaagcgatctaatccaattatatttata

SEQ ID NO: 90533 - DNA, 539 bp, Cannabis sativa
  modified_base (34)..(38): a, c, t, g, unknown or other
  modified_base (68)..(68): a, c, t, g, unknown or other
aaattaacatgagtacaacataaaaagaccgtannnnntgtaaataaaataaaaaaaaaattgtaaanatatttaaaattccgtgaaattgtacttttatgtttttgtatatttgtaaaataattattaaaaacataaaaatagaatgaataatattaaaaataaattgaatcaattttttttttttggtctttcatttctttcaaatcaggagtagtattttgataaaaaaaagtcgttctaacaccatttttaataggagatgtaaaaattgtacaatatttagcacaaaaagtagttttatggtaaatttacactaaattttagttttgtgcttcaatgcacaattatgtaaaatttaatatctaattaatgttttattaaaaaaaaatctaataattttataattaattttattattttaatatctaagacattaaaaaaaataatataaaggtttcataatttaatgtgatagttaaatatactaataaaataatagaaatgacataaatgtaaatgaaaaaatagtgcattta

SEQ ID NO: 90534 - DNA, 1789 bp, Cannabis sativa
acttcctcttcctattttggcgtgcagagaccttaacacttttggaattaaaccttatcatctctttttctcaaaactaatgcattttttggtacgagtgtaccacatgacgttggaaatggaaaagggaatccattcttaaatagaatgtgacttcaaacgaaagttgctgagcaacgtttgccatcatgaatccacatacatgccttgtaacacaacataaaagttagcaaccatacatattattgtcatattatataggaaggaacagctgtccatgtgatataactcgtgaaatgcccaaccataaccggcacttggtggggtcatatagccccattcttaagtaaaaaggtatatcgaagttggtaaactcgagtaatttcaaatttgagtgaatacaagaacacagcagggttttccaccaagaacagtagaagaagataaaatatttcagtctataagaaaccgtttgtaactgtactgtctgtctatcatgatatgagataactatggaagagtcaaaaataacaaccagaacgctgctgatcatgtaaattactgtttaatgagacattttgaaaaaagggaagaaagaaaaaagagggcaaagtatccactaatgaaatccattcacccaaatttaaacccataagaatggtaagggtgagaagatattagaaacaaaacaagagaagtgatggatatatgatacaatcagactaaaacaatcagcttttggcaatctctcggacgcaaaatccaggcgatgttcaagtgtaagacaaatcagtaggcagcttatgttctatgacagatcctatcccacaaaccatcaaaaatgcatcagaaggtagaattgtagattctaaacctgacagtcatcttgcacaaccaccagaacgtgagtggaaccagtagtaagtaaatagaatatagagaattccaactgatttataagaagtaatcaggtgttctacgagtaacatctggctcccctctcctaggagctggctcaaactgcaacgtcaagcaattgacattatatcagatttcatgccatttataaaaattgcaactagttatgctatttagcttctataaacacatataatgagggaagaaaacctgaatgaaagtgtggttcttgcagtcatcgacttccaaaatagaggccatgttgccacaacggtagcaataattgggtgcactaaatatagtaacaaccttttgctcctgttccaacaaagcaacgatttacttaccctgtgttaaaaatagcaacaatgtaagaatagaaattatatttatatggcaattacatgtgcccagttgtatccatccatgaccaactgatgagctctggcaatcagctttaagctgttagtatgattaaattgttcagaaatatcctgcataatgaaaatgtcattatgtcaatcttaaaatcagaataaccgagcatgtgaaagtgaggtaacggttgcaagaatataataggatttattattcacctggccaaaagtatatccagcacctcgaggagaaataccccaaccacatcgatcatctgggtcagaccataacagatcacacattggtccttcgtgaggaacctcttgaacacgatcaaaattacgtatgctgtcaagggtttcaatggaaggggacaaaccaccatgcagacaaaaaatttccgattcaacctagaaaagaaaagacctggaaatgtaattactactcgaaatgtgcagctaactgaccgctactatttcggtccagttaaaca

SEQ ID NO: 90535 - DNA, 1405 bp, Cannabis sativa
attttcaagtcttatggtattttcgacaagtgttgttcaagttttattgtatttgtgatagtttaattatttagtgataattcaaaccgcataaaccgtaccgcaatattttttacgatacaatttttacgattttttagtttcacaatacaagtgcgatataaaaaattaaaaaaattacaaaagtaaattaatttaaaaaaatagtcaaaaattacaccatctccacaaccacgagccctaataattaccaatcttcttcattaattgggcatataacacttacgagttattgaccggtcaaaacatctgactaagcacaaacgaagactaatctcacagccccgtcatttaccaaaaccataaacaccaaatcaaaatccaccacgtgtcatcaactcggtccaatcacatcacgcggttcttttcaaccctcacagctaagtcaacgcaccataatccgattcttcgtctaaatttgactcccgattttctctctctgtctaaaagctccgaaaaaagctcgcctctaatggaaatttcgaaaccctaaaaaaccctaaaaagccatgtctttgagaagagcctttcgatctcgcaaattctccaaatcctttcgggaattaagccccgaagaggaacatcatcagaccaccacacagggccgaggtggccgttgcgactcggccgagatgggcggccgagtcgtcgccgccgccgatgattttaacaacaataacgacgagtcttcgtcatcgtcgtcatcgccgtcgtggtcgtccatgcttccggagattttagtggagattattcgacgagttgagaatagcgaagatcgttggcctaatcgtcgaaacgtcgtcgtattcgcttgtgtttgtaagcagtggagggatattgctaaagagatcgttcgatcaccttctcgaactgggaaaattactttcccttcttgtcttaaacaggttcgccattttcgttttttgaattttgtattgggatcatgatttgatttgatcaattttagttgtttttttaggtctatacattaaattgaatctaaattgttataggatcagattataagaacaaatttcttaggaaaaaatttgatctttttcaattcagaattgttacactgtgaaatgtgaatgaagatttgattggaaatttcttttgtagtccatgaattgtgtgaatggggttgtagtcatcaatctgaatagcgaaaaaggattgtgttttgatcagaattttgagtttttacaagaatgttttgtaaaaaatagtcttttgtgtgaaaatttcattagtaaagataactttttataaaaaatttattagcaaaataacctcgtatgttcgcacaagctaccaaaaattacaccgtgcgaccataaaaaca

SEQ ID NO: 90536 - DNA, 906 bp, Cannabis sativa
ttgaagtttttcttagagtatgtttataagattaatactagtacatacagcacctctatggtggttatggctgaagtgtagaactattactagtgaaattatacatctattctttatgcttgtttgttttgcaaaaaagctgatttttcttttttaaaaataatgagattggttgattagattgcttccatgggatgataaacttaaaggttcatgttacatatgaaattattttgtttggattttcctttgggatgtaatggaagctgtgatagtatattgttccaacttccgatatagatttttgcttatgagctggtttataaacctgcagacattgtcttcacagtatctcctcgttttatcaaagcataaccctcgctgctgttgctagtatctcatcattataagaaatctcatgaaatctttgttaatttaaagttataatttctgtttatcaagaattgtaatatgaatggagcatttaactttgtttaaatgttttaatgtaggtaaatccaatggactctgtgtttcccaaggtggtcgctttccaccattctcatcagacggaaagcctccaaaaaaggttagcaggggatccaaggatctgactctttgcagggtgttccgccagaaaacttgctgtgatgtgggtcagacacaccctgcattgctaaacataaggaagctcgcttctactggggaggccaatcaagagtgcttgcaattgtgggagctattagaatgttccatatgtagtccacaagttggtgttcagccaggacctcctagattgtgcagctctttgtgtgacagagtttttaatgcttgctctgatgcttacttctctatggaggcaatgacacaggtttataatgtccctcaactgttggattccaaaac

SEQ ID NO: 90537 - DNA, 950 bp, Cannabis sativa
gtgatccattatgggactatgctatggattgttagactgatgctcttgagaaaaaccacaattggatcattgtttctttaccaactgaacaccatgctatgtggtgtagatgggtttataagatcatatacaatgctaatggatctgtagagcgatgcaaagcaagacttgtggctaagggatataatcaacaagaaagtgtggattatattgataccttttctcctgttaccaagttggtaactgtcaaacttatgcttgcccttgcagtaataaatggatagtatttacatcaacttgatgtcaataatgtattcttgcatggagatctccatgaagaagtgtatatgactctacctcctgggtataatcctaagagagagtttccaccaaatgttgtatgcaaacttaaaaaatctctatatggattaaagcaagcatcaaggcaatggtttgcaaaattttctagtgctttggttgaggaagggttctatcattcaaccacagattattcattgtttatgaggcacagtcgagacaacttcatcatccttcttatatatgttgatggtgttatcttggcaggtaataatctggttgagatggaggctcttaaagttcaattgaacaataaatttcaacttaaagatcttggagatcttaagtgtttcattggattagaagttgctagatctcctaagggaatcattatatctcaaaggcattatactttggaaatgttagaggatcttagtcatttggggtgtaagccagtgaatactcttatggaagctaacctgaaattaagtcaagatgaagaaggcagattggctgatcgtaaactttatagaaggatgattgggaaactgcaatatttgaccattacaaggttgtatatatctttttcggtcaacaaattaagccatttcttggttactcccaaagctaga

SEQ ID NO: 90538 - DNA, 656 bp, Cannabis sativa
ttattttgagttttaataaacatagtttattatttaatgattaaaatgtatggtttcattttgtaataagttttcaaaatatataagttcttaaaataattttttttttgcacattttttgtaattatgttatttgtattgtatatttatgaaaaaagtccaataaaaaatgatagcaaattacaaaattgatttattatgaagttaattaaatatatataatttcagtgcggaagatttatatttgtgtgagttttattatcaagtttattttgggaataattttaaactctcttaaacacttcaatttggcattttctatatctctgaactaaatctcaccaattaaaacttataaattacacaagtttagtttcagaattgagttacaagaatttatatttatatatatacatataattatttattcatcaaagaataaagacatagtaattaccaacaataatgttttatacttcaccaacttgttaaacatgtatgtttttcatccatttattaatattttctttatttatttttttcaatctaaacatagtaaccaaaaacaaaatgtttttttttttttttttttcactttttcgtgtttaaatttcttttcttcttcatttttcttttctcatatgtattatatgttt

SEQ ID NO: 90539 - DNA, 502 bp, Cannabis sativa
aataaaatttatcagaggaagttaacacaaaaaagcacaagaaactggagaaaaaaacaagtgtcacaaagaagtacaatggaaacgcaaatcaaaattaaattgtaaattctacatatcaatattaccagaacatttcatatgttgatatgaacaatggcaagtcaatatatgaaagttagtaacaaatgaggagaactggagaagaatagcatctttataaattccatcttgatcccacataaaatagcatgtgcacaaaagcaaaaattcaatataccacaaaatgcacaatatcaaacaagaggacttgaaagtttccaaaatcatagaagcttttttggaagaaagaaggaaaatactagaaagccaaatccacctagcatcaaactgaaataacctacaatgtccctattttgtttactcgtaatgccaacagctccatttaacattaagtatgctaagctgacaaaataaagaacagaataactaaagcagaagt

SEQ ID NO: 90540 - DNA, 580 bp, Cannabis sativa
ttttttttttttttaatttcgacatgttttatgggtttttaaagtccatgtctttgtagtgtatttttaaaagagaaatttacgtggaacaaaattttgaaattaattccacaattaccactgtccattttattcaggtaatataccgttgcattttaaatattttagaataggggtatacgctgcttatctttgatgtttataatactactatctacaatttaattttaattcactttgtctcattttccttttctttcctttttgctttttgctcttttttttattaaataataaacatacaaatattcatggtattttatgtcaatatatatatatactagaaaaaaactgcgtgcaaaacacggatacttaattttatattaggtgctatataatttaattataaataatataagaaataattatatataatttaatttattattatggtttaattgaattttcttaataaaaaatgattaagataataaaaagtaatataattattttgtgaagttatttttcaatacatgtaaataattaattcttagatgaagaatattctatcattctttat

SEQ ID NO: 90541 - DNA, 683 bp, Cannabis sativa
ttttcttttaaataaaattgtattgtattttagagatgacataaatttgtgatttgactttgacagatttttttttttgtttttttttaataaaaattgatgataaaaaatttgataccctagatattaataccctttcatttcattttaatcccacttgcccatgattctctcttcccatcatcatcttcttcttcttcttcttttttttcactctttgcttcctcaagttctctctatctttctccattcatatataagttttttttttcttgttcatatcttcttcttcatcttctttttatttttttatttagtttttgaaatttttagtcacgtttttaaaaaaaataagagttagtgtgttttttttattctgatttttcagaactaagcttgcaaatatagcttctattgtatctagtgttgagattgtacagaaaatggttagtttttttaatcattttttttattctttttagtgtttgtttttacggttgttttccataatttttttttttgacttcgatttcactgatctagctccatctcgctagaattaatgattgttttctgagcgttctcgtggtgctgtagtggttctatccatgggtgtggaagatgaatgctataaaatatatttcttcttccttctttatggttattttgtagttttttttttt

SEQ ID NO: 90542 - DNA, 1035 bp, Cannabis sativa
gagcaataggggcagttggagtggtagattcatctgcgactttgctggcagcctcgtccacgacttcttcagtgtccgcagcattagcatccttggggagaagatttcctccacctccttgagtctgcgatggtgacatggctcgaaaagcctcaaccatctcaaccgcctccgccccaaggatcgagaagtcgaagtctggaatcttggaaagagttgtgtagatgtagtcagagatcgcctggtcgtactgcttctttccattctccttctcgacctccaagtcgcgagacatctcctacatcttcgccttatagttcttggcttcaagttcgacttgcttacgaaattcctcgtgctctttctccttgttagccgcttcctgtttcagcttcttgacgctctcctgaagttgggcattctgcctctttaagagtttgacttccttagcgccggcaacaaaggcctccgagaacatggtcatgaactgtgaagccaactccgcagagcgaggcataagttcctcagcccacaaacttttcttgaagaactaggaaatccgcgctcgaacagctggatcgatcacaactttcttccccttgtcctgcgtaggcttagctagcttcttggaagaatccgcggcaggggtaaccacaacatcgctttttctcttctggggagcgatgggagacgtcgtcgccgttccagtctttgccttgtgattaagaacgggtgcttgttttaagaaagtcatctttgcgaggaaaagaaaagataagttaaaataacaataaatttagatgcattagtctatatgtgcgatatgttgcatgatgtcggccgagaagtctgcttggaaaggcgtttgtctattcgctccttttgctttttagacggctccttgtacactggctccctttgaaggctcacgttctttggaatcaacttatgttctcatagtttcaaggtcgtgcacagtaatttccagtcacgatcttgaacagggaggcttccgagaatttcagcggcttctct

SEQ ID NO: 90543 - DNA, 794 bp, Cannabis sativa
  modified_base (52)..(56): a, c, t, g, unknown or other
catgcaacattaaatgttaattctaatcttttattaataagtaaatctgatnnnnntgaaatgagtttatttagggcacaaaacccaacaaaaagagtgatattctgggcagcacctggcagcagggcaagcttctaagctctttcccgaagggcaagtgtgaaaggagggtggtgatatgtgggaatctgctgaaaccggctgtaggtggtgcccattccttccaccataaagtaatcgtcaacaaaattcccaattttgctaacgaccttatcctagtgcctatcaaccccttgacgtctggctgagaaaaatagaagtaccccgatcttcctttcttaggggtggacttcaaatctaaaaaccagctaaccacatgaggataaggcatattccacttctgggaggcatagagaatgaacagggcagattgatactgaatgcccttagtagggaattgggtcggacaaaggaggaagaagtctgccacattcctaaagtatgggtgcaaaggcaacaatgccccttgcttggcatgagcacccgaccaggcacacatctccctttcagggtttgtgcctcgattattgtgagcgggaatatagaagtctaactcccccaggtagccgtcctggttgagatcccgtaagcgtgccttggtaaccttggacggagggctcacccacctggcacccaaggcaacttgtcttccatgaggagccgcggtagtaagttcctcactggcatagtccacgccctcaaccagaacatcgccatccgcatcgactggctcc

SEQ ID NO: 90544 - DNA, 907 bp, Cannabis sativa
aagttgtgtttcccaagactcgacatcgttggtgtttatggcatataatgaagaagatacctgaaaagttaaggggatacaaagcatatgaacatataaagaatgtcttgaaaaatgtggtctatgattctttaacaatagaagagtttgaagaaaaatggaggcattttctcaataaatttaatctttcagagaatgagtggttaagtgatttatataaggaaaaacatcgttgggttccttcatttgtaaaagatattttttgggctggtatgtcaactactcaacgcagtgaaagcatgaattaattttttgatgattatgtgaattctaagacatcattgcaacaatttgtagagcaatatgaccttactttaagaaacaaagttgagaaagaaaatcttgcagatttttaatcttttagtacattgattccttgtgtaactcattttgatatagagcggcaatttcaaatgatctatactcattctaagtttaaagaattacaaaaagagctagctgggaagctttattgcaatgtatcttgtaatggtgatgatgataaagtctttaacgtaattgagactttatttgttggagaccaacaaagagaaaggacttatattgttaagttcaataaagagaattgtgagatcaattgtgcttgtcgactatttgaatttaaagggattctttgtaggcatatattaaagtaccagaaaagtatcttctagcgcggtggaggaaagatataaatcgatatcatacaaggatcaaggtaaactataatgatgtgagtggaaaaattgaaactcaaaggtataataggttgcaaaagaaattttatgaagttgctgattgggctattgaatctgaagataattgtgaaacattttggaatgtgatg

SEQ ID NO: 90545 - DNA, 884 bp, Cannabis sativa
tagatgatggaccttgggtcttgatgcaaaagttcgatgactttattacatctcaggcatttgacaatttccaagttagttatataatattttacaccctataatatttatattatatcattatttaattttgtagtgtactctgaatctcacaatggtgattaatttttgtgtatacatataataactaaagttcatgaatttcacaaagataatggtgaaagacatccccatatcttataaggacacataattttttgtggaagcattgatggaaatactatctcagtgtaaagcaactatggggctctaagttcttggatactgttgatcttaaattgtacattagttcatataatttataagtttataaacatgtttagagactgattaattaaaattatatataactgtatacgtatacatacttcttctaacaatcaatgcatgttgagattaaacaacatgaagcaacaacaaacaactcctacttttcagttttttcattcctctttgacaactttttgacaaacaacatggtaacttttattccccactcataaattctaattaatcactagatgttatgtaacgtcctgtcctacaggtacgccacgtgtgtatgtgtgtgtttttataaaattcttatttaaatactatataattataccaaaagtatgggtaattaaatttttgataattaaaatcaagcatataaaaacgtttttatagtaaaagataagtaatgagaactacggggacgccctgtttacaaaatattacaaactagtttattagtacttttacaacataaactttgcaatcccaaaatactatcaaaatggagcatcctgattactgggctgagtcactgcgactgatat

SEQ ID NO: 90546 - DNA, 1518 bp, Cannabis sativa
tatccatgcatgatagttatccatagaggttgattggtctttatcttttgttaatttatttaggttggctggagcaaaatatgcccaagtccaagtattgagttgtcgcttgtagtccatgtagagttttgaaatgaagggtttagacttttatatgtagtggggttctcatgctatggaaaacatggatagttcagtagagaatagtaaaaggtctttgctagattgtttgattgaggatcttgagagtgatcagatccctgtgggagtcccatttgagcaagtaactcttgtgcaaaatcttgagtgtgagaacataaatgtgggtgaaatagtcatagtgaacggagaggccccgaagacaataggttacttgattggtccatcagatgagggtcaggacgtatgtcaagatgagtgctctggtgaacctaccgggttccttaatgtgaaccctgaatgtattttgacggatgttgatttgaaaaaattgcttatgacataccttcaaatgtggaaatgagactgcctaagtcttatgagagagccgactgcgatatgggagattgggtttgtctttacaaagcagcttttgattgtggatttcggtttcctttcactcctttggtgactgagatactcagtctttacgaaatatctcctaggcaacttatgcccaacggttggaggttgctcctgagccttgagcattttactgaaaagtttggtattatagtagaccccataatttttaggaaacgttaatatgctaaagagcatgaaaaagagaagggtagagtgctatttgtttgtcgcactaggaaaaaaccatttgtaacttgtttgactaaggctgacgattcagattggaagaaagcatattgcttctttagaggtgatggtttatttgagtcgggggttaagaagagtttccctttctcttggcaaatattgagtgagtgttgaattatgttttattattgtgttggatatgtatgttttagtaatgtctttttggtccttggcgcagatactgacttcggggttcaacctaaaacgaatgagtttgttgatcgaattatcgaggatattgaatctataaaggaggagcaccgtaattttaggaaatttctccccaaaaattggttgcaacaatcacaagacgttatagaagaaggtatctttaaacttcaatcccttgaacacattcacatccttcttcaaacttgagaacttgagaaggttggaattaagtttactattttgactcacatgactgaagagcaatgcttgtttgcaaacaagatgtcccaaaagaggacgatcaagattcccaaagctagtgatgccatggctagagccaaattgacaacagctaagaagtcaaagactgaagggtcgaaacaagttcctgagagtaacttcactgatgttccattgactccatcttcccttggtacgtgcactacaatcaagaggaatgccaactttcttgacccagaggttgttgatgaaacg

SEQ ID NO: 90547 - DNA, 2963 bp, Cannabis sativa
gaaagtttgtggcagttgtaagaacatatttgtggctgtctttagggtttctatgatctataaatagtaccaagagaacaaccaaacatttttatctcttctagtctcctatttcaatatcttaattttgtgagaagagtgtttcttttgtaaaaacttagagtgtttaactagatttttgttttcttgtaatgatctcttgttgttcatataataagttgaagagaagattttttgacaaatatggttctttgagagaagacttttctaagtctcatttcaggaggaagtgagcacatatcttcagaagaatatttttctaagacttgcttcaagggggagtgagcatgcatcaatagatgaaaggagttcactacttggtgtgttttggaatattagattagcaaggtagattaaaaggggttacgacaaattattagagggagtctaattttttttagtcaattatatttgtaatcattgatactttactaattgatattattatctagtcgtctccaagtcgactagtagtatttgaaagaatactgataccacgtataattctcattttgtgtcaagtttttagttttgcacaatttatttctatttttgtttctatttattgcaagtttgtactctacaataacaagtttccatcctgttagtgcaagtcgttacagttaagttttaattacagttattaaagaaataaattattatatacaaaaatacaatttttcaagagagcgaagaaaaacacggaaggaaaagagaagcaaagctcaaagaagaaaggattcgaaatagggctcgggaaatgaaagcatacacttaaatagctctagaaacaagaagaggaaagcacaaagagactttatctacgtggaccaatcaaaataggagaaaagaagggagccaatggtccttcatgcctataaatagaagactccctcattcaaaaaaaaaaaaatggatgaattcttgctcacatcacactagtcaaaactttgttgggatacatcctcaagaacacttcaagcttggaaagaagatgaaccaaaaaaattaacagagattgtgtaaattgatagagattgtattttaattagacttaatatggtgtaaaaattcaaagtctgaatataatgtgttgttgagccaatttttggcataaacagatggtgccatccatgggaacaactacaacaaaaagctgaatacgaactaagatgagttgtaagaaagtatcagagaaggcaacaactccaagtgaaggagatacgtctaacccagttattgatctgactactgtagtggcattagaagtgaaagaaataaatcaaataataaagccaacatcttccaagggaaaggtggtcgtgctgaaatagatccacatgatcctaggatgcacggatccaacaatctaccaagaaaatatgactcgataggagaaataaactattggaatagtgaaaaggttgagagctcagcatcatgaagtcaatgattttcttcttgaagaaaaatatttttctatgactttgatcactttcaccgaggaagaccttagagaagtaaagttgccacatgatgatgctctcgtcattcgattataaatccaagatttccttctaagaagaatcttggtagatggaggaagcagtacagacattccgtttcacgaggcattagttaatatggggctagacgaaagcaaaatcagagctttaactctactagtgctttcctttgatagtaaccaagtatatcccatgggagcgattaagctcgatgtcaggactactggaaggacattaaaggttgattttattatagtcaaatctataattggttacaaggcagtattggggagaggatgggtgcatcgaatgcaaggagtacatctacactccatcaaatcttaagatttccatctcccaatgtaatgcatgtacttgacattaagggtgtcgaaagcaagcaaagaagtgttacacaatgatgaggaaagttaatgcattgatagaggagatcgttgcagaggaagaaaaatagcagacgaactcgaagaaattccacttgacccttctgaatcgaagaaaatggtaatggtaagagcttgaatgcatgaacatgaaagggaagagatgatgggcttcattaaatggagaaggaagacctttgcctgggaatcaaggggcatgccagggatcagccttgaggtgatgacacattaacttaacatagcagcccaaaggttccccaacagttgaaaaaactcaaaggtttgctccagatatcaatcaagtaattaacgatgaagtagagagactgctgaaagtttactttatcaaagaatgcctttattcaaactggatatcaaatccattagtagtaccaaagaaaaatggaaagaaatgagtgtgtatagatttcacaactctaaataaggcctatccaaaaggcatcttcccattaccaaatatttattagatgattgatgttactattggacatgagcagttgagcttgcaagattcacattcagggctgtactactataaggtcatttccttcggattaaagaatgtgtgggaaacttaccaatgattgatgaacaaggtgttttccaagcagctcagaaaaattatgaaagtttatattgatgatttgttggtgaaatttcaaaacaaggaaaatcatattcaacacctcaaagaatgcttcggtgtgctaaatttttatcaaatgaaacttaatcccaccaaatgtgctttcggagttacatcgagaaattttttaggatacattgtgagtcgaagggggattgaggctaactcggctcagttaaggactttctctggattaaatgagtctacaaacatgcaagaagtacatagagtaatcaggaagattgttgctatgggaaaaatgttaaaaatattttaccaggatct

SEQ ID NO: 90548 - DNA, 1174 bp, Cannabis sativa
  modified_base (789)..(794): a, c, t, g, unknown or other
actaggatgcaccaaccattttccttctccattcattcacaaggacttcaaacctcaattggaaccggaaataatggattccaaggctgaggagattccgactaatccaaaccaggggaatcccttagatcgttatgggtgatcttcacatgtgattcttatgtgtaggtattatcccttatgaatggtggtttgagtcagattacttatatttcttgttgctctattaacccttctcctttttttatgtctctgcaggaatagacatagatattgtgagcaatcttagaggtctttcccaagctgacagggcatcgcggaggaaagttggcgtagttttggatgaatttaggagggaagttggtgtggtttctatcagagaatcaacccaacccaagacccaaacctgcaccagaacacccttgtgccaacctctctctggtatcgagaaatttcctgaggctgggaaagaggtctcagctgcaggaaattggatcttctgatgatgagaatgaggtctgtgcagaggccaaggctctctacatgtagatggtctttctcgagctacgtgtagccagtctttctccaagctatgtgtagacggtctttctcgagtttattgacgcccctctcattctgtgtttaggaagattacttaatggtttgcctctagttgcatttttttgaagacaagtttgtaacccaacttgggttttcttatctgaattgccttgaactgttttcatttacatttaatacaattgtatttgcttgcgtttttattcacannnnnnacaactatattttgatcaaatgtacaatacttttgggtttttccattgttcgcaatcttcctgtttaagtagttagttatctaccaaactttttgattttcgagcatttgtcaattttgcctcactatagcagttataatcttcctttagcaaacgtaaatatactttaatgatattatcaatttgtatatttttaattttcttgtatgaatagttagtttatatatccactttcaaggttcaatttatcaaggcatcgtgatgcttcgtttagcactttcctagctcgcgagaaccgttagtattcaattttatacgcgagttaatttattttcctttcccgttagataggtttttaatcaaaaattatagttgtttga

SEQ ID NO: 90549 - DNA, 504 bp, Cannabis sativa
ccctttaaatgttaattttggaacataaaagttttgcacaaattgagattggatctaaattatactttcactagtgaactaatagtactaaaatataaagaagtaattagaagcgtaaaatagtaatttgaccaaaattaattacgaaccgacacaaggagcgctcatcattggaattgattatattaataaatactgtaataaaactcagtaaatataattctatacttattaaaagttcaaatgataaatacttatttcattttcaatttaaaaagtagttatagatacttttgttggttgaaatattctctcaaggtagttaagagatttcctctcaagtggttgagagattccctcaagtagttgggagattccctcaactggtgataggaaataaatatctataactaatttggttatatttttttattcaaataattaattaatatgatttaataaataatttacatttaaataaggagctttttcatttttatactt

SEQ ID NO: 90550 - DNA, 636 bp, Cannabis sativa
ttcttgacagttctttgctgtaatatctggtgaatattctcatgaaataaagatcaaagcccaaagggctgtttctggccgtggagtaggcaggataacatattgttattcttgttcgaagcatgtaatctctctcttcatttactgttttgtgcttgattgttttggttcttattgattgttgtgtgttgtgttctattttgtgctcattgttctactttgtttttgtgattgtaattgtgttctttgtcgagtcatcctcaataattggtatcagagctccaggtacgagttcaccaagaacaactcaagattcttaacaagatcaagatttctggacaacaatgacttcagcacgttttgaggtagaggcacaaatgactttggactatggaaaattaaaatgaaagctctactggtttatcaaggcatacatcaagctatagacaaagaagaattaaaagaattggatgaagataaaaagaagattgagattaaagcacatagtgccatacttctaagcttgggagatgatgttcttagagaagtttcagatgaagggacaacaatagggttatgggagaaacttgcttcaatctaaagaagtccttggccaacaaactctatttgaagaag

SEQ ID NO: 90551 - DNA, 908 bp, Cannabis sativa
tttgatatatatgacttttttttttcattaaaaacaatagagatgactcaagactagtacttacgtatcaacagatgaaacaagtatacgtaacactaacacacgaatcacggccatgcatatctacttattttaatacaaagttatggtgttttttaaactaaaatataattattatatgatttaacagttgggggtacttagattctatcatatggcaggaactttaataaaactgttgtgtaaaagcatctattataaagtgctaggtggtttatattattataatttgtacttttaaataaatgtttttctttaatgataagttataaaaattaaattaaatttgatacaaaataatattattgtactaaatttaatatacaataaatactaatttttttattaaagacatactttatacatattttttattataatatagtcattaatagtttttttttaaatatttagtttattgataattattaatgatattttgtttttttttttaaactattttacattttaaaatattattgtgcattatagcacaattataaatattgtgctaaatataatatttatttatttattttttgctaaatttaagcttggagagattgtcaaacataatccatattttcttttaataaattgacccagtaaaaaaaggaagataaaggacaaaaccacgttattttataaattgaaatgatctaaatcttcaacactaagaaatttcaaagtaaattataatattaaaaataaatcccataattatagatttaaataagttttcaatttcataaatactttttttttttcaattttttttttttttaatatagatgtaagtagattttctttaattttaaagaggcaaagaaagcaaaaaaaaaaaaaaa

SEQ ID NO: 90552 - DNA, 1134 bp, Cannabis sativa
gattaaacgtgtttagcgggtctataggaagttaaaaaactgtggcgccctgatacaaaatcgtaacaccctaataatagggatgccacaaatcgtggctaaacataagctgatcccgctaaactgggattaataaagctacagcggaaaatatttaaactttaaatcaattacagaataaaaacataacttgtaattatttagttttataaacattccaagagattacctttgtttcagaatcctgtaaaaacttttgcaaaatgttataagttatttttacacgctgacctaagcgtcaaaagttgagaatacaaaatatttcttctggtagacccaaccctcgtggtctagtatggccttagcatgtacaatacagcgttaagccctcaaactcatggctgatcacaaacaacttaccctttcctacacagtagagcacccatgagccaagcctagcaagatagtataaataacaatatacactacaattaaagatcacttaattattgatgccactacatctattgtctatttgacatagtcctaagtgttacactcccacactatttatgtctatattgcatagactcacgtattacgctcacatgtctatttatgtctatatggcatagacccacgttttatactcagacgtctatttataataaggccttaactacataactctttatatcatcatatataatacaatattgcattaataatcacatatattatagagtaataactctagacaacttaatggctaacttaaggtaataaccctattcttgattttctgcataattatttaaataacatacatgagcgtaactacgctaaactctacgtgctggtttactgtcttaccttgtaatcaaagtatgtggagattccaaatccttgggagttcctgagcatgtgtcagtaatcctagtgacacgttcttgggatttcacaaatacggctaatctcaaattcactttcacataaacacataatttgcattctatttatagattaacatgtagagcttgaaatgatatttccaacggtacaaagaacatccaaaacaaagttcagagtcaaatgttctagtcaaaataagaaaacaaaaaccttggaaaaaaa

SEQ ID NO: 90553 - DNA, 791 bp, Cannabis sativa
aagagaaaaggccctagatcaatatcaaaaatctaataagattgactcgtggactatgcagaattctaactgcaaaaccacgtaaaaaaaccttcgttttcatccttttcttgttatttttttactgtttttatttttctatgtaagtttatcactatttaggctcaaatttggttaacaaaaatctgcgtaacaagatcagaatcagaaatcttaatgatcttaaaaattttctattttctgatttttgataagtgaacatagtattttgttctccttaaatttcttatagcttatttggctgcatacctatctatccaacattcttaatatgtatattaagtaaaaatatatatacatacttaagcataaattagattccaatatgaatttagaatcttctatatttcttaaattctaaggtttcttttaggacaatgacttagacaacttattttttttagctacaagtcttttacctgatatagtatctttcatgctaaaagttttgaatactttattgatatacctcttttgttatagttcaagaatatctcaagaataatctctacatatcttcaattcctaacacaaaattggtatatcattagtggcaagtaattttttttactaatatataataccatgatcatattcttactctcactgaacttgtgatgtataaacaattatcaaaagcttcaatcacaaaactaaatgataatacttaataaaaattgtgttattgttgacaagaagcttacttgacactacaagaatgccaacttttg

SEQ ID NO: 90554 - DNA, 572 bp, Cannabis sativa
  modified_base (178)..(182): a, c, t, g, unknown or other
  modified_base (313)..(313): a, c, t, g, unknown or other
ttcttagaacttaaataaaaaaaataataattaaattgattttattcaagatacttaattatttatttctatttcaagaaatttaattaaattagaaaacatattaaagttgataattaattttttaattaattttataccagcttaaattaaaatattttcttagatattaaattannnnnaataattaagttgattttattctagatacttaattatttctattttaagaatttaggtaaatagaaaataatatttaagtttgaaatttttcaatttcagataaatttaaattagaataattttcagaatntattttattttattttaagaatcatttcccacattaattttgaaatgcatttattataaatacatatatttcaaaattttttattttgttaaagttgaaaattaaattttttattaattttagatcaccttaaatacattaattttcattaatgagttatttaaaataaatagactgatatatattattttaattagaaaataagtaattaattttgaattatctagatagatattttctaggtagacttttggtattt

SEQ ID NO: 90555 - DNA, 1784 bp, Cannabis sativa
gtttgtgtacaagtgattatgagtgccttcagaatttggtttggttgtttctgatagtaaaactattctaaactatttaaatcatgtcgttatgttttattaatcaatctgctaacaaggtcatacattgtattgcgcgtactttttgttttttctcccagtcgtactatccagaagattcttttgtctcttgagttagttgccatttttatggctgatttctaagtttaaatgaaaagatatcttgatcaatggagacatgcttaaaaccctactctagagacatcatggcctagaattcaggcgggtgatggggctgagcattggatttttccacaggttaatagtatcaagattaatgtcgatgtaactctgtttgagagggacaatggctttggctttggcatggtggctcgagattcaaacgactttctaattgatggtcgtactaccttcttggttggtcaagtagaatcagaggtagcagaggcaatgggagtccgggaagcactttcttggatcaaaggccattactggcagtcggtgtctcttgaaactgattgtcttttagtcgtgcaagctctgcaagacactttttctatgatttctttatttagacatgtaattgatgattgtaagcgtttgcttgctttactgagaaatatttctgtagttttagtaaaacaatcagctaatatggtgactcataacttcactagagctgctatattatatcctcattgtcgttttaatttggagtctgttttgctactttatttgatagttgaagttattagttaataaaaataaattttccattaaaaaaagataattattaaattttattttaataaaaatcatactcaaattattattttaaatcattttaaaaattatcagatcaaaatatctaattggtaactttatgtggaaaatagtagttacatattaaatataatttaatattatagatttgattgtagttatttatggtaattgtgaagaggcccaacccaaggcccaagtaaagcccaaaataaaagaggaaagaccagagacattttggtcgatcaccaccgcaccagacggaccacaccactctccttcttcttctttcaatttcatctcatctcaatctcaatccccattttcatatttcgtactataatttctcatcaatgggagccagtcggaagctccagggcgagatcgaccgcgttctcaaaaaggtccaggaaggcgttgatgtctttgacagtatttggaataaggttctctttctctctttttcgaattcgttttctgttgtttggttactcggaaacttgaattaattattttttttttgttttgttttcaggtttacgatacggacaatgctaatcagaaggagaagtttgaagctgatttgaagaaggagattaagaagttacaaaggtatagagatcaaatcaagacttggattcagtccagtgagattaaggataagaaggtctgtttgtctgtctgtatctctccttttctctctctctctaactctctcactctagtattgatttgattactttttattctaaatacgaaattctgctttactgcttagcttttggattgttttcatctttacccagtgaaaaaatagctgctttattccattgggagaatagtattatatttcatattttgataaagagtgaagtatgtgaaggaattaagcagtttcaggttaatttctaagcagaatgttgatgagagatgttatgaactttcgtttgtttcttatt

SEQ ID NO: 90556 - DNA, 763 bp, Cannabis sativa
gttctttgaagtaccagaacctaattttcttttagcaagaactgtggaagtatggttaggaggatatctttcaaactcttcttgtccattgatgcttgggtttggaaaattaaagaaaaaaatgaaaacaagatgaagaagaagaattggacaaataaatcaaataaaaaaaatatatacgttaatggagagagagagagtttttgatgaagaagaaagtgatagattttgaaacaaaaaaaatccctcaaagatgaagatgaataaagagagaaaataatgaaaagtaatattaaatagtgttggtgatatacttatcatcaaagttaaattaaaaaagagaacaaaaatgctgccatagatgtgataataccaagtaaaataaaacttttaaaataacttaaaatatatataaaaaaaaaaaaaaaaaaaacaacaaaaagaagaagattaatagaggagagagatgaatagtttaagaaaaaaagctgataatgaaaaaatataagataaaagaaatgaagaaatgaaaaatgtgaggtaacatgtgtattgtgatgaagaaaaaaattgaaaaccgtgccaagtgacaagacaatataaaacaatttttttaaaaaaaatcagtatagtataatataatttttcatcatcaattttaattaaagaaaaatttaaaaaaaaaaaaaaatttgacacaacataaatcaaatcataattttatattatctaaatataatataattttagttaaaaaaaaaaa

SEQ ID NO: 90557 - DNA, 512 bp, Cannabis sativa
caattttaatctagtagtttattccatttaatgtatatggaaaaaaatttgtattacacattttggtagattccctatctatttttacatcgacgtaaactttttaatcttttttatttttcataatagtatacgttgtagttatttaattataattatttgtaatttttcaaaaaatccagaataatttttacagcgttaaaattaaaggtcagacaaatatttaccatgcaataaaaaaaataatcacatgtacaataaaatatttaactttattataggagtctatcgaaatatctctttaaacatgatttttcttttctgtagttttgttctctcaatttttatattttgaaaaaaaaaaatattattccaacattaaaaccgttacaaattgcaggtctatctttaattacatactcacaaatataattacatggtcttttgacaaacttatgataaacaaaatttaatttattgacactaaacatacaaattattaattctaagaa

SEQ ID NO: 90558 - DNA, 522 bp, Cannabis sativa
aatatacaatctaacacaatactatacatacaatacaatacaatatttacaaaggatttggggtcaaacccagcccaacctcatccttggaccccaaacccagacctaaacccggacccggaccccaacccgatccctgttggtttttatagtttatatcagagttagaaaaacaaaagtggatttgattaaaattaatttaacccaatatgaatcataagcctaaggatctcagcataatgtatatagattaaatctaaactaatgaatagagagacaatacctcttgtagccttcagaggatcctcgctatctttttcgtattattattgaacatccaatctaagaacttgctaaagagttcactccacaatctttcaagcaagtcttaacacttagaaatagagtgaactattagtaactataggatgagtataattatgcaatcatagtatattatcaactcatgagatactgtgatgagatagggatgatcataaaactcacaccacactgatgtgt

SEQ ID NO: 90559 - DNA, 517 bp, Cannabis sativa
gctttagacaatctctcccaatatgtatcgccagctctttcaaagcacatcgtcgccattccatagttgtgctcatgaaagagctgtttagaaagagaataaaaatgatttaaggatacaaataataagcaatttcaactttctatgccactattcacaacaaaaaaaacaaaaccttaatgccccttgatctccattcttcaggactgcttgcaacttgcatagcctgtgcaagtgaatcatcaagcggtttagattgcacaagacacttcttcctccaatagtcaaataaaggttcagcaacttccgagctttcacagatccacaacctttgcctcgtacgtgtgacagcaacgtataattgtttgagttcagagcatagaatattatgtttggactcggagaactttgggaagttaggtatgctgttgtcaaacaaatcttgttctttcatgtattcatatatgaccctccattgattctttagaggggaggaaccaaaaaagttgtacagtaa

SEQ ID NO: 90560 - DNA, 509 bp, Cannabis sativa
tttgggcaaatgtagtagcttgggtatatggtgattcgtaatcacctggaagttgtagcgtctgtaagctggtatgtggatggctgctttcctcctgaagttgctgaagctttggctatttgcaaggcgctgggatccaattaatgcatctctcttggatatggaaatattattgttgagtctgattgcttgaatattgtgcttaaattgaaaaacaatgcttttattatcacctctttgggtcttgttttagatgatgttgttgaccttggcaataggctctatatggttaattttgtgtattgtaatggagttgtacatgctttggccaaacgtgctctaactaatgtaaaaagcatagtttggtgactagggaactttacttgtatttaaaatttattattaatagcgaatgctatttttgaatatattctcgctcccaacgttatagaacttctattactttgagtattagtggttgagaacgttttcttaaaaaaaaaaaaaaa

SEQ ID NO: 90561 - DNA, 765 bp, Cannabis sativa
tcattggcaacaatgtcaagaagatgactgacgtaaaggaatggcttagcacctagttcaaaatgaaagacttgggtgaagctaattatgttctcgggatctaaattattagatatcataagaacatgtcacttgctctctcgcaaatagtttacattgataaggtgttagagcatttcttaatgaccaatgcaaaagaagaaattatgccttctagacataatttacaactatctaaggaacagtctcctattgatccccaagagatagaagatatgagaaaaattcattatgctttaactgttggaagtctgatgtatgctatgttacgaactagactagatatttgctatgtaatgggaattgtgagcaagtatcagtccaacccaagaaaggaacattggacggcagttaaacatattctgaaatacatgaaaaggataaggaactatgtgttagtcttcaaggtggtgttttgaatcctttaggatatactgacttagatttccaagcttgtcttgatgataagaagtctacatctgggatggtttttactcttggaggtggagcacttcttcggagaagtgtcaagcaatatgcaatttttgactctaccatggaggccaaatacatagctactactgaggctgctaaggaactggtatggctaacaaagttcttcacagagcttggtgttattccaggtatggagaaccactgatgttactttattacaacaccggtgcaatcgccaatagtaaagag

SEQ ID NO: 90562 - DNA, 602 bp, Cannabis sativa
aatagttaagagagtagtttgagagtagagtaatgagaattagagagcctgcaatgcatgctcatatatattatgtagttaattagaaattgtgaggaaggtttattattaaggagtggaatgaaccccaaaacgtatcctctaatttcttaaatgagttttttctttttttcatttataattaattaatgggattaatttttacacttttacgatttgatttatctatgtttttttttttacctttactctacaatctacatctcctttatccacatctccctttgttgaccttgcttttagccaacgacaatgagtctattttataagcgataaaatatttataataataaatatatgagaaagcaataaaaacacacatgaattttatagaggttcagccctgagcagttcggtaatagcctaatccttgttacttgtattgacttaagatcaaggagaatgattccttttcttatagctcttacagcaatatcattgaatatataattcttagatctcttgcccaattaatatgcatcactatttatagggctagtaagcttggggaggaagagtttaccctctcgttacaatgcgta

SEQ ID NO: 90563 - DNA, 785 bp, Cannabis sativa
tttgctaattttatgtttggaatcctttgcaaccacttaatagatttcactagtaaaagagaggagagtgcccaagtagttacaaaccaccaaataatcacacaattaatcaatgtgggatcctaacagtacatgtccacgaaggcttactcttcatggctttgataccatttgttacaaccacttatgtagaactcactcataaaagagaagagagtgcccatgtagttataaaccaccaaataatcacatacttagtcaatgtgggatcttaacagtacacgtccccagaggcctactcttcatggctctgatatcatttattacaaccacttaggtagaagctatgttttagggtggtaagtggttgcttggtcgagcagctgccttttgcatgaaaggaaaaggtgttccatagtcactttcaaaagagtagcctaaacaaagagggtatccaggtagttatgtgggatcctatgagaatctccaagacctttagctgtattgaagtgatttgatatgatttggttctcatatgtatattaacaagttgttttgtctacagttcttttccaccaaccccttggcatgtgacctttctggtttacctgttatccacaatgatgatgacaacatggatcaagccattgatgaaaaaaagtgagttttcatcatgctaacaacattaagatgttgatgaatttactgcaatgaacttattttctatgtcattaatgcaaaacacacaattatttttctcgattttccagaatcaggaactctag

SEQ ID NO: 90564 - DNA, 1292 bp, Cannabis sativa
ttttttttatttatagatacatatgtatattcttacctatttacaattttatctctataaatttacattttatatttttatttttatcctcatacattatatttttcactaataccttttttaagaaaattattcccgaatgtagctggctcagtcactacttacatggacaattttaagctcgtctgatcaaaagtcatcgataatttgtttataaagaggaaattacactctatatcatttttttattgtcttcttttatttttaccatcttttttaaagtctatcatttttacctattttttaaaacattgtaccaattttgtccctgtcacttcaagatactaccatgtgattctcttatgtcagggtattttgggtacaatacatgtaaaaagaggtatgtttcaaaggtaaatttaattaattgattaataaaagtggtatttttcaacttaccccatgtttaaattctattctatttttttttaatcttttcaagaaagaatcatttggccaatgagattataaaattgtttattttacctaaattactgtatagtataaataaacataattttgatactttactttcacatgtgataatttcagattttttgtggacgatacaccaattagggtgttcaagaacaacacaaaaaaaggagtaaattacccaacaaagcccatgaaaatccaagtgagtttatggaatggagaagattgggccacagatggaggcaagaccaagactaattgggcctatgccccattcaaagcccattttcaggggttccacgttgatgggtgttcaagtgttaattcagattgtaattctgaaaataagtatttctggaacacaaaaaaatatcagagtttggattcgaatcaaattagagcttatgaaaaagtgagaaagaattatatgaactatgattattgctctgataggtctagatatcccactcctccacctgagtgccttgataaaccatagtttaatctctttgtttattcaataactatattttacaacatatgaaaagaaaatccaatttaaatattagtggaaataaacttacttatcctaatatttgtattgatggattatcttcttttgcttattttattatcaagatatcttatgaggaaagttgaaaataatgataaaatttatacaaggtcattatttgtaattaacaatgtgacatataattatagggtaaatactattttggaccctgtattttgtaaaaattacagattggaccctgtgttttgttaaatgacaa

SEQ ID NO: 90565 - DNA, 853 bp, Cannabis sativa
attaaccgtatgtgtataagaacaacgtacacccatctattggattctttgaaacttatatttactacagtaaattatttaatttttttttatcttcaatatgaatcaagttggcttttgattagaaggaatgaaaacatagaaataaaaatgagaatgagaataggtatgaaatggaataaaatttaaaatacataaaaaaaaaaattgataaaagatttaataaacttttctaatcatatattggaatggtcttttcttacatttcaaaatagaatagtcattccactaaaatagtcgaaaggtcattccattgaaatgacattctaacattttaatatatgcaaccaaataaaagaatggaataaagattatttcctttcctttttattccatttcattacctccaaccaaacgccagttaaaatccttggttaataataatgttctataatgtatgcaaaaactcaaataactaaatttatattattaaaattctaattcttttagactaaccatctatgccacttttttttttctttaaattaaaatactcaatcaattgtgtcagaattagattggtttaatacacatccatcaccaatcatttccttattaaaatattcccatgtacaatatattcaaaccagatcataatttgttcaaaaaagaaaccagatcataaattatttaaagttttaccattataaaatacatcatataactattatatggaaaaatttaagttatattagtaaaacaaaaaaacaaaatcctactatattggaggaaagatgatgttcttatacattaaaattctaatgtaattatacatatattttgggtccgcact

SEQ ID NO: 90566 - DNA, 841 bp, Cannabis sativa
tccttttgtggttttaatttagttatttaatctgattttagaaatggtattaattaaataaaaaactgggaaaaatggtctttttgcccatttatgttttgtccttttgtggttttaatttagttatttaatctgattttagaaatggtattaactaaataaaaatcctttttcttatttcgttttcaataaatattaaaatacaagaaaaatcacattttatctctccattctctctctttttcgaaacccttggagaaaccaacaacttgtggtgttcttcatctggtttttgctgattttaacttggttcttggtgaatcccttgaaggaaatagctttagtaaccttctctttagtttccttatgttttgggttgagaattttgcatgatttgtgaatttagttgctactattgtttgaagtatgtttctgaagtttagtcatgttgtataatgctgatttaagcatgttttgatggttgatagtagggttaagcaagtttaaagttttagaactcaaacttggtcctttaatggttattttagattctgagcttgggtagttgttttattgcttgaaaaatgtctattagggaataatatgcaggtctggaaggtttggtaaagtttggaatcgatttagttaggttttggaggtttttgggttttctgatgtaaaccggctaaccagttttacaggacctgtaaaactggttacctggatttgctgctggattccccgaaaaattcgtgttgtcgattcatgctagtttcagagctttggttggttaattcactgttagtttagggtatttccatgttaagtttcagtagatagg

SEQ ID NO: 90567 - DNA, 1502 bp, Cannabis sativa
gatacagaagagaaacttaacaatatcaaagaattgcaaaaagaaattaaaaacaagaacctggatcttggtgaaacccgtggaggagttgaatgataggcataggttatcaacgcatagttgtattatggccgcctgattctagacgtcgcatacatccggattgaagcatccaacctcggaaacttgagattacgatctactcatcccagatctagtaaatggtgataatctattgatgtcgcagtgattttaaaactgtggattttaaacattcatctttttctatattattattttgtttaagattggattagaaaatttaaaattcaagagcaaattggatgttgattgatatgtaaaagtaactgatccaatccaatctacatatatatatacaattaatattttaatataaaagataaaaatttaaaaatctaacacatatgatacaatttttttttcttcctttaaatttattattttttgttttatttattttaatttagtattggagatataaaataacattaatttattttattttattgttagttatgttagcaaaaattattttaataatattaaataattaaatatgaaaaagtaactaattcaaaataatcgatccaatcttcatttcatagattggattgtagtacatttgaattattacgtaaactagttaacaatccgtgcttcgtgacgtatgtttaaaattttttaaattatatatataaaatgaattatgtattttatttaatgataactaaataataaaattgcattaaattttaaatttattaattttttatatgaatcttaaacaaaattattaataataataaatatgagaaaataaataaatatttataaatgtaataaaaaaattaaaaaaaatgagaaaatatatatatagatttctttataaaaaaaaaaacagccacgttttttttttttttttgaaaaaaaaaatcttaaacaaaattattaattcataataattaagtgaaaaaaaatatgagaaaataaataaatgtttataaaccttataaaaaaaaaattaaaaaaaaaaaaagaaaataaagagaggagagataaaactgtttggagtgattttataggggaaatttattgaattaaaattggtccattaaaccaaaattattcaacatttgtagaataggttaatttttactaaaaccccactttacccctctcattccaaaaagtggctccctctctctcccttccctctctctcttcctcttgaagtctctcgaacccactgaacccaccaccacgacgaaaatctccactgaacccaccatcagagcaccactcgacccaccatctgaggacgaagacccactccacccaccacgtacccaatcgacccaccacgaagacgaacaaccaccaaggtaagatttctccctatggtatttttgaatacttttcttattgatttagggttaaaatattgtttattgatagattta

SEQ ID NO: 90568 - DNA, 631 bp, Cannabis sativa
ctataaaggaaaaattgtggacttgataaaaatatgaacttaaacacaatattaaaatcataaacttaagcatgacacaataaacacgaaaacacaacacaaatatactaacctagaaacatgatagcataaattacatccataaaaaatatttctttttatattttaattattaatttatatagttaaaaaaaataaatctatctttttaaagatatctaaattatttttaaatatatgagacattgctatgagatatttgagcattgctatgagatattcacggtgtttagcactatgatgaagtattgtcgtataattagttagcaattttctataatatttattaaagtaaagtaagtaagatctgatattgagttgtactaataatgatattacacaacacaagggtgttagatactatgagtgccctttagcatttcccaatatatttatgttaaaaaattactaaatcatttatttcttttttaagttcaaaaatttattgaaaaatatagacacttgtgtaaaatatcaaatctgatcacaacacagactgcaatgactggatagttagacataaaaattaacagattattaattatgtaattattatttatgattttatgtt

SEQ ID NO: 90569 - DNA, 570 bp, Cannabis sativa
taacaaaactaatatagatataccataatctttaaataatttgcttctaattctaaaaaataaaagataaattaatgattttgaaataaggacatttactaacttagtgctataattttggtcatttactataattttttaaaatgaggacataaactagcatattcttatgatttgaggccatttactttactttccctttttatcacatcttcagttcatatggaatttaaagacatgtggaattaatttgacattaacttttcaatagtggtagccatatgatatgtaaatgagaaatactaaaatatattattggtgcctagtagctttctaagtattggtgtaattaagtatcgtttctcatataatttaatgtaataattttaaaaaatatcgctaaccaatcataaagtaacacatttagaagattctagatactaataatacttaataacaataatgctctatataaattagagatggaaatttataccgcggggataggtaaccgcggggacccgcccctaatggggtgaggatcccccgtcttggtggttaatggggcgg

SEQ ID NO: 90570 - DNA, 676 bp, Cannabis sativa
agtccattatccaaccttcctctcctcacaattttagtgctttgtgaaattttcattacaccttcctcaactttgacaacataccccagtttatcaaacataccaatagagagagaagattgtaacacaaaattgtaaagcttacgcaagtgtacatatcaagtagtactcacacaggtgaggtcgaactaccgtgaattgaaattgaatactactaaattagacttatatttctatttggttaatcaaaataatcttggaatgaaataataataattgacagaaaattaaaagaaattgaataaagttattcaaatagggatgagagattaggaatatgaatcaattacccaattattaatgtaatttactaatcttctttctttaagtgctaacacattataaaataatcataactcttctcagatcattaagatccttaaccatatattatttattgcatctctgaattggaataacatatagtttgtattaagaaataatctaatggtcacacaagctctgtgaagactctcgtttcacatcaaaacttatgtttgttcaagtagagcattcctaatattcacttctcatatttcatattagtcatgaatcatgttagaggtagctaatctaaaatatgtattaacacaaatataaacaaatcacaaagatc

SEQ ID NO: 90571 - DNA, 581 bp, Cannabis sativa
cttctttgtcatccactcagggatgaccttcctcgttctttttgtatttgtcgaactttcctcttcgaatcagctcctcgatttcatcctgcaagacccaacattccaaagtagtaagaccaatatctttatggtacttacagaactttttggggtctcttttgtcgcggtttcccctgttagggggcggattcttgaagactccattcctttcctcaattgcatagatgtggtctcgtggcaccgcgagttcggtatagttaacgaaacgcggtccacccttcctttttggcgaggactctttctttggatgagatttggccaacttcggacttcgttgtctccgtgggctgcgtcttctcgggcttcgacctctggaatttttccctcggggactacgagaccttgatcgcgacactggtgatttacgcttatccttgcctttttccaactctgctagagaattctcaattctcttatgaggttcggccatagggaagaattggactagcgattctggtcttcgagcttgtaactccttccaaaaatcggttctcgacaaaacacctattatcaacata

SEQ ID NO: 90572 - DNA, 711 bp, Cannabis sativa
  modified_base (59)..(70): a, c, t, g, unknown or other
  modified_base (146)..(152): a, c, t, g, unknown or other
  modified_base (292)..(296): a, c, t, g, unknown or other
  modified_base (613)..(613): a, c, t, g, unknown or other
  modified_base (666)..(674): a, c, t, g, unknown or other
acattatcttttgaagcatatgatcacaattaccttccactgtgttgacatcactgtannnnnnnnnnnntatatgttctggatttaacagattttgtgcacgttaaaccataaacaagaaaaatacatgtaaacataaatgactnnnnnnnttctattgataacaaatcagattagattgaaatgagttttatttagaacataaaatcccaatagataaatcattgaggcctcatttcagtaattatatttatttacggaaatataatctataggtagctaagtgttttannnnnaaaatacattgaaaggtagaacggtaaatttctccctattcgatgtagatcatctatactagatctttgactatttagattgtaacaatggataatttcataacgtatctatatcttggtacatatataacgttctatataattaagagtgcaattccaaatctatagtggcgcaagaagattaataagttagagaacttacttggtaaattctagttctgcttattggaagcttgataatattggtccatggtccccacactggttgaggtaatactgcttgcagactcaattagttgattttaattaatcaattntaattctaaaattagactatgttacatttatgaattttcatcaagcaagggcnnnnnnnnnaagaaaagaggttttgggatttatttattaattaaga

SEQ ID NO: 90573 - DNA, 558 bp, Cannabis sativa
  modified_base (484)..(531): a, c, t, g, unknown or other
tctctctcttgtctcaccaccggatcccgaaccctcctagccctctttctctctctcgtctcaccaccggatcccgaatggggctagttgttgtgtttccgtagagagggaggtggtgacgatgggtggaatgggagatggagctttgtggagatggtggttcgtgactagcgtgcgtggaaatggtgctgatggcaagactttgcgaatggatggtgatttatggttggtgtttcgactattgggcggtgaaggtggatggaggtaatttttggttgtgcgtggagcctggtgttgaagcttcagatgttgaacggtgatggtgggactgagctgttgtggttggagtagaggtgggaatggttgtagagaatggtgatggtgaatggtgggggcggctagggttaagttgttgagggtaatggttgatttgggggtcttcttttagataggggaggggggtgttggaattaattttaccagnnnnnnnnnnnnnnnnnnnnnnnnnnnnnnnnnnnnnnnnnnnnnnnnacttctaaaacgataaataaaaacaca

SEQ ID NO: 90574 - DNA, 948 bp, Cannabis sativa
tagggacagttcctgaagggatcctagcaagagatgcgaataccacaacgacattggccatagtaccaatgaatgcaaaaacttgaaggacgagatcgaaaagtgaatctgattgggtcatttatattaatggattaagaaccggctaccccatctcaacccgattccagtaggaggcccgttacctcaagggaaaccaaagggtatacctagagcaccagcacccgttgtacatcctggaggagcaatccctcaacaggtccttgggctaccaccaagacctaatgggagagtggccatgatctccggtggccccatattaggggaaccaccaaaaaagagttaaagcgctacgttggagccataaaacacaatgaagtgtgggaagtcactaagcttttagcacaaagactccgactcatggaccagccaattactttcacggaagaggacgcaaaactggtgcgtttccctcaccatgaccctctggtcatcgagactcccatcgccgataaaattgtgggaagaatattggtcgataatgggagttccatgaatttattgttcaaagaagccttcacagccataggcctcacggacagggatttgtcgcccaacggcttccagctcacagggttcaatgggacaacacttatcccaatgggaaaagtgagactaccagtcaccctgtgcccggatacccctcagagtacttttaagtactgcaccttcgtggtggtagattgcccaactgcatacaacgccatccttggctggccgaccttggtcaattttggtgcaatcacatccatccaaaacttgtgccttaaattccctactcaagaagctggagtggggacagtgagaggaaattagggagaggccacgcagtgctataatgttgcagcacacttgccggtgctggtggtgttgggttttgtaccctaa

SEQ ID NO: 90575 - DNA, 587 bp, Cannabis sativa
atgctacaaccatacaaattatttgttcaaaaaccaattgtaaacacatgattctacatattataagtgcaaccatataaattaaaatatggagttaaaagtctaaaatctaaaacataaatcaaatataagtccacttcaaatacattattccacaactaaacatatgaaatacattaaaacaatagatagaaaatagagtcaaatccaaccagcaaagcaaccatggtctatgatcaccacctacacttacaaaaaataagaatacacaattaaagaaataatttatgaaagtactattgagagaaataaagctttaaagtaaaaaaaattaatttttcattaattaccttgaaattttatttgattttctctgtcccacttccacttccggaagcattgtcaagattcttattaatagtaatacatgatccatcacctgataaaaatttcattaacataaaatctaacatatactctcctcttcagcttctccttttctggatctaggtagaaaacgggctaatttcaattaacaattaatatataatggttgaacaatatgttacctgtaataacttgttcac

SEQ ID NO: 90576 - DNA, 581 bp, Cannabis sativa
tcaaatttaaaatcttaccttgctcgttgtaggctatggaggtgacggtggaggctgaggaacggcttcgtgtggtggcgtagaatagagaaagctcgaacttcggtagtattagattcagataaatatgcacccccaaagattaacatccaagctaggaggaatatagaagaacagatgattcaaaaagaatccatatcgatgcaattaagattagaagggccacaaagtattgttttctaaatatacctaccaaatgcccagtgtttggttcaacagatatgaaaagtccaactccctgaagatttccatcactctcaatcctaaaactttgataatcctgcaagtacaacagattattagttgggcaccaatgagtatttctgatgtagagtttcacaattcattaaagaaagatttgttgattccaactcaatacttaagttcaaacaccaagtaaacaaaaatgaaactacataaatatgtattatagccaaaaaattcaattatgtttatgaatcataaccaaatacaaattttaacaccaaaggaattatatgaatagtaaaaccttgggactg

SEQ ID NO: 90577 - DNA, 1703 bp, Cannabis sativa
aaaggcaacagagaacaacagttccacttgtggtttgacccaactgctgatttccacacatactctattctttggaatcctaagcacattgtgtaagcacttgtactaattaataaagtactccatatgttttggtttccttgatgggttttgctcacaacatttaaactatcataaaaaaaaatcattggtttttcagattctctgtggatggaactcccattagaaagttcaagaatttggagtcaatgggtatcccatatctaaaggaccagccaatgagaatccactcgagcctatggaacgctgacgattgggcgacaaggggtggtttggtcaagactgattggagtaaggctcctttcacagcctcatacaggaattttaaggccagtgcttgtgttaaggcttcttcttcttgtgctgcgaaatctcaaccttggttcaaccaagaattggattcaagaggcgaaaagaggatgaagactattcaaaagaagttcatgatttacaattattgcaaagacactaaaagatttcctcaaggaatccctaaagaatgcagcatggcctaaaacaaggactagttactactacatatcattctatgtcttattcaatatcttttattgtaattcattcattataatctgtatttgatttattttgaataaataaaaatattcttttgttttgtctaataattaatctctcatgatttatattacaatcaaatttaattaatggttacaagtcaaccaaaccaattgataactttattagttgcatgtgttatatgttatatagccacatttggcgtacccataaatattaattcaagtgctcatagcacaattggattgagaattaattaatcaaatgcattgacggttaagttagttattggttacatattatatataattattataactgtagttagttgtgaccgttagtatagttaagacagttagttagttaagctctaaagtcggttttttcagttagtgtgtgattttcaagtgttaaacctattggactagtctatataaagttcctgtttttaccacttgaaactaagacacaacaccattcgttgtgtaaagattgaacatcattaataaagagctatattcagattggttgtttcataagcatggttgtatggcattcgagttgtagactcaacaataacacagataattaactctttaatttgttttgaataaagaaataatcttttattacagttaataaatctccaataatttattttactataaatttacatcattattattattatttgaaagcgaaatctccacaaagagagacaacttacaaaagctcctacaagtagaatttgcaacactgggaaggtcccttttccaaatagttctaactctaattacaaaagtatgtttggctagaaaatgagcaacaaaattaacttctcttcaaataaaagtgaaaccaccaaagtcttgactcggaataattaattagttatagtaaaaataaaaagtgttttaattaaatgacacatttttggactttttggattaattagtagtacatgattaaaaaataaattacgttaataataaattacattatcatgatttatttgataatgtcataataagtaatagtttatctttgattaaattcaaaattacgtaattttttttttatttattttt

SEQ ID NO: 90578 - DNA, 530 bp, Cannabis sativa
aggaagttagtggaggtaaaaaaatgtacatttaaacttttcttctctaaattgttgaggttattagcaagaaaataaatgaattggaggggctatagaccaaagaaaggatatttcgatttggtgttttacgagataataatagacattattttagttttctaattaaacaattaatcccaaaaaaaaatattgaaccgatcaattttttttaatctccttattacaattaatcaaggtggagcagtcaataattaacttttttttatcaagcaatagatccacgaaacatacaacctatttaacttagaaaaagtattaatttctataaagataaaattaatctaggtaacaaattaataaagcatatataattcatttaacttaagttctatttttcatcacaacaatacttttgataaatcagcaagcacaacaatacttttgacattactattaattgcaatttatcacaattacttagaatcataaactattaggtgagtagtaattctaagttgataatagaa

SEQ ID NO: 90579 - DNA, 672 bp, Cannabis sativa
cgactttcatgagtgaggagaagagattgaatcgactcaaatgagagattgtcgactaagctggtaacatgaacaacaactgggtcatactctggccctaacccattgagaagatgcattatcaaatcactttcgtccattggatgcccagctgtggataaagaatctgcaagaactttaaccttgtcataataatccgaaatggaaaggttacctttctggattgttgataattgggacttgatctgcaacaatcttgctttcgattgagaggcaaatctctgttccaaggctttccatgccgtggatgaggattcatattgagctaaagaaccaagaatggtttcggacattgaagatctgagccaactgagtagcagttgatcctttctgcgccaggccgagaattcagggttgacattgccattaacgagttgagctggtggaggaataccagtgaggagaacatcatcaaggccatggccaataacagtagggataacttgggatttccaagccaagaaattggatctgtcaagcttgacagtaagagatgaatttagagaatgctggaacggattccaggatgaagaagaagcagtcggtggtggtggtggtggcccttgagtctgggcagtggtgcgcggaggattgtcgatgattgaaggatcc

SEQ ID NO: 90580 - DNA, 865 bp, Cannabis sativa
gttgtctaatcatatcctgtatagtagaatttacatgttcctcgcattatggcaattaaaaattctcttccatactgtttgccccgagcccaaatagctcgctaatcagactatttgattacctttactacataacttatcaaacatttagtccacatcttctaaccatttaaaactcagacgggtattaatatcaatatgtatgtaccatgcacatattcttatcaaaattttcacaatgctactcttccaacatactttataatagcctagacaggtaatccaatagcaaataatataaacacttatataccatgagtcgatttgtcctcgcagcaaatgtacatattcgaccagtcttcaggacctttaaaaccgtggttgctctgataccaagtattaatgccttaatttatagggatgccacgtgtgtgattttataaactaatttaatactaatatatttattaattattaaaaccgtgataatataaaaaacttgactaaaagaaaacaatataagcggacattataatggcataaaaagtgtgttccgggaatccttgttataaaaagttttgctaaagaaatatatacgataactatttaaacacaaaatcaaaatacacagcagatacagccagcctaaaacaatagctggcaactcggcacgcatgccgatgaggtcaatatgtacattgctggagaagattctcacctcatggttgatctaccttttctttacatttatatgcaccacatagcacccgtaagtcccaaggactcagcaaagaaagtaataataacaataatataatttattattcgaatattgtcatttatacacaataagaattaaaccatc

SEQ ID NO: 90581 - DNA, 698 bp, Cannabis sativa
ccaaaaggtttgggaagacaaaccttatcccaagaggccaaatgaattttacttcggtctcccttaactccccaaaggaaacctctgcagagcctctctacctccttaataacactttgcggtaggatgaaaatgctcatccaatagttacgaagaccaaacaacaccgaacgaatgagttgaatacgacccgcataagataaatgcctagttgcccaagtaaccagccgcatttttatcttctttatgatagcatcgcaagcctctcgtctccactttgtaggtctaagaggcaccccaagatacttgagaggaaatgagccctctctaaattgtaagtcttccaggatcacctctttttcagacaaattaacacccccaaagtacactagagatttatccttgttgggaaataatcctgtaacttcaaagaagcttcccaaagcaatcttcagatggtgagccgccaaaaaagtgcctttgctgaacagaataagatcatctgcaaagcataagctaatcaacttaaggcttttgcacataggatgaaatctgaaagtcttcttcgaagcttccttttgagagatattctattataagcacaaataaaagaggtgacatcggatccccttgtcgaagcccttttctcccttgaaagttaccatgcaatctttcattcatcatgatcgaataggaag

SEQ ID NO: 90582 - DNA, 1341 bp, Cannabis sativa
  modified_base (568)..(570): a, c, t, g, unknown or other
  modified_base (1279)..(1285): a, c, t, g, unknown or other
aatgatcaaataatatatatatagtagttatttattaatgggcattatctattaatgtatacttttaaaatttaactataattaaatgtcaatttaaaaaatattaatttttaaaaatgaaattttaatccaatgattaatagtaaaataaaaataaagttggtgtggttgcttttaccacactactaagttattgttacgtgtattgtacggatacctaattaaagttttagtttttatttttttatttatttttttaattttaaaaattataagaaactacttatcaattttttttttaaaaaaaattaatatttaaagttttaaaaacttgagtaaagtaaatataaagtttaagaatattaaaattgaacatatcccaatattaaaaataacattagaaataataataatattacaaataatatttacatattttatatatttaaattaatttaaaattagtataagtttaattaacataaaacaaataatattaatattatatttaaattaatgtacgataaaaaatagtaatatttttatatatttataaaactaaccttannnacaccattaaatttaacaaaatattcttatatttttagaatattctgttaaaccaacaaaaatcgttaaataatcacattttatgtataaaatttaacaaaaaaaaaaaattatattcttaaaatattctgttaaaccaacaaaaatcattagatagccacattttatatataaagatataaaaatatatttatattagcattacttttatctatttgtctctaactcactcaactattcttttatctcccactccctatataacaacctcaattatataatacaaaaataaaaaaaaaataaaaaatcttttatttagatagcaaaattacacataaaaattcaaattattctaataatactttcatgagtaatattcattaagagtgcacttatatataaattaagttattgttacgtgcattgcatgtgtacttagtgatatttttaatttttatttttgttatgtgtaatttcaaaattttataaatgataagaaaccacttaattttataaatatataaagtttgaaaaaattaaatataaatttaaaaatattaaaattaaacataccctcaatattaaaaataacaataaaaataataatgctacaaataatattatttttaaattttatatttaaaaatattaaaaataagcataccctcaatacaaaataatagtgttataaataatatattaatatttnnnnnnntttaaattaatttaaaattagtattcaattaactaaaaaaaataatattaatattt

SEQ ID NO: 90583 - DNA, 500 bp, Cannabis sativa
gtaacggtaaatagtagtataaataattttttaaaaaaattttataagttttataaagttaatgtttatttttagtggtacgagtacttaatatttataaaattacaggtcttgttattattttaaatatagaatatataagagtatctctaatgataagaatttagaaagtgtttgctgaggtaaatatattatacggtaaaatattaagatattatactattgaagagaaaaaagatattattttaggtggttgcatggatgctatgtattggcatattcattttttaaaaaaaataaaattgaagttaaaaagttattataactaaaaattagaatatttttagcattctcacacgtgtgtatatttttagcattcttaaaaaataataccattggagatactctaagatctaaattctaagttattagatttagataaaaatacataagtattagtattagttatatacttttaaatattcttttaataaatttaa

SEQ ID NO: 90584 - DNA, 1440 bp, Cannabis sativa
ttaattttttgcacacgaagcattgttatttttaaaaggtaaaatatcatgtttcagcttcgatcctttacacccttttttgttgtccaaatgtaaataataatatgtaaagtcaatggcttatagttgaatgcagatatggccaagtatatgatttaggctagccattctcagttagcgtaaatgctttaggtttgagattactcggtgaatatatgattattacattaaggaaaagaaaagcatccgtttccattgatcgtttcatattttctttttatgcatggtaattagatttacatatgtgaagagatcaactgtgttgatttttattcatcaggaagattcttttggtctcaatttatttcttctcttctgtgtgcagagatcggtattctctcttactgacccatgtttatctttctgctgaatgaatcttgtttcttgataatacgaaagctatcctgaaccttcttagatacattaacaaactaccgaaacagcaaagacaaaaccagaaaaacttagaaatattacataattaacttactatatagattactcaaataagcctgtataggaaattatactaacctccaatttgagctcttcttttgttgcttgtgctctaaggtaaccaaactccgaaaaccttttcaaactccagctgctcacctgtaaatcaccttaactatcaaattagaagttgttgcttatgctattatttgaaatcatttgggataagagaaagagttacgtcgatagggaactggtctagagagaagccagccatgccgattactgcatgcactggtgcggtatagttgctatgatcgtatgtgtcaatcccactttgatcttttttaggcattgccaaacactcatttctgtaaacagaacaggtcctctcgtagttgtggacatgtccgaacagaaccaagtcgacctgttcaagtttttaaaagttacaaacaaatcaatcttaagaccagacaagtaatgatagagagaaagagaaaaagggcttttactttgttggccattaataatggttcaacttcattagtgaagttttgatcaaaactatagagtccagttgaggaagtatacatgggtctatgcctgaaaattagttcaatattattaggttgagcttagtattgaatgaagaaatattgattaaagaccaacttattaccctgtgaatatcagccaaggagttttcgatcgatcaacagaagccatatcgtttttcatccattcatactgcagacacatcaatccatatgagaacataagatcgaacattatctttcttttctttctttctcttttgactaattacctgttcagaatccttttcccaaacatgctcggtggatatcacggtgaagtgaacacttccctgttcaatggaataccaaggcttatccttggctg

SEQ ID NO: 90585 - DNA, 512 bp, Cannabis sativa
gagacccgggttaatatgatgttggagtcagacatggggaatttggatgattggagaaggtttaaggaagtgggtttgttggacgaggcagttatggtgaggaaagaccacgaagcacttgctgagaaagtcaccaagcttgaatcccaggttagagaaaagttgcttgaatgacattttcttgttcttttgaattttgctattgctgtatccaatttggaggaggaaaagagttgatactagtactactggagtgagcttgctcattgtttgttactgtgagagaattaatattcatttttatgcacgggtggtaaaatatgtgtgtatttatttatttatttgggtttaatattcgttggactttctgggtaagctttaggtgtgctacactagaacttgggtcgattagaacagaactagctagaccaatttaggtgagataaggataaaggtaaaatatatgtagatatatgatcctaggagtcatatttgtaattgattagtataca

SEQ ID NO: 90586 - DNA, 610 bp, Cannabis sativa
ttaattattctgttttgttgttttgcgattgttcaataaaaagacattatttttataaaagaatttcatgttataataaaattataaatttttacccaaaatttaatatttttctaaaaacttctaatttttgttagaatgtgtcccttttttcctattgataagagtgtatttcttgaatgtgatcaaattatagatcggttattttttttttctataagattgtctacattaaagttatagtagagtacatccaataggttttgaaaaaattaattatgaataatttacaatattcaaaactaaactccaaatagtaaatttaaatgcacctacctaaaaataaaaaataaaaaataaaaatgtgtaattatcggtttgaattctgtttttgacaatataaattattcaaaaatattcaaaatttgataaaatatttaatataattacaatatatattggcaacttctgttattagtttaggggattatatttagacaaatgtaatataatgtgttagattataattgtagtattttttaaagggattttttcaattatatacttaaaatacaaattaatcacgaaaatcccttaataaatctcaatt

SEQ ID NO: 90587 - DNA, 685 bp, Cannabis sativa
gtgattatggttgagaaagtagaataggttgaaatgtaaggtaagataagtataataaggttttatttcaaaaccgatattgacaatgagtggagtagctacctagctggtttatgatcttatatatagtattaagttttcacttattattaatgtgaaactacacatatgaatatttttcagcagcgcattccgatccgtttttcaaggcagttttttaaggaaaaaccgaaagctgtaagacttaaggtggggaagaagtgttgggatgttaacttggcacattgtggaggtggagtggttttatgtggtggatggcctgcatttgctaaagacaacagattggttcctggagattctttaatcttcaaactgataaccaaccaagtcaatcatactttgctagaatatcatttcccattgtattggcaattagtaaatatctattttaattcatctatgctctaactaactaactattatgagtgtttgtttttatttaaaagttatttttgaaagagtttggatgaatttttcgtatgaattcatctctgtttactttgattgagttgtaatcagaattggatattgtatcttgattgatttcataggatttcatagtgaaagttacttacccgattcaatggaactcaaacaatagtcacctagaatgtgtttctaaggt

SEQ ID NO: 90588 - DNA, 731 bp, Cannabis sativa
attaaaaaaatgtttagttgaagtaatatttatgtaaaaaaaaatctaataatatttaaaatttattgttaataattttagtttagtggtaaatgaaaaagcccctactttaattttctaattgttttcatttttagaaatatcatacattttttttataataataataaaaagatatttattttgttaacttcaaaagatagcgacattacagcagtaattttttgagaaacaaaaaacaagtttgttctattttattgtttttttttaaaaaaaaaaaaaatacactaataggcttaaatttaaataggctaagatcctgtatgtgtttgggatgagctgaagaggtgcaactctaagataattacaaaaatccttaaaatactaatttgggcattcccatcccatgatgtgatatagcatcttcaaacaggccaagatcctatatgtgtttgggatgagctgaagaggtgcaactctaagataattacaaaaatcctagaaatactaatttaagggaaggatggccccaactcttatatgtttgatgctccaagttcctattattgaagaaccacttgtgctgcaaccctccccttgttcttccattaaacgagttagggaaaagtagttgaacttgcctagttcaaccaaatgaccccaacagcccttcttgttcttaataccgtaggactttaaaaagggatccacgttggtaacaagtgacctaa

SEQ ID NO: 90589 - DNA, 699 bp, Cannabis sativa
  modified_base (89)..(99): a, c, t, g, unknown or other
caagagtgttagagagaaagagagttagttctcgtgttctctttaagaaagtgaggataaatagtttgtaaagagagagagagagagannnnnnnnnnnagagagagagagagagattttctatgttatctgtcaaagagtgtgacatgaaatctccaacaacattgtaattgttcaagcttggattatagtggaaagagctaaacttcttaagaatagctcacaaggacgtcgtcgaaagattaggatgaaccttaccaaaattatgtgttagatttctctaatctattgtatcctaattttttgtcattttatttttcattcttattccgcattaatctcttttgtttggattgtgagttgtgtggcgaattcaaagtagaattccaacatataagaaccatatgtagaagggtggatgcactatatacactcaaagcgagacgttacatgtccacctgtgattaaatttaagagttttatgaaatttttttaatagttatggtaaggataatttttagttaattgaacaatatatacaacttcgtacgtaccataaaatttgggaactggatgttgacaccacaaaagctcaatattttctttgtcatccattgcatgaagtgcagttacaggtggatgatgtgaaatctaagtaaatgcaaattaattaatatattcaaagatagatagttattt

SEQ ID NO: 90590 - DNA, 833 bp, Cannabis sativa
ccattacacgaacgaggggtccagatgacctcatgaaggttgaatttcgccgagagatcaatgaacttctttaccttgtcttgaatgttgaaatgcagcttttggacatcggaatccctgcttttcatagcgctgactgcactcagcgaatcactctggaagatgacatttctgaagccgaaatttatggctgctgtcgcaccttcgcagctagcatcgacctcccctggcagcgggtcactgaagtgcgatttgaacgttgagatgccgaggatagttccatacgcatctctaaatacagctgcccccgtagactgagattgaccaatggccacatcagagttacaagcaatccacccttcaggagggggattccactcagtattaagaggatcgttgcactcctgaatagagtccaactcacacagcctactatttatatagtcaattcgcaccttcaaagggataggttgttttccatggaggattgaatttctctccttccaaatacttttaaagataagtgcagcccctcctaggaaacgattgagattcatagcatatggtctgttgtctgtctcaataaaccattgcatccactcctcccattttgataggaaaggaacagatgttctaacgttccaggaacaaccaaaccatatagctctagccagagtacattcccaaaataagtggtaactactttcctcagaggatgaacaattcgcacaagttatatcagtaattggaaaaagggatccgatcttgcctttggtggggaggcaattggataggattctccaccacagaaatttcaatcggttgtgaatttt

SEQ ID NO: 90591 - DNA, 811 bp, Cannabis sativa
agagtcctacagagatgaaaccggcctttatttatcccagggaaaatacatctctgagttgctgcagaaagtgaatatggttaacttgaagccaagtccaactcctatgacagccaacaagcctctatccattcatgatggtgaacctatgattgatccctctcactacaggagtgtcattggtgctctacaatacctcagtcatacaagaccggacatttcctttgccgtcaacaagctaagtcagtttctcaagtgtcccactaatgttcattggaatgcaacaaaacgtattctcagatatctcaagggaactatccatcacggcatacatatagcaccaagtgataggctgtcacttactggattctcagatgcagattgggcatgttgccccgatgatcgtagatcaattgctggatattgtgtcttccttggtgactctttaatatcctggtcttcgaagaaacaaaccgttgtagctcggtcgagtacagagtcagaatacagagcccttgctcagctagctgcagaaatctcctggcttcaagaacttctcaaagaaatgaaattcaaacttcctgcagccccagttatctggtgtgataacatgagtgctagtgcacttgccgctaatcctatctatcacgctagaacaaaacacattgaactagatgttcactttgttagagataaagtacttcaaaagcaactcgagatacggtatgtgccatcacatgatcaagttgcagattgcctcaccaaaggtctctcacacacacggttccaatttcttgtggacaagcttggg

SEQ ID NO: 90592 - DNA, 582 bp, Cannabis sativa
caaacgtgaatgggtaaacatatctccacccatttggcgtgtcactatatctaatcctaagtttttttatacaaaaaagtacagtagtaataaataaaaaaaataaaaaaaaatatttaataatgataaaacctaattattatcaccactctctctttcttagtcaattaaaagtctcaatcaattaaagcaatgtactaacttatttatcagccaaaataaaaaattaaataataataaaaaaataaatttattcttcttttccatctctttctctttttataagaataaaatataaaatataaaataaatataaatataatataataataaagctgtaacatttagaaaaccctaaaaaaatttctttctctcagattttctctcttctcgtttcttctttgccgtctgaagcttggaactgaagcaaggctttaacgtggaggacgatagaggagctctaccagccgatgatgaagtcaccaccagccgacgatgaagtagctctaccagcagacgacagaggagctccaccagtggagtacgcacccttcggaactcgagccaagcttttccctcacc

SEQ ID NO: 90593 - DNA, 2069 bp, Cannabis sativa
  modified_base (249)..(265): a, c, t, g, unknown or other
gaatgaccccacatgcttcccttcccttcgcctctggatcggagttttccgcactactacaaacttaccatttagtgacactctatagtgacccatacaaaagcgcatgtaactaaaaggttagaagtgagttttagtgacccgcacaaaatgactataaaattcagtgttagtgtccttcgatttgggacacaaaaaatataaagggtcactaaaaataattctataattttattattattattattnnnnnnnnnnnnnnnnntattattattatttaataaaaaaaaactttgcggagacgcgattggataaacatattttcacccacttgatgcgttacttatactatatcataactccaaattgaaatagaaaaaaggaaaagaaaacatattacataaaccctaataaaagaaggatagggtgaatgtattttttattccttaaagaaagttgtacaaattataatggtatttatagtattatttgggaaggcgggaaagcaaaaaaaagatataggacacatgcaggggcaaagccagaaataaaaattagggaggggggaaactataatagctaaataataaatattttaaaatatattattaaattgataattaaaattgaaagtcatctataaataaatatatgctgattttttagcaatttttctttaatatacgctaacatttagcaaacaattacttgaggaaattattttccatcttgttgtaaagtgtaaaagataaatttgtgatagctgtaaaataaaatatgtaaatataagagttgctactatatacagaagtggaaaaacttatgtttttctaacttttattgaccattacataaatgcatcatatgtcattttttacaaatatactactttgttttatgaatactttaattttttatttgatatctaaatttttgatatttgttcatactcactattttttgaggtagaaaataaaaaactaatacataatatatatatatatatatatatctcacatggaagtattttttttttcttctaataataacattctagaatttttattttaatgttctgacaatttttttttaccatgctttagttctagtttaactataagggaactaaacaaatgaatatacaactaattatataactaaaaattataaaaaataaaatgtgcatgtatatgggttgggggtaaggccaccttacacttaaatgtgccttcgcccctggacacatgtcatgaatatagaaggccacaaaccactaaaataaagagtatacattatgaaaacaatcattgtttaacatcccctctcaaactcaaggggcaagggagcaccgtgagtttgttgcgtaactcctgaaaacgacatgtggcgagtggcttagttaaataatccgcttcctggtcagctgaaggagtaaactcgagtgaaaaagaaccttgtttaaccttttcacgaacgaagtgataatcaatctcaacatgtttggtgcaagcatgaagaacgggatttgaagccaagtgaagggtactcatattgtcacagtgaagagtgggaggagtgggaggataggaaccaagttctccattagcaagggcacaacattcgaattcgttgcttgaatgaaataccaccttttgtttggaagaggaccaagaaattagattgagacccaagtaaacacaataggcactagtgctaagtcgatcatcagggcattatgcccaatcggtatctgtaaaataatgaagctcaagtgtggggtccagttgtagtaaaagaccaaggttggatgtccctttgagatactgaagaactcgtttgggtgcttgatggtgaacggtagtaggagaatgtagaaattgacatagcttgttgaccgtgaaagagatgtctgaccaagtaatagtgcaatattggagaccacccaccaggctacgataggtagtggtgtcttcaagaggatcaccatcatagatagataaaggagtgagagcaatcagagtgttggctagtttagagtcaagtaattcagttttggtaagcaagtcacg

SEQ ID NO: 90594 - DNA, 1527 bp, Cannabis sativa
  modified_base (920)..(920): a, c, t, g, unknown or other
ctccgactcgagctgccacagcacggccggcggggcatctgacaatacacattggcccgccgccaacacgaagtacagaaggtgctgcaggttgtttgatcataacaccgccgtgatgcggggcgcctaagatcactgccgggacacctactacagcgagttgaggtggccgaggtggaggaggaggacgaggagacgtcggctcatggcggcgcctcttcgagagaagactacttcttttgtccttgtgagcgttttggtgacctcccaatgcttgagaattggcaaactcccgcccacaatagtcacacaccaatattattgatgttctcttattattactattattattaacatttttgttatttttcaattctttattactataattagtagtagtattagttgtgattacagaaccaaacaatttcattactactgagggagcaatgtactttgttattatttgaaagagtattatagtagtagtaaaattcatatatattgtatacatatatagttaggttagggtttaggtattaggtatatatagtgattagagaagagataagtaaagcgactaaaagcaaaatgacggaaatacccttgagggattgaattaatatgtagagaaaacaataccgaaattactaaaggaaggaggggacggagtagttgggaaatatatatccgcagctacatgagtgtcttgtgctcacaaatagacaaacattaatttagtgctacttactgtttttccttaagtactatgtacagtactgttatctcttatagtagatatatacaactttttcatgtagtttcactacaatttttatattatttttagtaatttttgttttaaaatatttcaataataaatagctctaattttttaaataatattatattattatttnatatatattaaataattaaatttttttattttataacaaaataataaaaaataaaaaaataaaaataaaaagaaaaatgttagtatcatgggtgatttgaggccaatatgtaatgtcttgtataagattatctctaaagtattggttaataggttgaaaaccgtgcttccccaaattatctctgaaaaccagtcggctttcattctaggccgactaatctcagataatattatggtttcttaaataatgcattatttcaaaagaaaacgtaaagggaagactgactatatggcattgaagcttgatcttagtaaagcctatgatcgtattgagtggggcttcttgagggctatgatgagtaaaatggggtttcactaccgcttcatcgacttgatctttcatacggtttctacagtctagtatatggtaatgcatggggggcataagattggtccaatcatttctagtaggggaatttgacaagtggactctttatccccatacttgttccttatttgtgcgggaggtctttcttctctgataaagagggttgaaagaagcagccacattagagggtgtaagattgctaatggtgcgccaactataa

SEQ ID NO: 90595 - DNA, 820 bp, Cannabis sativa
attagtgagcagaagatgaggtcgctgcattgacatagattttgaggtagcagtatgaattagatttagtatctaaatttttgttagatcagactttttaactcgcgagacgaggtcctcacagaaaaaaggctcgtctaactcagcattgtccactaaatctgtttcactgccctcatcgtccgcatcatcttcgacctcgcaatcgggtagtttgatgtccactcccatctcttcaacttccacgtctggggcaattcgcgaataagcgaaactatacactgtagattcactatcttgcatgtctaaggtgattggttctgctaactcctgtaccatgcgatctatctcaccggtagatagtgagccttctcgggccttaccctcaggaatcttattgtctgatagcgaggtgggtacgacgctatcgcttttatatgggattcatcggcaaaggccccctctctagaatcatatctctggctgtctgataagttgctcatctgaaagatagaagatctttttagcgtggtgcgagtgaaatttgaacaaaaagtgtcctcacccaaataataagattgcaaaccaaagtgcaacaaaaaactaacagtatttctcaagaaatagttgggggtttcctagtatcctaagggcatgagactgtatgaacataagttagaggaaaacaactattatttcaagaactcagatagttttcatatcaatcaaaatgcatatggactgaaacataaattaaacaaatcgattgacaacaaatatagtttcaacaattttaatttagtaattttttttttttttt

SEQ ID NO: 90596 - DNA, 2790 bp, Cannabis sativa
agtttccccatgtctcctatccttgatcctctaggtctttcccaaggtcgcctagtggatgtgtttggttggttaggaggtgcattgctgcgttcaaccctttcagccatagccttgcattccaacttaacattcctctgatttgattcgaccaatctttgaaggagttgtctattttccaattccactaatggcacgtatctggtgggatcgtaagcgtcctcactgcatctttctaagatttcacccccagtttgtacaaatcctccacaatttcccccaccccccgagcgaggagtcttagtcgcatttgtcctatgtgaattttgatggatgctgagttatttctcctagttgagtatcttcgttttgaggagtgtcgtatgccatggctggaatgttcgaatatatttcaacgagggtatttttctgagtgttttcttacaagcctttcaattaaagcaccaaactgttaatacaaatttttgttaatcaataaacaagccttaaagtaataaataaactttagaataagtaattaaaaataataataaccataataataaatgacaataaagtttttaatgtagttttgaagttaattctttatactccatgagtctatcttatttttgggattttatgaagtgtatttgaaatacagaatacaagatatgatttatgaattatattctttctttctaaaaattggtcgtcccttattttccaagttctatctttatttataagagttttagggtgacagttattcccttgggatctcattcttgtaaccattcataaaacgtggacaaaccccatgtttcatatttacatcacacgggatagtaataaataactactataatcgctctttgtctttatctataaaaaattatgctgactatacttctttatcttgcaatacaaacaatcctctaaggttattttattctgaaggtaactttttgcatactctagctagtacttctaacatctttctgtgaatgttaagagaagcacacgtgagatactatcatagtgtgtaacaatttcgagatgaattatgatgggtaaatttctcttagtctttcaatatactcacgagtatgtgggtcaataagttgcaagctcttaatgaattcattatctaccctttccaccatactatcgttctgttgggtactctgtgtatcccgagatggacattctacgttggttgtttatctcgctggtattacgaaacggtagttattattcacgactcgtcattttctttaaaaagacgagttcaaatatttctaccaaacatattgtctgaggtgagtttattaaacatatatttactgctttctaacatgagctggtttattttctagcttttttacacgtgtctcactatactatttgctcgaaatatgggtataaaaattattaaatatactttaaccataaatattaatttaaaaaaatacaggtatttgattatgattcaatgatagagaaatttaaatttttaagtttaatttaggtacttaattaaaaaaaaaaattaataaatatatttttttttacattatataaaaaatatgtatataaaaaattatttaagtcaaactaaatttttttatcttttttttttgtcgatttttttttttcttaaaccggtggaacaacccaatttatataatgcaaaaataagatttttttttaattagataaaaaaattatttataaaaacttaaatttttctaacactacctatttatagataatatttattaaaagtgtactcatataagtgttctatatatatataaggtttgatttgtttattaatttcaaaaaaaaaaatctataaataattaacaatattctataataactactaaattaaattatacttgttccttaattatatccttaataacagtaataatataagtagtgctagacactcaaaatgccttttatattaacagaatatatttgactgacaagtttcatggtgcattcgatgaatctttcacatattcaattcaaagatgcacaaaacaccaccaatgttgaaaaaatcgataccactttcctctcaaattattgtttaattaaatgtagctctagaataattgaacattacccatattagggctacattcattttcaacacttgttaagtgttcaagacaaaattttcctactctttctcttatatattacaccttattatatatgatatgacatattaccttacgtataactcccatactgataattccaaatataccatgtaacacgttcatggctaacgcagcaaaagttccattccattcaaccaaaaataattattataataatattaaattattaatatatataactttaaaaaactcattcatctaaaaataaaatgaatcaaatcttttattacatatttaataatattattcgatccataccatttgcacacactagtcaagtgttaatcaacgttaaatatttttgttcaacaaatattatataactttttgagagagagggttgagtaaagttaatggaatgtatgttcggatgctcacgagaagtgaagttatataaaaattattatatttaatatttagaatttattttataacttgatatcagatcggacaaaaaagcatgcagtccttaagacaatggccagctctgatattttaccgaataattaaaatattagtatttttcattttataattaactgcatgcaatagaacaaattttgagtggaatcatatttcagcacacctt

SEQ ID NO: 90597 - DNA, 1473 bp, Cannabis sativa
  modified_base (55)..(56): a, c, t, g, unknown or other
atgttatttgtgatctttattaataagtaaatttgattatattgaaatggatttnntttagggcacaaaacccaacagcgcgcgtgttgggcacgtgcctcgagagatgttgaaatggtggcgagttgattgaacgaacccttcatttaataatcatttttcacgggacatgccataatggatgttaaatgtttaggctgatgcaatcttctcgactccccatccgttagatcttcagatgccattttggtgaatgatttggatcattcacttcgcgtggaaggaactacatttagtgcacattaagtactgaaagtgttctcatcgccttttaagtttcaaaatttttacttttcgtaccaaaggtttaacatcttgattcaacccacttctctccaggtgaagctcaattagttaagccagtctcaaaacacaaccgagcacgacgcgactgagccgtctcacacgacactcttgtccatcattcaataagtgctattgttgcttttgctagttgcatacaaattcatgcttaacgtaaaaataccgaggttggattggtgagtattgtatacgagtccctatactctgaaaatgtcggtctcatttaaatgatctgttgtaaaaagagaagcatgatagtttgataagatgacggtgtatcgaggggtcattcatccgggtggagaggttggcccgccccttcatacattgtcgaaggccgaccatcatgtgctagacatattcttttttagacattgctattttgagctgacccacttaattctgcactaactgctcttgcaggtgcttcttggtttatcatgctaggcccaagaaaggacactagttcttcaaaagctgatggcggcagcagtcctcgcgggaagaggaagaggcatgacactgccttttacactatatcttcatctcctctatattctcctggggatcacccccagcgacatggtcaacattccttgcaaggccaaccccgcccccgccattcatcttcccttcaaaaaattccctctgtgggattcacatttctcacgaaaactgtacttctcaaccccgccgctatgtagagagagggggagattaaaagagctttggaggaacgtctcgaggatgaaaagggatttttacgcaagccggccaacatactttcggtcgtgaggcgggctgaagtctcggagggcctccatgcctcaatcccggtcagaacaatagttgatgtagaggccgtggagaaatgcttggcacttaaagtggggagtgaggttgcaccctttgcagcagaacttttggaccaagtagctagcaacgtgtctaagttgcccctagagacttaggcaacctgtagcagtgttgatgccttttccttggctcacgccgccaaatagcaagcgattggggtgaggttctgatcctttcactttggtttttgccaccgtacttggccttctaatc

SEQ ID NO: 90598 - DNA, 516 bp, Cannabis sativa
ctctctctctctctctcaaattcaatcttctgatggctatggaacttggaagaaaagtgtacaaagaaattaaatctctaagccccaaatctatttctcgtgcctgaaaagttcttccacagtcgaagaaacatcactgtcaaaaatggaggccaccggcaccacggacctcctcgtctttctctggaggatcaaggctattgtggccttcatcgggcttcgaagcccaagccctgcagttctcaaagctccctttgtcgttcaccacgaagttaagaaaaaattaattaaacccacatttttatttcaccacaaacaaaatctgtaaaaaatattaaaataaaaatacaaaagagtgagaaacggaggtggagccgagaaagagagagagagacgaaaacaaagacaagtaaggatgatttactatggattttttcttgccgaagatgagaccagtagtggagacgcagtcgtaaaggcttgggcgagagagagagatctgaacatatctaacac

SEQ ID NO: 90599 - DNA, 525 bp, Cannabis sativa
tatttttgaaacttattttcattgatttaatacaaatttaattaaaaataaaatacttttctttagaagcaaataaagtacaattttaaacattacgcacaaagtaaaacaaatttgaattataaaaaaataattaaaaaacaaataccaaaatcagaggcttctctctctccctctcgctcaaacccgacgccacactcccacattccccaaacaccaccggcttcactaccgacgaccacccacggcaccccacgaccacgcacgaccaccacctaagaccatcatcgaccacccacaaccgcgataattatgaaggtaagttttgcctcacttttgtctattaatttaatttttgcatgatttaggactaaattgtaagagattattgatatgtttgtttagattatgtttgtttagatttagggtcaaacctctgtgatttgtgagtttttttatttagggtgggatcggtcggatctgtattttgggaaaatatggtttttaacaaggtccaatgcccgt

SEQ ID NO: 90600 - DNA, 569 bp, Cannabis sativa
caaatggatgtgactactgctttcctatagggtgaactagaggaagacatctatatggaataacctaagggatatgagattaagggcaagggggacttagtttgcaagctattaaagtcgctatatggactcaatcagtcccctagatagtggaacaagatgtttgacaactttatgattagatagggattcactagaagctactatgacacatacatgtactttaatagaaccaacattgaagaggtcatctacttactgttgtacgtagaggatatgttaattatcagcaaggggtgggtgtgagttctgggtgtcggtctttaggtgcttctgcggttagtggggctacggtgggggtcggttttggtgaggatgggcagggtttgccgaggaggggtagttgtgaggcttggcgaggtcgttggtgccctcccgtggtgggggagtttgtgttgtccgaggatgcggcggtcaccccggggaagggatttgcggggtttgggggagttattcgtggtggtgagggggtggtgtgggcggcctgggctatgggtgccgtgggggat

SEQ ID NO: 90601 - DNA, 762 bp, Cannabis sativa
atatgtagtagtgtagactatagtaccatagatatttatgtatagtaatatagtctatatatatatatatttgtgacaattaattaattaatttatgaattatggaacatgattgtgttgaattttgttttgccgttattatgaaaaagaaggtacgtgtgacaaatcatacactaacaagtaataagaacacacaccccatacatattatcatctatatatacataaaaaaaaatattaatttaatatcaaattctatatattttaatttaataaattatataaagaattattgtctgatctaaaatttaataattcataaaaaaaaaatattttttgcctttttattaaaaatttgcctttttattaaaaaaaaaaatttttattaaaaaaaaaaattaataaaaaaatatatatttttaaatgaggataatttttttgggttaaatagattttaagtacaaacttaatctgtttatatctaatactaaatgtgataatatatcatattggtattatattagcactaaaactctattaacaatgatgatatagtgtaattaagtattgatcgagttgtatataacttaaaaaaataatttttaagcaatatcactaattaattataactcactgatacccgataacaatgctccatatacaaataatgtatacaaattcaattccttcaagttattaattaaacaacatacaagactttccacttaatactctctctctctatatatatatatattatat

SEQ ID NO: 90602 - DNA, 2203 bp, Cannabis sativa
  modified_base (42)..(43): a, c, t, g, unknown or other
agggcacaaaacccaacagactccacgtgtcaccattcttgnnatgccacgtcagagtgcaaaatttgggataacatttggtgttgtctaaattcttccaacaacatttggcatcgtctgtgtgaacgattttttcttttgatttcagaggaaaatcataatgactagaaaccagatgaatggaaataacaacacaggatctttcaatgtcggaacagtgaatgttccactcccaggtaatggaacagcacctgtcgacaccatcaatggaggagtgggacgtaccactgttactcccctcaacttatttcttgaaaccaccggtcatgttggagaaacatcgacactggcagccactgttagatagttcccacctatcacaccagctgtggtgtccgaaggaatcatttaactaaccacggcccagtacacgaccctacaagagcaaatgcaggctttgtaggctgagatcaatggaaggttcaggacccgacgtcctcctcgagtaccaaacacgcgtttagataaccctcaggtaacaaatacaaggcgacaaactaataatccctctcgcagagaacaccagactggacaggaaggactcgagttgaaccagcctacacaaagggaacaagtcacacgaaacgctaatcgcgaggtgccacaagaggaggatcctgagcgacgcaaccctcgaagcagagcccaaccgcgaaatgaggtatatgatgttgaattttattcttcatcctcacaaagtcattctcctagtgtctatactaggtctggctccgtggagacaccacgaggagggagatataccaagttgaccggggggggtgagatctttgtgatcacctcaacgcaatttttaggtcacggtcccaaatgccctgaaactgcgatgagccccgtgatccccaagtgggcgatcaaggcacaaacaatggcaataatctagcaaatgttgtcaacctctaacgcaccagctacgactactgaggtagtgatcctatctgacatagctgcgattgcgaccgcacctgtgataactcagaacaacaccatcgtgccagggggtgttgataagagcatcctgctacgagcattgaaaatgatcgagcagcagagaaagcccatttacaagctccctgcgacttctccttttactgaagaagtgcgacaggctcgacttcccaagggatttaggttatctgagtcgctaaaatataaaggtactactaatctcatagattacttagaaaaaatttaatacaattatggaagtagaccaactacctcaattaacaaaatgtaacgctcatgatttgttcagccagttgccagaggcgtccatatcaacttgggagacattcatatatctattcttgatccacttccaagccacgatgatgtacaaaccgccttatacaaccctggctaacatcaagcaggaagtcggtgagtccttacaggattattttaagtgttttaatgctgaagtaaccaaggtcgagaaggcccccgagtcttcattagtttgtatgttaattacatgtgtcttgccaagaaccgatttttggaaggagttccaggctcgcagaccagattcatttatagaattcttcgccatgactgagccacacaagagaatcgagaattctctagctgaactagaaagggtgaaggaaaagcgcaagtcacccgtaccacgatcacgatctcaaagtcctagaggaaagaaccgcaaaggtagaagcctgagaagacgcagcccccagaggcagcaaagtccaaagcttgccaagtccccttccaagaaggagacatctccaaagagaaaaggaggaccacgctttgttaattacactgaactgacggtcccccgcgatcatatttatgtgatagaagagaaaaatagagtcttcagaaaacctcccccaattagaggaaatcgtgacaaaagagatccgaagaagttttgcaagtaccataaggacatcgaccataccactctggaatgctggttcctacaagacgaaatcaaaaaattgatcagacgaggaaaattcagtaagtacaaagaagagcggagaaactcatccccaagcggatgagaatgacgagacaaacaatgcgagtggttcacgaactcctcgcaatatcttaactattattagagatttactaattaataaaagat

SEQ ID NO: 90603 - DNA, 964 bp, Cannabis sativa
accagcaggaggaggcttccacggtggagcagcaggtggacgaagagttggcaaaggttgttgccgaggctgctggtttgaagttgctggagaggcagccgtttggtatttgcactgggcagatttgaagttggtcaagtaagtaaatgcaaagctggtcgtggcttgtgttggtttagcttttttattatgcaccacttgattccgttcagtccaaatagcccaaacagtgcacataatctgttccatttcaggtttggagtaaattgtagaaagatggcatatgtaatcacctttgtacattgcagaggaaagacgccaatcaaacaacattccagagtgcctccaaactgcacgagcatacttacaactgaaaagagcatgtccaaacgattcccacgcttgtttacaaacagagcaggtggcatctgttattaccttccgtttaaccaaagattttgcaactgggagtgcatcatttatcgctttccatgcaaaaattttaacttatggaggaagttgcatagaccagaaaaaattccaccaagatgaggcatttgttgaggtagaaccgtggccaatatcatcaatggcaactgctaggtgatagcctgtactgacagtgtagaggcccgaatggtgactatgccagattaaagtgtccctactggagaaaaaactgagaggtatagtcaatattctgtccacatctagagtagaaaaatgctgctgcagaagagggacattccattgcctctcctcggtaattagattggcaacaacactattagtaggtccggagtagtgaataggaaggaaagagttatgtcctggtatccatggatcaaagccagagagtattgttctaccatccccaatcttccaacgaagccccttgataagtagctctcggccccaatgaattcattgccatgtggatgaaggcgaatgacccaaaggagca

SEQ ID NO: 90604 - DNA, 1947 bp, Cannabis sativa
agtgtgtacaagtttgtaagtctcctctactaaaaaaaaaatcttggttcacattatttgtaacatgcatatctttttcctcaacatctgctaagtttggtttgttcttgagatattgattagttattctctttgaaagcataacatgtatatttgtcattgattatgaattttgattagttgtttgctttagaatactttatatctattgtgcatattttattttgtatttatttcgaattttcaaaaataaaaaaaaaataaaaataaaacaaagagggaggcgttggtgacttggcttgtgggctaagaaaattttgtgttttttttttgtaagcatcaacatcttctcaaaattgatttatcttgataagttaccttttaaaaattgatatcttattcattgtgttttgtccttgatcttgaaggattttcttaaattggctatttttgaaaagtatcttagttatcctagtttccttttatttttttaaaaaatatgattttggaaaaagaatggagcggtttcctttgtgttcgtgggctagtagtttctttttaaattttaagttggtttcctcttttgattctctctcacatgattatataaatcaagttcttttgtcatttattttcataacctacctgattcctattcctttgtgtttctgcttctttgttcttctttcagattaccttggctaagacaaagaacctagggcaaccaaaaagggtggaagaatctgatgctagcccctcgaatgctcctcctgctgctccaattttgttgcctgctgctgcaactgcaccgaacccaggagattcatcgcttcctcagcgtgaatctcaagccgaaacaaattcccaagcaagttgtaaggaaatctgtgcgtccccacaaattttgcacttcatcgtcttcttcgtcgaaggggtctccatcttgtcctactgcatctcctcatgctacttcaagtaagggagttgcagcctcaactctaacaggcccttccactcgcactcgtgcccagcaggcgtctctcggaaaggaactttgatctaaacgaagccatgacagacccattcattctgccaagaagctgaaaatgaatcccccttcggcttctttgagttctgaagaagaagaacctatggaggtttcctctaatgactccgagacaaaatccgtgtttatcccatctgaaaaagaactcccagaagattttggagtctcctctgacagtgaagaaactgaactcgaacccaagcctcctttgaccaaatctgctccagcacctcctcgtgcatcttcagcagccaaagcttctactgctgccaaaggcaagcagcctatgaagagttcatctcctggtaatatttctccatctcaagccatcaattccggattttactatcgtgataatgagcgtgattggaatatttatgctacccaaaagtttaaaagtgaaaggaaatatgatttgcatgctcataggatgtatggtattgttaagtttgtccaataccatcattgggaaaatactcttactggttttgagggatatattgatggaattgtcaaagaattttatgctaacttgtctgatgattttcctgatgagaattctgaattctttcgtaaagtgtatgttagaggacattggttttcatttgctgaaaaatatatttccaaggctttgcaactaccaggagatgtgacaaatgctataatgtccatggatcgccatcttgctcactgaactcactagtgcatgggttgggtggaaatctagacagagtcttcgaattacacatattacttatgctcatgcttctctcataaggtttgcacttagcaattggttcccaattccaactaaactgtggtgtctcaagatgtggcctcatttctctttcgtatcacctcggaagcatacatcaacttgg

SEQ ID NO: 90605 - DNA, 559 bp, Cannabis sativa
atttcttttaggatggcattaaggaataatagtattttggatgtcgtaaaattatattagaccatttttttttgttaaatgataaaatagattatgtactttttaaaataataaaactaggattttaagctcaattttttatatatatattttttttaatataaacagatatagaaaacgtaacaagttttgtcataataattctatattaattattattaaattttattttacaaaaaaaaaaatcaatttagagtactatttaatactattttagtaaatgtatgatataatttactaatacaagtagcctacacactcaatctaatacaaattaatattatttataatttcatatattcaaattaatctagaaataaaattaatattaaattttattttacaaaaaaaaaaaaaatcaatttagagtactatttaatactattttagtaaatatatgatataatttatcatttaacaaaatagaagatccaatcagtaacttttacaaaacatatcatctaaaatgatatttaccgagtctaataaatgaaaaact

SEQ ID NO: 90606 - DNA, 518 bp, Cannabis sativa
caatgaaattttccatgcatgcgtgtatatatgtattcatatacatatttatgtaacattaatatcatttttttcgattaagaatattaatgtaatgttgatctgtataataaagacaaaattattataaggctctttcgaaactgacatttggatgcaaaccgtataaggtatatatatatacatggtcatctttattaataataattttggtggttaattttggatttattttttattttttgagagaatagtttttgaagtatatatattagttgactagagcttaacattacatgttgaaccatatgttatatatgtttttttttcttatttaaaaccaaaaagaatgtcaaagagagagagagagtacatatgacaataatcaacaaaccagcacatatcttattccacaagttatatcatatataatagatcatgaaattataaaaattaaaattgttgttgtattaattataaacatctctttcgatttcttttaagaataaatacgagaa

SEQ ID NO: 90607 - DNA, 509 bp, Cannabis sativa
gaaaaatcacaataatagagaaaaaaaagaacaataaaataacattaattcatagaataacctcagtcaatatctatcaaatatctaaatagagagtttagctcataatcaaatccatgattaaactaaacacaaatagaaacttaagaaatcaagaaaagagaaataaactagatggaggattgttgcggatcgcccatgcttgctccaagagccttcttcttgtatttttagggttccatatggtctcccctctataattcgcgatcccctttcattaaatagagtttttcaaccaaaaaacgagaaaagatgaagttatccttgacatgtacgaagttcgcgccgcggcagccaatatccccaccgcggcgactgtagaaaagtgaaaaacgggctttgtgtagtccctcaccgcggcgacttgacccatttttttctacttcgacctctctcagtaaaatgggcataactttctcatacaaactccaaatgagcttattcaagat

SEQ ID NO: 90608 - DNA, 691 bp, Cannabis sativa
ggaattatagatatttagattgatttgggtcttcttctcaggtgacattgccagaattaatagtggttcttcgactgtcggggttgattcattgttgttgtcctcgtttgatcgtacgaagggttcaagtctctcaagtgtggatcgtgcgtcttgaaggtgagtataaaatgtatgtgtaatttttttttttatttaggctgtttaaatacttaattggccggtacactataaatttgtaatattgttgtcttctttagatataaccgaaaaaaaagtcggttttttttttatttttttttttatatttttacgaaaatccacataaaaatttacataacaatcaagaggataatctaaatcgcaaactaaatctacataacaatccacataaaaatcaccgaaacaacctaaactataattttttttaaaaaaaaaattaataatagtttatgaaataatttccgaaataacaaaagccagttttttttttattttttggtagccggtaagccaccaaccgtgggagcaatagcattgttattgttgatcacatacacacatgctttagaactattagttttcatcatgaatttaccaactacatccaaaattagtcaattttctttccacaaaaaataagagaatcagtggtcctttcctatgcacacatcgatttaactaccaacta

SEQ ID NO: 90609 - DNA, 513 bp, Cannabis sativa
ttttttatgaaatgccgaaacggcgtataggggtgcattgaggtgcattgtagaagtatcatcaattttatatattgttacagtgaacattctattacaatttattagtcaagtttcatatctataaacatatgtaactatatatattttttatttttttttcaatgatgatgttcgttatagttataacatcatttttataaattttaaaaaagttgaatagtttacatgtcaaaaaataggtttgaagttttttaaatacgcgtagtaaattgagatattaagaactttttttcgatactataaactattcagaattttcaaaaatttatagagatgatattataactttgttttcgatattatttttgctaaacatataaaagtaaatacttaataagttttgaaatagcttaaattaataataataataataataacaatattattatgctttagattgtaaagcgagtgctacgtggattggagtaataccctcttgtgctagtcatg

SEQ ID NO: 90610 - DNA, 966 bp, Cannabis sativa
  modified_base (910)..(913): a, c, t, g, unknown or other
attaggactaacggacaaataaaaagtgtgaccttgaggactattgccgctatttttgaaggttggggactaatctgcattaacataaattttttgggaacttttgccgcaaatttccctatataaatcttagttcactatattacataaaaaagttatagcacaatcttagtttaatatatttggatcctccttgtagtcacttttgtttttttaaaaaaaaaaattcaaggttttacatatattatatatatatatattaataaataactatatatataattatgtacgtagtgattggtttaaatttatagaagttattaggattatttttttagtaattttttttagaaattactcaaatatatagtgtatagtaccaattttaggtgtaaattgataaagaaaaactatcacgataataagaaataaatcaaatattttaaaaaaataactaactagaatattataagttaaaaagtaaaaaaatacaattattaattattacgtgtcttcttaaatttatacaactattatcatagattaaaaaaaatgataaaatttttgacatagtatattttttttttcacaaaagtgttaaaatatataatacttgaataaaaaaactattacaatcaaatattactttaaattagcttagttggcgagaaaattatttattatttgaaggtaaaagtgttaaaattaatattgtgtcaaaatttaaacaatatttttaaaaaaatttctaaaagaaaaagacatgttttaaatttttccctagatctctaaatatcttgagatttttctgttctcctgagatttttttttatatgtcttgtgatgtattttttagtgagtttactcttaaggttattaaggttttcatggttacatttttattgtaacnnnnatggttacatttttttaagctattggattattattaaatggttgtgattaatt

SEQ ID NO: 90611 - DNA, 1332 bp, Cannabis sativa
ttattatgtatagaatttcaaatttctcttatatgtttggtttcatgaagctaataaaatggtaatactaatataattaaataagaatggtaataaaatttgattttgatgtttaatttgtttttggaataaatattttttatataaaaattgttggatgaatcaatatatcaatcatcaatatctcaatattatcgatcatcaatatatataggaatgcacacaagtgatgatatggggatttttataaaatttctttcccttttttttgttttctctaattttcaatttttttttatttttttttattttttaattagttttctttaataaaacctttcattttttcatctcaccttatttaataattgtatataattacctcatgctttttgatttgtaatcttagcaattacactctttaataaaaaatttatagcatttctttttctttttttttttttgaaaaaaagcgtgattatattactaaataaaaatcgttagacctcactgtcattatataacaagttagaaggaatggaatcaactggagtaaccccaaatttctagtgggagaactcttagccacattatgggcaacaagattacaagttctactaatattattgaaaatacaactagtaaaaaaaggagattatctattacaaaatgagacgtagttatccaatgcccaacaggacgtcttcttattgagagcatgataactaccctcgagtcactctctacgatgacaaacttggaacctatatccttcgcaattaatagagccaagcagctggtcgccgcctcaccacatagcgcatcaaagaagtccagccgagccgtttgaatccaaaccaccctactaagatggtttctggcaacaactgcagtacacatgctttctaatcccatttttacatcacaattcaatttaatccaatcctcagggggagaaaaccagacctccttccggcataaatcggggaaagaaaataaaaaagcatgtagatctacaaaagaagtataaatagagtcaatacacttcttcacatcaactgtatcattattatgtacctttgcattacgggttcaccagatcgtgtcaacaacaatcgaagcataaaggaaaacctcctcagtagcaattcccttgtgtttcaggtccagatgaatttgacccaatcccacgagcggatactagtgtgacaaataggataaatgccccaaggcgaggacctccatgcatgtaattgttgggaatattttaccagggtctagatttactaacaagtatgttgaattaacattctaaatatgaattctctaaaa

SEQ ID NO: 90612 - DNA, 615 bp, Cannabis sativa
caacatccacttttcgatcccatgatgtggacattttctgattaaatccttgaacctctcccaagcctcatagatagattcattgtccaattgacaaaaattattaatttcccctcgcagcttggcagcttttgctagaggaaaaaacttggacaagaactttgtcgccaaatcagtccatgtagcaatggagttgggtggcaaagacaccaacgaactcttggctcgctccctccgcgagaatgggaataatctcagacggatggcgtcatcattgacttcatttactttaaaggtctggcataactccataaagttagacaggtggagatttgggtcttcagagggcagtccactgaactgaactgaggattgcaccatttggagtatggcaggctttatctcaaagttgttggcatctacggtagatggtcttatacaagattgaacccccgtcaaaattggcagaacatagtccctcaggctacggtcaggtggattacaatcgtttgccaagtcttctattgctcccccattatttccattgtttctgttattggcgttgtcagccatgtctatttctggttcgaccctcagtgtagctctttctgacct

SEQ ID NO: 90613 - DNA, 978 bp, Cannabis sativa
aaaaaaaatagaataaaaaaaatacttgtaaattctaaatttcaactttaatattaaaatataattaaaatagtgagattgttagatttaaggacttttgcaaaataattttttatttattttatttaataaaaaagacaataaaaaatgggtaaatactattttcgacgttttgcaaaaattggctattagaccctctattttgttaaatgacaaaatgaaccctatatttttcaaaatggtaaaaataggaccctaagctcaatttttaacaattttatttttgttatataactaactttaagacaatttctaacatgaatagatacagaaaatgtaaccagttttgtcataacatctatagatcagattattattaagatttatcttgataaaaaatcaattcaaggtcttatttgtacaattttaaaaaatatagagtctattttatcatttaacaaaacaaagagtaattaataacttttacaaaacataaggtccaaaatagtatttactctaaaaaaacacacatttgcttatacaagtgtcttttatttattatataaaaaacagacttataatttttttgaaattattaaaatttatatataaatctacatttaatttgatacacgtgtgtctcccagcaatatatatataaatagggcaatcatttttgtccttattagaagggaccttttgttttctttatatagagaaattttaattcaattctttttcatatgatgttgtaattatatcattcattttactaattttcaaaaaatttaaaataatttatgatgtgaaaagaatagaacaaaatcgttagttacactcgtataaagaaatttgaaaactaacacgtatgcaactaattggtcaaacattatttttaacactctaaaatttgatatgttttcaaaaagcggtgggatgaaatgtatgctataattgtaagatatacatcgtcatcaa

SEQ ID NO: 90614 - DNA, 757 bp, Cannabis sativa
  modified_base (406)..(417): a, c, t, g, unknown or other
tttatatcaaatttaccaatccaatttatatatagacacactcaaatttagttatgtgagttttgattaagaatatagtaaattacaatatatgcattatcacatacgctacctaattgaaaaaaaattaaaattacgtatatacatataatcatattcaaatgacacacaatataacaataaatagtttttttaaaagatcaaaatctctaactctagttcaaaaattaaagaaatacattacctactaaaaaattaaacatacatgtattgcacttaatatcacctaattaaacctaattaaaaagaaaattaattgtacgtgcattgcacgtaacatcaacctagtagatatatagataattgatatagataaatttattttataacatattattattattannnnnnnnnnnnttattattattattattagaattgaatatagaatttgagtagacatattattaaattttaataaggtatttgaataaagaaaaagtaaaaaaaaaaaattagaaaggttgagaaatgagatattttacaagtaagcttcttaaagtgccacatcatcatgttatgaatttgctttatatatatagataaaaaaatagatagatagatatagaagataatgtatggaataatataaatatgtatggtaaaataaataaaataaaattttggtgagatattttaaaagatggagtagaaaaaataatttttcctttaatatgtagttataattaaaataaag

SEQ ID NO: 90615 - DNA, 700 bp, Cannabis sativa
aagggaaaattgcaaatttttcatacaattttccccacctgcattatcaaattttagaataattctatattatcaaattttagaataattctatataatagttaaatatataattccaaaaaaaaattaaaataacatttttaaaactgacataaaattagtaatctattaactaatcacacaataccaaaatcgttaatagaaatttgtaaaatcttaaaaagtgcagtcatgtgactacatgcaaaaagacatttgttaaatatctcagaataaaaaaatgaattattatatgaattaattgatcaattataaagttagatgagattaattaacttaaaaagaacaaaagaataaagctatataattagtacctatgtgtgcaactaaaatttcatatgtcatattaaaaaaccagctcttaaaaaatacaatactccaacatatgaaattagtcaatgctacattattgtttttctaaaattaaaaagcaatttatattattaatgtattaagtaatacaagaaataaacaagaaatatatcacataattagaaattgtacagaagtattacaaaagaaaagttccataagtcaatgctaaaatttatctataatctaaatatatggcattttcactatgcatagaaataagcaacctcagaaataagcaacctcagctgttgtttggtttcatgaa

SEQ ID NO: 90616 - DNA, 518 bp, Cannabis sativa
ttttttaatttttatacttcaaaaagcattttttatatatatttttacagaaataaacataacaacttaaattgcaactaaaatccacatggtaactcacataaaaattattaaagaactcaaaccataaatttcttttttttttttaaaaaaaaaataatatatagaataattaaaaaaaaatccatgttaatattaatctttgaattaatatatacaagcttatttgttttacttggtttaaataaacttatttgttttactctatttttttctttattattctttcgctatatgtatacggccaagtcatatcgcatagttatatattgttttaatcaaaattaaaataatcaatttttttaatggaatgaaaaagaaaaattgcgcatgcaacacgctatattataaatttgtatacaaatttaatttaatttatgtaataaaacttgatataaaaaaaaaaggacaaattaaagtatatgtatatacaggttcagtttggaggcatatatata

SEQ ID NO: 90617 - DNA, 1309 bp, Cannabis sativa
ttaaataaattaatatttaagtgttcctcattacaaaacaatttttcatacttaatcttacgataggcaagaaaataagcactaattgttgaaataaatcatcaaatttacgccacgatactaaaatcatcaaccaaatatgaattaaattcatgcaattagtattgtgtataccaaaaaataatagagaattaaaaaacatgaaaatggtagaaaaatggcccaaaaccaccgctgcacgcgcccccacgcgcccattttcttcatcttttttttttaaatgatcgtacgacatgtcgtttggtggaagaacgacaagccagagggtccaaaaaacgaccagtcattcgcgctgaaaagggggctaggtcgttgtgcgtacgacatgtcgttttaataaaacgacatgtcattttccccaaacgacatccaacacaaggtcaaaacaacctgccatttttttttctcggctgggctgaaccaatagggcgaacgacatgtcattttgcctgacagaggcaaaatgacatgtcatttttcagtagtccctgtcacccgaaaacgcacacacgggtccgtgggtctgaaactcggatcggcgcgacccggttcgtgacccggccatatctcccacatccggccaccaaattcgacgtcgtttgaggcgttttgtcccatttttaatcctctatcatttttcaatatccatttcatccattttttacaaaataaatattgcccataaaacattgatctaaaaatggattttacctccacaacaatggaaaataaacaaaatatccatccaaaaaagtatataaacccatttaaaattgtaaatctcatatttacatttcatcaaacatataaatccgaaaaaagcaaaaatataataaaatttcagatttgaaaataaaatgggttagttcaaaaaatggagttctaaaatcaaatatactagctcttgataccaattgttaaattatcacatagattatgagctatccaaacacacattcaacattaatcatcattgctcataatcataaaactaagatcaatattttatttagaacatccaaacaaatacacacatacctcccattaagccatccatgtgagctatgttgagcatccaagaatcttcaatgtgaggacaaacttaaagtgatattagagagaacactatgtggagctatcccctctttcactcattaccattaaccacactcacaaaaccacttcttcacataagacacacacacacatatatatatatatatatatcccatacccttataaccctaaa

SEQ ID NO: 90618 - DNA, 5110 bp, Cannabis sativa
  modified_base (71)..(72): a, c, t, g, unknown or other
gaaccatgcatcataaaataatttatggtctttattaattagtaaatctaattatattgaaatggattttnnttagggcacaaaacccaacactgataccatgttaaatctcctagccattattaaacataagaaaaatagagaaaagaagaagagaaagaaagagagccaaaggtagaagatgaaagaatatctcaattattcattgatcaatggtaaagtatttatacaagtatagctacacaagaatcatctaacaactaatgacatcggcaacaataacagaataataaccactgacagttagttgtgtaacaaacataacacatcagtaacaactctgagctgtcaatcagctctaacaataaggaagctcagatagtttttgttttcattttaaaatggatgacattgtaagttgcaccaaatcttaccctccatttttttagagaatgtaggctaacactatatatttattacaagtttctaaagaatatataaatcaatcaattcttttgtatttattgtgcttctccttttccctactaataaattacttacagcattttgggatcaaaccatgtaaatcattcacatgtcgcccaatttgagaactggcaagtatcgtgaaggtacaatatttttcatgtatttaaagtatgattaatccaaaaagaaaagtctctttgatcagttacttagagaacaaactaaagtgtagacaaattacactaccagccttattcaaaaacaagatacagcttggtgtggttatccatcaatgacattttagatcatatattctattgttattatacaaaacattcattctaacttgccaagccagatgcttatgcttttctataaacagagtaaaaatgctttaaaagaaaatgaccatgaaaaaaatagacttttgctttatacatgttagttattttagttaccattcaaggtttgaacaaacttggctagtgaattttgcaagtatgcttgatattcttgattgacattggactccagtaggttcaaacaacaggcagtgcttagaatttcagttccttttgaaggatgcactgccttgagtgtgctactactcgacaatgaggattgaattgtgctttgatcagtagcttgtatactgtttgtgctttgtgatgagccaagagaaggtgaccctctgtaatcataagccctataagtgagaacatatccttctaatattttcaaaacctgtaaaagcgttcacatttatttctgagaagattttccaaggaaacaatatgtcagaaaatgaacaaaaggaaaaagctattctaattgatgctaaaatcctaacataagaaacctttgacatccttggtctttgttcagggtgaggtgagatgcataaacttgcagcatacatcatacattctacttccttcttttcataatttctctccaaccgagagtctatgacctcatcgattttcatacttccaagtaatggggagccctgcagcttatagttttttcatgttaataaacaccaatagtattgatcttatagaaatttcttgttgttatacagttaacttgcccattctgcaacaaattgttgtcctgtttttcttgaaaattcagtgacgctgaatccacttaagagctccaacaaaaccaccccaaatgcatatacatcagctttctctgttatcaacccactctgtgtgtattcaggggctaagtacctacaaataataattcagtttataggcttgagatatgaaagaattgatagtttttgtaggaagtaaaagagtctagtaccccaatgtaccaataacacgagtctcctcggctgactgaccatctacttgccatcttgctagcccaaaatctcccacctagttatagaaaaaatattattacgatgaaggcttcaaaacatggggactcaagaaaaagtctgtcgaagaaattacatggaagcaaaaaaagtatattcagtgaaaatactaaccattggttcatagtcatgagtgagaagaatgttgttgggtctaaagtctctatgtacaatgcaaccaacccggcaatcttcgtgtaggtatctcaatcctcttgcagctcctattgcaactttcatcctacttttccaagacatcagctctttttcttgtgatcctgcaaattattaactactctctttgaatttccaagagataagttaaacttaggtggcatttggttggagataatgaaattgaatggaatgaaaagaaaacaattttattttgtttggttgtatttaaaagtattagaatatctttccaatggaatacttttctatcgttttgttgaatggatattccattattatataattttttatattcatttcaaatttgattccatttttattcatattttcattctcattcctattcctatattttcattcctacaaccaaacgccaccttagatatgtaaagaacttcgaaacagtttggcttgatcatcttactatataagtgcctgtctagtgaaccattgcaagcaaactcatacaccaaaagccattctatttcagtgcagtaacctacgagcatcactaaattccggtgttgcgcaaagctcaacacttcaacctcagagcaaaactcagatgctccttgagcacttaacatcttatgttgcttgacagcaacaacttgaccatcaggcaacacccctctgtgtacaggaccgaaactgccttctgccaagaagtttttgcttgagaatctgtctgttgctctttctatctctttgaaactgaacttcctgggagccttccaaaaaacaggagtattatgcttacaaatagagcaaagaggtggagggtatggtgggtgtttagtgtataaggatacggtttttcttatacttgagattctgttcattgttttagaagtggagggtagtaatggcgcataaacttctctttcgttctcagttaaagagtctcttgttgttatcagttgtttcgaagggaatatcccctcttgagcttttctcaagtgcagtaagtgagctgatcttctaggtgaaaccattgtcttctgtgtagtagtatcattaatctcatccatgtctgtttcaaaacattgcaagtcttattaacttcattctaaaataatatgattattaactttcttcttcttatagttttagaggggaatatctcaccagcttttgctttagaaagtacatcatagcttctatttttctcatacaagggattggccaataacttatgatgtgatttaccagtgaaaaaactcgatgccttattaaatggttgaaaagtactgtgaaaatgaggcttgctggaagtttcttgaggctctactttctcagaaaagtactgggaattaagatcaagatactgtttgcattggttttttgtagttgaagggctatgcttgttaaaatgatctctacatgtactagatattgaatgcgaaacatctgtttcgaaaattgaacttgaagtagttggactgcttctagttgtagcggtactggtgtactcaggagcctttcttggaagcaaaccaagcatttttgtctctactttcgtttgatgatttcccctgaaaagtttctttctttttggaagatttacagatttgaggaacttcggtgtagcatggtctatgagcaaaatattgcagttcaattgtttgaagcaatgatcactttctctcttcaagcatctgtagttaaaagtctagtttcaacattgaatcactgtttctaaccatcttactgaaaatgtctagtttaacaagtttaagtttccctaaaatctctcaaaagaaatatgaacatacctgtcaagaattacccaagttgcttgaagctcttgagctttagaagtaactgttcccaattcaacactagtcacaacttttacttcagtatgcacctattagaattcaagttcgaattagaatgaacatagaagttttcattcttaagatttttgcaaagaaaaataagagtattacctgctttagatcatatgctgagcagagttgttgtatgatatcagtgcagacattgttcactctatggaaagcatcatgatcaactccatttataagtattatatcatcattcgcatcaccttctttggtttggcctatacataacttctttagcaggcctagttacgaaagatgttggtaagagaccgaattggtagcattatgcataaatacaattctcatataaaaaaaaaacttacaagaaaagaactgagctgtttttgaatgatgtaattgtatacttggactcgttgcggaagaacacacttgagaaggaagaagagctaaaaggattaaagtgtccgaagctctaaccacattccacactgcccattgaagtgcataatttgtgatctctttactagcatcaactgccactaaaataacctctccatccattttttttttcttgctgaatgggatctcagtatttttagtatgtggccaataagacatgccttgacactcaatgttataataggttatagttttgtacatttttgtgacatgttcaatttggaagtttgactattaaaatgggctccaaagaatgagccaaaggaaaaaacatggcattgcataaagtatgaggcataatcaaaagatccgtacaagactccactatacaagataagagaaacctttgaagtgttttttctcttgtctgttagtatttgaagggagtagctagtgtcaatcatcaaccaaagctttggaattttcgcttggactctttcataataatgacatatattataaggaactaactatttattttttatttattttttcattttggggacctttcctatattgtaatattaaacaacagctgaggcctaattattagttacacaatttgactgctcattcattttacttgacatgatccattgtcattaaacaaacaaaaaaattggaactctgtttggattcccattaaatcaatgatagggttggtgggacataaacaataaatttagaaataaaaattgttggagatcctttttgtctttatgaggttagactttctata

SEQ ID NO: 90619 - DNA, 853 bp, Cannabis sativa
agagagcttgttgtgggataaatctaaagagtctaacttcttcaagttcccaatctccatagggattgcatggttcaaattattcattgaaagattaagttgaaccaattcaacgaggtttgtcaactcttgaggaatttttccagttaaattgttactagagagatcaatcactcttaacaatccaagagtattgctatactcgcgataaacacctttccatacaactgatgtaacaatttcataaggtagaaacacatttgtagagaagggaactcctatcgaaatatcagttatgttctcttgcctatcatttaccatagaagttaaattgttgatgcaggaaggaataagtccagctatagtattcgtggaaatatccaatattttaatcaactgaagatgacacacactggatggaataactccatgaaaacgatttgatcttatccgaagaaaaatcaaatttgtgagtctttccccaatccaagatggtatatttccttgaagattattatattcgacatcaagaacttgaagttgtgtacaattctttaaagatgaaggaagatttcctgagaaattattgtgccccaaaagtaaatattgaattccatttaacaaaccgattgatcttggaattattccagacaaattattgttatctgattttagaacaatcaattccttcatattccactggcaatcgggaaggcttccacttaacatattattggaaatgtcaagaagttttattgatccttgtaatggataacaaagaaaagcccttagatcagtaaatctattatttgaaagaatcaatgtgctgacattcgatagatgaggtggaata

SEQ ID NO: 90620 - DNA, 593 bp, Cannabis sativa
gtaaaataatttccaacatgttattgggatgggtattcctctttgagatgttgagatgatgcagagaagaaagatgggttcattaaattttgtagcttgaaattgccttaatactcaatatactttggtaagattatgaatcttgaggaatgcaaggctaaattcttgagcacatgctcttgtaaaacttatacaaactcggatatcaatggagaaggtagagtggctgcttcgtctgatttagagatctgctttatatttaaaaatttcaatctggcgaataattgtgcatttgctatcaggctattagtacaattactttcttgtaactcttttagtgtaaatatagcatgcttgagcacatgctatattttttgaacaatcatcaaaactttatacattatttttcaatatcataacattattattattacttgcaatcagtttcattaacaatagtcatttaaattatagatcaaagtagtaaagacaccattttaatttaaatatatattcccattaacaatctacaaactaactaattcctttacactgataataaacagtctaatataacaaaattcttggtttat

SEQ ID NO: 90621 - DNA, 815 bp, Cannabis sativa
aagtacaaaataatatagattagggcacaatacgacatgatgctacaaattgatacgagaagcatgaaaaacacgatacataaacacaaatagattagtttgaaaaataagacacaacaagcctaaaaaacacgtcaagatactttactcacttttttccttaaccccacaattttttattttttattttaataaaaaaaattaagataatatatttatgagcattcatattagccaccaacctaacatattttaaaagtggtgtcttgtgattattatattaaattatatgaaattcgatacttaattacattaacagcaaaatggcaataagaagagtgagtgctaagtaccacaaatagagccaaccttgaggtgggacgaaagagacgtccgccttaagcccccaccgcttaggcccccatttcaaaaaaaaaaattataatatagttagtaataaaataaattaaaataattataatattaaatatgtgttgcaacttagtgataatttgattagtttaaccactaaaaggttgagagttcaaatcttaataatctcacttttttttactcttatttttatttttacctaagatccaaattagcaaagaatcaaccctaaccacaaataccttttagcatttttttaaatttttttatttacgttaattgctataattaagtaaattgtggagtaaataaatggtgatacttattattatgagggttaaaccttttaaattataaattggacactatattttcaaaaattgtacaaagtatcattattttttttattagtataactaatt

SEQ ID NO: 90622 - DNA, 2125 bp, Cannabis sativa
ttatatagaatagatataattatgtggctaatatgtatgtattctatggatggggtagctgcactttttggatcgataagtatgaagtatatatcccgaagctgccataaaattaaggacattaaagtgtaatggcactattaatacccataggagatgtacccatataatgggtaactgtttgttttctttattatttatatatttcaatggggcctgaaaaattggtgtggtctagtaggaaattattatttttggattggtcagttatatttactataagcaataatatatgcaagtgacgagactagctataagtgtcacaaccaaatgaactaaaaaataaaccataaagccttaatttggggtataaaataagaattaaaaggaactctattactagagttagaaacgtttgtttaggaagaataaaaatacaaaaataagaatatgaatgggaataagaataagaatagaatgaaataaaatttaaaatgtaaaaaaaattaataaaaaaattattaaattttttctcttcatgtatttgaatgattttttctttcatttcaaaataaaattgtcattcttccacaatagtggaaaaggttattttattggaatgatattccaacactttaatatgtaatcaaacaaaggaataaaataaaaattgtttatttcttttccatttcattacctccaatcaaacaccacaaaaaaaaaaaaaacctataccacatatataccgatttgtttctttattttgtcttagaagagagtatttttttttacataaaatttagaagagagtatgaagtatgctaatatatatgttacatgtaacatatgttataatatttaattatgtatataacaaattttatatttcagattatgactaaaagaactatgctggtgaaagaaagaatgattaattaataaatagtttttgttgtaacacaaccgtattatattataatatttatatttgctttttctcaaggaagaataagtttgaacaaaattgaagcattttcttctagtaaagtagtgtgaagtgtgaacatcactaaaattaacttcttttttcttttgtttgatcatgaattatatttattattcttcatggaatctttaattaaaacaaagaaatacagaatctctttgtttatatatgggtcctcaaataactttggagattgtaacatacatacttgtatatattgtagccagtcattgtttttagcccacaatagtatagcctcccacaatggactttcttcttccccaaattcatacttgtgctaagaagtttctgccatttgaataaagaacccttcaaactctcctatttatataatagagtagagacgattaataagaccatatttacatatagaacaaaaacaaagaccagaataaagtcaaaccattttaagccctctctctttattgttgttattttaatttatatcaagtgtggtccatctatatagacactattttccaacttttggaaatgtcaatcggagacctatatatgtgtgtatatagatattatataaataatttctctaataattttgtttaatattgcaacaataacaaggggcatgtgtaattagttataatattattttttcatttagcttaatatgtaagcattatttaattatcttacactaggactataattttatggcttctattagtgtcacttcaatagctagtattaggtcaatgactttatttttttaaatgtcactatggtttaatatggtcaatggtttgaaaatgtccaataattactaatatctatgtatagtagtacgtactgatcaatttactgaagtaataaggtagcccaaggctcaatgcatattcgttacataaaaaagattgttgttgttgatatctaaatcttattcattaaacataattcgaggtgcatcatcatcagtatctttcatgagtttgaatgaagtagattcttcttaaaattctgtgtttcacagtgtgtttttaatcttttccctaataatattaatatattttgtgttatttatggtccttacttttgtttttatattgacttatatactttcttaagaattgttaattaaaa

SEQ ID NO: 90623 - DNA, 599 bp, Cannabis sativa
ccttaatttgatctctataaatgccttagatgagcaagggtacaaaagctacttcggcaaaaagaattggaaactctgtaaagggtcaatgatcgttgcgagaggaaagttatgttgttggttgtacaagacttttgggaaggcttgcaacaacagtattaatgtagcaaacaacacttcaccaaatttatggcacaaacgacttggagatatgagtgaaaagggttttcaactacttgcaaagaagaagttcattcctttcgagaagggtacaatattggatccttgtgagcattgcttatttgggaagcaacatagagtttcacttaagagttcctctgctaacaaaagggaggtactggagcgagtttactctgacgtttgtggtcccatagaagtcaaatccttgggaggagccaaatattttgtaactttcatagatgatgcatcaagaaaggtgtgggtctatatgccgaagacgaaagaccaggtgtttggatttttccaacaatttcatgctatggtagaaagagaaactgggaagcacttaaagtgtctcagaatagacaatagacgcgaatatacttctcatgagttta

SEQ ID NO: 90624 - DNA, 622 bp, Cannabis sativa
caccaagaaagtggtttcttcacccagaaaagtggtttcttcatcaaggaactagtttcgtcacacaacaataataaagattataaaaatagaacaaaaatgatatacaatgaaaataagtgaaaccagtttcatcaaacaaccaaatagagaaaagaaacacaaaaaaatactcataaatataaacaaaacaacacacaatgcacaacaataatcgaaaacaaaatataagtgtgaaaaccagtttcaaacctagaaacaaaataataaagagaaacttaaaataaaaaatatacaataaaatagagcaacctcatcacagaacccttaaaacctgtgaaatcagtttcgaacttatgaaccctgtgaaaccgaattcgacactatgaaaaatcataacaaaatataaatgctaaacaataaagttaactgaaataagtcatcggaattggaatagtcgctggagttgctgccagcaccgagaaagtcaccggaccggagttactaccggcgccgaaaaagtcataggattgacattatcaccggtgatttttctggcaacaatgccaattttaacgaatttcttaaagtttgctgtcggtaccgaaaaagtcaccggagt

SEQ ID NO: 90625 - DNA, 611 bp, Cannabis sativa
  modified_base (37)..(66): a, c, t, g, unknown or other
taacatacatgtaatcataattcacttctaaattgannnnnnnnnnnnnnnnnnnnnnnnnnnnnnagggcataaaacccaacatataaagttccattaattgtactctggttttcactcttaaatagtatcaatgaaatctctctttctctctcaattgtcttacacattcttctaactaaaaggttcttattttcttacctcgcttttcttttctaccatttttttagtctttctaattctcttactaaaaatttcttttaccccagttttgtatcctgaaaagggtaaaactacaatgtagaaaagctagtgagagtgatgacaaagaatatacaatcaaaaaagttggtaataacttttaatcgatgaacattttattctttatttttgctgaatcgatgaacaaataactagcattactaagtaaattgccattataaaagaagagatgggaaaaaaatagtaaaataatatataagaagtagacctgaatatatataagagatacttatggccccatcaataagtccatatcgaaaccccaatccctgaaacaagatccaatccaacaccttgatgttctgttcagacgagagagagagagagag

SEQ ID NO: 90626 - DNA, 1037 bp, Cannabis sativa
tattaccggcggaccccgccggtaataacttttaccagcggaatctcatatctttaccagcggactgttccgcccctaataatagtatttgttgtagtgttctacaaagcatcctctccaagaatccctattgccaagtgaacctaaatttgtcaagcaagcactcaaagatcccaaatggttcgcatcaatgcaaacagaaaacaaagccttagttaaggcaaagacatggactttggttccccatgagccgtatatgactgtgattgataacaagtgggtctataggataaagcttaatgctgaaggatctctcaacacctataaatcaagacttgttgctaaaggctatctacaaacacctggaatagattatcaagaaacctatagtcctgtggtcaaaccaacaacagtgagggctgttctaacacttgcagtgacttcacattgggatgtcaaacaactagatgtaagcaatgcttttcttaatggtgaccttcaagaaactgtttacatgaggcaacctcatggttttgaagatcctacaaagcctaatcatgtatgccgtctacacaaagcaatttatggcctaaaacaagctcctagggcttggaatgacaaggtgagaaacacattattagaatggggttttgtggcctcaaaatctgacacatctcttttcacttatggttcgggcaacaccttcattattttactagatgatacactagtaacgggtccaaactcaactttaatttccaaactcatccatgatctcaacaactcatttgctctaaaggacttaggatctcttcactattttattgagatagaagttcatcgaaattcagagggcatgtacctatctcaaagcaaatacatcactgatcttttggttaaagttcaacttgatggtgcaaaaagctgtcccaacccgactagtgcaactttatttctattctatataaaatgtggctatataacagaatttttagtttatgagaaattattgggtggctttttatttatatataata

SEQ ID NO: 90627 - DNA, 1115 bp, Cannabis sativa
acagcataaagtaacgagctttgttgttagcagcttaccagcggtcaaactttttctttactgtcttggttacgttctcacctggttgtgcaggagcttcttcagtgaacacaaacaatgaattttcaccaatgagagcaacattaatattctctctattaagcaaagttagctccaaagagcttgttgtcagtccatagtgatgtaatagggttgttcatagtgatattgaaaattacaaatatcaataaatagaaatcaaatatggtttagtacaaaattatacacatattcgaaaattagtaacatttaacacgtagtaaagacatgtgaaaatacaaaacaaacatatcctaagtaatttttaaggtttttgttaacgcaaattttcgttaacgaataatgagcattttttcgtaataaattaaacacagatgtatcagaaaattgagaagaataataatatatagtaataatgtcaccgagaattttacgtggttttgcagttaaatctgcatagtccacgagtttattttgttaaagatatttctggatacagaattacagtttgtgatacttttttctctaaaagtttttccgtccctttttctgtagagtctgcctctatttatatataggaacataggttagtagttatttacatttgaatttgaattactgttttcaagaaatgtgggctttgaccacattctattttaacacgtgtagataatactagaaaactgcctaaccgttatcactcctatcttctaggcggtcgacgctgaggtggctaagaacatctcgctaaaggcatctcactttgtacatagatgaccaataatgatttggtttattcatatgccttctagtaatggcatgagcaccagtgtactgagcaaacttaagaactactctttgaccataatgcctcgcagattggacaatcatgtcctacatgctcccaagttgttacacctaataattataatgtggattatacgctaagtgtttcaacaactaattttcctcgtcaatacttccttatatgtagtgaggtaaatgtctcgctatacattgtccgtagttcgctcaggattatgccttctgaggca

SEQ ID NO: 90628 - DNA, 514 bp, Cannabis sativa
atgatgattttccaaatccaattactaattggatttgatcggatgagaaaaaaaagttggattggatcggatgcccacccctaatcttcataatgcaccaaattattattattattttacttattttatttaataataataataataataataataacaataataaattgtctctttaacaagctatggttttttttttttttttttttaattctaatggcaccttattaagaggtattcatattttttcttaaaataattgcactttataccattttagagttatgcgtgcttaacttaactttgcgatttaacaatggcggagccaaaaaaaatttaatggaaaagcaacatatgtaaacgtataaaaataattgttttttattgagttaataattttttacataggccatggcattctctagtccccttatttctgtcgttggcaattaagtttttattatacatttttaaattctgtattttacccaatagttaacaatatattgaccaa

SEQ ID NO: 90629 - DNA, 533 bp, Cannabis sativa
tagaaaagattacattgaaatagagttttatttagggaacaaagctcacctccgcaaagagtcttggttatttctttagcgtataaagcagttctttgatctaccatggatttgtggggggacttcaatgagattttatctatgtaagaaaaaagggaggggtagatcatgatggtatagcgatgagtgaatttcaaaaagttcttgatgactgtatgttagatgatttggggtatgaaggtccgaccttcacttgggtcaataaaagacaaggcatttcacatgtccaagaacagttagaccgatttgtatgcaatcgtgcttgatctgagctgtatccttcagtttgagtgtctaatggtgattttcttcattctgatcatcgtcctatagtcgttaaactagagaatattgtggtacgaaattaggagtgaattaagtggtagtattgttttgaaccacattggcttaaagaggaggaatgttgatctattgtgtttgacacttggcaaagatgtatgttagatgtggtt

SEQ ID NO: 90630 - DNA, 617 bp, Cannabis sativa
  modified_base (99)..(100): a, c, t, g, unknown or other
gatcaaaatatagttgtttacattttgaataaaaatgcaagcaaatgtaaatgtattaagctccaatgaaaagagtacaaggcatttaagatagaaaanncaagttgggctacaaacttgtcttgacaaaaatgccactaggggaaaaccattaagtcttcttcctaaacaaagaatgtaagggggtcggtaaactcgagaaagatcgtcttcatatacctcggagaaagatcgtctacacatagcttggagaaagaccagctacacatagcttgagaaagatcgtctacatgtaaaaggtctcgacctctgcaaagacctcattctcgacataagaagatcccatttcctgcagccgagacctcattcccaaccttatgaaatttctcgataccagagagaggttagcacaaaggtgttcttgtgtaggcttgggtcttaggatggttggattcttttatacaatttgaaaccacgccaactttcctcctggattcatccgaaaccacacaaactttcctctagaattccttgtcagcttgaggaggacctctaagatcgctcgcaagatctatgtccattcctgtggagatagaaataaaagatcaatggagcaa

SEQ ID NO: 90631 - DNA, 843 bp, Cannabis sativa
  modified_base (35)..(39): a, c, t, g, unknown or other
ttttagtcataacataaaaatgataatttataatnnnnnacaatttttttatttttagtcacaagttttgttgtgagtaataataaaattttttgtagtgatattcttaaagtattctgattattttattttgatggaaaaaaagtattcttattatattaacatatgtttaatagagctttttttactatatgcatctatcaactgatcagacaattattttgcacataaatatggcaaaaagatacatttatttgaattaggttggagctctgatccaaactatttgaatatttatcggatcttgattctggtctacccccggcccgcaccatttttttttctggatcagatttgattagatccaatttcaataaatttaagaaaaatattgaatcccaaatccctaatctaagaagtgagatctcgactcgatctcctctcaagcattattaactccttaaagataaatccatcaagtatcacaaatggttgtgtatgagattttctggttttattatggctgatatttgagaagcaaattaattaatcaatacaagctctttgtctctttaatgtactcattctctgttatttgataaataatcttcttttcaaaacacattctctaacttgatatattacagatactgatcatatcatgttagtatatattaatcccatatatttccatgtcctaagtagtcgatcataacgaacaggaacttaaggcctttcgtactttcattttgcatatattatactgaaattattatttcaaacttagatgcgaccacttatatgtatgtcactcaaagcaaaattattatttttattattagt

SEQ ID NO: 90632 - DNA, 650 bp, Cannabis sativa
ggtgccactttcaagtaacacaaattttactttagtgttgctcagaattgttgaagatgacataaactaattgaccgcactaacctaatatgcaatatcagaacgaaatcaatcaatgtaagtctgtaggggtgttcattagaccacttttaatgcttttaggcctatctaaattcaatctaattatatattggatgttacattttaccatctgatccgatctatcaaatcgattcagtattcattagttgttggattggatcagttttgtccatttgatgtattttatatatatctgttgcattaattcgggtttattaaatattttagacctagtattaatattttagatccagtatttatttgtttgatagttggatccatccaattcaaaaagaaaataaaattttaatgttaattttcatttatacatatattttttttatgtataatattttttttttatgtatagcaacataaaatcaaattacgcatccaaagtaaataaaaatattaagtagttcgattggatattagttgtattggatatttggacactccatccaacattcgatccgatccaattggatattcaaaaataacatccaatatgatccaatctttgacgatcggttattattgaattgaat

SEQ ID NO: 90633 - DNA, 547 bp, Cannabis sativa
ttcctcaagttaagaagccttgggagtatcaaaaatagaatctccagagctcagttttaagggcccaacgccttgtcagcaaatgacctggtgtgctaggttctgtttatcccaatctgatgtcgtttcaatcgtctgtctagtttttcacaaatataatgatctacgaaattatagaaataaaattcacaactttgcatttctcatttccaaaacacccagaaatgaatattttcgagtctcttatttctgtaaaatagcaatatctctgagaactggtgaccaactttgccagaacatataaataaactaactggtgtcacactatcacttagacatcttaaaggacatccctttgacgtttctacacttacccaacgtccaaattgatggtagatgtcaacaggggtgctgggatgtcaacgtgggcgctggatgtcaacctgggcgttgggacctgaagtgcctccagtaaaacaaccataactaactcaatttttatctgatttacgcgattgaacttgcattttgaagctatttaaatgct

SEQ ID NO: 90634 - DNA, 613 bp, Cannabis sativa
gttattgctatgctcagaatttttttaaaaaaaattaggcctatctcgacacgcacacgcgagcccgtcgagatagggctgccgagataagtctttttttttgtagtgaagtcttctcccaaaaaggatttcgcaattatcaattttctatagctactatgtacgccaagatgcctcatgaaagtattgttcgatggcgttatgatagcatttgggatagattttgtactcctaaacacatgttcataagttggctagccttgaagagccgtttgtatatctcggacagacttagtcgatttaatcataccaactttttcttgtgtttgttgtgtagaagtggagtggagagtcattctcacttcttttataattatatttacagcaatttgatggttcattaagtatggttttggattggtatttctagtcggaaaaaagagctccatgaagtcctaaagtgaattcggaaggtaaaaacttttagaggtaaaagaaaaattcttttaagtgtcattacaccaacaatttattttatttggcatgttcgaaacaaggttttttgagagcaaaaattttctaccgttaaagtcacttttaaatgtattgctaa

SEQ ID NO: 90635 - DNA, 740 bp, Cannabis sativa
actccacagttaagtgtgcttgacttgggataattttagatgggtgacctcttgggaagtttttccaaggagtgtgcaagtgagtacaaagcatgctagaaatactcgtgttggtttgtagagtcagtcgtcattctatgaagcagtcagagtaatgtacttgtgtataagagtcattatttcgtgggtgtaagggcttaatattgaagcggggacattacaattagccctactaaatacaaggctatcatctacaaaaaaacaagtgagtaacacgtgatcccgatctagaacacctaaaccccatcagttcagatttggcctctgcaagagagaacaacgaggacaacgattccgcaatgaaaaagaataaataaggagataaaggacatccttgccataatcctcttgttgaaatcactcgacctttaggatgaccattgattaaaaaagtatactccaaagtcgtcacacaatccataataaccttaatctagctctcagcaaactcgaactgtcgcatcatactggccaagaacctctattccatccgatcatagtcataaatcctcttctaccgttatttcttttaaacaatgaatgaagtagctccaaactaaccataatattgttagggttgtacagaaattttcgtaaaccgcccaacccgaataacccgactaaaccaaaccgacaaaaccgaaaaaaaatacaaaccgacataacttgacaaaattcta

SEQ ID NO: 90636 - DNA, 758 bp, Cannabis sativa
caatacaaaaagctgtcatccgcaaagagcatatgagagacactaggcgctccattagccactttacaaccatgcagccgcttcctctcttcaaacatgcgaataagatcagaaaaagctttagcacataccaaaaaaagataaggagatatagggtcgccttgttgtaggcctctactaggcacaataggccccatagttcagccactactcacaatctagtaatgtaccgaggacaagcatccaaaaataagacgaatccatttatcagcaaatcccaaccgagcaagcatagcacacaagaaatgccaatccactcgatcataagacttactcaaatccaacttcatcgccataaaaccatccttgcccacctgcttccgcttaagataatatagaatttcgaaagagaccataatattatcagtaatcagcctgtcagggataaaagcgctctaatgcttggagataacctcagactataatcccttcattctgttagcaagaaccttagtaataactttagccatgacattgcagagagaaatggggcgcaactcactcatttgctcagggttcttctttttggggattagcataatattcgtattatttagccctaccggcatttgttcagttgcaaagaaatatttaactgtacggatcacatcactgccaacaatggaccaatatttctgaaaaaattgtggattcatcccgttaggaccgggggacttatctggatgcatttgaaagac

SEQ ID NO: 90637 - DNA, 536 bp, Cannabis sativa
tatgaaaatcaacacacacatattagcatctttgtgagatgtaatatcgctagctagtagtgtaatttattattgaatctcacttattttactttaataaaaattataaaaaactgttaactatttataaaacaccatctcatagtcttgctacgtacttataataacgttctactatttttatcgcgtctcattatcatgataatgttcgacattcattttaaaaaaaattgacccggtgggttgttttttcatcaagaaatgtaaataaatgctaactgctatgtttaaaaatataaagaaaatatatgttaaaaaaaattcacaaactacacaatagtctcattttcaagagagcttttaacacgatcaaattctttgtgttggctttaaaattttttattatcaagtacttctttctagctactccaaacttaaaaaaaaaagctagctatataaacacatgaaacaaatactaataaaatatattaaaaaaaaaaatatttgaactcattcaaatttggatcccttcacag

SEQ ID NO: 90638 - DNA, 542 bp, Cannabis sativa
atagcaaaactttcaaattttaaagtatgcaatttaattaagagcaagagattagcactaacctaaataacaatctagagagcttttgtaagagagaagctttttttgttaggtttatttttgctttgaagtacttttccactataacttgtttggcattattgaagcttgcttttaatacactcttactttggtttggggtgtcaaaaatgagtgcacactatgaataattttgaccaataataatgtgaaactctttcccatttttttcctttttcttggaattaaaaatggaaataataataaaaaaaaaaaaaactaaactaacaatgtattaaatactacatgttattatcacttgtaaagttaagacataaattacattgatgatgttgtaatgtttttggtttagtagaagaagactcaacgaagtggtaataatgttggaacaattattaccctagggttcatttggaacgccgtattaagttgtattatattgtattatattaaattgtattttatgcaatatttttatgtaa

SEQ ID NO: 90639 - DNA, 650 bp, Cannabis sativa
aatagttgcacagcaacaacacattttaaagattaagtgatgataaaaatggtgtttcagttcaaaaatattatatcgaaaccacttgctaacaagataatgtcttaaagttattatttttcagttccacatgcctacacccaatagccctccaagaaaattcttaggcaaagtctatgaaacttggtgaattacaagtgaccaagggaccgtaagtctgtgtacttacttggggggcacccacatcgtacaaggcatcgaacttgcatagagaacttatgcagagaaatttaaagcttagtataagcaaaaaacttaaaagctaagtcagtggaggcatactttgtttgacataaaaaagtaaatctggatacttacatgtctgcgcataagaagatagtcaggattaaagatctcttggtcggtcatatgtccaagtaaaaggctttaaggctgaacaaaagtagtgttcaaaaatagagtgcctataggccaaaagcaagaacatgaaagccttaaggcaaaaaataagttatgttcaaaagtaaatagccaacattccatacacaaacatgaaactgaaactactatgaaataaaatcataaatgtaagatgcaaataaaatgtgtctactcatgtacaggtgcaa

SEQ ID NO: 90640 - DNA, 652 bp, Cannabis sativa
ataatcaaactgggaatattaaaatacggaatttcaatgttgggtggtttgtaatttttttaaacagctctagtggcagtagtggtggagtagtgatggtggtgattatggtcgatgatggctatgatgatgatggaggtagtagtgctagtgatagttagtgatggtgggagaagaaggaggaggggaggacgagaaggaaaaaaattgagaaattttttttttaaaaaaaaaaaggaaaagaaaagaaaaataaataaagttattaacgttttattttttttaataaattattaaatgtactttatagtttgctacatgaatattaaatttgtaatgtaaaataattaggtgattaggactaatcacatttaaagaatggacagaataataaatttacaaataaaatgacactgaagggagttttatcactaaaaaataattaaagagttaagtgtgtaacaattaaaatatatggagatttagtcgcaattctttctaaaattaatgataaaaatattattttttatatatatttttaataaaatcattaattaaacattaaatttttttatcaagttttacaactgcatattagaacatattgttataaaaattaataaaaatatatcacaaattttttttttttttt

SEQ ID NO: 90641 - DNA, 758 bp, Cannabis sativa
ttacataaaaatattacatgaaatgcaatttaatataatactatacaatacaattctaaattaattaattaatacttttaactgtttttgtgatacttcaattatctttgttgttgtgtcgcgacaaaacacaaaacaattgaagttttaattttagaaggaagcctatacttggtaaaaacgaagacaacctcatttttgaacgatgtggtaatggtagagttagatcatataggatttgtagtatctattctattgtgtggaattttaggctccattttgaaataacatggatcgatgaagattgaagaaaattgtgagttgatcatttaaggtaatttcatgtaccatcaacccgtctaagtgaatatcattttcattagtatcagactatgatctaatattattgcatgggctaggcaagaactgcaatgaactaatccaaactaaccataaagtatatccacaaaataactagaattgattacttgtattaaactgtactcgaatccacctgagcatgtttttcgaatcaaggcctctgatctttcacctttttacatatgaaaccccccttatcctatgcatctcttgctaaaagccatgtccccccatctgcatgcattggaattttctggtgtactttgttatttacaaatctaccttaaatgttttttgcagctgttcattctacataatcgaacaggcatacgccaatactttcacatttatggtttcattgaactgacagtttagat

SEQ ID NO: 90642 - DNA, 969 bp, Cannabis sativa
agtaccatcgactcttaccaacataaagcatcgactattctcgtgctccttgtgatatgcaacctatcaatgaagaaacataaatatttatacatttttgctaggaaacatctaagatggagattcaataagacaaggacaatagcaaatatcaacttagctcacctttatgtcttgagctccaacgccaattttaccatctttttcagggtgaaaatttaaggcaaacaggaagattgacttgtccacatcatttagcctctcatctatttcatacctatacagtgaaattgcaaagaaataaatatattactgcagttttttccaatttaaaatccaaaaaatacttcgaaagaaacaaaattgatctctcagctttcaaaatccgaacaaaacccattttgtcttgaacatcgatctctcagacgttcacttgcaatcgtggatgacgagcgggagagacgacaaccgatcgactagagacgacgccgagatccctgcactagggagacgaggcggagcttccatgtcgttaaccggaggatggctggtcaccagcagcgaagaaggagaagaagaaagagaactttcacgcctactcgtactcgcctagcgtttcctgaggggagaagaagaaacggcatgacttaatttttttggtttagcatctgatagggttttgtgtaaacccttatttacccttttttttttttttattttgttaaattattaaatacattagtattacagcttttaagaaaaaaaatacatgtttcaaaaaaaatatatattaatattacagctatattttttttgttttttgttttaaaaaaaaatataattatggtatagtgacgcgctaagtgagtgtgcaaatatttatccagtcgcacatagcgtgtcactgtatctcaatatttttcaaattaataaaaattagaaaattttgaattttactctttagtgaca

SEQ ID NO: 90643 - DNA, 1401 bp, Cannabis sativa
tctcgtttcttgcttgcttctggtctaccgatccctgcgtaagtttaagcttttatttctatattttgtttatttacaatgcaggagttggtatgttttaatatgctgttttttttttttgagtggttctttccttacatgctaggtatgatcagcttctgaaaacatctcatacttttaacatcctagactctagaggctttgttggggtgacagagcgtgctcgatattttggtcggatgcgcaggtaatatatcttgatttatgctatataaaaattacaccaagaagtttgtatgtcaaatctagcattcaaagaatcttgtttcttgcttgcttctgttctttccttacatgctaggtatgatcaacttctgaaaacatctcatacttttaacatcctagaagtatttttagaattcgacagtaaatgaaagttaaaagttccaacttccaagtgtagtatgtttgttacattatttactttctcaactttgatggtcatcatttttaaggcggtgcctatggaatatagacacaactatgctttagcaataagtagtaatgcttattcaatgagaataatttcttggcatacattcattaacgctcttaacttttgtgcatatgcttacgcttcttgttctctcagtttagctcgtcagtgtgcacaattatggttgaagactagggagacgcttgaacatccattgggtgtagtttctgaacctgttaatcttgtatgtcctaaggagcttttggaggcagctgtcaaaagggtcagtctatatacattagatatataataggtttttggctgtatcataagatggtcatataagtcaacatggtttctctgtattgtcttaggtaatttttggcccccctgacttattaaaaatcaataggacatgggtttttcgaccataattattatagcccaagcattgtgtgatattgtgacgcaccaggctaattatgtagcattttagctaagtgtatatgcatggacatgtgtggttatatctatgtaagcatccttgaactgtttaccatgtcaaagttgtgtccaatatgatattcaaatgtcacttggcataatattcacattgctcaaggtgtttctttttaattacttaggttggtgataattcacggttatttgtacttgaaattgggactgaagagataccacctcaagatgttgttgatgcaagccaacaagtattactcttttttctttttctaaatgaattatctaattttctttctattgtgtcctccatttttgtttttattttgtagcatggtcagacgtgaatgctattaattgttttgagtttgtctttacagctaaaagatcaaatgcgacaattgctggataagcaaagattgagtcat

SEQ ID NO: 90644 - DNA, 632 bp, Cannabis sativa
tggtaaaatatatccaacaacaaaacccaacatccttccctagaaaaagagagctcctctagctcatttttcatattcttctaaatctccacaaagtcagaacatctctctctaaaattttgagccccgtacttagcaaattctttgtcattcttgtgagaaataaaaacttgaagtagacgtagctccataaccatcgcgtcacggggagcgaactactataaatttattatgtctatcttacttatacttaactctcattatattcttgctaagataggaagcgggtatggccagatatatagatttctgtgtcaacaatatctataacaaaattaattacatatatttatttaaaatgtttaaatattgattatttagttttttaaataaataaatatcttatttgattaaacctttgatattatttattagttataattattatacaaatataaacctaaatctatatatacgatatatttaagaaaactaaaaaaaagttaattgtatcatcattttctctccagttagaattctcactcatgtgttgagaccaaaacaagaatatcatatttttgtgtatcctatcacccccacactagtcgttgtgtgttgtggttgatttgaaa

SEQ ID NO: 90645 - DNA, 544 bp, Cannabis sativa
ggaatatacactgtaacccatggagcaacttaaatcaaaatctaattcaaatcacaatccacatcgcaaccaacgaaacaactcatactgcaactaatagagcaacctaaatcgtaaaaataaaaaaataaaaattgtaaaagtagaccaaaaaaaaggctaaaaaggagtatatatggtgatttcccttctattaaagagatacaagggttaagttttagaataaatagactaattaaaagatatataatgacactaaaataaagcctatgaccgaaatcctcattaaaggcctatgggtttaatttttgtcattattttgtttctttaaaatgaaacaatctttttatcttcaaaaatactatttatctattgtaatgatttaaatgctaaccttatctgtttaataattataattcattattaaacaaaaattactattaaaatatatttttaattagctcctttattgtaacgccctaatgttaaggcacgctacagtgctttttcaattaatgtgcaatctttgctaatcaaagaaatt

SEQ ID NO: 90646 - DNA, 820 bp, Cannabis sativa
tattctcacaacatgctctcctaccacccatctctctttctcacttttaatttattatcgtatgagctttattaatatacatatatatatataaattaattaattaataataatgagaaagaagaggaagagtcaagtttatatgtgcatgcaccaaaccaaataagggaaaagctaattaagcgggcgtcttttcgtttctcaagaagatagatatacatttacaagttgtaactatatatggggccgttggtccaacaaacaacgcatggtgttcaaaagctacacaccaatatattttttattacatatgtttcacactatatatatacttagagcttgcattgctaccagacattaatggtgcttaacacttttaaatatatcactttgtgattggttagcgatattctctaaaaattattatattaaactatataggaacctatacttaattgaatcaatatagcgataatgacatataggaaaatactagacaccactagtaccttttagcgtttctctatttaggacattagtataggtcactaagtttcttaggacgtctataacataatgttttctaattggctagtaaatttttttataatttttattaaattaaaataagcggaactcgatattaaattgtacttatagtaatattacatttcataaaagtataggcatagtgccttttagaaaaaaagttaaaaagtactactagtgtctaatatcttcctcagtgttatacagttattagtataattaagtattgtatccatataatttaaaccaataaattttaaaaaatatccat

SEQ ID NO: 90647 - DNA, 650 bp, Cannabis sativa
  modified_base (606)..(625): a, c, t, g, unknown or other
atccacataattattaatatttataacaatattaaatatattaactatttttattggctttattagatgtttaatttttttataaataaaaaattaattgatgtattaaattttgattagtaaaccactttttaataaaaaatcttgattcttaatcaacactcttattttaaaaataacttctcaaacttcttttagaaaaaaattataaatcttagcttctttccaaagaagttaaatttaaaaaataactttttattttttattcaaacacttagaagaacgtttttaattgtaaaagttaaaatagaatttataaaaggtaagcaaaagggagagtacttctaattaagggttacaatgcaattacttgttttggtatgaaaagttgaatataaaagtttagacgtttgttttgtaaatgggatgaaaatgagagtgaaaatgtaatgacaatgaggtttcatttttggattgaattggaattaaatatctaaattgactaatttaattcaactgccacctacgtacgcgcatattatatagtttgcaggtcggtgcgcctcattcaaatttgctataaataaataaagggtaaataccatnnnnnnnnnnnnnnnnnnnnaaagttaccaattggaccctgtgtt

SEQ ID NO: 90648 - DNA, 816 bp, Cannabis sativa
  modified_base (216)..(222): a, c, t, g, unknown or other
tgataagccgcattttttaggtgagcctgatcgcgtttttcttctagaaggtcgaggtaaagcaactatttttcctcgttctgtgcaatgttgaaaacatctcttcgtagtgaacctgccccaacctcgactggtatcatggcctcgcatccataagagagcgagaaaggagtttcaccagtcgtggatttgggggtcgtgttgtatgaccataannnnnnngaaagctcttctggccatacccccttacgctcttcgagttttcctttgatgttgtgtttgattatcttgtagactgcttctgtttgcctgttactctgcgggtagactactaaggagaacgcttttttgatccctaactcatcgcacaactttcgcatttccttacagtcaaattgttttccgttatccgaaatgagcttgtaagggataccaaattgacagatgatggagttatagacaaactcgcacagtttaactgttgtgatggttgctaatgcctttgcttcagcccatctggtaaagtagtcgaccgtgactacagcatatttgactccgccttttccttttggtaattctcctatcaggtcgatgccccaaaccgcaaagggtcaagggctcgtgataaaatgcaagtgactcgaaggttggttgatgaacgtggctattcgctgacacttgtcgcatttctttgcgaagctgaaagcgccttgctgctgtgtaggccagtaatacccttgccgcatgatttttaaggcaagggaattaccaccagtatgattcccgcagatacccccatgtacctcgcgaagtata

SEQ ID NO: 90649 - DNA, 589 bp, Cannabis sativa
tgctacctaattataaagatgtaatatttttacctatatcatgtgagacatttcgttgaaaatcttctctccatcttctatcctcaaacaatttccacacagctcaacaatcctaaccagtgaaaaccacgaacaagatccttcaatgcaaaaactgaaatacttaacagtgaaataaataaagttaaacaatttcacttactaaatattaatgtttatttatatattaaaagatagaaaaaaaaattgagactattatgtgtactgtgatatgacttataaaaatccaaaattttacatataatttcatggcattatgattatttaatttctgcattgttatatagaagcagtttttttatagaagctgaatatattatgcgtactattgaataagagtagtattttgcaatgcaacatagtattgttttttttttttttttgttatagaacttttattccaaccaaacacgaaactacaaagagtgagaagaacaaatatattttacaatgcaacaaagctaaaaggcataacaaaaacatactgacactgcaataccctttcaaatatacccaaagctttctattt

SEQ ID NO: 90650 - DNA, 743 bp, Cannabis sativa
taattttgttaaggggtattatagcgattggtaggaagaagaaaggtcttaattgtctttaagtgccatccatgggcacgcacaagttcccaaatgtataaaacaggacatgcacaacctacgtagtaggctgcctaggttttaggtgagattagcttcatcctttcttgattgatgtgattcttcataatggagccatcacttgcacccttgattatcgtgtaattgctaaaagacgggtttatgacgtctaacacgtcctcttatgggtgttcccagacgcttccctcatgctgccttaaatgcgaggtaaccgttcatctccagtttcgctagtctgaaggggttcatacgcccttcgtctctcggagaggaagcatgcttgttttctcacatctgggagcttacccttgaacttagttattggttcctttagagggaatttggttaagtattttgttcatctccggataatgggtcttagtttgccacgtgtcctatgctgaaattaccacgtatattagaaaaaacttggggcaacaatagtaattatttattttttgtaataaatgaatacttttttccatttaattaaataaggaaaaaaagaaaagttgttaaagtaaaatttgtcgagacaagatttgttaggatgaaagacactaaccttgtcctaaaaacataggtaggagcctaggcttgttctcgtccctattggatttgtctttttgggctaattaatt

SEQ ID NO: 90651 - DNA, 1131 bp, Cannabis sativa
actaggatcgacacaaacattcttctttaacaaagtcacaaacaagggagtaaattcatctggcttcttcgcaagtgtagacaaagagaaccttgcatgtttatcatttccaataacttcagggcgataattaagcctttcatgtacttgtaatttacttccaatttcaagtcatattgcactttgtaaacattcagtttttcatacaaaagatcaaccaaacatgagtagcttacgttcgtatcaatgtcaaatgtcaaatttttggcccgtttataaacccaatctctaccttgaagctcccaaacaccattatacataaaaaaaacgcattaacaatcgaacctgtcacatacattaaaaaaatacaattacaacttagaacaaaaatatcaaaaaatagtgatacaaatccttgaaaataccataaatctgcaaaccatcgaacacaacatcggagcaatatcggcacccatcgggcctatcacaaaattctgccaatgccacaatcgggcaacatcatcagacaaaaattgggccacaaaattcgcgacggtcctaaaaatgatttttcggggactgtcgctaaaaaaattaagtaactatttaaaatcgttgggaatactaaattttcctgacggtttaaaatcgtagtaaacaaagtaggcgacgttttttaataaaatgtgatttttaaccgtcgtcaaagcgtcgcctataagggtccattaaaaaatggtcacttacttctcgccacatttcccacgtgcctacctactttttttctattccccacatgcccacctatttcttctccattccccacaccctaaaacgaaaatgttaactgtccaaaaccccacccacgcctccgcaccatcgccctcctctctctccgtcttcctccctgtcttggtctccctttcttctcacctctctcgttcatcgatctccacccacccctcatcccgtcggtctccctctactctctgtcgcatatgtcggaccaccaccacctcccgtcagtctccctatcatcttcgtctcatacgccggaccaccaccacctcccgtcggtcttcccctctctctttctctctgtccgagcttggtataaatacatttatttat

SEQ ID NO: 90652 - DNA, 889 bp, Cannabis sativa
ttttagttagattatatcaagaaagctaattattaattcatttgtttcaaatagaaaaatcaagaaactatacctttctgtccctctctctcaagctccttaaaaaactagctaggtttttgtgttttttctgctcaattcaaggagtttccagcaagtttagagtgtgttcaactcaaagtaaatttctatcatcttcttcttagttttcataagttctagttaagtttttatgcgtgtttttggcaagtagggttctatgttgttgattggtgtttgtttatgttttctgaagttgaattaaggttaattaggttgaattgaactggatttgtgggctgttttgatgttggagcgagctttgagtttaagaactcaagcttttctctttaatggtgaattttgatgttgagcatgttgagttgtttggttgcatgaaatatgtctattgtggtatattaagcaggtctggaaggtttggtaaagtttgggggtcgaattgagggtgtagtgaatttttgagtttttccttcactgaaccagtcgacttgttcagggggacctgtagaaaccactcgaccggttggtccccaggaaaccccatagaaccggaatcctagttagggaaaataaggtaagattagtataatggtagcatttatgtatacatgtttagcgtacatgttagtttccaaacagggggccttccaggaaggattttaccgagaatgtccattttagtattttagccataacttttcactcgggtgtttgttttagacgttctatataccatttgatagcttgtggcgagctctacattatgtaatttaatttgagtcgaattatgtattattagaggatgtttttgtttagatttatgccttaa

SEQ ID NO: 90653 - DNA, 2314 bp, Cannabis sativa
aaatgctataaaaataacaacagtgaggaaaattggaggacaagtttttgacttctcagaattccaacataggaaatcaatgataaaagactaatgagacatttacaaaactgtaataggaatcaatgatacactctcaattctcaggctaaatttgcacactatgatgtcccattaatatcaaccaagtaataattttagatttctcagcaaaagagtaatattttaggtgggacctttatattttaatttatgaagttataaattattacatatcatactatgcaaatctagtgtgtgacttgagagtgtctgattgggaaggaaatcaaaatcatttcatacactcaattctcaggctaaatttcaacactgatgtgtcattaaaatcaaccaagtaacatttttaggtgggatttttataacacatcataatcatactatgtaaatttagtgggggaattgagtgtctgattggtaaggaattcaaaatctttttatttcgtttacatagtcttgaaacataagcggaagcttgaattgattaaattgttcaaaaaaaatatattttgttgtgttcatagatgtagactagtggtttcatacctttaagaagtctcaagtgcaaattccctcctgaaatgttaaaaaataatattttattttattttaaataataaaaaatgatttaaaggtaatgttattcctaaagtaaaagcattcttgatatcatttctttagtaaataaatgaataagagtcattattatacatatattttcacttaagtaaatgtgacattatgtatatttattatgattgttggtaccataaggcgccccttagcatatccacattgtattcttaagaacattagaactttctcatcttactttctaggtgtaaatctgattcatggtttgagtatttataatactttggctctgtttggctatccgaaaaatgattcccattctcttataggaatcaatatgacagattgattctcgcaaagtactttatttgacaagggcctatgattctggcaatgtttccgctattttaagaatcaataattcaggatgtcattgctggtgctaagcatggtgcatgcatgtcatcagtattgtggttggtacttaatgtatttttaatgtagatattgacatatggtgcagatcaaaggcagttggattaaacctggtgctgcagtaatcgatgttggcacaaatgctgtggatgaccagagtagaaagtcaggttacagattagtaggggatgtagatttcaaggaggcatgcaaggtagcaggatgcattactcctgttccgggtggcgtaggcccaatgactgttgcaatgctcctcaaaaacactttggaaggcgccaagagggctataccaccacaatagaagcttctgtgagctgtgactgtcttccccgattcggaccatggtaaaatgtgctatcaaactgacattgtaatattatttgtcacaatcaaatgctggaaaataatcttcatcgtgtattgtcagttaataaaatttcaagttttgaaaggttgatcatatatagtgattaaaattttaaaacaaagtgaaacaaagttaaccaaatgacaatctatcttcttatatagaaaaatactgaagatttcaagtaaagtagacacacaaccaaaatagattattgttattaggtaagagtggtgttcaacaacactacatttacaagataatatatgaaacacaatacttaattatacaaataacatataactaattgcttttagcatttctcaccaaaataaagctaaaaacactacgaagatttatagaaaggcattacaataaccttttatttcataaattatgtaagaaaaaaaacaactgagttataaactaaattcacataaatatgtaaggaaatttttagacgggatcacttgttatctcacacattaaaactatattaactattttgtcaattttagaaaaattttaaataatttagtgtcaaaattaaagtttaaataattatttacaccttatgatttgtttaccatacgtgtgaaaaattagttgtttattgtcatattaaaaataaggtgccaaaaaaaagagaaatttatcaatttatatttttatatcaattaattacattacatgtggaataaaaaacttatttataatttattatacatctgattaactataagaaacatatttttaattttacatacaaattatatattataaaaaataaataacaaacatcatattttatttataaaatcatatataatatatata

SEQ ID NO: 90654 - DNA, 595 bp, Cannabis sativa
  modified_base (74)..(76): a, c, t, g, unknown or other
aaatatataaaaaataaaatgttagataaaataagtttttacatatttgtgattataataaagtagattataannnatcattatcattataatagatcttaacaactcaccgtctttaaaatttataatttaccaaacactcagctcagcttttttctacagttttgctacagttgttttttttcagttaagtatagcaaatgatttacattaacttaaggagtatgatgggacatcatctacaaaaataagtatattaaataatataaaaatgaaatttaaaattaaaacaaataaaataataaattcctcctcacaaggaaaagccgaaacccaaactcatacaaatataacttacatatttaaaaaagaagtaaagaataaaagattaagtgcccacatgcaggatcgaactacagaccttcagtttacaagactgacgctctaccactgagctatacgggcactatgcaagaattaagtattattaaaataattacatagttccaaataatttggtagtttctagtttttttttttttttttaattattattattattttatggagcaatttagtaatatcatcataataa

SEQ ID NO: 90655 - DNA, 774 bp, Cannabis sativa
actatgccatgctttcatgtaatttatctgtattccgtatttgtctttcatttctccctttatgtctgctgggttgcactttgttttcaggttcaagaactttggttttacgaaatctgttatcaactttgctatagcttgtcgttgatctccaaatcttattggaactcacatgtgtgttcttcttggtagctccttattatgaatgtttctgtgtttccattttttgaagctttaaactctatttgcagtttgtgtccaaacatactattttgtattcttttgtgcaagatttcactactttgtattgaaatgttttcttgattgcaaagtagcatagggtacttatcaatgtatctttgtccttgtaaatttgtccattttctattgtttcatgtgtttgtcagtgatgataatcatttctatgttgtcgacttcttcttcctcttcctggttgttttcaagttgctgtaccatttctgcagccacaagctttgcgtaatcggtgaagtcgaaatattcatctactcctgtagttttttctctgttgttttctggttgttgtatggtttattctaatgtcacgctccctgtttctagaaaaaatgtataatcttgaactgatccaattgtgtgagcacatagttgttgcttagaagttgttgtcgggttgtttccaggttgctgcaaatctgcctgtgctgagttgttgtcatatgatgccatcatcatattgttgcacaccattgttttgttaggtgttgttgtgctgct

SEQ ID NO: 90656 - DNA, 653 bp, Cannabis sativa
gcaaaaaattgagaagagtcaatttatcctcttgccctttcataaatctacctatgcctaaaagtgacaccttattaatattttataggatattatgataaattataaaggacctagtacttaaatgtaccaagaacaatattacacgttggagggtgccaaattactagtaccctttgacatttctctctttataaatgttaggtaaacgttgataaaaaaaaatttatcaacaacaaataaattatcttagaataatttaagattaagaatttttttaattctatacataaaattgattttatttacacaaatacgtatactgacgtagctgtactacgttgtttaagatgaattaatagtagatggactaacatccgttcctttatgtataggcagaattgtagagatatgttatctccatttagtcaaatttttggcgtgtacagtacatgattggcggagctaattacatgaatattataaagtcttcaccacattttttttagagaagaaaagaacgttcattcaaagataagatatttgggaatcacaatcggggacccctccctaagcagctaatcttaaagtcaagaaaatgttcattggatctagcagactttgctaaggcatccgcctcatcattgtcgttt

SEQ ID NO: 90657 - DNA, 980 bp, Cannabis sativa
  modified_base (922)..(933): a, c, t, g, unknown or other
taaagaacaagagcatcagtctatttcaccatttttgaatcttaaaccttcaaatttcctctgaaactgacgattttccccctttcatattatatgccctcactgtctttgacttatttcttgcacattttctctgattacatattcaacctcagagaatttcagaacccattgcctgtcatcaaaatctcaattgcaaagttcttcattgcctagaaaccttcaccaaaatagtaagtggctcattcccttatttctgctatttttcttttctgtattggtaatcttgtctttgtgattgatcgcttcagtatctacttcatttgatttaggtaattttagttttgtttttctggataattttagggttttaaggataaaatataggttataaagttcatagactcctgggttagattgtatttagattttctgaaaaatgggataatatttgtccacaaacatgacccaacttttttcaaaaaacacaatcccagaattcttggaaactgattgtcctaaaaaatttgcctttcctttcgaatccaaaacttatgttcccaaaacccttcttgagataaacagtacaaagattagagatcatctaataaaaaccaatcaggacgaggtttcaagtcattctagatgatttttacaagaaatagtcgagggtaaatgtcgttttctgcgagatgcaacttagcctgaatgccaaatttttcttttattcctttagcgagacccttgtttttaccttgagtcactgttgctttttcaccaagtgacttagattttgaaattatgacttctaaggctcgaaaatccaagactcctcaagatcctacaattacatttgaggccaaacttatcgaatcaaaggttaggtccatagcttcctatgttattcattgaataagcccannnnnnnnnnnncctaaataaaactatcaaaagtgatatttcattttagcaacctagtc

SEQ ID NO: 90658 - DNA, 595 bp, Cannabis sativa
ttttcgttagtaatgtccaacaatggtgacatttcattggtaaaaagttgttggagaaagttcgtcagggaaatgtaatatcaatagcgacatttaatgtcgttgaaaaaaaaaatattaatgacaacaaataattttttttttttactatattgggatatcaatgacgataatgtattttttagtagtattaagatatagatatataggtagttaatacgtcttgccagctggcatgtctgagattgttctctcaaggtacgtaggttttttcagcgtttgacggcttcgaaggtttcaacgtttgacggctgcttgcgactgggtttttcacgttccgattactgtgctttcactggtggagcatgccttcgaacatacaggttcttttttcgtatgttcatagatcttcagcatctctgagttgcgtttaggattgctctctcacgggttctgggttgttttttacggcgttgactggttgcctgcgactggttttttctggttcgggttgttgcgttttctctggttctggttctgcgtgtgtgtagggtccctcaccgatcttcctgggtttcggaaggatcatagtcgt

SEQ ID NO: 90659 - DNA, 665 bp, Cannabis sativa
atgtggtttttaatgaggaggagtttccagcacttttgcccaacccaactcagcaggtattgtcttctgaacccatctcatttccctccacaactttctctacaaattctttaccttcacatactaatcctatgccatttacagtccctgaggatcatcatcatggaccatctactggacattgcagttccagtttgtctacaccagctggccttaatacaaaccagacaagtgcagtacctactgctatttcccttccattaacctccaatgttcccaccagtacaccagcacctactgaaccaccccctacttcagaaataataccaacatccacttcccttccctctgcctctcttgacccgactcccatagttcctactgtcaccaatccaccccttcccattacttttaaccaacatcccatgaccactcgatccaaagtaggaactcacaaaccaaaagcttatactgcaacaaagtatccactaccagaatcccttcttcccactaaacccaaaagcctaaaacaagcccttgctgatcctcactggaatgcatcaatgacagatgaatttttggcattaaaaagaaatggaacatggacacttgttccatatcagtcctacatgaacttagcgggaaataaatgggtccatagagtg

SEQ ID NO: 90660 - DNA, 508 bp, Cannabis sativa
ctgaaaagttcagagaacatgatttgctatatatcaaagttgagaaatcacgatttggtacatgtcaaagttcaggaaccacgatttagtacataaacacctgaaaactttagaggacatgatttagtatatgtcaaagtttaggaagtacagtttggtacatgtcaaagttcaagagccacgatttagtacataaataatcatcacgttagtaaaattaaacggaattagacaaaagtccccaacaatctcaatagttcagtaaaattttaatggtctgaaaagttcaggaaaaataaaaaatcctaattatcctcttctcaaaaactatctataattttttttttggaattatgttaaatattaattaaaagaataagggtaatgcttaaagcgagattacttcttattgatgagaggaaaatatctaaaacagatcaacaaatctttgagtaatatgtaagtgagtctgcttgttgttgaattggggatactgatttgctctgtt

SEQ ID NO: 90661 - DNA, 657 bp, Cannabis sativa
ggaatagtcatacacttcattacaagtttctaagccattcatatacatgttgaatgagaatatacaagtatttttactttttaatgtagaagaaaagttttttcttttttctttttctttccttggtactgtttgaatgattttcaagtagttcctgaaaaaatttcaaaaccaataaatataaaaaataaaagtctttattattgtcagcacaacatctaaattcatgactttgtgctatatatataattatataagttatggatagtgggagaatcatacatgtgtatatatattatatatatctatgtatatacatatatgatagctaatttataatttgtcctatgtttgggttgtaagcgtacggcctacccaaactgaccgaagacaacatgcaatgcaacttgaatcctggtcccagtgagtttttgtatgggaactattttgaataaaattaatcaatcttttcattatacaagagataatattttttttataaaataataagtctattgatcggagatacaccacataaccaaatgttttattatttacaaataacttcaccttcaaataatagtctagcaaggacaaaaatcagccttagtaaaaatggaagggtcatcgttccatatgatgatgggagttgcatgt

SEQ ID NO: 90662 - DNA, 649 bp, Cannabis sativa
tgcataatattttatgaacacaaaggaagtaatggtggagaaagcagttgcttaccacagacttacaattcctattatttgggattggtcaagtacactatacttgatttggatatcaagacaatagattgattgaaattcacttcttgttttacgttagtgcaagtgggagtttgtttggattttatgtcctaaaaaaacccatttcaatataatctggtttgtaatcaatagaagattagaagtcatttatttttacatgtagttttcatgttaatggtttaatgtatacaatttctgttaggtcaaaaacatatagttattcacaattacagtgatgtcaacacagtggaaggtaattgtgattatatgcttcaaaagataatgtcccatgattcattagtgcactggatttacattgatgtgatagtcagcgataaagctcacttgcacctttcataagtgttatattctttccaaaacattggcgaagtatgctagtatcaaatgtatagagtatacattggactaataccgatgttgatcttagtaaagatattataatcttaccattgtatctttctaagtcaatatcattggttgatcttattaaaagatcttaattctaacatggttaggttcgatctca

SEQ ID NO: 90663 - DNA, 573 bp, Cannabis sativa
taagactcaaaaaaagttagctagaagaatactaatgaaggtcatgatctgcgttctattcccttgaatgtaacaaaggagggtggtcttgcatcattcttgtctttctggctaagccgttttatttttcccacccaggtcagaacattaggcctgaatctttttgtatgacttcagtaatgttttgggttatatatatcgtgctttatataattatgcattacattgtcaagagcgaggtgaatgtttccttcctgtgcattatgtgttgcggtaattagctgagcactttcactaattaattagttattttctaattataatataatatattttagtctatttattttaataaatcattaatgaaaaatttactcgatttaagtttgtccaaaattaattaaaaaaatcaattttaatctattttttaaaaaaaaaatcaaaaatatctacattaaataaaatgtatttcgaaatttagtgagaaatgattaataatatgaaataaaataaaatatatttttaaaattattctaatttaagttattctgaaattgaaatttacaacttaaa

SEQ ID NO: 90664 - DNA, 727 bp, Cannabis sativa
aaataaagacacacacgaatttgtacaaaagtgcaataagtgtcaaaggttttcacatatacctcgtataccaccaacggaactaagaatgatgacctcgccatacccatttgcgatatggagaattgatttgattggtgcactccctacagggcgaggaggagcaaactacgtagttgtggctactgatttcttcacaaagtggacagaggctgaacctcttgtcgtcaaaaacataatttgtaggcttggaatacccattaagatagtatctaataacgaaactcagttcgatggtgagttattcactgagtattgcgagaggaacaagattattaagagcttctcatcagtatccaggcctcaagcgaatgggcaagtagaagctgttgataaaaccttgaaggatactatcaaaaagaagtttgatgctgcaaaaggtagatgagtcgatgaactaccacaagtactttgggctcacaaaacaactgaggaaacagcaacaaggcatactccattctcgattgcatttggcttagaggcaatgctgccagtagaggtcaatcttgcgacccacagactagatttctataatcaagaagaaaaccaagaactcttgaaattgtcctttgatcttcttgaggaaaaatgcattgagtcgcagatcactaatacaacataccaacaccgagtgataagataattcaacaagaaagtgaagaaaagg

SEQ ID NO: 90665 - DNA, 576 bp, Cannabis sativa
catataaaattaattatatatagtattagtttaggggaataatatatgggttatttaagcatggaaattcaaatttcccttaaattaataataattattaaataaatttttgcaatttactacaaaaaaggttattttagtaattaaattttttaccatttagttatagaaatatgtgaaaacgtaattactttattattataaaagtaattacaccaagacttgaacactttttactagaccacaatacagcaaattcttactcttatattttactaacgcttgacactctcactttaactacttaaatatttacacacactatttggaacactttagagtttcgacacgctagggacactttttggatgcacttgagacttactccctttcacaacaacaagggaccaagtcccctatatatacccctcaaggttggtgatcttattgttaggaatattttaccggaatctagatttactaacaagtatgttgaattaacatcttaaatatgaatatctctaaaacaatgaaattaaacacatgagagatttagaaaaccttacattaattaca

SEQ ID NO: 90666 - DNA, 675 bp, Cannabis sativa
caatcttcagtaacacacgggaattaattaaatataacctcattttacttcttgaaaagaaattagtgtgttaatattggggaaaaaatagagatgaaagcaagatcaaggaaagatctcaggaagcaaaactatagtttgatttaaaaacagtatatagatgattaaaacactctaaatctgcagataaagctctcacacaatcactaaagccttgtagggttgcttagtttcaaacattattatcaggttttgtttgctaacttttccctcaaatcatattgaagtctctttttagtccattgttgactgatcttttcaatgtttcattatgatattaaagcttgtttaacaatttatttcccagtctcttagcattgtattacactaaactcttgatctgtacactagtctttcatgttgcattagcttttccttaactttcaattacttacaattctcttatattccagatattggaaaggccatcattatcattaatattcgatcgacttaatatcatcattttccttgttactactagtttaacagaattcacatcagcaatagataaatgaaacaactatctcttaagccaatcaagcacaaacctttgctctatccagatttcccaggtgcacatggcaaagtcccattttaatcgtcaaattcaaa

SEQ ID NO: 90667 - DNA, 651 bp, Cannabis sativa
aaattgttgaattcaaaaatttatatatgtccaatttcactaacgggtgcttgatgtggatgaaagttcaaattaaagacatgattcggtacttgtcaaagtttgagggccacacgatttaatacatatcaaagtttaggggtatgatttggtacacatgatggttggggagcacgatttggtgcatgaataatcagcccgttagtaaaattgaataaagttagacaaaaatccttgaatcaaaaaatctcaatagtttaagtaaaatttttaatgatctgaaaaattcgaaggcacgatttagaatatgtgaaagttcgaaaaacaaaaatcttaattagttttatttttttaaaataaaatttgtaaatttataaataatatcataaatatataatttataaatttatttacaatattaaaaaaggttcataatataagtttgttatccattaaattttgtaaataatatatagactaaataaaaaaagtgttccaagttgttaaaagtatttttataatttgtattaaattttgtatttcctaaatatttttaaaattttctaatgttatgcgtaatttttcccacatatttttatttgtatgtgtgtgttttgaacaaatttgtgtgtgtttaattaattatctaat

SEQ ID NO: 90668 - DNA, 653 bp, Cannabis sativa
catgtcctaggtcggagtcctatagtgttacatatatttgtttggagcagttgtctgttattgattgctacggttggtagtttcacattctctaatgtattatttgccgaagcacaggagtttcattgcctgatacaagaccttgctcgtgtgactaatgaaatgaactttcaaaagtctgatacaaaggttagttatctagtttcattttcattatttattattatagaaaacttttttgtaattagtaattataatacttgacgtttgttttatcatctattggatatacatgatctcatataaaaagtgaaaagaaacttggagcttagaaatgtatgtgagcaagtctaactagagatatacatggtactgacaattacagtaccacgcactagtgcatgtgaaggtagttcatatgaaatgattgtagatatgctgtctttattattattattattattattattatttctgtactcttttttctattatccactgctgctcaattaattacaaggtcttcctcattagtacttagtgatcggtactgtgctttgaacttgtaagtgagatgcataactaaatttgtttgctacagttactgttttttaaactttctaatgtcataattagttttctgatatttttcc

SEQ ID NO: 90669 - DNA, 844 bp, Cannabis sativa
tatcagcaaaacccatttgtctcagcattgcacacaaaaaatgctagtcaactctgtcataagctttgcttaaatcaaatttcagcaccatttacccttctttgcctattttctttctcttcaagcagtgcaaaattttaaaggaaaccatgatattatctgtgatcagtctcccaggaataaacgcactttgattcaaagaaataatcttagataataatcccttcattttgttagcaagaactttagtaattatcttagcaataacattacaaagagaaataggacacaactcactcatctgatcttccatcttattctttagaattaagagaatatttgtatcattcattccactcggcatttcctcataccagaaaaagtttctaagagtattaatcacatcttttctaactatggagaaatatttttgcaaaaattttgcgttaataccgtcggggccatgagatttatctagatgcatttcaaacacaccattactgacctcttcatcaccaatctaccgaagtaaaatctcattatggtcctcacgcactgtcggtgtcacacaataaagaacctcctcccaccgtgtagactcagcagtaaaaagcttagtgtaaaaatcagtcatcacatgatctaatccattctcccagtgtctcaagttcccataagtagcttttaaacaaaagatatgattattatgtcttctactagaagctttggaatgaaagaacttactattttgatctccccctttcagccatagttgttttgatctttgtctccaaaacacttccctttgattaagcatgataaaagttattttttggactcataa

SEQ ID NO: 90670 - DNA, 729 bp, Cannabis sativa
tatttaaaatttcgtgaaaccgtatttttgttgtttttatgcatttgtgaaattaaccctatattatttagtagaagttccacctgatccgtaatgttattaatttacaaatagttgttcatatgatccaattccaaatcgaataatggttatggtttctcatctacaaaaacattttttaggtattagattaataaagtatgatttctaattttttttttttatatttgttaattgtaggaattgtcttcttgtgaaaacttttgttctctctccgtgactttattttagaagaagacaacgtgccaaaaataacggttaattaaaggattaacctaataataattttattgttgtagctagttttgtggcgaactagtgaagtcatagaaataataattgattatatatgtcatctttttgttagacaaattatgttgatgttgatataatttattatattcatataggattgttagagtaccaaacgataaacatgaattatagatgataaatgataaatgacaaataaataaataaaaagatcaattatatgagcatcctttcaggacaggaaaggataatcctatgtgttctttcgagagattcactggtttctaattaaatttttactttctaattttatttctcaaactaaattatgagctattacatttctattactaaacacatgtaaaaaagatacattaggataagaatctttttttt

SEQ ID NO: 90671 - DNA, 609 bp, Cannabis sativa
gaggatgatgccgggaagtacaacgtattcctctgtctcaggcggaatccttgagtcccagctgccggccggagtgtcctttctcctaggcttcttagaagactcagcctccaccatttttctcttgcgcttccgttccagcggggctataatctcgccttcctcctcctccttggcctccccgtcctcgtcgatcaagatgattgtgcctaagggggcactagaagatgacctccccggggcaccgtctgggcgggcgccggaggaagggaagggtccgggctgtaggtttcggcaagagttgccaagaggtcttccattggcctggctgcttcaaaaaaaaaataaacaaagtgtcataatggccataagaaagtatgcgcatgaaaacaaaacggtaaagctagtcctaccctgactatctaactcagccctagcaaagtcttgaactacaatattggcttcaccatccccaagaaagctgtccgaggggaggaaccagctggaagacagataagctgagtgatccagagggatgggtgcaggaggtccgaaacccatccgggaccgtcctaaaaaatgacttaagtgggaaaaataaaaggcctt

SEQ ID NO: 90672 - DNA, 670 bp, Cannabis sativa
gggtttgatgggcatcagcagaagacttgacaaagccatttttaatgctgtgttcttagacttacttaggctatggaaaaagggaagagaggcctagtcagacacacaaaataataacacttttttttttttttcttttttctctctctcttcttaaaaatatttttaatttttaaaatataatttctaattctaatgaaaaatatacatgcaattttcaattttccttttaagttatttctttgataatcattgcaccaaagttcaaactcaacatttaatttctttttttttttttgtaaaaaaaatctttttttttccccaaactaataagcaaactagcaaagaatgtgaagatcctaattgaagttataaattgataacatgtgaggttgtgctgctgatattctctgtaaattagatgattaattgtgattaattgatattgattagctaaagcctaaagtgatagctaaccacaaagggaactagaatcatttgttttgttttttattattttgattcgaattttagtattactaacatatcattataatgttagacttttatttgggcttacattaaattttattggttttattaaaacttgggttgattggatagttctttgctgtgttagcccatgttgttggtgatcgattgttaatgg

SEQ ID NO: 90673 - DNA, 1019 bp, Cannabis sativa
tttactaaacatcatcgccttagttcaagttctagagtaaaaaagcctgtcagtgttcttgttgaattaggccattctgatgtttgtggttctcctatcttgtctaaacttggtttttgttattttgttacttttgtggatgattattctcctgtcacttggttgtattttatgaagaatcgttctgaagtgttctttattttttatgccttttgtgctgaaattaaaaatcaattttatgtgtctattcgtactttgagaagtgataatgccaaagaatacaaattttgtttatttcagtcttatatggttcaaaatagcatgcttcatgaaactttgtgttaatactccatctcaaaatggtgtagcagaattaaaaaatcgacatctccttgaaacaactaaagttctctcatttcaaatgcatattcctgaaccgttttgcgccgatgatgtttctactgcatgtttttctattcaccgcatttcatcttttgttcttcataatgaaatcccttacaaaattctttttcccaataagccactatttcctatagagctaagaatttttggtagcacttgctttgttcgtctatagttaaccaaattaaatctcaagtcaatgaagtctgtcttccctgggtattctcgtcgtcaaaaaaggtataggtgttattgttccgatcttaataaatatcttgcttctatcgatgttatttttgtggaaaatacaccttatttttcgtcttcacctaatcttacttgtcagtgggaggatgatgatttgttggtatattctatcacatcttctgtgtctaacacatgcgtctgccccctccactcactgtctcatgtcctacacttgtttattcgtcatcagatctggactccagagatgatcttcccattgcactacgtaaatgtaaacgtaaatgtacctatcctatttcttcttttatttcatattatttgtcctcgtcttcttgctcattcgttgcttctcttgattctatttcgat

SEQ ID NO: 90674 - DNA, 701 bp, Cannabis sativa
tggaaatcaaagaaacaacaaacgatttcccaatcctctgttgaagcagaatatcgagttatggctaatgctgcttccgagctcacttgggtaattgccatcctaaaagactttggcatatctcattccaaacctgctttgttatatagtgacaacaccgcagcgattcacattagtgaaaacccgatttatcatgaacgcacaaagcatgtggaaattgattgtcatttcattcgagagaaagttcaacaaggttcagtcaagctacttcatgtctcttcccaaaacaatctcgccgacatcttcaccaaagctcttctcccaactcatcacaagaacattgtatccaagatgggtttgatcaacatctacactccaccttgatgggggcttttagaccacgtggactagagttagttaggattgtttttgagttgttaatcttgattaggtagctaataattctgttaatagttggttatgtcaccaactgatttcccttgtatgaaccgagctatttaagctcatttctcagttgtaaaccagtacagaaaagaaataatacaatttgctctggttttctctgttctttctctctttcttctcatatatagaaaaagaccgaccaaactgaccgatgctcacctcttgtgacctaaccccaattttgtcctctctacagcctacaaaggctggtttag

SEQ ID NO: 90675 - DNA, 528 bp, Cannabis sativa
agtgtacaaatgccacattggattcttgaagttgaaggggatctctaaagccttaatccaatctgagagaggataaaattgctcttgatctagcccatactctattggctttagagtagtgatacccttaattaaagtgacaaagggtgtcaaattcaaccctacatacaacatgtgtggtgatgtgcatatcagttggtcgcttgttattgatgttgttatgcatgctcttttgtctttcaagtcaatcaaagacattgattgactaaggccttgatgttgttgcttggtcgtatggccttgttggaaactactgggatctgtctcccatgctgacaaagtcgtctctcgagtgtttgcttcatgcttgattgcttttagtactgtactgactattccttttaaaatagtcttcctcagagtgacatgttcggagggaattgaactgattgctcaatttcaacacgtgtccatgaacctaagagaagtattcgtactgttgactgtcaggacctcgagcaaagtacc

SEQ ID NO: 90676 - DNA, 525 bp, Cannabis sativa
  modified_base (39)..(54): a, c, t, g, unknown or other
ctactttgagatagagaattgaagagagagagagagagnnnnnnnnnnnnnnnnagagagagagagagagaatgtgtgtgtatgagagaatggggttagagctatgtaatcaagtgcttatggggtcaagaacttgagggtgtactcggggttggttgtgaaaactgtgactattcttagggtgtaattctcaagtttagagtgttgtatgctctaccattggtgtttgtaaactctctaattctttattaattaaagcttgatgttgtttctcagctggagtacggccagggatcatgtttgatctcgaggccaggaaccaggataaaaattggtgttcttactcttgttattttttgttctttttctttgtgttgtttaagtgtttgtgatttgttattgttcattgaaatagttgttttgtaggtttaactcaagaatcttgttcttgttactgtcaaattttcaacaaattagagcaatggtttaagatccatattaagaagggaaaggttcaagattcaa

SEQ ID NO: 90677 - DNA, 553 bp, Cannabis sativa
tgataaggtaaaattataataaaaaaaaaagcctttttctcaattttttatattaaatactttgtttgataataactgtgtttaattaattgttttttttttcttgtaagatggataaggcagctttattaggaagtgtgatagatcacgtgaaagaactcaagagaaaagcaggggaagtaagcaaatattcagtagttccaactgaaattgatgaaataatcatagaaagcaatctttcggatcaagactacgtaagactttccgaagctggcgctaataaaaactgtgacaacgttaattacataaaggcctctgtttgttgtgaggataggcctgagttgttctctgagcttattcaagttttcaaagggttaaacctcacagtagttagggctgatgtagttagcattggtggtagaattaagagtgttcttattcttagctctaaaaataatgaacatggtaatactagtgtttgtataaacactcttaaacaatctcttaaactagttttaagcaaaatatcttcttcatcatctatggctacaac

SEQ ID NO: 90678 - DNA, 627 bp, Cannabis sativa
gagtatatcctttttgtccaacgatacctatttgacattcttgtctactgtagcagcgtccgtgcgtgacacctatccagactgcataggccccatttgtacatataccttcaacccgcgagccaaaatcttacaagtgggagtatatcctttttgtccaacgacgcctatttgacattcttgtctattatagcagtgcccgtgcgtgacacctgtccaaactgcataggccccatttgtacggacaccttcaccccacgagctaaaatcttgcagtgggcctcaaagtcatgtatcccatgtatttaccccaatagtgagcctattttacacaaaaaccctaaacgggtcatgggtatgtttggatctaaatctaagcctataaaaacccctttaccccttcatgcaaggggggcaaaaaatactttcaagttctttctaagctttcttcttctaagaaaaacgaagaaggaaaaatactacaacaagaattagggttcttcaaattgtaagacccatttgtaatacatcaagccttcttaggccaatacattgactcatggactaggattcattaatacctgaaccgcgtaaaactcttcatctcattacttaactacttatcta

SEQ ID NO: 90679 - DNA, 990 bp, Cannabis sativa
gaacggtttgatttttataaaggttatgaaataagcagccttgtttttataggagcttgctaaataagcagcctggtttttataggagcttgctaacatcctggtttttataggagctcgctaaataggcagcctgatttttataggagcttgctaaataagcagtctggtttttataggagcttgctaaatgagcagcttggttcttggcagaggtgatgggatggttgtgtgtaggaagagaattgatgagacgggatggttgtgtgtaagaagaaaagtgatgagacgggatggttgtgtgtaagaagaaaattgatgagacgggatggttgtgtgtaagggaagagaatagggagcaatgatgaaaactgagatttttagagaaaaagtcttcttttcttctgatgtcctctttatgtgtcctcaacctttcttttataggagttgagtacataacctaccctgaatacaacctaccctacatactacctccttgcactaacattatcctttaatcaacttgttgatcgataaggttgtgtctcattcataattaactgtttcacccaagagtttttattaaagacaataacccttcctattatatccttttatttatcaacgatcacttttcttgaattgaatatattcattaattgctataatattcatgagttgttcaaatggtcaggcataaatggtggttagtttttgatgttcgagtctcccttgacacttactttggtatctaaacatgggttatagtattttatcatcttatatataatgtttttacttttggggtttgcttaaacttgaaatcatagttgttttttttttttatatgtgtgcatatttttttattgtcatacttacattctagtagccattagccaatggtcctactacacttaggtggcgtttggttggaggtaatgaaatggaattaaatggaaaggaaacaatttttatttcattcctttgttt

SEQ ID NO: 90680 - DNA, 652 bp, Cannabis sativa
ttgtttctgtaaaaacagcgagccgtttttttagttctacaccagtaaaaacggtagaccgtttctgcaaaaacagtttctttcatttttcactacagaaaaacaaagagactaaaagcaatcccaatttgacccaaacttcaaatcaagctctaggtcacctaataacatcataatagacaagtttcaagcaacagaacctcaaaatatgcagaaaattaaaaaccaccattgtagagtcaagtttgagttcttgaactcaaacttgctcaacaactaaactaaccatgaattccaactcaaataaacattactcaacttaaaattaacccatatggtaatttaaaagaaatatatatggtacatgtatgtttcaaaatttaatatattaaatgtatatgtataagaaaaatataatctacgataaactaaacttttctttctacatataatattttttttctttttctagaaaattgttgttttttgtttgtttattttaatttattgttggaaacatagaataacagcaataacttatattattttgttgttggttaattatgtgaaaataatttatattttattattttaatattaaaaaaataactaatctaatatgcactattgcagattagatttgatttgattt

SEQ ID NO: 90681 - DNA, 3225 bp, Cannabis sativa
agcacaagaatgttaaaccagtctaacacttgacaaccctccttgagattcaggcctcatccattgtaccccctattgccactgagccagcctcaagtggtatgaagtagcagcactatccaacacacacacacacacaacaataacctgttctgatgaagcacaagaatgttaaaccagtctgacacttgacaaccctcttgagattcaggcctcatccattgtacagcatgtggagtctgaaaatttaataaagaaaccaaacttggtaacagttcttaaaatcagtaacaaaacagaagaagagaaacatactacctgaaacattctattaagcctttcatctcgaatattcccaagaccatacaaagctactgctgtcgatccctgcaattcataagcaattattagtgctaaggaaagaagcttgcatctgcatccaatatttttaataattacaatgttacatatccactaacttaccttcttaataagaataggattaagggtgatctgaccaacaccagaacccccaaggaccattttcccaaaatagttcacaagattgcatgctgagagaatatcaactgcggaaaggttatcctgccaacagttaccatagtaaggattggaaattccatgatagaaagaatactaaaatctgctttaagatcagaaataccaaatcatgtggacatatagcttaaaattttgaaggaaaatcatgaataggttgatacaatcacttgggtagaactcactcccaaaagctagggtgcccaagtagttatatgtgactaacctataccatacttagtcaatgctggatcctaacacaggtttagaagttgaattttataaacatgaagacagatattaccaacttaatgaggagaatcagctaataattccatcactggttcagcttggtccttaaccagttgggaaactatcctacttgacaagatcatacaaggttccaactattaatattatggtagacctcctctcacaatggtttactctaggatagctaagaaaagtgacgtggcaagttagttacatgaggacttgtcgagtgtgggagggtggagctacttcaatacacgctaatataaataaggaagtatctgtaatagaggggtgtggatgatttgtgcatttcctttatttctttcatacagtaaggagagactaagctctcgaatctcttggcaattatcaatacaaagggggttctgctccctatttcttcacatttcttctctgaactctgctaatatattatctgtgacctatcatattgcttgtgttatataatacatacatttatttatatatatataagtgtttcttggcattcctaataaggagaggaagactctcggggagaatgaccatgctagaaagaacaattcagaatggttttaaatatctggacatcaccaaggcacataaggataagaatttacggctgtagttcatgaacttaactttaaaattcccaagtatcttatcagtgaggtttacaaatatgggcaacatgtaataaattaagtaactacaacacttggccaaaatatccataccactccagcaggatcatcatggtttccatgaatactgaatacaggcaatccaacattgaagtgtggatcttcatagtttacatgaccaaacctgtcaaagaagtacagaagtaaacaaaagagaagaattcaaaaatagcctaacttctatttttcctttcatgtcggacctcttaaattctaaattattattgaaaagaacaagaaatctaatcaaagtagtaagtaaatgtctatactgagtgttcgacgaagataagctcagacaagtaattacgaatcccaattctatatataaaaaaaatgaatatctttaaaagtcatacgtgcttggaaaattcacggtttggtcactaacaacttggaactgtataggccgatcattgaggcagtgacgacgaagaatctcaatggccttaactagtgttgtccttgaaggcttattctcatggaaaagatcaccacctagaagtacacaatccacctgatagcaaaggaacatgtaaatatacaaaaaaaaacatatgcaaagacaaaacaaagccccttcagatcaccatatagccaaaatgaattcaagaattacctccttttgtaccgctattgagcatatctcttcaaatgcctggaatgaatcgtgacgccgtacttcatccttctccatatagcccaaatggcaatccgtagcaacaagtactcgaagtgtattgctaatatcctctctaaaaaaatttttgtcacacataaatacgaagataatttttctaaaaaaatttgactagttaatcgataaaacttcatctgcattgcacaactatgaaaaattctaccatacgaagaaattgtataactcaagtattcaaagttctgtaagcccaagcttgcttgctaataaatgaatttaactttcgaaattctctcaattcagactgaaaggcgttttctccataaccaatcaaaagagttacgaaagaaaatcatctacctcgataagtcggccatgccttatgtcacaatccgccccttctaacagttcaaacctactagagagtaccatgtcaaaatatcagtccagcaccattcaatgattccatttttcaattcaactttttcaatactgaaaaatacttcaaaactcaatcgtctaataactggaaatgtaagcttgccctaaaactgtaagaatagaggaaaataaccaaaccccactttccattatactgaaaatagtacaattaaaccaaacaacaaatatcagaaatataagaacctttgattgatttgtatcagcagaagtacacaggtaaaagataaagagtactaattcaaaagacgccaatcgagtgaagaacatctaaaagagggggtgtttgtagagacgcctttgtaagaagaaagcgaattttctttcaggttcccgcattttctagggaaaatagacttacctgtttggtatgtattggaaagattaaagaggagtgtgtgtgagtgagtccactcagtgggtgtgtaagagaagcttgcagcggaaaaaatgtactctcccgtggcggggaatttttaaagattatgttatagggtgctcgtaaaataggtgcaccaatatatttcctatcaatttcaccatttaaaaaaa

SEQ ID NO: 90682 - DNA, 619 bp, Cannabis sativa
ccaataaaacgtgcaagagtttcaaacttacttaatggtagtctaaaaacttgtatccaaaaaggagttatggtatggaatctatatgtgcattctgtagaacactcggaaggcaaaggatcatatgttggttatgaaaatgtcatggttcctttgacatcactctgtttaggtctccttcacaactaaaggagaccatatatgaaccaacttataggtagaaatggcaaatcttcctttccagttagtcatgataaaattgttgaactgttttaggttgtaacctttgcgggagaaaattttacagatcagtcgatgaaaagtagggtgtggtggtggaatagcaatattggacaaattgattacttctctctctctctttaacaaataatgcattggaaaggttaggatgaaaggaattcatcgtgaagaagatgaaaaccataatagaatcagcagatcaaacaaaaaaaaaaaagccaaaaagagaggaagcatggaagttaattaaagaaggagaaaaccaagaaagttatgagcggagaaggatggaagcaggttaattattgataaaagtaatgggcgaaaaccaacataaaacaattaaaaaaaaaaagaa

SEQ ID NO: 90683 - DNA, 908 bp, Cannabis sativa
gtctatttaagaaaaatgagtcagcccgacacgaattatactagatttgcgagccgtgtcaggcatatcctataaaattattgcacggtaggacatgactcatattttttttatggcccagcacgacacgacccgtattttaaaaagtacgaaaaatatgggttaattaggttataacacgacatgtacatatttataactatgtgtctgagatggtttgggactacatttcacaaaggggtaccactatcagatagtggtatctctttataaaatgtgaagttttagaaccctaacggaaggtattttaatttactgctaaattttttacttaagtattaatttgtcattataagataaatttaaatatttatactgcaaattactcatatttttaaattaatgacggactgtaattacaacattgaattttttgtatgttaattttttaaaaaatccgaataatttaaagtgtgaaaaaaagaatttcaaataatcatttaatatttgatttgagctttgtttttcacactcttaaattatttaaaacaattataataaattttcgaaaacaattataagattttccatgtatatatacatatattaatattacttggaaactttaaagaattagggtttctttgtttttttgtttgtttttttattttttttttaatgaaacgaaacgcacacattgttagctaagtatgtttaaagaattagttataataaattaataatggtcaacctattaaagaaaaaaaaaaccaaaccattttaaacgataggatagtttgatgggtttgactttataatttaaacatcaaagaattaatgaagccttttaattaaatataatcattcactaatgtgactatatattaattgttatatataagcacttt

SEQ ID NO: 90684 - DNA, 561 bp, Cannabis sativa
atttcctacagctgagaccttatttccagcctcaaggaattcctcgataccagaaagaggttggcgcaaaggtcttctgatgcatgtttgggtcttaggttggctagattttctgatagaaaccacaccaacttccctcccgaatccatccgaaaccacgccaactttcttccgggattcctggtcagcctgaggaggacatctaagatcactcacatgatctatgtctattcccgtggagacaaagaaaaagttcaatggagcaacaaaaaacatataaaattaataatatgtatcatccgactcagatcaccatttacaagggataacactcacccttaagaatcacttatgatgatcgcccgtaacgatcaacggggttcctttggtttagatttgtcggaagctcctcagccttggaatctgtcgtttctggttccaattgaggtttaaagtccttgggaacggatgaagaagaaaaatggttggtgcatcctggagttatgaatttgggggggtgaacttctgaattgagatgggacattctatcaagaaagagat

SEQ ID NO: 90685 - DNA, 1318 bp, Cannabis sativa
aaattgtccatactggtcaatcgggttatgtttctctgttcagtcgatagaacatgatgtgatttgccctatcccttatttgcaaagtagggatagagcgtctgaaggatggcactggttgaaatttttagtgcccaaccctacgaagaccatatgaaataaagtacttttggcatactcccttcgacatggttgtgcaatcagtgtcacccatccattcgtgaccaatctggctgaaataaaaatatccaatcctattttacttcggtgcatacttcagatcaaagtagtactcagatcaaagtagtacgccacgaggacataaattgggataacatttgcgtgactgattacatggacaaaatcagtgctgcatggcagtatagttcaccaataggaaggccaagtcagaacctgaacaaacggagaccccgacacttaaaaatgcatcaagtgacgaactagctccctctcaggagctggccgaccacccttggtcggacccatggccgggattgcaccacgaccggctagcctgccctccacagagacttggccaactaagaggtgctcagcaggctttcctgggcacttctacacgtggataacaactcatgggctacaaattgggccctaaaagcccaacagaatagctgaataatatctagaatcaagggtactttggtctgttataattatttaacaaactatgaaaatatctagggatctaaactgtaacctagggttttcgacgtcctatataaaggccttaaccttagcctagaaacctaagttgcctctaagcctgaaacctgcatccaagctttaagtctaagtttgataaaatctctcttcctcacttcctctctcacacgcctaccctagcatcatctgaacacttgagttttgccattattgattcataccttttattcctaaggatgctatagcaaatcccacctatagtgatctaaattgttttaactctcggtataaatataactaaaaagaaagtaggtcattacccgttatcacaagggggtcgtacctctataacaaacctgttgtttattttatttcattcttttttacgcaaacacgtggcaaacatcagattcatatgacctcactattggttgatcactttttgaggtcatcagcttccatgaaattaatttaggtatattagctagtcatgaaattaattaaaataatatttaatttagcattcaaaaaataaatatttaatttaatttaaataatttttattttaaattaattattatataattttaataaattaaatttctaaatttat

SEQ ID NO: 90686 - DNA, 620 bp, Cannabis sativa
tttttttttttttttaaaatcagtatattataatatagctcctgtgtaaaccccctctctctatatatataattataacaatatagctaaaagggtactctctgatttgagtgacaactttcaatttcttcttttatgaaacatactcctgaaacaaatcaatacaagataatttttaaatagttcttccttatataaacaccacaccagaacagatttttttagataattattttaatatgaataaataaaaatgtatcaaagtagagaatttcaattcatatgataaaggactgtacttattttagccttatatatattatagttatttgatataattgaatatcaacttcgatttcacataacatatacagatgaatgctaaatcttcacgataagaaatacaaaacaaacacgtagcaacaaattaaagccaaattcaaacattaaagtgaagataaaccccaaaacacaaacattcattagattaagattcataggctttatagaacgagaaatccttacggacaaatagaacgagagatgatagagatgttggaatggactatggagacatattgctccgactaagagggctgtgttggaattaattttaccag

SEQ ID NO: 90687 - DNA, 1924 bp, Cannabis sativa
agaatgggcagatcgagagtccttaattcctgaaatgcagaccacttacgtcactactaccaaaaggcggaggacacaagatcctgatgaaacctcaaaagtttttatgtaaaggtaaatgtaattcactattgtaagaatggccctcgggcatcatgaaatcaaaacaaaaaatagtttacatttgaatttatacattgcgtttttaggccacaagctatgtttaaaacaagtgaccaggaaggtggaaacatccacacttctcatctcacttgggggtatcatatgcctaaaatgtgtgtgccccaaaaaaatgtactgtgtgccatgtttgttatcttgtttgttttgtttattaacattcataatttttttcttaaaacaagatacattttaaatcgaattccttaaaaagaaaggtcgcttgaattccttctttaagttaaaataagcacatgtttttcaagtagaagcatttttagccaaaattcctagaaaagggaagtgtcgcttgaatcccttctcaaaaaatgtataaaaaggagttgcttagagtttaagaattattagaacgagaaggcctcgcttaaaatcctatagacttcggcgttatcttgaccaaaaactattgtctaaagtctatagcgtgtgaaatcggcctccctaaattataacaaagcttaaacatctgaagaatgtcaaggctccatgatcgtatagtaatctgggaacagcccaaaagaccatttatgttttcagaaacttttagttggctcaggcttaaaaattttatgaggggttaagaccaaatccaccatgcctagtttatagtgtgaatttttcacctaaaaactcgagaccaggctcccgtaaaaatgacacatggattcactctcctcgaggagtgctgagctgtcaaaaggagattacttgagtataagcctcgcctgaaccagagtcagcgagatgatgtgaccctcacagcgtctagtcgcattattatgcctcgcacgatgcaagactgaaggccgagtttaagactcgcatataccaagatatatgtgatgtccaaaaaggttttcctgtgagttagtaaagatcgattctttactcagagagttagtccagatgacctaacgcgctcgataacccaataaggactcgcatgtcctaagttatcaactttctgcaagatatctgtatacgcgactcaaataagaagcagatatcttaaacacataagactcgaatagtcttggacgcatcttaaactcgcaagcttatatgagactatgaacagacaactcgcaccactaaggtcgcatacgttgttgtagttagtaaattgggtcgaaactattcttcatttatgatatttaagtttttattgatttaatggttaatatttaatgtagaaacggattgataattaatcaagttctatataatcaaaggagacttactttgtatataaaggagtgatccgatatgaaatggacaagatagaaatccttggaacaatggactaagtagatcgtgatctggctgaatcactatacttcccttgtgttatttatattttccaatacgtctgagtgtccattttttgaatactcaccattttaggtcgagtactcacgttatttgcattaaataattatattcttatctttatctagtgttgtcaaaattcctctaacaacatttggtgtcgtctgtgggaaagaattttactgttgattttggaggaaaatcataatgacttgaaactagacaaatggagataacaacacaacttctttcaatgtcgaaataataaatgttttgctttcaagtaatgggatgaaccctgttgacacaatcaacaggggagtgggacgtaccacttgttggattttatcccctaaataaaactctttacaat

SEQ ID NO: 90688 - DNA, 850 bp, Cannabis sativa
ctctctatagaagaaagggaagctgacacaatgataggaagtgtcttattctctcccaaatattcgtacctcaagtgatctggttagaattttaattctagttcaggtggcttttcaatagatggagctgactttgttgggatgactcctaactcttcataatgttttcaattcaatggttcataagagtcaagccacatggtatatttgtttacttctttaccatcttgttccaccacctcctcttgcacaaaagtcagattaagagggtcatcactgtgctcctttgactctaccaacttgtccaccacgtcagttgaaaaaaaattgtcactagctgtaggataagtcattgtcttgagtacgttaaatacgacttcatctccttgaactctaagcttcaactctcccttttggacatcgatcaatgctttccatgttgccaagaaaggtctccccaagatgatagggatattcttgtcttcttccatgttgaggactataaaattagcagggaatataaatttgtccaccttaacaaggacatcttctattactcctcttggatgggctaaagaccgattagctagctgcaatgtaacagttgtaggttttgcttctccaagctgtaaccccttgagtactgagaaaggcataacgttgatactagcccctagatcacataatgcatgtatcttttcaatagtcccaatagtgcaaggtatagtaaaactcccatgatctttcagtttcgaaggaagtttcttttgaagaatttcactacactcctctgttagagctacagtctcaaattcttccatctttcttttcttagacaaaatcttcttca

SEQ ID NO: 90689 - DNA, 888 bp, Cannabis sativa
ccgaggttgattcttggtgtgagtctggggtcaaggtccaggaccgagtccgggtctggtcaggggtccgagtctaggtcagggtccgagttcgatatttaagaccagggttggggtttgcaacctcagaccttttgtaaatattataattgaagctgatacagatcatttgttatgtattaaataatacgattcacattgtgttaaaatttacagtcgtaatcattaatacaattcgggcttgtttagtatgttgtattgtattgtatattagtattatttaatacaatactatatttggtattgacttgtatttatagatggtgtaaacttataatatattttcaataaacacgaacacgacccccaacatcgactacggatcgatacataatattaaataacacaacttacattatattaaaaactttagtcgtagtaattgatacaatacattgttttatccaaacatagtattatttattatttaatacaatacgactcttatacgacctaccaaacgaatcctactatgttttatataaacgtagtgttatttgttatttaatactatacgactcttatacggtctaacaaataagtccttattttttttaccaatgtatttttagcatttcttaccaaaaaaaaaagttttagggcatttttatagataaataggttctaaaagtaaaataaactcaaagcccaaatctcactaatgttgaattacatagatgaagttaagaataccaaaaaccccaagctagaataaggaaaagaagagtgtttaaaacaatcttcttttctaatataaagtacaaataccactcatcttaacacatatatacatatctataaaaacagcactataataattgatatctc

SEQ ID NO: 90690 - DNA, 600 bp, Cannabis sativa
ctaaaaaacaccagtagaacaccagtgaaaacttaacacagtatattgcagtatgaaacttataaaaaaaatactgtaagaaaagtaaaaaataccacctgatagtatttttgtaaaaaaataataaaagttattatactatgtaaatttctccttttttattatgaaatatactctcaattacttggcacaactcatcaacatcaaggatgaagtattagtctaactaattacaaattcttacaagaaacgaaagaagaatcattcacaaaaactttacatataataatattttctgaattttagtgggccttacgaaaaaaaaaaattaggtccttattaaaaaaatgtggttttttctaaaattaatataaaaaaaaaggtgtaattttaaaaagagtagcattttttggacccctaagttagatgagcactaggcgcgggcctacccacctttgcttataggaccggcttacttaaagaagaggaaattacactctataccctttttatattgcccttttttatttttaccctcttttttaaaatctattatttttacctctttttttaaacattgtactaattttgcccctgtca

SEQ ID NO: 90691 - DNA, 1012 bp, Cannabis sativa
ttatatagataattacccaagtccatgcaaagaacgcaagctggaatgcattctgcaatgacaaaaaataaatgaaaatatattagaaaatttattaatttattgtttgacacatgaaaaaatatacattgatgttatatatgaaattataataatagtagtctatctataaattttataatatagaacattaaagtatttatgaaaataaatagtcaagccatgatacatcaactcaattgaccggtgttagttgtttgttttgtttagaacatggatattaattatttttcttaaaaaataaaataattaagcccattgatcaagtcataataattaaattggaaattataagttttatgaatttttatagtatttatgaaaaaaaaattaagaaattgttgaaaaatgatgagaaaccaaataagggtaactaagtacttgtatgataaccagagagataattagttatcttatattgtttgtctcatatttttttttttaattttcatataaaatatttttgtcaagaaaaaactatattttacacattataccttaaaatcataaaagtaaaaaatctccaaataactattagagaaaattacattatatatccactttactttatttattttgatctttacctctattttcattttctttaagagatacccactattatagatgatgtccctattatacccgttaagttaatgtaaaatatatgttaaacttaagtagaaggtaagggtatattatatttgagaactcactcacaaaagtgggtatattttaataaaatataatataagggtatttttaattaatggacaaaaaaagatatttttcaatttatccctaactattattatgactaaggtgggctaagttttcacctaggctcactcagcccaatacttaacttttttaatttttagaaatggacatattctttaataattttaaaaatatcactttctttttattaaaggacgtataaaatctgggg

SEQ ID NO: 90692 - DNA, 703 bp, Cannabis sativa
cataaacaccgccagtgagagtgtcagtactaccaacggttgactgccgctcagtagaaccctagcccgactgggttcagtgagttcattaggaggatactaacgccggtacaacaaaaataacctgagtacttactatgtgtcagagatacagatagtaacaggatgttcactgtagtgagaagcaaccgtattaataaatagcgaataataatcccgtgcgatcaatgctgaatgcaatgattgtgggattcacgctgaatacactgatagcgggatcttgtgctgatgaatcatgttgcgagaagctttatttgctaagtgttggtcgccatgcgcggattgctaaaaacaaacatattgtgggcatggttaactgttcgaatatttttgaaacagggatgtcattgtaaccataacgaacaccccgtgaaaaattgtaatttttaaaaaaatattccgacatgtaattttcggcttgaagattgagacagagatagaaacaggatgttcactgtaacagtcccacagaaatgatgatatggaacaagtgtatccagtgtaatatgggacgtacactgttcactcgttgtacattgtcaatccacacagcactaaaatattattttaaaataaaggactgcttgtgacatgacatgatacacttcccaacgaaacaatcagccatgccctattatgttgt

SEQ ID NO: 90693 - DNA, 848 bp, Cannabis sativa
ttttcaatctgtttaacattgctaaccacaagataacactgtgtttggggatgtttagtctactccaaacctcattgcaccacttctgtccagcatcagcaggatagaataacttgtatcctgctgcaattatgtaatgtccttgctgaaaatctgttatatagcactttagtttcagttggtctttgatagctactagccttttccaataccaactagcatggatagaggttgtgtagctccaccaatcttggtctttgagatatacactatgaatccatctttgccagaggctttcccacttgtttaagatggcccaaatgtccttacaaatggccgctttattccactcttctatctttgtaattcccaatcctcctgctttcttaggatgacaaatgctttcccaagccacagcccaggaccatgaaacattgcttgacctttccacaaaaaggccctacaaatagcttctatagctctgataacttttttttggcaatgccatcatttgactccaatatgcctgaatcgctattagaactgagttaattagagtaatccgacctacaaaggagagatttcttgtactccaactcttaattctagcagtcattttttcagccaatagctcacaatccttgcctaaaatcttcctaggacaaataggtatccccagataagtaaatggaaaatcctatctagagaaaaccgatgctttaatcaacttcttcacacttccttcctccatattactacaataaattgcagttttactggcattcgggtgaagaccagaagtgacggaaaatagtttgagggcttgaagcatatatgtgatgctctgt

SEQ ID NO: 90694 - DNA, 1304 bp, Cannabis sativa
atctaatcccaaagttatagggatttcttcggtgagtcacgatgcgaaagctgaatttgctaactgttggcgtgctatgcgaattactcactgcccggctaagaaggcttcgtccgagcgaaaataggtggttccctgttcggcatatttcttgtgagcaggtacatagagttgattccacgtgtcaccatcgtccgatgccacgtcatagtgcaaaaattgggatacaacaattatcccccattaaatggatttgtcctcaaaatctaacctgaacaactctggatattgagtcctcatgtcggactgcaacttccaggtggcttcctccaccttactgtttctctagagtaccttgaccaaagctatggtcttgttcagaaggactttatcttttctgtccaagatctgaacttgttgttcttcgtaggatagatctggttaaagttcaatgttctcataactcagcacaggagtgcgatctgaaaatatctctgtaacatagagacatggaatacgttgtgaactgctaaaattgctggaggcaaggctagacaatatgctaccagtccaacctttttgagaatcccaaaaggccctgtaaaccaagggcatatcttgcccttttcctgaaacgtctgatcaccttcatcggagacactcgtcagaatacatgatctcttacctgaaactctacatgtcagtatttcgaatctacataactcttatgcctactctgcgaggcaagcattgtggccttaatcttttctatagcctcattagttcgttgcactgctttcggacctaggtatttcctttctcctatttcatcccagtgaattggagatttgcagttcctgctatacaacatctcgtagggagccatccctatagtactttgataactgttgttgcatgaaaactctatcagtggcagttacttgctccaagagccttcaaaaccaaatacaaaggtacgtaacatatcttcccgtatctggattttcctttcagactatccatcactctaaggatggaaatttgtactgaacttcagtttggtacccatggtccgctggagactgtaccaaaattttaaagtgaactttggatctctatctgatataatggactttggattcccatgtaatcttactatttctttgaaatataactctgcgtactagtccaccttaaagacttgcagaaaatttgtagactttgtaaatcaatctaccacaatccaaatagaatcatacattctcatggtcctaggtaacccaatcacgaaatccatggtgaca

SEQ ID NO: 90695 - DNA, 719 bp, Cannabis sativa
aaaaaaaagactaaaaaactcttctaaatgccgaaattactacaattttttttttacttttagtcttaacaaaagtacttgtggctaaaaaaaaaattatgactaattataaatcattatttctatgttgtaactaaaaggtctgagctaaaagtaaaagtctcaaaaattataattcattgtgactaaaagcgtttttagtcacaatacttgttgtgactaaaattaaattagttacaacttgtatctaatattatgttttagtcacaagtaattttttgttgtgactgaaagtcacattttttatcacaaaaattttatgttgtaactaaaaagtttttactattttttttttttaataaacaaataaaaaatctaccaaaatacgtatttaaaatgatgtactataaacttatgtactatagtctcttctaataattaggtgatgaaacatgtatgatcgtttgaaaataaaaccatcaatatttcattatatatatataattgatataataaataatggataatcaaagtaatttcttttatactaaagtattttagaaaaagggaaatatataagaatttttttattattactttttgtgctcactgaactatatactacatcaaattatgccccaactttttaaaaaatggcattattaaatctcatgatttcttttttcataaattccctaaacaattttggacattgcaac

SEQ ID NO: 90696 - DNA, 695 bp, Cannabis sativa
tctggatctgttgttagaagcttgaattcctctttccagaatgctgaaaaaccaaatgtaaagataacattagatgatattgaggaggaggtctcttattggaaatcagcaattgtacgttatgtattaggagctaatcccccattagaagtgcttgaaggttttgctaagagaatttggaaggaaaaagtggatagggtagggctaatttcgtatggaattttcatcatcagattctcatctgttgaagaaagggatgctgtattgaatggaggctatacattctttaataaacgaccagttatcatgaaagcctggaaccccgatactaattttcgaaaggaagatatcaggagggtgcctatatgggttcaactagagcaactggaactaaagtactggggtcagaatactctgtttaagttggttgggcagataggagaaccaatcctagtagatgaaataaccaaacagaggcagaagttaacctttcctcgagtactggttgaagtgcttatgaatcaagagctgccagaatttatagagtttgaagatgaatatggaggaatggcaaaagtgggaatcaaaatacgaatggaaacccaacagtttgtaacaattgtaggggcctgggacacaagactatagactgtaggaagacacaaggcactcagaaacagcagcagtgggttgcc

SEQ ID NO: 90697 - DNA, 1512 bp, Cannabis sativa
atgtgggattgaacaacttacccggtattttctcttacagatcatgggagtactgactgtcacaattatgcagatttaatttctaagtgagatttattttattaactaattatgtaggaatttaagttcatattacccaaaagtcacaacccgttacgtttttagaacaatgtttgaaagtaatagacaaagagtgataatagagttattgattatggagttcatattattttaatcaataaacaagtggaatagaaatgcttttttctattatatgttttctttatttaaaactttatatcaaatatttaattttttaatataataatgttatttttttttaataaattacatctttacttaatataacaattaaaagttaaaatacattacctaattaaaagaatcctcttaaaaaaaattaaaagaaaaaaaaaactaagtatacctgcaagttgtgcacctcatgtaacatcaacctagtatatatataaatattagaggacctccaatggaacactatttcaccaaattaatgttgaatctttacactatttcactccagtgacacactaaattatgcaccaaattagtatgcaccaaatgttaaatcattaatggcgttgattttgaatctgcatcaattcggtgtacaacttttttttcacattctaatccttatttaattttattttcaaatatagtcttatattttagtcctcaaattaaaatttatcacaaaaataataattgatttaaaatactaacacatttttacaaatacaaaataacaataaaaaaaaatactaatagtaataaaataagagcaatataattaacactaaataataaaactaattaaaatcaacaacatttaagtaattaataatttaatagtcaaattgatcacttgtgaatcttagccttaaaaaatatcaaaatattaactatatagactttaaatattttgagaatcttgatatctttgatatgcttgatattattggtgagctcttttttacataattatttttttgattgttttgaaaatagtcgtgtatattaggatcaactacaaaatttcaataagatttttaaaaaaaaaattgtgtttaattaatttaataaatatttattaattttactaaattattttaagattttaaattcttaatgctataattcttactaattattttataaattagctatttttaattattaatgtaaataatataaaatgtgagattttaaggtgttgtttgataacacttttgttttctaatttcttaatcacaaaatgaaagtaaaatttttgtttttaaaaattttacttttaaaaaataaaaatgcattttgtaaccaattttgttttttaattttaaaaacaaaaaacgaaagtgtgttctgtaaaattcattttcattttttgattttatttatgtaggttttaggtccagggtcggatttgagttcaagtcagaggtcgggttcagcgccagggccgtgggg

SEQ ID NO: 90698 - DNA, 518 bp, Cannabis sativa
caattattaattatatattttatttaagatgatttcatactttttgtattacacatttaataaaattttaattaactcattataaattaaaacttttctttttcaaatatctcatagagcactttgtttaatattttttctaattttagtttaaggaacataattatgtcaatttacaaaagtaaaatggtcttgaaaatttgacaaaaattaagttaattttgttttagctaataagtaaataactttttttgataatctgtagtaaatggcaacaaaccaaaatgatatattcttgttatttatcatatgtaatacaacttcaaaaaatatataattatggtatctcaatagtaacttttgtgtggtttttcactctaaatcccatttaactaaatatatatgataataatgtagagatatgattttgtctcgtgatgtacttttgtggtacattaaatggctctcagggtacattaaatgagtgtcaggatacgtttctactttttaaccctaat

SEQ ID NO: 90699 - DNA, 907 bp, Cannabis sativa
agttcagggggcaaaatccttttagcttttttttttttttttcagagaatgaatttgatttttaattaatatggttaatatcgccatcaaaatactaataaaaaagcccctaaacttaagaaaatatttagctagagtacacgtacagaaaatatatgtacttagagatattttttttaattaagtgtcattttatattaataattaatttatttattttatataattttttttaataagttggtcactctaataaagaaaattactaatatttaagattgtgaactcttaagcctcatttactaaaaaagaattttttgaaaaaaaaaatacttttccaatattttcgtttgatagatagtgaaacttagagattgaacattatgaacacattgaacatataaaactaaaatttaaatatatttgattgtataattaattaatcaaataacactaatgttttattaccacagtttgtattactctactaatatgatttttgataaatattattcacttaaaggttacttatgttgtatgagcatacatattatttgttcaccaatcaagatgcaattaagcaatcttaataatatatgactcgttatttttatcatctacatataaaagtgaaaaaatggcatatacatatcacattcaaacgaaaaatattgaaaagtatttctttaaaaaaaaatctctcgtgtaagatacctgatcatttgaagatcttttagtaaatgagacttaagggtccacaatgttgaatattaataacttttcttattagaggtgaccaaataattcaaaaataaataaaaataatataaaaaaattaattaattattagtataaaataatagagtgacacataatgaaaatttatatatataaatgtacaaacatg

SEQ ID NO: 90700 - DNA, 3182 bp, Cannabis sativa
tttttaagtcttaatttgttgtgtcggttataaagtgacgctacttatgacagtttaaaactaacgtaaaaaataaaaaatattggtttaacaaacgcaaacttgtgtcattcaaaaactaatgaaaaaaatttgaagcggtctttttacaacaaatttgggcgttgactgacacaaaaaaaaaaaatcattttctactctcttgttgtatttgttaggtaaacataaaagtacaacaattgaatgtggtaaccggtagattaaattaaagaagtaaaaagtcaactaataaaaaatcaattaatgatataaaatgaccataaaattaaatatactacatagggtagttaaagggtgcaaacaaaaggttttgatgaatcttttaaagagaaatgttaaaggttacttatagtgtctagcacccttgaaagatataatatcattactggtataatttagtattaaatttcacttattttattttaataaaagttataaaaaatcgttaactaacattataaaaaaaaaacaattatttttaatgattactttttagtcacaacaaactgtgatctttgtgactaatacctttagtcacggaatttttagtcacgacataagagtaataatttgtaattaatgataacatttttacttctaatcataagttttgttgtgactaaaagtaagatttttttatagtgtaatcatagaggccacctcatatataatggtactaagtacattgatgtcccatagcaatatgcttatcttaagtatatcaaattatagtttaaaaattttcaaacttgtttttatatagctaaattttcctgtccctagtttagccaaccttattaattaaccttaattaagctttactttttttttaacttgagaagaataggaccaaactctctattaattacatattgagaaaatttaatatttgagatctaaatatataagttaggtgggtgggactaatataactactacttaatatttaataatttctttttttttttatatagtgtaatttattctgcaacatactgcaaaaaaatgtcattttgagtgacaaccttttagttataatatacattttttgtcattaaaggtaactatttagtcacaacaaaaagttacttgtgactaaaagatagtatttagatacaagttgtcactaatttacttttattgtgactaaaaacatatttagtcacaacaaattgtaatttttgtgactaatatacctttagatatggactttttatccacaacacattggaattattgtttataattagccacaactttttcacttttagtcacaagttttattgcgactaaaagtaaaaaaaatttatagtaacacttaactatgtatataagtagttggtagcaaaactttctaccattaaaaatttgtcacaattcattttttaatgttggcaaactgttaattaagctcaactaaaatgacacatgtgaagatgatcatattgatccaaaataataattttaaataaattattgttacaaaaattaattaaaaaaaatttaaaagtcaataaataagttaaaaaaaagtatctgtatgtatttttaaaagtgtatatatgtataatactcctaatttttctaaaagaaataatttacattcttataaaaattaaaataaattaatataaatattatttttaaatttttatttaaaaatttaattcaattttctttactttttcgttttgcaagattgaaaatttagattttttttttaaggttttagatttaatacttaattttaaacttattcaattttcactatatatatataagtaatacttgtctcaaaattattgaacaatcacttccaacatattgtgggaaacattcacaacctcatgtttggctcttcattaatccatcatacactaagagatttagccaagaaatatggaccattgatgcacatgaacattggtgaagttccaaccatagtaatctcatcaccagaatttgccaaacaagtgatgagagtccatgatgttaattttgcatcaagaccctcaattcttttttcgaaaatcatgttatatgatggtgctagtcttgcttttgctccatatggtgagcattggagacaggtaagaaagattttcatgcaagagcttttgaatacaacaagagttcagtctttcaactacattagagaagaggaaatgctcaactttgtagactcgatttcatcgaatgttggcaatgttattaatctcagtgaaaggctcaacacgttgatgtataacattatttcgcgtgcagcttgtggtagaacaaggattcataacaaagagttcttgtctttgttgacggaaattgttgaggtatcattagggtttgaactttctgacttgtttccttcttttaagttattttatcagatgagtcgttctaaacctaaactcgagaggcttcgagaaaggacggcaaaaatatttgaagagataatccatgagcacaagaagcaaaaaccaaaagagagaagtgatgaagacttcgttgatgttcttcttaagtatcatcatgacaatgatgaccttggattttctttgacaaatgagaatatctatgcaataatttttgtaagtactttcattttataacaattagaaaaacacattcacttggtgaaagcactttgttatatatttaattatcatatctttactttcattttatgataattttatatttattaaagcattaccaatgctaaactttacaaggttgcaaacacaggcaactctataagttgtttgcgttggtgaaacacttacattagcactttagaattaaaaactttttatgtctcacatgactccctttttcgaacgaataaatacatataatttcagataatattatatctcatatagagagtattttatatgttttatttgtgatttttgttaatatatataaatatatatagttatgaataattaataattatgctaggaaatatttggtgctgggattgagacatcagcatcatctgtagaatgggttatgtcagaattgatgaagaatccgaagataatgaaaaaggcacaagatgaggttagagaagtctttcgaagaaaagggttgggaaatgagagagcactcgatgagatgaa

SEQ ID NO: 90701 - DNA, 509 bp, Cannabis sativa
tttttttgaaaagggaaagggtccgcaagtcatagacaggacccttccaaaagtaaattaataagcctcgcttgtggcggaggaaaaccatattacaagtgatacaaggggtagatacccctttacaacaaggcattccaatctctacttaaatctaagaaggacaagtcctcaaaaaacttagttttaaaaacccaagtagctgtccagaacttagctttctcccacaattcctctgctgaacactccaccccttcgaagattctagcattcctttccaaccacacagcccaaattattgctaatactgccgttctccacatctttgttgtgcgtttacagccctttagcttgctaactaacagttgtggtacacatcttggcataacccatgacaacttaaattcctttatcaacttgatccataattgactgatgaaactgcatcctaagaatagatgccccacatcttccccgctagctttgcagcaaacacaccatccaggtga

SEQ ID NO: 90702 - DNA, 589 bp, Cannabis sativa
gtatgcaatatttttatcaattgagttgaattcttgtattcacgattatactgtcttagaaaaaaaatccatatttttgtttgtgtgcaactttttttttttaatgtagatatagaacaaatatgaattcagtaaaaagggtactagaaacgtctctggatttaaacataagtgatcagcagtataaaaacttacgtcttctgatcaatatatacattaacagagtgcaaggaacagagtctttgtataaagaaatagtgaatttcaattcccgaatggaatatattcttgtattcacaatcttactgtcttgacaaaaatatatccatattattgtttgtgtgcaacattttcttttggtggatatagaacaaatatgacttcagtttaaaggataccataaaccactggctttagtaacatagtgatcagcagtataaaaacatagatcttctgagaaatatttaccatcccagaagtggaagggaaggaacagagtctttgtttaaagaatttcaattctcaaatggaatatatgtagagcttagatgccatgactccttactacgacaggatacaatatctaaat

SEQ ID NO: 90703 - DNA, 704 bp, Cannabis sativa
  modified_base (377)..(380): a, c, t, g, unknown or other
  modified_base (666)..(674): a, c, t, g, unknown or other
atagtaaaaatggagtgtatacacgtacccaataataagaatgaattactatttactcaatttataaactataatcattatgtaggagagatggtcgagtagttcaaggcgtagcattggaaccgctatgtaggcttttgtttaccgagggatcgaatccctctctttccgtatccttcacccaattcaccgatgttatttaccgtaatatatcgaatcaaataccaatggatgccaatattccaacaccaatagttagacctttcgttgatgtggattctcaagtcctaactcaaatttttgtgatatgaaaaatactgaaaagtaatggataagaaatgaaaatcccccaagttagtttaattaggtttaagtcnnnngagaataatattcgacaactagcaattcatttattttcaaaccgacccatttactatctattatttgattgaccaatccttgatattggaatgggttaagagtcaaatgttttggcaattcctaatactagctactagttggaggagctttgttggaccaccattcttcattgtctatgtacacattatgaacccactgttgagttttgtgccctaaataaatctcgtttcaatataatcatatttactaattaataaaagatcaaaaatcattttatgttgcatnnnnnnnnngatttatttcatgattatatgtttcatgta

SEQ ID NO: 90704 - DNA, 736 bp, Cannabis sativa
atactatttttgtgttatttgtaattaataagtagttttttgtgtgtattagtttgtttatatgtggttgttgttgcttgttttgtctcatatttgatggtttgccaagtatggtaattttgtgcctagtgtggcttgtttgtactatatatatatatatggtagtttgttatgtacggtagtttgtttaatattttttctaatagtttaagatagcagtgacatcctcagctccaaaaatatcaaaagataaattttcaacaataaaattaatattcacttttatttaatactataattaagtagtatgttaaccaaattttgtctttttatcttttgtgtattttctcacacacttaaattttcgaggatcaagattttaaggagataaatttttagtacaatttatttcttatattaatatagtgtatctgtttattattacttcactcatttcattattcaagttttcaaagaatttcaacaaaacataagttataattattacatcatattaattacttttattttattatttttcttattttgatagtaataatttctttccttatttgtatatttgttggttagacacgcacacttttaggggtttcttttataatactaaagttttattgtctagctttttagggacatctctttcacatgctagtcgtaacgttaatattgtaatccatagatttgtttaacataccctaagaatagatagtagact

SEQ ID NO: 90705 - DNA, 561 bp, Cannabis sativa
attgtacttatgaaaaactagatagactgtcaaaatgacatcaaatttggataagcaaaacccaacaaaccagactatttgttgacatgggcgctaggccctttaaaccgagctttcaagattctatttttgatactttcaaggcttctaaacttgagaacagggttggctctcctgtttttgaccatgagagattcaatggtcacatcaaattcggcatttaagaaattgaagttagcatcccaagttgatcgtcaaccagtatatataaaataaaaactaataaatattttattttaaattcaattctattaattaaattatattacattatttgaataattaatataactgattctgttatggatatttattttctataaccaatttaagaattatctcaactacattaatagaatatctcaactatgggtatgctcttaatgggtattacccatgtatgggtatttcattcttgaccattggatcaaatatctaatggttgatatttattattattaattaaatattaaaaagttaatatttcctattttgtcactt

SEQ ID NO: 90706 - DNA, 1176 bp, Cannabis sativa
tagttactatttacacgaaaactaactttgatgcatgtggatatcaatatttgacacgtgacaagaaaaaaaaatatatttatggagttgtgaaatcttgagtcatagtagtcgacttgagagaggtctctagccttatgcccgaattgattccgagaactctaaaatgggtgtttagatcccaacaagttgtttctaatgcaccatcattcagtattctgaaccaaaaagacaagaataatccaaatctgcgacctgaaaattgaaaagagacgaaacaacatcccaaaagtcaacccgagtgcctaggattttcatctaacgtctaggattttcacccagcgcccaggttgacattcctaactatagtttcagttttcgagtccatcttagtgcaaatagctcaaattttgtacttagacatgaataagacttatcacgaatcgatcagaatcagaacacttaccatttggagcatccaggcacacagtgcacaggccacctagtgatgcatccagcgcccaggttgatattttgtcaacctaacttatttccaatcagttttctcaaaaagtgctttaggcatcttttctatttttaaaaataacgaagatacaaacgatctcgaagagcaatgagattgtctaagggttgaaacagggacccaacaacgcccaagttgacttgggcactgggagtgggccatgcgcccagcaggttcacgtgcaatctagttcgcatgtttttgcccttcaaacacaaattttgctattgaaattcttcttattatggttaaaaatggggtaggagacctcatcacaatctctaatgccatagaagtatcaaaacaagtcccaggaagtttccagagaagcacccagcgcccaggtgacatgtggcccgatgcgttgggttctgcttatctgattttgatttcgtctcgaacatctgactattttttcgtagtaaatgagaattacgacttgtgacaagtcaaattcatactttgatattcaccttttcaataaggtgaaatattgacaaaattgaagagtttcgagtctactcgattcacaaaaaagcgacatcttcgagaactggtgaacaactttaccaaaactaagaaattgattaagtgatttcaaaatatcacttaggcatcaaaaaaatacaagt

SEQ ID NO: 90707 - DNA, 602 bp, Cannabis sativa
ttccttcaccaaaacagccatgaatggggaattgtgtgttttgagggtactttgaatcatgcctacatctctttaaggaatgtcctttcaatagagttatattttttagttatcaatgggggattaactggaagacattcctactactaacactagggagatggtatttttggttctttcagcagagtaaatccatcagaagccatgaaatgttgtcttttgtggcttgtgctctatcaaaaatctagaactctaggaatcttgtcctcttccaagattattcggcaaatattcacacatctctgcaccaaattctaaagggggtgagagaattccttcgacaacatgttgaatattctgctcctaatctttctgcatctcgaggctttccctagcctcattggaagcctagatggtgatatttatgggatttgtgtggacggctcattctctaattcgaggtctagtattggcgttgccttttttctcaacagagcatgtattaaggtgacttctaatgtatctctagggccggcccaagcattttgggggccttgtgcaaaattttaaaattggacttttcttatatatataaaaaaaaa

SEQ ID NO: 90708 - DNA, 728 bp, Cannabis sativa
tgctaactctactttgccatggtgtgtgatgggtgatctaaataatgttctctcacatgatgataaaaaaggaggtaatagatatcctgaatttttaattcaaggttttcatcaagctttggcggatagttgtcttgaggatatggagttatgtggctatctttttacgtgggagcatggaaggggtactacttattggattgaagtttgattggataaggggctaactaatcttgcttggttgaacatgttctcatctactaaaattcacaaccttgaaatatctacttcggttcatgccccgattcttatggagctggttcctactgatggctaccatttttctaaacagtttcggtttgagaatgcgtggttaagggagcctctttactttcaagttattaaggacagctgggagctttgtgggaatgatgaggttatgaataaagtgagtttttgtggacaacaactgtgtgtttggggaaaggagttcacgggcaactttatagatagaattaaaaagtatcgcaatgaggtccaaaggcagaagttgggttgagatgatgtctctgttgcaaattataaacaatcaaggaagaacttattcgaagcttatattgaacaggaggtattttggcgccaaagatcgaagcagttatggttgcaagaaggggacaacaatagcaagttttttcatgcctcaactactaatagaagatggtataatt

SEQ ID NO: 90709 - DNA, 519 bp, Cannabis sativa
attattaaaataaaagatctacttgttcggttattagatatttatatttgaatttaaattttaaattcaaatcaaattagatatatctttatttttataaaaaaaaaaatcaatttagagtctattttgttatttaacaaaataaagggtacaattagtaatttttgtaaaacgtaggatctaaaatattatttattaattcaaattatatatttacacctatatatatacttggcactataagattcgccgtagcatttctctttatcaataggtcgtttgctgaagtattaagctcaaatggtctgcgctcctttagtaggctttaattgttgtggtcggtagtaacggtccaatctacaaatggtatcaccttaaacccacgcggcagaaagctatatatgtaaaacgagtactgtagtcggactataaatatatatatatatatctaattcagtcttttattatacatatataatttgatctttaaatttaattttggtgtgtactgtgtactaa

SEQ ID NO: 90710 - DNA, 647 bp, Cannabis sativa
ttggaaagagaggttttgtaaagacatcagctatgttaggagacatggttggtcttgatcttgccgttgttgatcttttcacgaatgatgtgacaatcaatttcaatatgttttgtacgtttgtgataacctggattttcagagatgtgaagagctgcaatgttgtcacaaaatagtgttgaagggagtttgatgctgatgttgagtcatgcatgatggagtgaagccaagttagttcgcatgtggcattagccagtgctctgtattcgccttcagctgaggaacgagagacattgtgttgcttcttcgatttccatgatattagagaattgccaaggaagatgcaataacatgagcgttgagtgtccgggcaagctcccaaatcatcaactgcaaaggcctggagatgaagtgatgctagtgcaaaggcatggaagaatagaccttggccaggggttcctttcagatactggaggattttgttggctgcatggaggtggggttcttgaggtgtgtaaagatattggctcaacttgttgacaacaaatgagatgccgggtctggtgatggttaaataaatgagtttgccgatgagacttctgtattgagtggggttttggagttgttttcctgtctcaatattgagc

SEQ ID NO: 90711 - DNA, 999 bp, Cannabis sativa
tgcttccatgtgtaggtaaaggaaaggcgaaagctaaacaagagtgagcttggctacgatgggattgtacatgtcgtggcagcgtgacctggagtgttgggtctcgggacatcaggggattatattttgtagtcgctgtgcgacataaaaattatatttaggcacattttgtgtaaaagtttagaaacggaatcccggtgtttgtaaattattatgtaaattataaagtttaatatttattacaaaagttttaatttgacacgtttttcgagagaaatatctttgattaacaaagatagcactgtaactaaaaaagtactgtagcgtgccttagcattagggtgttacagttttaattcaatcacgcttacatggttccttttagttgggtatgtcactcttttaataaataataacaatgacgagttatggttatagaattatgagattaataattcgatttaaaatgtgataagtagagtgaaagtggatagaattttttttttgtaaaaatttaatccaatttttttcataatcgcatatgttgtagcaatttaggattacttataaattttaagaaaattatgaatagtttacaatgctaaaactaaagttcaaatagttacataccacgcgtataaaaaaaacgtgtgtgtaacaaaatattaaaatttggtgttgtaaactactcagggtggtcctaaataacttttatgtacaccatcatgaaaaaatagaataaaaaactctcttgattcctaaaacaaataaaaagtgtaacaaagtacctatttaagggtgtaatatagacttacccaaaagtataatttcattagggagaattaatacaaaaaaggatcaatatattaatatttaatgaaaaataatgatacattaatccttcaaaaactcaaattatacattgataaaaatatatacaatagaacaagagattgtaacgtctctacttcaagctttcattgggtccttacacccaca

SEQ ID NO: 90712 - DNA, 741 bp, Cannabis sativa
atatatagggtggtcccaatttgtttcaagtcaatatatataaatatatagggttgtagtaaatagtgcatgcaagctagctcatgaacataatcactatttggtagtctctattacctttcttaaaaaggggtccaataccattgttcaaattccacaatgatgaccttttttctggctaaaaacattataagatgaagaaactacttaatttatattgcttttggtaatattagtgtctttgtggtctctcctttatttcatcatgagaatattatttatttatgtatatatatgtatgtataattgtcaattcttcatgagtacatcaaagagtttgattgagtagtacaattgtatttttcaacacttgtatcaattaataatgtcccgaaatttgattgagcatattccatcctattccactctctagtaagatacaaaaataatagacaaaacacacaatgaacgaactaggcaactagctttagcttcagattctctttccaattccctaacaaattatttttatagggccggtctattgagattttatgggccttagcaaaaactaaaattattgagcctttatttaaagagatatgtgatatattattgaaaattaccaaaaagatgtgtatttttaaaagataaaaaaattaggcttcctgggtgggccttaggctccgggctgcttattatttttaggggaacttacaataatactgaaattaaggttaa

SEQ ID NO: 90713 - DNA, 657 bp, Cannabis sativa
aaataatccaaaaatatgaaaaaagttacaaatcgagtattttttactgtatatgatgatctaatggtaaaaattaacttctgaggttgatcgataatttttgaagcccgggccgcgacgacgagacctgctccgggttagctatagctttaattcataactcccttgaggtgaaatttggagtcgataactttagaattatgattgaagtgtgagacattacttaatagagcattgaaatagcctcaaaaagcaagtttaatcgtgtcaattggatcactattgagtgagttatgtccattttactgaaggttgttcatgacccagtgcccaggttgacttatgatgtcagcctggatgctgggtgagtggaaaaacatcttgggaatgtacatttggatgtctaagtgatattttgacatcacttagtttatttctgtggtctggcaaacctagtcactagttctcagagatgtcgctgttctgcggagataggagactcgaaactcctaatttccaagtagtttaccatgcttggaaaagagaaatgcgaagttgtaaatttgaatattctgacttcattgatcttagttattgtgaaaaactagactagctttcgagataaaattagaatcaaataagtgaaacccagcgcac

SEQ ID NO: 90714 - DNA, 729 bp, Cannabis sativa
taatgcacatttatctgacttgacaaccagatcacaagacacaaatgggcctggccctttatgcagcctgtagatgttgaaggtctcggtttgcatgactactatgaggtaaagtttattgcttccttcttgaatctccaatgtaatttccaggtaattaacatgaatatgagagaatcatatgcacaaacatgtgtagcatgggcttgcacattttatacttgtgaaaatcaaggagtatgcacaaacatgtgtagcatgggcttgcacattttacatatgtatgtaacagaacacatttgtgaagtttaagctttaatatattttctctgcctttcatggtttaaactggatgtcatgggaaatatgtgcgttataaaggattcaagtgttgattgcatgataaatacaggcggtgtaacatgttctctagactaggtgtgagataaatattacttgctaggcgtttgagtttgggatttttgacacagacagatttatttcacaggtctagtcgcactctttgtaattttttttttaaaatatatatttataaattatggctcactgtttatgtatttagccttaatgaggatgtaattgagattataatagctgtttagaattcttgttctgcatagttaacttttcttattaaatgctcttttcttgactttagcaagaaaatgcttgattgcattatgttattgtctcagatttcttcttaat

SEQ ID NO: 90715 - DNA, 1063 bp, Cannabis sativa
aaatagttggattcatttggtagtaaaattctttatctaaaggaattcttaataaaaatagaagacatgtttaacaatttattaaattttgcataagttgattttgtattgtggaagatcttatttttaagtactttttgtttaaagataaatagtttgattcatttggtagtaaaattcattaggtaaaaatcttattttttttatgaaaatcagtgatttaattatgcataatagaggaagtttgagtttgaacttttgttcctaacaatgtttagtacatcattaataactactgtaaagacctcttagtttaaatttggaattagaagataattaaggtttaattgtgaaaattatttattgatatttaaataattatttatgatgatttatttggattcagaatgcattttatatgtcatatagtgaaatttcaaatttttacatgttcagtgcccggcaacattggaacgcggtgtttggctcagtagaatcacatcatagtatttttgtatagcggggcagttagttagacattgggaatgtcgggattagtcggaaatttagagtttacccaaaatacccttagtaccctttaagttagttttgtgtgggcaagggcattttggtctttttgcccttttggtgttttgtctttatgtgaatcaaataaaaggatttattcagattttgtttaattatatttggctgaagtaaattaataaaactattttattaatcattttacaaaaaaataaggaaaaaggaagcaaaatcttttttctctcaaagctctctctttctctcttttggccacccttagagcagctagggttagattatttttctgcatttcaagcttgttccagcaaggattaggagatcttgagttcttggtaagtttcatgtggctttttgttgatttcttgagttgtaaagaaaagtaaattttgcatgtttggtgatttcgatgttgtggctgctgtttatgttttatgttgatttctaaagcttaaaaatgtctagatatgaagatttaagcaggttcttatggttgtta

SEQ ID NO: 90716 - DNA, 731 bp, Cannabis sativa
cttatgttaggatattttgggtacaatacatctaaaaagaggtatttttcaattaaatataaaattaaaggtaaatttgattaatagattatataagtcgtatttttcaacttaaccctgcattatgggtggcctgggcaaattatagcccaacaaacccaacccgatgggccgactaacccagccctgttagtatgggctttatgatattgggctgctactttcactctttctctaaccctaaccctaaccctaacacgactgccttctctgaccacaccagacgaggtcaccgccctcttagccgggaaaaactcatgcaagggcgcgaagaaggtaactcatctatactgttttttttctttttctggattccttctttcaaaacattgtgagttgtggtgttttgtttctttgattttgagtttactagttcatagtttgtaactttatttttatattttcttttcaatcatgttttatataattttattttagttttctgtgattttagatttaactctgagtgtattgttttgctagtttttcttttttatatgatttgggatttgagtgtgttatcagtgtcattttgttcgcttttgtttggtctttttaatctacaacaatttcttgttcatttgtcttttcactgttaactatcttctcccttttaccaataacaaaactagtgtattatttatatcttgaatttatatttatatatacat

SEQ ID NO: 90717 - DNA, 749 bp, Cannabis sativa
agagcgcccaaaaatctttacaaagtataaagaatcttgtggagcaaatagaaatatctatgagtgatgaatatgaaatttaatattcaaacactatgccttcacaaatggagagtaacccaaaagagaatttcagtggcattactatccaaagtagtacacaacttgaattaccaccacaccaagaagttaatgattaaattccaagtcatggagtcaaatagtcatcccttgaaggatcatctcaagcaaaggttaaatctcctacttttgttggtccaccatcactaaaaaagtcatacaaactaattatatcaacttatgtcactcctccaccttttccaagtagatttaaaaaatccaagaaagaggagcccatgaaactcttcccaaaattaaggtaaaacttttatgtcctgagataatcaaagaatagtcttattatgctaacatttttaaggagttgtgtccaaatgaaaaacaaattgaatggtggtgagaaaataagtgtggggagaatgtttctgttgttctcaaaagaaagttgttgcctaagataagtacaattcaatgcacaattggtaaaactaggtttgatcattgcatgataaatttaggagcaattattaatattatgtcttattctaattttgcttctttaaatattggttcgttaagagaaactcaggttttgattcaattgactaatcagactaatgcttatcacttaagaatagttgaagatgttt

SEQ ID NO: 90718 - DNA, 650 bp, Cannabis sativa
ccctataattactaattactgcttcgttgcatcattaattaccaatacttgtaattaagtagctatatatccagcattattcctattagctactagtatgtcatattattatttggtttattctctaccaattattatatttaattatataaaaaatttactttttttttgaaagaacttttggttcaattaattagacaaaacgatgggaatcacaggggataaaaaatttacttaattgcaacaataataatattgctactataagacacaagtagtatacaacagcgctctatacacctccaaaatacaactaattataatacaaaaaaaatatcatcataaataatgagaataaaaataatgttctcacttaaaaaaaatctaattatttatgataatttaaagagtttttttttaactttttgtttgcagcaaacacatagaacacagttacgaaaataagtcaaatatattatatataatttgactcaaattttaaatatattctttctttctcttacagtcaaataaaatattatacctaggaatgcctttatcataaatttattcgtttacgaatatatatatttttaaacggatatttgttaaggaatttaaaataatcataattattcctaatttgaaag

SEQ ID NO: 90719 - DNA, 749 bp, Cannabis sativa
gttcctacaggtccctctgaaccggaattccggttcaatgtaggaatcaccaaaaattccacgacttcaccaattcaaacccaaactctaccaaattttccagacctgttatttagaccataaagaacatatcccatgtaataaaacaactacagaacgttaaaatcaaatttcaccattagagaccaaagtttgagttctaactcaaaccttgtctaaactccaaaccaaacaatcaaaacatgctaaaaccaacatatgaaacctatttcaactaaagaaaacataatccacaactcagaatcctaatactcaatccatgcaataaataattacttaaagcttaagaaaactatggaaaacaaaatgctaaagaggattaccttcaatggaaacaccaaaagctaactactaatcacaaaaccagctgaagaactccactaagctgctggttcttctagggctcgagagaaagaacgagtgaagagagagaagagagcttgtttcttgatttttgatttttatgaaaaataaatgataaaggtaatagcttaagtattaactactaaattatctaaagaataaaatgaaataaacttaaaataaatcttgctaaaagacaaaagaaacccttggcaaaagattatttttcccttcccacactaataggcataaagggcacttaagggtattttcgccaattctacattctcgactattcttgacaattctaatgtctaagtatacta

SEQ ID NO: 90720 - DNA, 967 bp, Cannabis sativa
ctttaaagaggagacaactatctagcaaataaatttctaagtcatgaaaagttaattttaatacttcagaaagcaaccatcgatggatccaaaaccgtttgtttaaggacaagcaatacaaaacctcacgcaatggcaaaaggcaacattcaaatatctttaaacatttgaaacatctaaggaaacattgtctatccagtaaactttcgagacaacaaaagttaattttaacttttgaaaaagcaatcagcaacaaatttccaaacaacaattattttttgtcgttcgaaactgtttaaaaatgaacaatgcaaatctcattaaaagtggcgaaagataacattccaatgcacattttactgttaaagatgagaaaccctctatcaaataaatttttccgacaacaaaagcaaattttattatttaaaaaggcaacccgcagctaattgtataattgtaaatatgtaactgtctatcaagtaaacttttaaagcatcacaagtcaatttcaatatttcacaaggtcgcttagtatcataaggcaaacttcaaaagtattttttattttgtaacaatgcaaggaagaaactattatttatacatagcaatatattttactcccaattatttatttccttaattcaactagcaaaaaatttgatgaagttaaacaagttaaatatatacatatactaacataaatatataccttgttgatgataaacgtctatggaggaatgtttctgtcagcacgctcaagtgcagcgtgtaacaacacaagtcacaaccctttctccaacaacagatgctgctaagactacaaatatgttataaaacgatttcataagtctgatgcaaataaagatctaaaagaatttatctaaaatgaataatgtcagaagaactactagaccacacatgagtttgataaatgtacttacagcagtaaaatatattggctccatag

SEQ ID NO: 90721 - DNA, 735 bp, Cannabis sativa
aaactaactatatttctttaataattaaatttaatttttataaattatatatatatattaaaaataatttctcaaaatattaggggggtcgtggccaccccataccataacatagttctgtcactgcatgcaatgcttttttgccaaatgtattgcccaagatgattgtgtggaatgacacagcccctccaaggatgatcactcaaggctgcttcatttttacaggaaaaaactaactgacatacctttccaacaggtatgcatcagttttgataggaagtaattttgaacaacagaaattttactaccattaataaatttcatgttttattttaaagtaacaatttattgtttgctaactttaaatggtaggtgaattagaatccttggggtgacattgagtacgaaccgagttacatcaaacaaagtaaataggcaaacaggaggagaattgtcatggttggaccagatggtggagagtggtacctgtaaggaccgttgcacaccatctatttctctattggtatgatattgtccgctttggacctaagtcttcacggatttgttcatccttatatacccaagatccttcccatttctagccaatgtaggactttggatgtacatccaaccagagacggacccactttgattgatgtgggggctatagcccccactaacaaaaatactccattttaaaaaattaaatgcaattttttaatttcgtaattatag

SEQ ID NO: 90722 - DNA, 698 bp, Cannabis sativa
  modified_base (52)..(55): a, c, t, g, unknown or other
caaaggctaagaatgattggttgcacctgaggttgcaagattttaaatcagnnnntgattataactctgcaatgtttaatatcacttataaattaatgttgtatggagaaaaagttactgactatgaaatgttaaaaaaaatatatactacttttcctgcctctaatgtgctcctgtagtagcaatatagagagcgaagttttaaaaaatattcaaatttggtttcatgtcttctaatagctgaacaaaataataaacttttgatgaaaaatcatgaatctcgcccaactgggtttgccccattccctaaagttaatgttacaatttctaacaatcataatcatagtcgtggtcgtgatcataatcaaagtaatagacgaggtcgtgaccaaagtcaaagttacggtcgcggtcgtagttgaagcaatgtttggcatcgtaatggccagaataaaaatccgtatactccaatgaaaagcacaactactgagaacaagggaaaagatcctcaaaataataatcgtaaaaattctgaaaacttatattttagatgtgaaggacattgggcacgtacttgttgtacaacaaaataccttgttgatctttatcaagcatccgtgaaaaggaaatgagaaaatagaagtaaatttttcctatcaagatgattagttttttttaaagagcccttggatattacg

SEQ ID NO: 90723 - DNA, 583 bp, Cannabis sativa
atgggaggcattctggtgagaagtcggttgtgggaggatatatggcagaaaccaacccatactatgagagacttccttggcagagttgatgaattcattaaactagaagaggtttagtggaacgccaaaggcctcaaccaagctaagggaaagaagaacgaagcaagcactagtggccaaggctcccagggttaggcgagtaataataaaaatggctttaacaatgaaaagtggaccaacaacaataatggttgaaataactttattaacaacaaaaagccaaacaaagcatcttcatgaatgactatgtccttctaattgatacaatcctcagccacatgcgatattctccttgttcttgcctatgggcacggtaacccatcattgcaccaaaggatgacttaccactgagtatagagtacttgaggtcatcccacctagaatatacaagttagcatgttatggtgccgacaaaaagctagtactaatgtcttgccattaaaacggagagcacctacaaaagtactaccaatataagttgcttttcagcaatgacttaggctggttggtgtacatgcaaagt

SEQ ID NO: 90724 - DNA, 848 bp, Cannabis sativa
ctccagactcactcacatcctcagtctcaccataactcgcaaacagttggtggaacatacctgaatctgtaagaaaaaggtaaaaaaaaaaattaattaatatcgctacaaacacattatcataatattatcatatgggtatgttcaaaaaagtgaacaagtatatatataaaaaaaaaagagaaaggaaccttcagagtcataatcattgagcactgtagtattctcgggattgctatcaacaccaacaatcactccaatatccctcctcgaagtagtgggttgcaaagacatgtggatagaagagtcgactgtagtaaagttctcatgagaaggatttccccggtcaatgggaacaataggagcatcaggtccatcgattgtacttgtggctgttgagttatgctcaggagggtacaatcccactaacttgagcatctccgcagttacaattgttgaggcatgcttttcagcagctggcatggctgtcaaagctgccgcgtgttgtatcatctcctcggttgggactagtttggaatatgtaccaatatggttgaaagcacggtgggtagtgtccatgggggttgtaaagaagtaggatgaccgatgcttgtcttcgcggtttgtgctacaaataccagaaacatacggctgaacctgctctcggttcatgaagtagagtattctgaatggttcatagatgggcaagtccggaaggaaaggaggtagtgaatttcgtgaggagaaggcctccccatcccttttgatgatatattatgaacaaagcagataaggctaggtacccatgaggagcaatttggaccggggaaacgtcaaagtagttcgcc

SEQ ID NO: 90725 - DNA, 522 bp, Cannabis sativa
taggactcaaatatataatttaacaaaatatataaataaaaaactaatttaaaacaaacgtcaaaactaaaaataattgaaaaacatacatatattaaaaagactaattaaagttaaattcaaattatacaaatttttaaaataaaaaatcaaaatataaaaatccttaattagtaatacacactactagactctaaaatctctatttcaatattgaaaatatataatgtatttctttttttgaaggaaaatatataatgtatttcaattgcgctaaaattaaaaattttaattgattacaggaccatgtattattgattcagttacacacactacagctagtctccaattaatttgggacgaccgacttagcaaattaagaaaaatatgatatagtatatactacgaatcattattacaaaactcaaatgcctcgtaagtccatcaaattacagatggagcggttacgtactgtgtaatgtataatgtgtaatattaaaaccaaagactaaagaccaaatt

SEQ ID NO: 90726 - DNA, 746 bp, Cannabis sativa
ataataatgatgttaactatatatcaatatatatatatatatattccatatgcataaagtaagaaaaataataagagcattcttattaaatttatgatgagagttatatttttaaagtgaattacctctaatcaagtcaaatacgtatgaagtaaaaaaaaataaataaataaaaacctattaataatattattagaaacaataagacatgattaaaaaaaggagatatatacaaaataatagtttatacggtatttttccttattatgtatatacaaattaagcaagcatatattagtttaattattttatttaaactaaattacattatttcaatatgaaaaacatagagaactcctctactggagagcaacatgagaaaatattcaataaatctatatatattatatgattgtaacatccaaaattattgaacaaaactccccaatctataccaaaacatatataacaatataaactcattaagaagtgttccatataacagtataaactcctcttgattttaatatttaccattattatacttgctagctccaattagttagaaagtgacctccaccccatgctaattaccaaaagaagaattcttatctctgcattttttagcatgaaattagctaaatgggatatgtatatatatatatatgaaagaattaatatggtatagggagaaattaaataattaaagaaaaacttaaaagtctcaaataaaataatctattaat

SEQ ID NO: 90727 - DNA, 1013 bp, Cannabis sativa
tattatttcattaaatagagagcatgatagttaatttttgcaaaatataagaattaaaatagtatttgtccttatatatatatgtataggtattcatattttggatcgtggctatagattcaatccctcgccacttatttttcagaccgatcactcacttgaatataatgatattttttttttgctgaaagaaaaacttacactcgacaaagcatccaaagcggctgcacgtacagcaaggcgatgagccaccccattattcctacgaggaatccaaacaccccattattactttgtctttattttagtaagataatatataactatatataaaagagtcaataacttttgggcttttacatgttaaattacttttttaacctttatcttatttttttcattaaaaatttttgtagatcaatataaatcacattattttgatgtaatatttttagtttttaatctcttcctattcataattatattagctaataatcatgtaacaacttaatcattaataatctataacctctataaaagtgagaatatttttaagatttcactaagtaaattacgtaattagcttttactagatattaaaattacaaaaagaaaaaatcattattttgataaccacaaaataaataataaataaagttgctaataaaacaaccaaatatatacaattatttaggtgaatcttaatctttctctcctattaacattttttatgaatcctttcaattttttttcttataatcttctataataattcttctttgtaacttaaattatgtttttaaaatactttttttttaaaaaattaaaaatttatttcaatcctagaaataatttatttattattttatttaataaaaaagacaataaaaaaacacgcatttacttatacaagtgtcttttatttactataaaaaaacaaacttataaatttttgaaattatcaaaatttatatataaatcaacatttaatttgatacacgtgtggagcacgt

SEQ ID NO: 90728 - DNA, 569 bp, Cannabis sativa
attgttattgaatattagtagtgttcaatatcttttaaaagtgacactttatgattagttaatgatatttcttaaaagttgttatattaaattatagaacactgctattggtcactaataatgcttagcacctctacacatgtcatttttcgattggctaacaatactaactaaaagttattataataaattatctgagactcgatacttaattgaaccaatagcgatattgacacataagagggtgctagataccattggtgtcctttagtatttttctaaattataagacacacaatacttaattacactaatagcgatatgacacttacgtgttaggtaccaatagtgacttttagcattactctttatcgagaattgctaaaagacactactggtgcctaacacactcctccggttcataccgtcattggtataattaagtatcgggtctcagataatttaaaaaaaataacttttaaaaaatattgttaatcaattataagacagtactttaacaattctcctttcattttaatacgggctcttctttaggttttaaagtcaat

SEQ ID NO: 90729 - DNA, 553 bp, Cannabis sativa
cattcgccattgttgcaggtgcaggatcagatgtagatgacaacatggacgtgagttaacagcgattgataccatgtaatgacacaagagaatgaaaaatgctaattgagattagcttggaaaaagctaatcaaacaattagaccaatcctttatctatactaatagagagtttgttacaattaaaaataaagaaccaagaaagcaactaacaactaccattacaacattgacgactttaactaacgaaacaaaaaagtagttaggtgttatcaccacttgtgttagtaatattgtgaagcttgataacttgtgtaaaacgatttgttagatgaaagaattgcatttcaaaaaaatctcatttaaataattgagatattgagtatactcttcagaatatatttatatatttttttagtaagaattaaaattgaaaataagaacaagttagagaaacatggatcatgaaagtacactgtatattatatttgtagttgaaattttatattttaatattaccaatttattatttaattaattcattaattaaatgc

SEQ ID NO: 90730 - DNA, 808 bp, Cannabis sativa
  modified_base (257)..(264): a, c, t, g, unknown or other
atttaagtcgggtctaggtctaaggtcgaattcaagtttgggtttgaggccgggttcaatgccaagaccgtggggggaatttaggcccaagtcttgtcggattcctaaatattgattaagaaaaaaaaatattgaaagtatcttttttttaaaaaaattgattctcaattaaaaaattaaaaaattaaaaaatgaaaacatttttatacaacatgttttaaaaaactttttttttattttttcaattttaaaaacannnnnnnnattaaaaaagtgttaccaaacgcgacattagcatatgagcgtgggaatataaaagaataacccattttgaaatatctgtggtttctgtggtgcagttgttcaagtgaataaattcaactaggacatcctattttgcaatatctctaagaaaaaaaaaatagtcataatgcttacatgattgtaaaaaaaaaaaaattgactaaaaaattttaaaagaaacagagaaaaactttagaatgccgaactaattaagttaaaaagtcaattgaaaccaacgacatagtgaagttgagattgtatgccatgccacaattaaataaggttgcctgttctggcattcgcctgtgagtgagattgaatcaaagggacttagaaatctaccattaacaataataaattaacaagaaaaaacagcataaatacatttgcagcattaatacgatggggatgtaacacagataataaaccttgccaagtttctctaagtgcatcacacttacttgaatatcaacaagtttcctttgtgtttggtagtattcttcca

SEQ ID NO: 90731 - DNA, 1033 bp, Cannabis sativa
acaccacgaaacatatgtatattgacagtaaaactcataaattctaactataattggttagaacttacttacaaatacaataataattaataacaaaacttagtgtagtcatgccttataagctttatatagtttctttattgcatatttcagtgtttgttacggggtttgtgtaagaatatcataataaataaatatattaattaattattattgatttgtattcttagttaatatagtttattaattcactcaatattttaaatatggttagtattattaatttaccaattttcccaaattacatatccaaattgtacattctaattgattattaatattctgaaaattaattctagttaaaaaagtttcatttatattaatatagggtattcgtccctaagttcactgatcatattaattcttccataaacgaccatcagtgaaagttagtgagagagcttggaaattcgattacttacactaattcattttcttttttcttttgtagattcaaaacttatgttggattgaagctcaaaaaattaatgaccagagatatttcaatttttttcacatgtattgtcgtattataaacttctcatattgatatcatctaatctgtattctcatttattgtaagcttctcaaaggcatgaggttggaatctccatttggattgtgtttatatttgaggaaattaagtggggtacccactttaagttagccattttaatttttaccctctttttaatattttatattttctacctacttttgtagttaatgtccttataataccctttcttcaatccaaaacagtaggacttaattttcagtctttaatgctaatgtggggagatattgggcaatcttcctataaaagtgggtataatataaataaatataatttgctggtagttttggttaactaacacgaaaaataagtatttttcaagttatccctttatattttacggaagaataatattaggaggcccactagagaagtaattacaaacaaaatttgtaa

SEQ ID NO: 90732 - DNA, 621 bp, Cannabis sativa
  modified_base (361)..(371): a, c, t, g, unknown or other
ggtgaaatttatcataacatataatatgaatcaaatttgcaccataataaatattacattatttatttatttatttgctactaataattaattttattaattaaaagctttttaacaagtttttttatatttatttaaatgacttattttatgtatattgtttgagtaatttgtggtataaatacctaagtttaacttccaattgcaaataaatactaagtttaacttttggcggtagtaatactttaagttataattctggaacttttgtaggtacctagttgttaagtattaagtaaattgtcacgtgtcaatttttaattggtgcaactcatcaaattttttaattttttttaaaaannnnnnnnnnnataccaataagaaaataacacgtggataatgacttaaaattcacctacagagttccaaaaaataacttaaattattactgctaaaaattaaacttaaatatttatttgcaattaagagttaaacttaagtatttatgctacaaattacccgttttcaataaaaatttaataattatgttgatttgaatagttaattgtcagcttgtgcattagagtatacaattattacaccaactccggtggttttaat

SEQ ID NO: 90733 - DNA, 2118 bp, Cannabis sativa
aattgtacaaaatattattattagttcaatttttgttaaaataaaatttaataatttgatttaaaagtattataaccatactagctattttttttaccattgttcgtgctagaaattgactttaagtttaggttggttttattgaaaaaaatgacgaaaattaaacttagtgtattattttgtactattttgaaaaatacaggactcgattttccatctaacaaaatagatagtttaatcgataattttaataaaacacaaaatccaaaatagtatctatctataaattcggtaatggtaaacttgaacaaggggtaaaaagaggtaacaaaaataaaaaaccaaagaatttttgtatgaaaatatagaagaagggaagtatagatagtaggatgaagagtttagttgtgttaccatttttatagcacataatatttgtgtaatgaaaatgaaaattaatgtgtactcactactcaccccaactgatgtcacaaaattgcaaactgcacatttcacagatcttgctccatattggtacatcagcaacatcctgcaattcccacaattcacatgtgccacctgatttgctgtcacattatgcatttcaaccacacttcaaaatataaaaaacccagaaaaaaagagaagttcccaagttcgaatcaacccctaaaaacctcctaaaataataataaataccttccaaggcaagattaacagtgtgacaacaagaacattgcacacttgttgctcctcttatgtacattagtaaagtatggcaacctccacacacaagctgagccatttctgtgcctatattttggtttaaatttttgttagaaaaacagaacaaaattagttttctttaaagaaaacaaagggagtttgaaagaacaaactcaccgggtggcggtactgctgtgactgcattgcaaacagcacagcataccgaggtagccccgaccggatacagtaaaagattccggcatccagagcatactagctggctttgtgcacctgctcaacattattcacataattaaagtgttatttttttaacttgagatttgtaacaattgaatgaatatccaataacataagctatgttagtataagaaagagataagaaatgaaatgaaatgttacattattattgaatgaagagattttaagataccatttgaaggtggagttgtatatggtgctgctgctggtggtgatggatatggtgctagtggaactggcattataagatttcactaactttgatttttgttttttgtttttgtttttctaagcttttaagaaaaaagcttattgcctcaaaacacagaatatcataataccatacctgaaaaagtgaagcaccaaaagaaaaactcagaaaaagtgtttatgattaaccaaccatatgctagcttctatctatatcccataatgtttaccataaaaacacaaaaatatctttcatttgagaaacatttattaattttgagaaaggtttgtggaaaagaatggggagtgaggaaaacacatacctcttcttgttgccaagttgcagaagaagtgaggagacaaagaaaaagagagtgagaggatatagttgagcatttgggagaaagagaaagagaaagagaagagaattaggtgggggccaaactaattaaagagtgttaaaaagtaatttattaccttttttttcttcttaagaaatattatatagtataatatcaggtcttatacgttttaatttaataaattatattaaaaagtgttcattaattataaatgtcacatttatatgtatcggggtatcaatttaaatttagaagaataagataagaattgacttgaatataagtgttatacatactctattagtatgaggttcgtgaggacttagacttaaagcggaccacctaataaagtgaaagaacagggcccaacaagttacattagagccaaagatttagaagatagtgtcttatatcgaaagcctacctaatattatggtcggcgtattccattgggccaacaatatggttttcgcaaggtgcgaaattctacttaatttgttactttttttgtcttaagaaactagttcttaatataaagttt

SEQ ID NO: 90734 - DNA, 622 bp, Cannabis sativa
gatgatggtgttgccaaaaaaagtaatcaaggctattgaagccatctgtagagcttatatgtggaaaggtcaagcaatgttccatggggctggtgcggtctcttgggaaaacacttgtcaaccaaaaaaatcaggtggattggggattataaagattgaggagtggaataaggcagttgtaagtaaatacatctgggctatttcaaacaaacaagagagcctttggcaaaggtggatacacagtgtctatctcaaagaccatgattggtggagctactcagcttctatccatgccagttggtattggaaaaagctagtggctatcaagaatcagataaagcaactgactgatacaactgagtttcagcaagggaaatacactatagcaccaggatataaaatgttttctccttcagttgctggcccgagatggtgtaaggaggtttggagtagattaaatattcccaaacatagtgttatcttgtggttagcaatgctaaatcgcttgaaaactcaagacaggctgttcaatattggagtacaagtacaaggaaaatgctgcatgtgtgaggattgtgaagaaacaaaccaacacctattctttgaatgtgctactgctgta

SEQ ID NO: 90735 - DNA, 718 bp, Cannabis sativa
atgctattttatatttaattacctaatttctgtgattgtgctcggaagctgtggaaagcgacgttgggcctagagagttgcattttataatttagtttataatcgaggtattattgttaatagtagaagcgttagaattttcggggattagtagttgaccattttgcccttgagttgtttaattatttattttttttatttatttggggggcaaggaggtcttttggtgagacttttcttttgtctttagtggctaagttttggctgagaatggattttactaagtaattttattaaaaagaaaaagaaaagaagaaaaaggaagcaaggagaagttgcttaagtttgaagggaaaacaaaggaaaatagttctttctctttctctctctttcgattcttttgggctgtagttgggggtgagaatttgtgttgaatcaagggaattctagtggtattgaagctttgttcaaggtaatctttttcctttatcttttacttgaagttgttgtagttaaattaggttttgatatgaattttgggaaattggtggctgtttgatttgggaattgtttagattagtttctggtgttgattagaggttgttatcctgattataagctaagctaagtgagtattttaatgtttggattgaatttaaagttgtgagttcaaattggagctttaatggtgaaatgggattttgtttgatttgttgag

SEQ ID NO: 90736 - DNA, 568 bp, Cannabis sativa
tcaaagagacaagtatattttcatcacatatttaatgtgtcatttggttcatgtcatttagtttcctatttcttgatttgtaattatggaattaatatggtttcctatttcgtgcattgtaagcaaaaagaaaaccatccctcatgcattaagtccctataaattgtgactgagcctcactgtgaaagggatcgagagaattgctgctaaaatacactatagagagaaattagtaatctaagagagaaattaatcaaaggtcaattgtaagagctttcaaagggaagaacactttgttccttctcttaagtcaatacaatacaaggggactaggctattaccatacttatggggccgaacctctttaaaatttggtgttaactttaccttactcggaccaggactcggattcacacctaaaatcgagaacctgacctgaacccagacctggtgattatagcttaaatttatacatttgaagtccttatttatgcacatgtaattaatataaattaaatattccttaatattaatggttgttgacttcgcttttagccaacgacaatga

SEQ ID NO: 90737 - DNA, 794 bp, Cannabis sativa
aacgtaagcttaaaatattaaatccaagtgagatcaacggtgatcgatactgatctaagccttttgactattaaagtcaataagaacactactgattagtgtaattgttgatcttagaacatctcgggcgctgatcgaactgttgattaggtctgaaataccctgtagtgagtcaatataagcataagctacgacatttggggtgagatgaaagacgatctatataaacctaagccttttgactacataaagttaataagaacactaccgattagtgtcattgttgatcttagaacattcgtggtggcgatcacaccgtttcataggtccgtaatacctcgtaaatagtcaatgtaagcataaactatgacatttgagtgagatcaatggtgaaccataccaatcaaatcctttggactagtaaagtcaataagaacaatgttgattagtgtaattattgatcttagaaaatttcagattgtgatcagatcgttgatcagggttgaaataccctgtagatagttaatgtaagcacagactacaacatctgggtgatatgaattgtgatcgatacaaatctaagccttttaactagaaaagtcaacaagagtactactgattagtgtaataatgggtcttaaaacatctcgggtggcgatcggaccgttgattagatttgaaatactttataattattcacattaatcttagaatattttgggtgcgaatttctcttatgcaatttgtcgtaagcgtatttgcacattagtcattttatcactctataaatagaa

SEQ ID NO: 90738 - DNA, 683 bp, Cannabis sativa
acttggatgcactctttattctctgaacttcacatacaactacctaggcctcctatcatatggtgtgataatatgtgcacaattctcctaacagctaatcttgtattgcatgctcgtaccaaacatattgagcttgatttgtactttgttagagagaaattgtcccaacaagtggtgtgcatttaacatgttccagctgttgctcaaatagctgatggccttactaaatccatcacaagctcacggttcaatcagtttcaagacaaacttaaaattaaagaatgtaccaattccaagtttgagggggtgtgtcaagatagttaaagcttctaactgtctctgagttagttgctcttgtctgttagctagcagttggttttcggttaggagtttgttagtattgttgggctttattgtcgtaatcttgagttgtatataatgtgctttctagttgatcaatgtaagagattctttttctattaattctctctatctttcactgtctttgctctctttgcttcttcttcttcttcttcctctatttttggttctctgcttttctttctgcaacaatggcattgaacaagagttctaataatactgagcaaaataatctcaccctacagtggtctgtagcagaaatataggaatatgaatgggaatgagaattggagtaggaatgg

SEQ ID NO: 90739 - DNA, 1492 bp, Cannabis sativa
aatatttaagttgattttattcttgacacttaaatattattattttcagaatatttcttttttgataaatcaatgaattgtattgcacaaagcgaaatttatacagcctatgcgcacccaattaaggtcgaaatctatatacaagtataaaccaatctgaaatcaagatttgattatgttctataaagcaataaaccaatctctatcaatactcttgatctttttaggcattaccctatctatccgaatctttagtgtccattttgtttcttcaacaatacggctcgggttaactcttgacttttgccaaatagcttcatttcgggctctccataaattgtacaccagtcctactacagcagcagcaagaacatctttcttgaactttgacagcttagatctcccaatcaacctaaagagatgctgaaggttgctggtttgagcatgacaatccaccaaattcttcacctcctgtagggactggccagccacactacattcgaaaaataggtgctgacaagattcacatgcaattcacacaagctacaaataccatgaacttgaacaccaaaccgcagcagcccatcttgattcttcagcctattaagcattgccaaccaagctataacactatgtttaggagtgtttagccttgaccaagcttctttgcaccagtacagtcgggttgatgagggtaaaaacagtttgttacctgctgtaacactgtatttatgcttctgaaaaccagcagggtccaccaaagttctaagttgatatttgagggctaccatcttcttccaataccaactagagtgtatagaaggagagtagtcccaccaatcttggttcttaatatatacactatgaacgcacctaagccacaaactctcttgattatttgaaatagcccatatgtacttacagattgcagctttgttccacacttctaagttcttgatccctagccctccagcagccttgggttgacaaatgctactccaagctacagaccatgcagcctggaacatggcttgacctttcaacaaaaaagctctacagatggcttctatggacctcaatactttctttagaagaatcatcatttgactccagtaggcctgtatatagcaatgagaactgagttaataagagtgatcctccgagcaaaagagagattcctaattctggcagtcattttctcaactaagatatcacattctttccttgagatctttttcccacaaatttgaattcccagatacgtgaatggcatctcctgccttatgaaccctgaaatttgcacaatgtggttcacttcacaaggctgcatgttactacagtatatggcagttttgctggcatttgggtataaaccagatgtgagggagaatgtttttagagcctgtagcatgaataggacactcatgaaatccccatgacaaaataataagacttttgggttttatgccctaaataaaactcatttcataga

SEQ ID NO: 90740 - DNA, 599 bp, Cannabis sativa
aacaatcatatacgtacagaccaaaaatgttctgtactgcttttcatttcataattagcatttgaaaataaaaaagttgtctactagaaaattccgtctagtgtccttttttttttttttacttttcgttatctctctctataataaaattaaaataagctgagcttctctttctgaattcacactattgctttttcaagtaatattgtcgttttaatttaatttccttttcaatatcatgtgatttaattctctataactatttttttttctttaaacaaatattttacttatttctaaagttcccaataaagattactgatttaatagaacatagttcaaatgattagtaggtattgcacctagaattattcttttaaactgaacaaaaactaacaactgagcaactattctaactcaatttcctcacaagtcttaaccatcataactaatcttagcatcatatattgttttttcaatgtatgtctaagtaatttgttaaaagaaatatgtctaaataatgaatcagatggtggagattaagatagattggacaaacactgttgatgattattgatagcagaaacattaacaatttt

SEQ ID NO: 90741 - DNA, 588 bp, Cannabis sativa
tggaggaagttatgaagggcccaatcgcccaggagaactacatgtgccgttctaatggctgggaagcggatgaactccactctaccttgatctgcgctcatcaattggagaagatcgtgacggtggctaggattaagccgtccgcgtctggggtttttcatcgcttacctcgggacgaagagatgcccaaccacaactatgggggtttcggagcgtggagccagaccaatcttatgtttggagccatgcttccccttcaggattatttcattaatttccttaattttattggcctcgcgccttaccaacttattccccaagcttaccgccaactctcaggcttatttattttttatgtagctagaggctaggcttcaagcccggctgaaattttatatttttatgaacttgtgtctgtcccaaaaaaggggaacaagtttaaggatggttttttcactctccgggcccatcctactaatgaggtcccagtcccttttaatttccaaaagaacgttaaggagtatcaccaccgcttcttcttctcttctggcttccaagccgtggtcgcccggagctcctcacggagtg

SEQ ID NO: 90742 - DNA, 694 bp, Cannabis sativa
gtgttccttcgacggagcgagcccgagggattctcatctccggaagtccgaaatccaattcaattctctacactaatggccgatccgtaatcattctcaatcaatgtgagagaaaataccaaataaataaataattacctttttccattcaataaagtatccattgacacaagctttgacctttaggctgaataatttgtaaaggcttcacatcacttctatcaacaccacctcttgattcatcgggagtacccccgctaaatagttcaatttccttttccacttttttttattggatagatatgatacatatatatcccaaaattaatctaattcccatatgagaatttatgtgctcatttcaattacggtacatttcaaaacatacatattttctacataaaaacaaataattaaatttaaaattgaacaaaccatagactattcataatcagacacaagaaaaccaacctgtagatttatctgaaagaagataagtcctgcacatgtcccctaaacaaacagaaaactggtcacaatttaaaagggatgaggaaaaaaaaagaagaatttgattatgagcataatataacaattgaagatatgtaccaaacgagtctgttgtagttcgactgctcgtaatgcttgccttgaacgaatcggagtaatcgtgctccatcgtattgaagagcct

SEQ ID NO: 90743 - DNA, 727 bp, Cannabis sativa
taaaaagaagtatgtttcaaattttcaaataaatataattcaaataaatataaaataaataaatataaaattagataaaattagaagtaaataattagaagtaaatttgattaattgattaataaaaggggtatttttcaacttaccctatactttttcctgttaataaaccaaaagtagcacacaaacttatttttttaacaaatttaataaggtaattgcacaaattatcattagagatgttatctcaaattctgtacagggtgattgtgatgtggcatccaataaagtaatatgtggagaatattttaaagtctggacaagagattttccctcaacattcaaccagagaattctatactcaaaattgataagttcatgctttcagcaggaatcatctggacaaaagttgtacatgattgtctgcacaaatcctcattattcaatgatgttgaatcctcagagcaggataatgcggatgaacaagatctttaagaatttttttcataaatatattctcaatcaaatccctactttgtgaaattaaaaggaaccgaaaaatattataggaaactagcttagttttccaatctatttttgattgttttggaaaacttaggtgttgtttggttttttaatcatttttctgtttttaaaattcgaaaagtgaaaatatttttcaaaaacatgttctttaaaactatttttacttttcaatattttaatt

SEQ ID NO: 90744 - DNA, 666 bp, Cannabis sativa
ccctatctctaagcactaaaggaactctcatggaaatagctttgagaattatcaagccttttagggtttctaacaaatttgttaataggaatttgttcatccatatgagcacactagactcctttatatagtattttagatatcaccatttaaaattctaattcataagtcatagcctccatggatgttgtggactcaataaagagatgtaactcatgcacaccataactcctatagagatgtaactcatgcagacaccataactcatatagtattaagaatttcaaattaagatgtgtaacacattttacactcttaatgttggtgataatggtgaaggttactcatagtaacaagtaacttcccaaaatgttacaaaaagatgacaaataatatactttgtcatatgttacatattattagtttattacacatatttaatctatatatattatattattgtaaataatataacaacacaatataataaaaaataaataacctgaaagaaagatggcaaaacaatccatattatgataatagagttaaaaacttgaaatacttatttgtcaaatttaaaaagtcgttgagataaaagttatgagcacaaaataaattatttctcttgcctattaatcataccatggccacaaaactatttattaa

SEQ ID NO: 90745 - DNA, 664 bp, Cannabis sativa
ttaatcgatcaggaagaaatgcactttgagcaggggagataatgcgactaaggataggctttaaacggttgacaaggactctagaaatgattttgtatagagtcgaatagaggctaatggggcgataatcagtcactagttgagggtgagagtgtttgggaataagcacaataaccgtgtggttaatggcctcaatgtttgcatccccatttaaaaatcctttggtagcctctagaacatcattcctaacaatatgccaatttttttggaagaaggaaccgttgtagccatcagatccaggggctttgtcactggcaagttggaaagttactctcttgatttcagagtcagtatacgagacactgagagaattaaattcgggctcagagaggtgattagtgaatctagaaaggacacggttaatgatctcttgctcaggattttaactggtaaaaagttgttcaaaataatgttcgatcgtcctcacaagagcttcagtgtcagtgactagagatccgtcagggcataaataaaagggatggatgtgtgtgattttgttttttgctcgtcttgaggaagcaaaatggtgaaaatatctcgtatttttatctcccagtctaagccattgtacacgagatcgttgcttccaatattcttcctcctt

SEQ ID NO: 90746 - DNA, 3227 bp, Cannabis sativa
agcatttttatatatgaaaatgataataagagacaactgaccaataagatggttccctgtgccttggattgtatcctccaggtagccgggctttctgagtctcagggggtggtacttgagattgctgtccaccagacacagacactgtttcaatgtggtcttctgggagtgcgccgtctcttaccagaaactcttctgcttcgtctgaatcttcatcttcagaagagagtggagcttccttttcatcttctgaagaatcactgtcagaattagcaaaggaagtatcagtactcttcacattgtcagctttcttctcttgagtttccgagggaggggttggtttcttatcaggctcttcttctacgatatccttaaaatgttctacttcttcttcctcggttgactcattctgaagcaccaagttcctgcaaatggaagctcgacgatgatgacacgaaatcaaaatccatttaaaaggaacttgcatgagaagacttaccacaacggcagccttgccttcaatacttctgagagcaagaaaaggcatccgcatgcatattgaggtggctgctgaagggcaacctgtcccagttcaagtaaaagagtgaaaaaataagcactcgcgttctttggtattgaaaaacaagggaggacaacatattttcatgtataattcatttcttacatacgatagaaattgtaagggtaaaatggctttcttttttcttcttgttttgacttttaaaaaattgatatgtgttgaaagaagaaatatacgagtgggaccagtgaagaaataaataaaaatgcaaaatcaaaagtcattaaacctgcatcacacgctttgcaaaggcagccacccgcttcaaattcacatcacttttcatcgctctgagaagaagtccaataaacatttctgcctgaaatttgcatgttttaacattatccataagatgtttcatcttcaccttattaaagcatgacaaaacaccattaacattagagcaatgataaaacacattgaacttgccttcgaagaattcatggctgcaggaagaagtaactttgcgtacaacgcccggtaaaacctgtcactaacaatttgattcttagatgagatcttatcaagaagcattaacgcttgaactcccacattaaaattgttggaatgaacctgcatcataatatctacacttagtatacatgcaaatgctcttgcctgaaatacaaactacagaactggacaaaggttttcagttaccagttggaagagcattggagtttgggtctctataatgtcatcagcttctgtgcttgagacatatggaaatgctctattgactccctgtgtagcccacgatggattagcaacaacaaactccaaagtaaaaaaaaaagcatatatccagttagcaaataaagtgataattatactgactgttagaagagctgatagtagacgtgagtccaattcaaccggggattctaacaaattctttgctttgccatgcttatcagatttggaagcttttccatcgcattttttgtcacttttatcctttccatgaccaatccctgcctctgtaataagaacctgaaaatttttatttgtaaggcctcgtcatttcttttctatttttcctctaatacacttgtttaaaagaaaaatcaaactcataatttgaattatgttggtctcttcaaaaaccattccacttaacaccaacttattttcttttgcaaccaatatagagaacccacaaatgtctgaaaagggacataaaagaatacaaatagagaccatatataccttgaaaagtgcaaaatatacatctatcaaacgctttgccacatttggtccttctcctttatgagtgagacgaatttggctcaaaaagttaacctgcatatgcatacatgtaattttaggtttaaaggattacaaactactgcaggcaacatgtagtcacagaagttttgaaatttattcatgactaaaaaggattaataatttgttaaattccaaaatctatcatttgtagtatatttacttaagtaagcaagtaccagcactaatgctacattatgatttcattatcatatgaataccagaaatatagatgctgaaaacaagaaaaagtgggacaagcttactccaaattaactagaaaagattcaattatgtgtgtaaattatacaacttacagcgtggtacttggctcgtaataccaaatgaggccgaaaaagaaaagagtccacctcatcaatcactacaacctgtgaaaaggagttgtaaataaataagatacaaagcctcaacaagagtatctaacatcttcacatggtcttatcattccctcatcatcatggtatcatatagagcaatggcacatcaaagaactaagttcacatggtcttatcattccctcatcatcatggtatcatatagagcaatggcacatcaaagaactaagtactagataatgacatgatctatctgtaaaaaccaggtaacaaaatggctttaaatataataaaatacaagtgtaactacaaatataatatacatgtacatctacaaaaaacagtattcaaaaaagctagaatcatgctccattccaacttccccgagatcttactctccccattgataactgaagtgaggcagttgaacgaatacacacatataacatattaaaaaaaaaaacttgaaggatatagtgatcagaccgtcatatttgggtggtcagacaaaatttttgacaagtgataatcagcattggaagcacccttattttctggatcccctaactgtaaaaaaaagacaagtgaatattgaatcagatataatccaggatgataataaagtagaaacaagagtttttgtaacttggttgtgtaaaagttcatggtgaaaacttactttgttaactaatgcagagagtaatctgcgctcttgttctgatttactctttagcaatgtataaataatctgaatgcaataaaaaaatatgtgagaatagatgaaacgtttcacatagtcaagacaaagcccggggcaggaataagtgaaaattttaaaaattgttatgcaaacatataggaaaagaagtcatggtgattagggattaggatggaagaaaaggaaacaaagagtatatgtcacagctaacctttaatgccttgtcttttaatataggtaacatatctcttgatgcttcttctag

SEQ ID NO: 90747 - DNA, 753 bp, Cannabis sativa
tgagttacaccaaatgattttccaacccccttcacatttgagatggggggtatttataggctctaatggcctggtgttcaaagtggtctcatggggagaagatgtcgctttcccgctacatgttgcacgtgttagaggtaacctgggaccccatacccatgtctagtgtcagatagtccctagtcgcaggttggaggaggatggtccccgggttcatgcgcatggtccccagttgcacgcggggtggtctccgattatagggtgtaggagaatggttgcagcgtacccttggtcaggtttttcaggccttgcaggtccattgtcgtcgccacttgtacctccttgttctcagtctttagaaggcgtggtggtacgctcttcccttccacgctttgttcttacaatcctttctaatgtcattcttatcattatgcatttgatttttcccttaacgtcgcgacccctcctaataacatactcactccatgcgcaccacggctcgcatgcaagcccccatctcttccccttctgggctcacgtgcaagccccccatggactcgaatgcgtgccccattcctccgcacaatgtcaaatctcatactcccactctgtgcaacctctcatcaccacggctcaccccaagacacaggctcatcataaaaaattgaccctcatggctcgcgtgcgagccaacttgggatgtacctagctatcactgtaatgaccgctctagtaatgtggattagaaaaggc

SEQ ID NO: 90748 - DNA, 764 bp, Cannabis sativa
ttcgatacctactaaataaagtttatttgatttggtataatcatggcaaagctgaattcaaccattagaaaaatagaaagtcaagcttcctaaaaatagccaactttccataaagagaatttcttctcttgtaagacaagattcttaaacattaaagccaactgagaatacaactttccttaaatgaaaagagaaattaaagatacaaaatcaacacagtaaaaacaatttaattgcataataaaaatacacattaattgaaaaatattttgacaacgaatttgccaaaaagatctttacaatacttaagtcaaactcaactttttttgttacctatttttttgccaaaactattttttttttcaacttgttatccatgtttcagagcatgtgacacatggattattatggaagggattatcctaataataccctatttaaagtcttacactacaatcttatcacggagatgcctcttggaatcgagaaaaggtcgagattgaagagtacagggaagtctacctagctttcccttggcttcccagatgccaaaggtgcattgcctctttcagatccagaggggtctaaaacatggaaggttgcccagctgatattcggacgggcactcgaagggcctaatctagatgtcaaccaccttggagtgttgtatatgtctaccttttatgcacgccaaatcaccaagtgatggttatgctttttcttataaagatcaatttttgtctcctacatccaagcgcgatagt

SEQ ID NO: 90749 - DNA, 888 bp, Cannabis sativa
  modified_base (739)..(741): a, c, t, g, unknown or other
ctatatggataatatgacaagattggattggatagatcataggattatgcttaagattagtaaacctaatccagctccttttccaaacgggccataagaactaattagattgccaaagttgatgctgcatatacaaaagcaaatctaggcagatgtaatttttttgtggggttactaaaggcatttgctaaaacatgccttatcatcgaatgagtatttgactatttgtttatttgaattccaagcaattatattatagtcttacatacatcctgcccattttatcgagggatgcaattatcatgctacaacttataataaatctacaatcaaactcaaaaaaataggcagtgaaaatgcaaaaagtcaatctaatgcgaccactatggctaaaagaaaatattactttagtgagatttttagaaaaataatagattttgagtaaaaatttacaattttactgccacaccaaattttttataaaagtactatttttttataaaataaccgtaaaatgacaaaacaaaataattaaaaacaatagtgaaacaactaaaaaacaaccgtagaacaacaataaaaacttaacaactaaaaaacaactgtaaattaacagtgaaaacttaatacaatacacattataaaaaatacatagtatttttgaaaaaaaaaattgtcctacaataaagaaaaaagttgaaaattttagtatgtagtgtaaaatctctaaatttaaccnnnttatgttaaatttcttttattaaattagataaaatttttaaattcaacaatcttaataatttaaataaattttgatgacctcaatttgatatatataaaagtttgtaaaaatgataggctaatattaataattaataaataaaaata

SEQ ID NO: 90750 - DNA, 524 bp, Cannabis sativa
ataattttagagcttaagaaggtaatgaagttatgaataatacaacaacaagcaaaagacttttacgtggttaggcattaactatccttggtccacaagtccattttattaggttctttagccggaggttatgtatacaaatacaaaatgatggactttgctcctattctcccatgttcctcttgaagaagaataatcttagtaggaatattcaggagttaacagtagggttacaaaacgatgtgtttcattcttttttttttgcgaagggaaggtcttggatcttctttgttagagtccaaagaatgggtctggatccccttttcatgtgcacccgttggagtatttataggctaattccatggtgcagatcatcttgaatggatcttcgtggggatgaacccctaccgttggattggtagatggcatgttttccatgtggtcttaccgatgtcagatcgtactggctacaccggcagagctttggacacatgtcatctcagggccattcttatttgaatttc

SEQ ID NO: 90751 - DNA, 794 bp, Cannabis sativa
ggcatcctgttcggactatattcttcgagcagatactcggagttgattccacgtgtcaccatcatgtgatgccacgtcagagtacaaaaattgggataacaaggggtaatatagtctttttgggtgatagaaatagttttgttttacttattttattggctggataagttatattaattaaagtttatttaatttttttataaataaagctagtaaagatagatagatagaaggagataggatagtagtcatcacctccatttctcttttcattcttacccgacccctaagaggagctgcaaccagggattttttttggtttgattctccatgtttgagttgaattggcaaaggacagaagtttgtttaatattaaggttagttcttgatatttttccccttgaatgtcttgaatattaggttaggtttttgctagggttgtaaggatttcggggctgggatataagttgagtttaaaatctatttttaggcttggtttcaagcttgtctaggtttgaattggttggatgtaagggctgcttagcttgggatgagttgaatgatattttatgagttttatttcacttggatatacaattttgaatacatggatgaattgtggtgttttaatgcattgattatgttgtgtttatgatattatattgatttggagcagttggaaaggtttgattaggtttagagcaagttttgggactttgaagatctaaaatttttgagtttctattgtggtgaaccagaatttcggatggtcaatttttaggaatcgccgattt

SEQ ID NO: 90752 - DNA, 546 bp, Cannabis sativa
tctttacaatctttgcttgaaattcttttggcacatatggacactcccagatatctaaatggggtattgtgtctatataagccaggcatatctaatattcattgtatttccctgtcatgcattccactaaagtagacagtagttttggtaggattaggatgcaaacctgaggaaagtgagaatagcttgagtccttccagcatgagaaacacacttttgaagtcacccttactgaataagagcacatcgtctgcgaagtttaagtgatttagtttgatcccctcacatctttcatgaaactgaaagtcctccttagatccaatcctttgcataattctagacaggtattccattcccagcacaaagaggaagggagacaaggggtccccctggcataatcctctttttgactcaaagaatccatgtaaagtaccattaaacatcaacaagaactttggagtttttacacagatcatcaccagctttacaaactgactagggaactgtaaggcttccatcatttcttctataaagtcccactccact

SEQ ID NO: 90753 - DNA, 874 bp, Cannabis sativa
ctgaaccatcaaacttatctatatcaaccttcatggaactcataattgtatatgtataaagttatttcaaagaaattatatagataatgagtttagaaaaatcctagtgttgttctttgcaatcttaattttgtgtatttgaattcttgctggtatgaatgtgtttcttgatgctttcttgatgatttctttatgctttctttatgctttcttgattaatctttgctgcagattatgccttgtttggctctgataccactgtaggaaattattactcccaatttctctacacacagcaaagaccagtcaaagaaacccacggtcaattaggctttttacccagtcaaagtctcttttgactccttgatattaaaaccccacaaaacgacagcctcccctttaatcgaagctacaagtcatttctaaatatatatcagaaaccctaaattcacatcatatatatatatatttcattttaacctaaacacataacatataacaaccttacaaaaaccttagcagcagccttcgttcttcactgttcttctctaaagaacatgaagacagatgctattacagcccagaaaaataaatctcagctaagaaaaataaacccaacccgattgcacaaataccccagaaataccagtaatcaacctagatctacaccagaaaagttaatcctttcccaaaccgattcaaacccaaaaaatcatatacacaaacaataatcaagcaaacacatcaatgaaaaatacagaaaataaaaatggagaagaagacactggttttatagaggttccccaaaattgtgcgggtacgtcctcttcgagctcgcctcgttccactatgattcttcaatgttcaagagtta

SEQ ID NO: 90754 - DNA, 1351 bp, Cannabis sativa
tgtaaagggttttatttagggcacaaaattcaacaggcccatctcaagttaattgggaattttaggttaaaaaatctaattaagtttttttataagaaaaaattatgtttttttaatatatatatagtggtaaaaatttaaaatataatatttacaaaatataaatgtatttttttttaaataaaatatcaaatgtagtatctttttttttagaaaggattctttaacaaccaaacaattacaaaggataaggcgagtccgcttttatggcatgactcgcacaagggggattgaccccaatccacataaaactagcagttttgactaaaaacagtctatttttttgtgtgggttcccttttttttagttcctaatctaccccttttttatgtagagaatccctaatttatgttgtacgttctttttgtgcatgcttgacctgtccttcttttgatgtgtgcctgacgcgtgtcttttatttttttctaaattctgtgtgccacgtgccttgttacaatatgggtagtaggtgtttctttccgtatacattggatctgttggtttcttgctagatgtcttctgatgttttattcctttttggaataatttcttttcgacgggataatttacttttagtcaagggtgatggagtggccctagaattaactctcgtcgagtctttttctccgacggaagtatgattttattttatcttgttttaaatggcctcactctatggaattcgtcttcctaattacacagggctggttcatacgtcggtgagtcagatagatggagggtgttccttgctcgagcttgcgttcatcctgcctgacctatgggtttgacctatggctttaacttatcttggaccttgactttttggcatactactgagtgtgtcgtcgtcacttatttctttttgtcgattttagttctgtcattaattattactctgagtggtgggcacttgttttgtcctttcttgagtttttcacactttgttggtatgctccatttgtcttcttgtggctttgtggacgctttttattattttatctattcgtgggtcgctttgtttttcttcaatctgttgggcccttttatttttgttgggaatatatctaattgggcctttacgccctttcccattttctcccccaaacactagctttggttaacaaagcataattggctaaagaatgagccacttcattggcttctctaaaaacaaagtgtaaaccaaaaatacaatggtgttgcatcagtaatttaatctcttgaatcagcccatcaacctctcaacacccttcctgtaaggccctaaattattaggcacgctacccaaaat

SEQ ID NO: 90755 - DNA, 629 bp, Cannabis sativa
acagatacaaatactggaacaacatacaaataatattccgccaacaggagaaactaaatacaaacagtcatcaaacaaagttattacaaaaagaaaatttatgcattttggcttccctcaaatatagtaatgtatccttaaaaaccacttcaaaaaatacaacctcatagtaggtcccatgtccaacttgttccaacaagctaaatacatatagactggtataggaatggtattttaatgcatgttacttgaattctacatatctaattggatatggcaagctataaaatctaatttgatcaccatatatatagactatctctacatagagaaccattggaaaccacacaaattttcagttacacaattaaaagtgacgcatcagcatagtatacagaccaatcttttagtaaattcatttctaccattcccaagtaaacttgacttgttgccaacctctagagcacagttcttcttgccctcgttacatcattaatgtaatagttacaagcgcatgaatgtagcttaattgtactagcacattcgttaaacaaatgaaaaataaaggcattcaagaaggctcaaacaccaatggaaatttaactgagaaaatgaagcaagcacatgta

SEQ ID NO: 90756 - DNA, 817 bp, Cannabis sativa
gtgaagtgtgaaactaaaacgaaaactctgaaacaaacatacctgatacctcgccacctcagaactcagcagtcacaggtggacactcgtgaggggcacgggtagacacgggcagagaagactttttgactttcgatgttagggatgaggctcgcaagactgagctagccgctgagatgcgaccccgttggaaaagaaaaagcagtcgctgcctctctcggagaagaagaagttctaggatttttttgggtcttgtgtcttgttcttcgaatagtttgaatgaatagtgaactgaaactaaaatgtgataaaattaatattattaactttttattaaatgtaataaaaaaattaattttttttactatgttcgagttacgggttagaacccaactaataaaaaaccaacttttgatacccgaactcgaaacccgtgtagggcatttttgggttggactcgacctgaccacacaggtttttaattttttggtttttttagcagtgggtcggggtgggtggttggattttctagatttgcgggtctaaatgtttagccatagtaaatacccaacccgttgtggataaattatccccaaagttggctatccaacttacatcaatatatccttcaaaattgaaggaaagttggagtagtgaaggcataagttttgggttttctttagaccatctccaataggagatataaaaattgtactagatttagcacaaaaagtagttttgtggtaaatttataccaaattttagctttgtgctccaatgcacaattgtaaacttttgatgtaaaatttaatatcta

SEQ ID NO: 90757 - DNA, 894 bp, Cannabis sativa
ttttctagatgtatttatattgcaggagtatcgatttgtatatgtgtgtacatattgtgtaatctgtacagttttcccacataaattgatatgaaatagaattatcatcaatgtatgatggaatcaagaggtgtgtacattttcatctcattgttttccctatatttgataattttgtgtgaataagaaaataatttttttctgttattgccattcaatctgttttttggggcacaatgtcatacgaagtgagaagatttggttggtggattttatgtttggaagttggattttggcatagaaagaaaaatgtagggaaaaaacagtggaaaaaaaaatcaaaatttcatgttcgataatctattgaatcaactttttttcaatttccttacatatttctttccccaccaaaatccaacttccaaacatagccttaagaatttaagaatattaaacaaaaactctagctactgtattgattgtgaagccaaatgctgagttaaagcattgcgtcaaagttcctattgtaagattttcatgggagtttgtctacattttctcttgttgatgctaaatcaaaaataaataatcaggagcattgttataaatttatgatttattagattattaggattttgtattatgattattatttattcatctgaataatgatgctgtattgttactgggatttatctaattaaagtttaaataagtttaaatttgtagaaatacataggcttaattagttgtttgagttatttgttcttcatcttatatatatatatcttgcttttttttctcttattaatttttctatttcttttttctttctttgtttcgcactctgtagttctgaccatatttcttttgagaccaatttttgcaatttag

SEQ ID NO: 90758 - DNA, 1022 bp, Cannabis sativa
aatatacttttggattgagtttcctaaataaaaacctatttttcatcctcaaataaattaaaatatttgttaaattatttcaaaaaaaaaaaaacatttgttaaataataattactttaattttgtaaaaaaaaaactaattaggatttttgcctgaactttgagtaccaaatcatacccactattgagattgttggatttaaaaacttttttctaattttagtaaaaaaaatctaatatagatgaaagttcaggggcacatgatttagtacatatcaaaattcgaggggcataatttggtagatattaaagtttagggagcatggtttagtatataaaaatcactaaaatagtaaattgaatgaaaatagacgaaaatccttaaatccaacaatctcaatagttcaaaggacatttttaaccaccttaaaagtttaggagtatgatttggtatatgtcaaaacagggggcaaaaatcctaattagaaaatgatcaaatatttaatacttaggcaacaataaaaatttgaatatacgtgaaaatatatacatgaaacttttctatatttctcttagttttgattaattaatttgaagttattactaaacaccacttaaaattatttaaatttatttcaaaattaataagatatttgttataatgagcaacaaacctaatttttatgtaaggacgaggaacaaacctagttgataacttataaatgttagtgccccactcaaagagttccacttaaaaataaggaaaaattttaaaaatatatttctttcatgttttatttataattttataatttaaaatttataattataaaaatatacgtgtaaaattttaaaattacaaaaatacaattaatttaacaaaacataaaaaaaacaatgacaaatcaacattacgataactctaaataaattataaaacaataaatatatcagaaaaataaactcatgacaattataaaataaccaataaaaggtttattatttttagtgatgaggtattt

SEQ ID NO: 90759 - DNA, 892 bp, Cannabis sativa
tggctcaggaggtaaatccagcattgccttaacaagcaccgtctcaaccaaggctgacaatctggaccctctagttcaaagaggaaagctaactctaaggagtcagccaaggacaagaaaaagcaaaagaagcacgataagtacgtgccaatatccgtttataccgagcttaatgaaactcgggaaaacatttatctcgctcatgagcacagggttgcatttcgtaaacctgagcccatgaggcatgcgagaggatattctagttatcttgggagggccacatattgcaggggaaagtaacaatgctcaaaagagatatgtaatggaagtaaagaatgagcagtctgcttttgctctagaaccttctaagaaaactaagaccaaagaacctctgattgtattctcggaggaagatgaaaaacacgtgagatatcctcatgacgacccactggtaattaccatatagcttgccaataaaaggacaaaaagggtgctggtggacatcggaagttcagtgaacatcctttataaggatacactgaggaaaatgggacttgaaaaagccaaattaaaaccttccatggtaaatttgtgtggatttacaggcgacagtgtcaccagtcaaggaataatcgagctcctattaacattgggcaaagcacctttatccaccactataatgcaagactttttagttgtcgacctgccatcaaactacaacatactgttgggtcgactaacattaattggactaggggcagttacttcaattaagcacttatccctgaagtttcagacactagtaggtgtgggattagtgcgaggtgaccaaatgctggctcgcgaatgctatcgcatagagctgtaaaatagaaaggtcggtcactagcta

SEQ ID NO: 90760 - DNA, 632 bp, Cannabis sativa
tggagtcataactacaagggcaagatctatgggaggtcgtcaatgacagtgaaataaacccacatgaagatgttgcaactttgaaaaaatgaaagataaaagctgaaaatgcatcgtttgcaatcaaaacgacgattgaagaaaaaatgttagagcacattaggaaagttgaatcaccaaaggaggcttgggacactttactcttctcaaagaagaatgatgcaagactccaatttctggagaatgagctcttaccattctcacaacaggagatgacaatcaaccaatattttaataaggtgaaatctctttgtcgtgagatttctaatttagagccgacttctaaaatgctagaagcaagaataaaaagaataattattcatgagttaagttccaaatataaaaattttgttgctacaaatcaaggttggccaactaaaccttctctcatcgagtttgaaaacttgctagcccattaagaatctttggctaagcgtatgtcaagagtttcaataaagagtgaagatgtaatatatattttgataagcctattggtaaataattagggtttatatttatagtctgggttaatgaagtaataagtaagattatgatcctactaatctatttca

SEQ ID NO: 90761 - DNA, 840 bp, Cannabis sativa
cagtgaaatttctcaaaaaaaaaactaaatttttcatatcaaatttgaaaattggtttttttttttctacacacttttttctttccttactaaaatttaactttcaaatttaacctaaaaaattaaaataattttcaattcaatgaccttgtgaaatttcatttttatcctttttatggtataaattcaaaaaaaaaaaattatattgaaaaacaatataaagtgttttagtcatggaaagacctacaccaagactagggagtacaattgaccaccataaaaaaatgatcaaccttcattttttttcttttattatttcttgaaagaacattttttataattttgtctttataattttattttcatttatgtgttagaatttattttattatgatctatatttgctaacatgtatcttaattataaatctataatttaacaatctaagtatgaacaatcttaaaacgataaataaatacatataaagtttaaaaaactttacaaaaatggcagcggaataaatatcttatttcgttccgttatctaacacttgaacctttctgttgtagagtattattaagaattgaacttggatattttctcctttgatggtgttcatcatagtcttccacaaaggtctgagtatcaattaattgaattgtgtgggctaatactcataatacctttgaacaatttagaaaatgagtttcgctagtgaattttgaaatagtttaaagaagagaagagaaaaggctatctgacatagtgtttgcccaaattttaacgacaatgacgtgtcaagagtagcaacacgtggcacaaaaatactgagactaaatt

SEQ ID NO: 90762 - DNA, 1028 bp, Cannabis sativa
aatttaattaagtatcttgaataaaatcgacttaattattaattcttctttaatatctaacaaaaatattctaattaagttgatctaaaattaattaaaataaattaattttcaacttaaatatatgttttttaaatttaattaaatttcttaaaattaaaataaataattaagtatcttgaataaaataaacttaagtatcaattctaatttaagttataagaaaaatattctaatttaagttggtctaaaattaatcaatgtttgacttaaatataattttctacttaattaaatattagaaaatataaattagctactacaaatgactatgtagaatcttttatttaaactaagtgtgtttttctaaattaattttaaaataatctaataaaaaatcatttattattgattgaatttaaccagttgttggaacttatatttttaccaagatttagatttactaacatgtatatttgattaacaccctaaatacgaattctctaatgtaaggaaattaaacacataagagcttagaaaatcttacattgatttcagcagaataatatgacacattcccctcagatataacccttgttcctttctgtcgcagagtaataataagatctgaacctagatctccttctcttattcgggttggttaaccatcatcttctgcactatgattgagtacttgacttgctatgtgtgggcatggtaatctatcactaaggcttgaatatgttgaagagcaacaagaaggtttgaaatcactatgaaaaggagtctctcattaactagttgatagagaatgaaatctatgtttagattggttgaaaggtgagttggatgagaatgaaagcatcatgttcatttcatagtatttcaactagggttttggatttaaaattatacggattaaagaaaaataaaataatgggtaaaaaaaaactctagtgggcggccactttatgtgcgccttactagttataattttgtcactttatttcaaccatttatccttattt

SEQ ID NO: 90763 - DNA, 548 bp, Cannabis sativa
ttgtcgtttagaagaccaagagagtaggttgtctccaagaaacacacaataactagaagtagattttctggtatcggggcaaccaccccaatctacatccgtatacgaaatcaaagaagtggttgatgagggataaagatgcaatccaaagtgaagagtcccctgaacgtagcgcaggatgcgctttagagtatgcatatgagtatccattagatatgcataaataaacagatctgttgtacggcatagatatgtcaggtcttgtgaacgtgagatattggagagctccggttgggctgcggtattgagagggatcctcatatggagtgcttgttttagcactaagtttcgatttagtatcaaccggagttggacaaggtttacaagatgacatgccagcgcgttcaataatttcttaagcatactttttctgggacaaaaatagaccgctagcatgttgagtgtctgcgattcccaaaaaagaactcagtggacccaagtctttcatagcaaattcggtgctaagaagtagcatgatagatttgcga

SEQ ID NO: 90764 - DNA, 682 bp, Cannabis sativa
  modified_base (40)..(44): a, c, t, g, unknown or other
ttctgatctttattaatatgtaaatctgattatattgaannnnnttttatttagggcacaaaacccccatcttatcaggttctctctcatctcttgctatattttctatttacctgtatttgttttttcttaatttaaatgtgattgttattttcttgggacttgaatacgttttcagattctttttgtttgatttggattattatgattgtgcaatgagcaatattattgaaaagctgaattcgttttagtagattggattttggtttgaaatttttcgtgcttaagccatctccgaccttatacactatagtatcttccctaatatatttaaaatttattaaatataatataataatatgaaaaaacaaataaataatgatggtctggctacactatatttggtgtagctatagtgtcactgttgtaatgaaaaaaagttatttttaacaccaaagtgtgcgttggagttggtcttagttatttgaacttgttctgctttgcttgtttggtttggggactctgaagatttcactgtccaatttgactcagcttttgggtattatttgtagtaatctattttttatttctttttgtcaaagttatgcctgttgtttataatcttctaggtgaatgctctgagctataaaactaggcccactgcaaaagatgttatgtgtta

SEQ ID NO: 90765 - DNA, 967 bp, Cannabis sativa
agttacttagatacggttgagtatattaacaaagctagataattagatatttaaaatgtcgagattattcaggattatacttttggactattttacccctaagtgtgtaaattacctttttagtatagttgggtaaaaatgtcttttccttcttcttgtcttaagtgacttagagggatttttagtgattgtctctttatcttttagataataagctgaaaaggattaattattttagtctttatcttcataattcaaaaaattagaaaatttcaagacctttctctctctgtttaaggtcggccgcaccaagaaaattaagggagtttaggattttctagtagtttagatcaagttaagagttatttgagtaggattttaaagtttaacttaaggtaattcttgttcctcatcttcttttttattttaagtgtaaaagttaggttttaacgtataattttgattttggccactgttgggttttggtagtgttagaatttagttcttaaaattgaattaggtttgtttgagctattttagagttttttggtgggctgtagcaagtttgaactaggtttgagcttttaaagctcaaatttagctctttaatgatggatttgaattctgagctttgttgatgcttttaattgtgaattatgattattggacctaatttaggtattcccaaaagtttagaaagatttggtttcgaattgtggtagttttgaggtttggggaaaaatctgctgtgaaaatgacagactgtttctgggaaaatggcctaccatttttccaggcagaaaacccaaaaaaacggtctatcattttcacagaaatggcctgccatttcgttagggtactcttcctgaaaccttttttttttcttgttaagtagggtttagtcacgctatttatcaataaagaaacttttagtttcaagtttaagtccctcaaaagtgatttagcg

SEQ ID NO: 90766 - DNA, 542 bp, Cannabis sativa
cttgctgaaaaatcacattacaaggaatcaaaataacatttgtgttctaagttcttcttcgtagatctaagtttgtagatcggagctctacgaattaatggatggatgtattttgatcaatttcattatattttatatatgctcgattttaattcttttctttttatttttttcaaaaaaaatgatatgtttatgttttcatattttgatatttaatttttgtaaaattattttttttaattacgaaaataattttgctgaaaatttttattatcaaataatcatgtttagtggtatgaccaactacaaattataagtatgcaaccaaagtaactattatgattattttgctacgataaatttaatgtaaatttaatatttttaacaaatttttttatattacacatcttatttattagtagaagaaaagtaacatataaaacataatattctcaattatatccctagctagtactttctgtcacaaattaatacactctagattaaattctatcattattaaaatacaaactacaacaaaa

SEQ ID NO: 90767 - DNA, 3165 bp, Cannabis sativa
tttgattagcaaagattgcaccgtaattgaaaaaagcactgtagtgtgccttagcattagggcattacacttctggaacccaagggctcttttcgaggacggtgatgagtttcttcatgtgatgtgttaacgttctccctgctgtcagccatgaaggagattgttttgtatatgtaaggagggttttttctgagcttttacatgaaggctctcaatgaaagcaccaaactgttaacgcagattttcgtttaccaaatatgagcctaaatagtgataaacttgtactgaaaaaatatagacagtaaagaaaaaagtatgaacacaaaggattttttacgtggttttgaagttaaacttctacatagtccacgagtcaatattatttgatttttgatgttgttctagggccttttctcttatgatttttttttttatttttcagtctaacttgcctctattaataattgcatagtcaggcagttaattacagggttgactgaatgactgaaatctttacaacaattacccttgaaatcgtggggtttaattacatatgataaatgaggttaatatttgaatatcacacagctgtgattatttcgcttttactgggtcaaagtaattgtgtattaaacacgttataaatcatagtgttctaggatgtctcgataagaacccagtaccaatgaccttgatagcgagctggagctttttccgtatctttcagaggttgataatgtaaatctcgtcgttcctgcgctgaagacataacgctccatttgacaatcgcagctctcggcgataaggtgaacttctacagtctacatcatttgaatgtcagcttctacttgagagaattgactcgaaggagctgtgaatcttattgaatgatgtttggagctagttagtgaaagtaccatgcgcatgtcttcctagggcgagacggacgcctcgctatcacttgcttgagtttacccgtctgttatactcagtttgtataatatatattatacgctaagtgtcttcacaatcattctttttttcttacgtctactcatgctgaacgaggttgatgcctcaccttgtgcatcccttgacgtatggtttcacgctaatgtatgaggcaacagtttgtatatctttatctcgcgcaagaccttatagtcagcaagttgtaaatatactttgtcacttccgtatttaatgagttattctattttcaaatataattaccgtttcatgcattgatccctactctttccaatctaacacgtgttttttgttgagatggtagtcgaatttcggatataacacctaatattattatatattgtgtaattaagcattaaattttatatactttagtttaataattattatttaaaatgggatatagctttttaatggtattagacaccacttatggttttgatatctagcagagtgcattaacaatggccttgtgagggctcactcatgtcaaccttacatagaagcacacatcatattatagtaattataccagttctttcagaaataatttatgagtcttggctgaattatttaagggaatatttcttaatgattctgttttgtcactcagtcaagtcgtggggtcttgacaaagatgttatgcctcgtacatattcgagataatgcccaatggggcattgtttaataattaggctttgtgtgtgacatttactatctggtgaataagcagtgattaaaaatcttccaaaaatatatattcactatagtactaagtcagacacttctacatcttctttaccacataatatattttttttttctatgtgtactaaaatgtaagtaaacaaaaagcttgcatttatataaatatatatatatatatatttatgtaatctgggtaaagaaggaccacgaagatggagttttaatcattggttttgttaaaagtccaaatttgttatgtttgtttgctcaatgactaattatgtggacataagtatatttagagaatttcaaagtagctttctttgtgtgcgcgtgtgtgagttttacatttactgctaggattttcagctagataacaatattggatataattaaactactatatgctacaatcttattatttgctttttaccgaagcccacaagactgtgacataggataacaaaattgatatatctgtaagtgacatattgctcacgtcaatatcattaagttatgacttgtgctacacaggaaaagtatatctatattatttttttttcattttttaagtgataatataaaacttggttgcttctcttgggttggatggtgacaagttccttttgtttttccttacttgattccttcggccatatatattcttctcatctcttccatgcttttacatttgagaaagagaaaaatctcactaatgggtccctttaaaagaataataattgattagggtcttttctttttcttgtttttcttttcatattcatatgactttttgattctctctcttctccaaatggcctaaggataccagtgccccgtttggcatcatcccagaatctctttatctgctatagaatattttaaagcaaagcatagaaaaggagcttctaagactaagtagacatgagtagcagctggttaaagagaaaggtacttcaattaaaactcttttattcatttattcattttttaaatatttgggccacattcgcataccataaccaactttgtcaataatttatattcctttcttcgaagttgatcaactacaaggtttttttttttttttttttttcctttagataaagaagaagcagatggttaattagtcaggaagaagaacaacaagaatctcactaccttgatagtcttgctgtaaaacttaccccatcccactctgtggggtctaccaaaatatttgatcttttagtaaagcgaagaaacgaagcttgaggaatttagaatgataacagatacacattagatccttgacacaaatcttcgtttaattttatcagctatagttaacaaggtctgagtttattaatttatttggtacctagagacaaatcttcgttttgagaataaaagaaagaagagtttttcctttaatgaatgtttttttgtcttttattattggagaacattgtcccacgtggattaaat

SEQ ID NO: 90768 - DNA, 862 bp, Cannabis sativa
gattcctactcaacttttatttttctcttatcatctttcctttaattttttgtatagatctatgttatatggtgatttttctctctctctcactcttgttgaatttgtgtctgattctttctctaaagatgatggaggatctgtattgattgggctcaaaaatggccgggcttgagtcagttccaaggttgcaattagtaagggatggagaccgaaacttgaatcaatgggactaagttatttttaactgatttttttattcaaatttactcataattctgggtttacattgttgtattttcttttaaacaattatatattctttttgcttcaaatcaacatacattggaaatattttaccgtaatttgttttagattttgtacttgtgttttttcatttggtataaaaatgttgtgagtattttatttctctaatctttaaagattcagatggtagtatataaaaatttgattagttatcctacaaagcattaatattcataaaaattatttctataagttctatttaaaaaagatctggtaccattttttaaaggaactctggtaacaatgtaaccattctatttttttaccctaaaattgatttaaataaaaacaataacagtcaattaaaaaaataatttataaaatattaattaaaaagaattgaatattattattcttttttaaaaaaaaatctaatatagtcactctttttgtgtgtcactatatctacaaaataataataaagaataaaaagaaaagatatagtgatgcttttttggacttgctgttatttttttagtctgacaaaacttgactctaaatgcctacactgacgcgcaatgagtgattgtgaaag

SEQ ID NO: 90769 - DNA, 994 bp, Cannabis sativa
tctctctctctctccactacaagaaatgttatttttaccagcacagttcgctactgcgctggtaaaagtaacttacttttaccagcgcatttcgcaaactgcctggcaaaaaagtcaaagttttagcagcgcacatttgcagtggctaaaatttaacttttagcagcgtatttacacgctgggaaaaattatttttgccagcacttttcattttgtgttagcaaaagttctaatactaacattgatttaccaacccattttgccaacacattagaagtaaattccattttactagtgcaatttctatatttcatagatcaaaaatctcaaaattgtagttttgacagaaccgtgacccaaatctcgactcaattttactaatgttaatattggatactttaccataaaaagaattgtgtacctcatatatcccattaaattatggtaatatagatgatataatgatgcaggtttattcatatatcatgaataggtcaccacgtgcatgacacatcttcattactaacggcaccatgaataaaaacagatttagttttgtgcaacttgactatatacatacataggataatgtagtattctaatataaaaattatgaaagatgtagcagtgcaagtgggctacttttatttttgtttcagctcctctcttccctagacaaacacaccttgctctaattatttcaattcacatctgtacactgtacactacctacaagacataatactatacaatccaatctaacgccatctctaattcgcctttaaaacattaaatatatatataatttgctttcacactatatttatcttaatagaacactccaaataaactcataaatgaaatgattttgtttacagtatcacactaaattaggaaccgtttggtaacactttttttaatcagttttttgtttttaaaagtagaaaagtggaaatatttttcaaaaacatgttctataaaagtgtttttactt

SEQ ID NO: 90770 - DNA, 1070 bp, Cannabis sativa
atgcttctagcttctttaagattagcatgcgtggttggttagtcagtactttgattggagatggggttaaaaataaaaccctaactttctgggtgccaagtctagttttttgtcaccagatgactctgtttgattcctggaaacacttgtatcttaatctttggctaaaataaagaaaatgcctagaagacttttttgaaaaactccttcaaaatggcttaggatgacaaagtgtcaacttgggagctgggtcccaattatgaccccaagaggactccgtttgtttcctgagagcactcaaatcttaattgttgttgaaaatagaaaatatgctcagaagacttcatctaaactacagatgaaagtggcccaggtttacaaagtgtcaacctgagcgttgggtccctgttttggcctctagatcaatccatttcattccaaaaagcacttgtttcctttttggataaagaaaaacaaaatggtctggatgcttcttcaatattatggttggaagcagctcaggttgacaatatgtcaacctaggcgctggggtgcttggggcaacttgtgcctcaggtgctcaaaattaaaagtgcttcgattcaaattttgttgcctcaaatatgttaatgacaagtctaattcatgttccaatacaaattttgagttatttgcactaagacggactcaaaaactaaaaccctagtaggagtgtcaatctgggcgctgggcacccagattgacttttggggtgctatttcgtctattttcaacattcaggccttggacatggattcttcttatctttgtggtacataatatacgaagatagtgaattggagacaacttagtgggatccaaacactcattctagagttcccggggtcaacctagatgcagggctagagacccctcccagatcgattgttatgactcaggactagtcaactctgggatgttttctttcttgtcacatgttaaacattgatgtccacattaccaggattagtttttgatttaacaaaatatatttattaattagactcgcaaagtgatttaattaacaaata

SEQ ID NO: 90771 - DNA, 1140 bp, Cannabis sativa
tattccgtggtacattagatgagtctcagggcacattagatgagtctcagggtatattagatgactctcagagtacgttactattttttaaccctaattatccctagatcaatctcagctctcaaataaaataactccctcatctaacaggtgtgatacatcatgaaatacattccgtgaaagtacaatcacaagacaaaatcatgtcccgaaaaatattatggaaattacgtgttgtccacagtgcaaattataaaaatccttttttttttatttttttttattttgcctattataaagtcacattgatacatttgaagtcactgtcatatcaaattattattaaatttattgttttagtcaaaacccactttgccaatgaatagtctagttatttagatatgaacttgatccaataaattctcatcataaaaaaaaaaaattatgccgtcgaaagtgatgattttttttttcttatttggattgcttttaccctcttaatcttttcttttaatttgtatttaaatcatcattttaatttagtaagaaacaattttaaaaatttttgaggttaaaaaataacaaatcattcttttcaattttttttttttttgatactgtggtaagagattacacctataaatagtcaaactttcatttcttcacatttttcacataaacttttttttttatcattgtacattattatgtttttttaataaaaatgtattgaatgtaaatttctaaaaagattaatatgactgactacatataaattaactaataatgcaaagaactttgtacattaaattttcggcttgcatatacccattcatttgattatattattaattttatgcaagaaaaattagatcctttcatgtataaatgcatgttaattttgggaagagaagtatatatatccatctaataaattcatttgcatatgttttgtctatatcttttatttacactgtatatgtgtgatgccagcgtctcattttaatatcaccaacataaacttttctcttttcgttaaatcccctagcaaattagaagattagtataccttataagcataaatccaacaactgatctaactctacaagttgaaagtttatcatctttgttgttattttt

SEQ ID NO: 90772 - DNA, 827 bp, Cannabis sativa
  modified_base (292)..(307): a, c, t, g, unknown or other
acgataaactaatgagtgtttatctcaaaaaactacttaatattcacataagacaatctaaggttttctaccaatccccgctgtataaatatactaaaataaaacttatattttggctctaaagcatacaccatattgtagagctcgtcgcaagctttgaaatggtatatagaatgtccaaaacggacacccgagtcaaaagtatgacaaaaatatgatttctgatcacttagaaatttctaaaaactataaaattcgaaaatcctaatttttgcactcaccgaaacactannnnnnnnnnnnnnnntcactccaaacttcacagggcgcatatatactataaatattaccatcattacataacataaataaaaatcgaccccttaaatgagaaacgccattaacgttcggactaagctttaaaaaagttccaaactcgatttctaagtcaaaatcacctcaaattcaacaagtaaacatcgatactagtcccatagctatcaaagaacaattctaagaagtcaaaatctccataactattctaattcacaaaaccctatatgaaaccaattatttttaaacttcaaaagaaattcaaaccataccttaagctttccctcttcaagaatttgctatcctgctactaccgaagcttagatcgctaagtttcgggttgaaaattgaagaaaatagatgtaaagggagaagtttttatcgaaagaggaagaacaagggttttgtttgtcgtcgttcttttctactgttataacttaaaacttaatatatatatttaaaacaaaacgatcagttttgttttatatataata

SEQ ID NO: 90773 - DNA, 608 bp, Cannabis sativa
tttttttttttttgagtcaaaaagtaaaggtatattaaaaacaaaaagtgataatttgcctaggaatctcccaaaaaagttactgtgcaaaaataatactttaggaaaaaaaacaaaggtggtgatttgaaaagagaaggaagagtcgagtaatagaaagaaatcagaacaaggtacactatatatattacacttttcaagtaattaagaaattaataatattattatatttttctaattattaatctaccttctcctcccttatttatcgcctattttctaattaataatattattttaaaaatatatgttttttctttttatttaagcgtttatatattacaatatgttttatctaggactcgaactcaggacttccaacacttacacacccatctatggccacttgagctagcctcaagtggttatttcaaaaatatatgttaatattaggaaaaatcaaataagatattcattttcattttactttctttggggaaagaaaataaatacacataattttttgaaaaaatttattgcttgtcataaatgattcaatatcattaatgaacggttgtatttgagcttcaaaaatgcacctatttttt

SEQ ID NO: 90774 - DNA, 1043 bp, Cannabis sativa
tatataatacaacttatagtcaactaaatttgattcgattatatttaggctaattaaaatttttgtcctataaattttaatatgtatgtgccaaattatgtctctagatttttttaaccgttaaaaatttcttcaaaactattgagataattaaatttaagtattttgtccaatttcattcaattttgctaatttgatgattgttcatgtactaaagcatgctcctcagactttgatatttaccaaatcatgtccctcaaattttgacatatactaaattatgtcccctgaactttcacccatgttagactttatttactaaaattagacaatagtacttaaatctaacaatcacaatagttcagggattttttaacatccttaaaacttaatagttcaagaagcatgatttagtacatgtcaaagtttaagaggtaaaaattataattaattttatatttatatataattttaattaattaacatttattattatattttttgtgttggattatgtgggtttaacaatttagaactagaatatctatattttcaatatcttttcctcgcaaaaatagccttacattaaaaaaaaaaaaatctttctctcactctctggcgttgaatcccaacccaaaattcttgtcgtcgaacacacagacccacagataataacataattttactttttgattcttattaccaaggacaagactacgggccaagtacttcttcagggctctcttaaacatggtctttatcatctggatctctcacaagctagggtcccaccttctactacttacaataaaagattgattaccacccctactacttttagttgcataaagaacaacagtcttggagcattcgctgaagctcaaattttgcatcatagacttggacatgcttctccaaggatcttaagaagtttcctaaataatgctcagccccaaagttaaatgactttcctaaatttacttggctatatcctatgaaagtcaaacctaaagttactactagtttttatcagtttaaaactt

SEQ ID NO: 90775 - DNA, 854 bp, Cannabis sativa
caaatattgaactcaaaaaaagaagaagcaagaaagtagaaaagaagacttacgcaaaaggtgaaggctcaacaaagagagcaattcgacgaggccttgaattgttctcaggatccaataaaggaggatactcttcctcttcttctggcctaatctcagtgatggtcatatcttttgctttaattccaaagttagtccttttcctcactctcttgggtccctcaaagtagctaaaccgtgttcctctcacaaaaggacaagtgggttttgttcttaaggcaacaaaaacaggaactgaagaagaaaaggaagaagaagaagaagaggaagaagaagaagaagtattggctctggaaatggaaggaggagagagagtggaatatatagagagagaagtagtacaagtcatggtgattaataattaaatgaataatataatgcgggtataagagagtttgtggggtgtggtttttttcgaaacttttggattgacaatcaagtaagttaatgtgggtatttggtgtttggaagaaaagaaatgattttgatggaatctgttgagaaagaaaatagtttctttaatggatataccagttggaagatggaatagttggaaggaatcaaatgagaaactgttagtatatgcccatgttggattttaactcttctttccttctttgcaggtcgtaatctatattcaattgcaacccaatccaatctccgattctattgtggattatatataaacagggacttggacttttctttaataaaaaacatttttttttagagagaaatatttcctattttgaatgctaatacaacttctatcaatttttgtgttaaaaattgta

SEQ ID NO: 90776 - DNA, 587 bp, Cannabis sativa
ggaagatggtaatcttccaaccagaaggtgaggaaccgtttgtttatgttgggtcggttcaaggatctcagatcccggtgatttcagccctatcagctaaagaattattgtgtgatggatgcctagggtttctggccgtggtgttagacaccactcggccagactctgttcgaccagaatatatgaaggtggttcgagaatttctagatgtttttcccgaagaactttcgggtttaccacctcagcgggaaattgattttgttattgatttagaacctggagtagaaccggtctccaaggctccttatagaatggctccagctgagcttaaagaaataaaaatttggctccaagggttacttgacatatggtttatccggcctagtgtgtcgccctgaggtgctccggtattatttgtcaagaagaaggacgggtctatgagaatgtgcatcgactatcgggagttaaacaagctaacagataagaattaatatccattacctaggatcgatgatctttttgaacaacttcaggggaagacggtcttttcaaagattgatctttgatcgggctatcatcagttgaga

SEQ ID NO: 90777 - DNA, 633 bp, Cannabis sativa
caaggtcacaaactgctagtcacaacagctacaaaaattgagagcaatgcttaatcagaacccatgtgctattgtgctactctttgcagcacaaagttatatataattttaaatatcagaaatggcaaagccaagaatctgaagatatgatggaaatctagtctattctaatgctcaattgattaaattcacaatattttgtaatgatgaaggagaacctgtagaactcccattgaaagtgcagcttgaagggccttgttatgtcctgatgctctaatgggaggactcattacatacctgaaacatgggaagtttgatatggtttacaaagcattaccaatagtaatgatagaaagaactatcagtaatgataaaataataagataatgtccagcttattactttgccgcaatggaaaagtcaggatgccaaagccaagaatcatcaaggactaaggcagatactacagtttctccaataaccctcagccctgtaggttgaaataaaataacccaatcagacaaataattaaaatctttcagtatatcaagataagattttgaagaaaatggatgaataatgaatgaaccaaccaccaaattggcaaacttatatcccacaatttgtgtaaac

SEQ ID NO: 90778 - DNA, 646 bp, Cannabis sativa
tatgatgtcaaactctgttaattcaaattctataaggtcagcactcaactccctatcctcgatcctaactggcagagacctaacgcgcctattagagataactaactcccgcctaggcattagggctccaaaccctctttctagaatatcacaaggcctacccaaaagatcaattattcgtgtagccacatatgcgggtgtagctcccgaatcaaataatactgtaaacaaagagtttttgacgaaaagctgacctgtcaccacagagggagtggctgcagcatcagcttcggtaatggcaaacacccaagcaggtacagttttgcctctaacttccgctcttctttcttcacatgagggcaatccttcttgaaatgccccaccatgcagcacagaaagaatgtcttccgattgcactctccctgatggtgtttcttacaacgtgggcactcagggtaagaataaccttggcgtccacctctaccttggttccaacggaacctcttactctgccccgacccatcagatgttagggtaactttcctgttctgatttgtggtggaatcaccaccatccctaccacaggcaggagtaggaaaagtgggggttcctgttgggttttgtgccctaaataaaaccctttaca

SEQ ID NO: 90779 - DNA, 702 bp, Cannabis sativa
atcataataaccacatgatctaaactcaatggtcaaaaaaagtttcctaccggtagggaacttttgttaggtcctaccacaatcttgccctatatatatataaattatctactttttattagtagaagggtttgtagcatttttttaatatatatattatagagtacgtgccacaggcacgtaatctcccgttaaaatctgtacgttataatcatatatcttattttcatcaattatgtttaaataattgttaaaaaaaattatagtttgaacaaagacatagtgtggtataagttaacttattgaagataagatcatcaattgttcagtctaaatgtaaggtcatgtggtttgctctactattatctactaataagcaaagtttagaagaaaaataaaataataattaacaaaaatttattcattgtttcgaaaataacaaattttttatgaaaaaaagaataacaacgaaaaaaataaatatcatatgtatgtttatatagtcttctaccttttatatatttactattaaacaaataagaagaaaaatttttaaaaaaaaaaacagtagaaagagatagtaaaaccatatagaaaagtctttaaaaaatattttttaaaaaaatggaataaactaaatgagagtaattttttgagaaaaaaaagatgaggttttagaaaaaagaaatgacaaaaacatta

SEQ ID NO: 90780 - DNA, 1000 bp, Cannabis sativa
  modified_base (880)..(896): a, c, t, g, unknown or other
actaatgttgttaagtcttcactacgctccaatcttacatgcgtagagctagcagctaaaagactgcttggaggagttggcaagcacagttcatgagtacttcgatgagtgtctggggcatgcgtctgtgatgcatgagactcatgtcatgacaattgaattgaatctcttccatacctttaaaggcacaatagtgggagctaattcatgtgtgatagtactttgaattgtgctgctactaaaagaagggacaagtgggtatcttatagtgaccttgaaattagaaaaaaaggggatatgtaatgaaaaataataataaatgtaaagatatatatatggtgaaaactacgaacatattaccataagcaaaaaatatatatatacacactaaccaagttcgtggtagcatcgctgtcaccattagttcctgaacaatggaagggtcgtggttcagagtttggtcgaactgctacatcattcctgtgagacttaccacccaagcgtcaaaagatttatacactaaagctaccattacatcatcttctatggacccgatattaagattggcaggagtatgacgctcatcaactatacagagttcggagggtgctaaaggaggcgacttttgcgaaggaacatacacccctgttttcaaaaacaaggtcatactaccttgtataaactatcaaagatttagcattattaagagaagaggagcgagtgaggagatacctgacgacgcacccacatctttctcccggtcacaagcctcacctcgactgattaatccaatacaatgatgtcgcatccatatgttagcaaatttaacagaaatccccccttctctttctttaccgggtagtcgaaatgtgtcgcgagnnnnnnnnnnnnnnnnnaaggaacccaacaaacatgactgttttgctttttctaaatcccctatcttccgatcatgaggaacatgttgatcaaacccaaattgtctagccacacgatcagg

SEQ ID NO: 90781 - DNA, 777 bp, Cannabis sativa
aaaagggaaggatttcctaaaatataaatataaaaactctaactcctggttctggaaaagtgttgtgaaggcaaactcgattttaaagagaggtgcttgtaaacaggtggctaacggtgagaatacaactatctgggaggacccttggattcctcattacaaaggtttttgtccaaaaccgatcagggaaggagcagtaaatctcaaccgagtgtctgacctgttactctctaatggttactgggacgtaaataagctgaaggaaaaatttgatcatgaaactgtgaaagccatcttgaaagggggccacccctctgggaatggaactgatagatggatatggactcaaacaagtaatggtatgttctcttgtaagtcggcttatctggtccaagctttggatagagccccccagtgtgaggtagctccgactctctggaacaagctctggaatagcaaaatcctggaaagacacaaggtcctgtggtggtgtattctgtcaaatgcgcttcctacaagatcagtgatcaataaaagattccacattgaggatactacttgtcctctttgcggatcaagggaagaaactatggaacatcttttcctttcttgtgatgtggcctttcatctctggcgttcttctccttggggtttttatcccttttgtgattcaggattcagagtctgggactgggtcaagttcatctgggatctgaaccgtagaggagttcgagtggaggatgctttcttgtacgcctccataatcgtggatacaat

SEQ ID NO: 90782 - DNA, 517 bp, Cannabis sativa
ttctctctctagtttaaactctctatctcaaccttacactatcacgatttttactcaagcaataatggtctgattcacacagattacaagtattgatagttatttatagatttacattgttcactaaattagctctgaaaatatcgtcgctcatttacacagccttaaatgatctaactcatttctaacaataataatccttgtcatctttgataacgcgctttcaatataaacaatctgaaagatttaatatggactaactattcgaatacattacatacaagccctctttcccgaatgaacaaattaagactgacagtagctattcagaagtgcatctcaggactaataacaaagttatctagagggacagtacatacgcggtacaagcttatcaggaaacaccctccgattttttcaaagtcattcgcacaagacttttcaaattctaaccaagcttcccatatttactctccaaattcacaacttctcttaaaatttgtaaccataatcaaca

SEQ ID NO: 90783 - DNA, 930 bp, Cannabis sativa
caattccaaatccataagaatttttctgtgcaaatagggcagcatcggcattgaccttgatgttgttggaattcagtctagtccaaagctcagtgccatcacctttgtttaaaaaaaaaataaagaggataaacaagtgttatcctgaactttcaccaataatcaagtgttgtactagccgaggtcagaatctcaatgtgagaggatgcctttttattccaaacagtagcatttcagaccttccacagagcccaacacagcattatagcataacatacttgttcctcatcaagcttgtgaaaaatctcttctagccagctgccaaaagaggatggtaatgccatattcaaattaatccacaaggttgaccaataatgcgaagcaagagggtagttaagcagagcatgaatagtaatttcaggttgggaattacataccaggcaaatagatgagactctcattctattcttattctcattctcatttctattcttattcttatatttttgacacaacaaactattcattattatttaaaaatttacaggtagtcttaaataactacaacatacatgattaagaaaaaaaaattaaactaaaatacccttttaagatgtactacaaaatttccaagagcttatgaaagttttgatcacactttctcacatggtctctctatgctcttcaaaagcctaatttctctcaaagaaattcataatacaataaaataataataataaagaaaaatcttatttcatcccactctttattgaatcttcatttcaatagaagaaatctaaacttatattatttatttatttattttttctttaaaaaattaatctatcgtcatatttaacactatgttctataaataagagaaaatgggagggagaaaggaatagagaaattgatgaattctcttgtttg

SEQ ID NO: 90784 - DNA, 1015 bp, Cannabis sativa
agaggagggtgatggtgtggaggcatgggtggggttttggagagttaagatttttgttttagggtgtgggaaatagaaaaaaaaataggtgagaagaaataggtaggcatgtagaaaataaaaaaaataggtgggcacgtgagaaatgtggcgagaagtaggtgacgatttttaatgagcccttacactcaacggttcaagaccgtcgggtatagtataggcgacgattatacccgacggttttaaattgtttggtataaagctctcctaaaaatttacattttttttaaaaacacgtcgcctatttggtttactacgatattaaatcgtttggaacactacatttttcccgacgcttttaaatagttaattttttagagacggtcgcctaaaaaaataatttttttaggaccgtctcgaattctaatatttgtagtagtgtttgttcacattaaatcatgaagagacatgtaaatcgagttacatacgtggaaacactgttctgatttttagtgtttgataatagttgtataaacatttggctaacaattatttcgtctgattgaaatcttcgtctgatgcaaccttcggccaactaccctgcaactttcatcagattgaagcctttgtctgatgcaatcttcggccaatcacccacaaccttcgtctgattgaaactttcatttgatacaactttcggccaacaaccgagcaattaccctgcaactattttttgattgtgtaagtgatagtgtaagagatattttggtaatgaaaagcacattaaatgtataaatgttgtccccaccttattaaacatagtatcacacatatagatattttggtaataaaaagcacataaaatgtataaatgttgtccacaccagtagttttggataatagtgtgatgagaactaagtaattcaagctcaataaaaccaattaaacagtagcaaaatagtagaaaattatattgaatataggattaaagctccttatgcccctttaattttcc

SEQ ID NO: 90785 - DNA, 825 bp, Cannabis sativa
attttatttacagaaaatatggtctttttatattgtactttaattaatttgttgttgttttgatattatttagatgttattttcttgttagttttatgtagttttcttgttgttttgtgttgaatctataagaaaccgtaaaaatataaaaaaaaaaaaaattaaacataaaaatataaatttttttacaaaaaatagtgtctcatataattattttcttattaaatattaaatttatgtcatttacaaacttaaaactttaagtatttatgccgctatttattttaaaagttaaaaaaaacttatagaaagtaaatcaaatagggcttgtaattttcattaggtcgagaacgttacgacgccgtttctgaaatgaagaggacattttgggccttatagggtccattcaaggtcggtttgaagtaaactcggccttttctctcttttctctctctaatacccaaaaccagaaactctcagacgaagctccggttcactactttcctctgcttcaatggccacctccaatggagtccaagtttcacctttaggtacccatttttctataataaattgtcttccttatttccttttaatatttttttttttttaagttttaaacatggtagcttgttttctcggaaaaactgtgggaattaatgggttgtgtacccaatcgtttgataacaaattgtttctagactcagttatttagttttgatcgccaccgtgttcctatatacctgaatttttagaacagaactaaccaaaatccctttttctttagagagagaaagaaaagaagggtttttagtatttctatgc

SEQ ID NO: 90786 - DNA, 796 bp, Cannabis sativa
agtcattatgagttaactactaatgagtggaaaaaatatatgtttttactttatgataattgagttactaaaatgtagtaagattttaattaatattatgtcaattactttatgtcataaaagaaaattattatcccaattactttatgtcttagtcattatgagttaactactaataagtggagaaaatatatttttttagtttatgataattgagttactaaaatgtaataagattttaattaatatttttatacaatgttttttattgatatgagtaacctgtcaaattttattttttttttataaaattaaaaggaattaatattgtagaattcatatttcttgattatattttgaatttaataatttattacaaacttctgttttcttttcttttaaataattctaataaacttaataccacctacaataataactaataaacttaaatgataataatttaaggatattatatgaagttaaatttcagtataaatatctaaaattttaaaaattttaatttgtagtgtataatatcattcatttgttttataaattttatattttatgaatttaaataactataatttaatgatagtatataaagttgattttattatatttgataagcatttaaaattcaaaattttagtttctaattatagggttgtcataattacatgttcatcttagtagtcaatgatccatagtcttatttttataatttaattaaataatattttacataaattatctaatccaatttaaattaattaataatcataattttttt

SEQ ID NO: 90787 - DNA, 678 bp, Cannabis sativa
ctccaagtttgagtcagttggctaacaccacaaccagccacaacaaccaacttaattcaaaataaaacaacatatctaacatccagaatccaaactcaaacacaaacaataatcatagcagcaaaaacatcactttaccattaaaatctaaagttttgagttcaaagctttacacttggttaaatttaactaactaacaacaaaaccagcttgataccactcaattaaacatatctaagcctctgaaaacaacaacaactaatcacagcaaccacaacaagtaaaatctcaaagcatgcaaaaatccatttctttaaaacccaagaaatcaaagagaaagcaacaaggaattacctagagctcaagatctcctaatccctgctagaacaagcttgaaatgcagtaaaaaaaaaataatccaaaccctagctgctcaagcagtggccgaaagagagagagatttgagagaaaaagcaattttgtctaactttgctaacttggaataaaatgaataagtggatgattttttccttaattaaatagcttatttcagctaaattaagcttaaaaatcagatttaaacataacattaaatcctcactaaaagacaaaactcaaaaggcaaaaagaccataatgcccttgcccatactaaaaagtcacacaaatcacttagggt

SEQ ID NO: 90788 - DNA, 1207 bp, Cannabis sativa
attcatctcgatatgatgataatcaatataattaaataaaataattgagatttgacataaataaacttcaaaaggcatttcattgatatcaccaaaggtaaagatagtccaaagaacacagtgattttactaaacttaggatgttggaatgactagaaagtttgagatttctagctagttcttgcctaaattggttgtgggtgattcttttctttaattaactctaaaaagcttcatatgacagtagctgaaatgggcgaatctcaaaagcaaatctaagcagtgtgactatttcgaataaatattgctttttagtggggaacaagccttatagggtttacctcagctgtgtctacctactcttttcttttgtacaattttgttctctcataatatatattgataagatattctttcacattaatattaatagtagtattacagaatttcacacatacgacaaacaagctagtcattcccattgatagatatgtatgagcttgagtaagtgtccagcaagaaatttttcaaaatttattcattcaaacatatctgacatctctcattaggagagttgactttaatggtcttgttgcgcaattcatgtgaatcttgggctgagagagattcaagtaactaagacaaaaagagaaattaattagtttattttttatatggcaaaaatacgttgcagtttagatatctctatattaatattaattttgtcgtttgttgttaatatggtatagattagtttaaaataatatttggcgaaattcttaagtgtttttgctaagaagcatgcttaattgagacttttagcataatttatgtactttatcgcaaatatccaactattatgcaaatcgatctctcacttactaatgatgacagcataaaacaatggctaccagagccaatcgcacacgcactcaaaccaaaaacataaagtaaaagaatttttttttttgctggggtaaccgataatggttaagataacaacggtaacaaaagttacacagaaagaaagagggatttcttccatccaagaaagtttattgtctatcttaagggcatgctttatgagcctcaacattaaagttgccgctaacatgggaaagtgatgctccaggaaaactagacaataggactttaatatcagaaaagataacccccagttcatttaaatacacagtctggccctcca

SEQ ID NO: 90789 - DNA, 509 bp, Cannabis sativa
  modified_base (167)..(167): a, c, t, g, unknown or other
agtaatttgcgacataaatactgatttttaattataaataaatatttaagtttaatttttagtattaataatacctaagttataattttaaaggtatctaattacatgtggataatcacttaacatttaatgatcaagtacttacagagttccaaaaatataacttnagtattattaccgccaaaaattattctttagtatttatttataactgagaattaaacttaagtatttatgtcgcaaattactctttaaaacaaataatgaccatattatatgaaattattttattctttttttgaaaaaaaaattacttttatcactaattaattttgtgaaagaatatgcaattataaaatttaattaaaaaatagtatgtgaaagttgcccactattaaattaatttttgtaaaaaattttatcaaattttatgtgaatcatagaaaaaataaaaaaaataaaaatatattttaaaataatatatattttaacaattatgggtgttatct

SEQ ID NO: 90790 - DNA, 508 bp, Cannabis sativa
taaacatcataattcaaccctaaatcctcccaattcaatctagatgcatatacataaacctaatagctcaatcaggctataatcaacataatttccccttaatcttcacaacatgcaacacaaatcacaagaacaccatgaacatccacaaactctatacacaagcttaatattcagtaattaacaatatgcaaaagagattagagaaagctacctaaaaactctcaagctccaagtaagaaatacaaaattcacactagattccaagccctttttcttctaaattgggtaaaaatatacaatatagagaggtcggtttggggttcgaaagaacccagaaattgatttttattttgccgaaaattggccttcattgaaaatagattaattagccaaaaaggccattttgcccctaaggcactcacaaaaacatatacacattataggggcaatcatgacattccactcgcacacataaaacacgtaaatcatatttttgtcatttatc

SEQ ID NO: 90791 - DNA, 1091 bp, Cannabis sativa
ccaataacgtaaggacaacactcgaaaaaccagaattgtatcgccaatagaaaacccaataacctataatacccaccatcctcatcactacgaacaatcttcctaagaccagagtaattcttacccttcaaagattgaatagtcatatcaaaacagtgcttatgccaaccaaattcattgaaccgaccactatcaacaacatatatttcctctatcgaaacagctttacccggaggacaacccaacaaataacactgcacaaaatataacacagccaacttgactgcaagatcgtcattactcttgagattgtcagcaataaaggcagtttaaatagcatccttggtaatttttttgtaaccctttaagcactgtttaactaatgtattaccatcttgcttgaactgataaaaagcagaatcaatttgacaatctaacccaataactaacgaaaactccttaatactaaacctaagatattttccttggagacataccgaaaactccaattcattaggctgttgaacctcccccaacagcaaaccatgaagaagttgataatggataatgtactctggaattcagagaaaatatccaaacacagtttttgaaaaaagttctagttgggttttagttagaactttttttatatcttcaattacagagtaataaccagatgtcactactctagaatggtagtattgagatcgggtgtacttggattcccaatcctaaaaaaaacaacaaaaatactactaaaacaaacataaaataatacgaaaaataatcaataaaaacaaaaaacaaggtaaaaaaaatagaacagaatgaattaaatcacacacctctacaatcctattgccaataatttcctcaacaagacctgttgatggaaaaatcttacaggggatttacccttttcctaaaattaaacgaaagaaaaccaaaaaacaacaataaataacaagaaataaacataaaatcataaaaaacaagaaatgaaaaaattaacatgaacaatgaaaaccccaactaatatacagatatatgaacaaataaactaaaactgcaaaaaacccaaaaacaacact

SEQ ID NO: 90792 - DNA, 824 bp, Cannabis sativa
tttctcacaaggtttgactcaatttctcctatttttcctttaaaatgttttcgagaaataaccgattctaccctgacatatttagtgtatggcccagccatactattatttagcagttttgtgatgcaaagtgatgaggtaggatctttagtggtcttttattttaatatcaaaaccattgttttccacctctattgaattcaccatgtaaaatttgtcatcaaccaacacatgcccttgggagtctcgaattacagcacccaagcctattctgttttgtgagaagtgtactgctacatctacattcagtttattttgcccttgcggaggagatttccatggtatatgatcagctacagtatgaatcaaaccaagaatcgagtttgtagtggatgccttgtaaaaattgtagagatatgccatagattttgcataaatttcagcttatttttggtgtgttttatgataaattatattgttccagtcagaccaaatggaccacattgtgcatataatctgttaattctatttttggcatatttaattgacaaaaatattttattaatttattatttagtttccactgtgtgtaaatattgatttccttattttatatgtgaatttaatactaagaaatctatctttagaaggaaagttgtctagctttcctatttatggaaaataaggtaaaaatggtaagtttggttactcatctctttcaacctaaccagctatgatattgtgatcttgtgtgagtttcccattttgtttgatcagatttcttgaggagaaaactagagttaaactttccttttctataaaag

SEQ ID NO: 90793 - DNA, 1286 bp, Cannabis sativa
gttttaagatggaactccatgattctcaacataggtaacatcaatagtgatagggttgttcattaaattacatttaatattttttaagtctatccagatttgagctaaatatattagatattaaatttacaatctgatctgagccgattaattttattcatccaatcgattcaatatccaatagatgttggattggatcgattctgtccattagatgtatttcatgtatatctattgatttaattcgagtttacccaatattttagacctattatttattagattagatcagatccattcagtattttagatccagcatctattggattgaattggatctatgcaatttaaaaaaaaaaatagtagaattttaatgttagtttttatatatacatacatctttttacggataataacataaaatttaactaattcaaactaaatgaaaaaattaactacttcgattggatgttggtattctagtgctactttatgtacaccataccctaatattttatttcttttatactgtgcataccccaaaatacatgtgaagtgtccatcttcaacacctacgaaccgaaccaccagaggaatactagaatagccgaaaaatacccatcaattttggcgagatgaagcaaaaaaattaaaattaatgttaaatcaacacccaaaagcttcgtcaataacataaattaacggaacaaaaaggttagaagcttaaacccacccaaattcttttaaatctgaaattacaaatgatgctcaaacatagatctcaaagttcttttaacatgttgtttgagcactttaaattcttaaacataataatactggggttatcattatttttctaatgttatttttgggttgttccactattatttcgtatgtttaacaaatattggtttcaaattagacatattaaaccaaccactgaatatttatttgaggtaaccagaataaaagaatcatggatagtagacctcaaaaagagaacatgcacgtgcaacaggttactacacaagctctattcagattactacaccaaaaaaaaattagttagcaacttatgaaggaatagtgtaccaaataggacaccaaattgaatgggacgtaccacaaaatgtgaaagacgtaacagtcttacctcccattgaaaaggtggaatctagaagacaaaaaaataaaagttggctgagaaaagaaacaacataacaaatgcagcaaatatgagaagttggggcacaataagagaaaggagaaggcatcaaaaatgaaaa

SEQ ID NO: 90794 - DNA, 715 bp, Cannabis sativa
caatctctagttacaattttgtcactttatttcaaccacttactcttcttttaccgtattttccaattcaaacctataaatgccaaaacaatttatttaataacagttccatgattctgagcttcctggaagtaacttcccatttggagaatgtgatcatgcacgttctgatgaggtttcatccgtgcattgatgaaattccttgtcgcttcaaagtgagattgaattgatgccatcccgaatagttcactcaattggttcatgatttctgcagccgtgtcagtgttagcaaaccttgtttttaaggtatcaaccatgctagaaagcatgaagtatcgagctttgttgttggcattctgccaacgctcatacttctcctctaatatctcggaaaataaaatgatatttaattagacatattttattaaatatgtaattactttggtaatgaagtaagattgtgatcttacttggatcaattagtgaaatctattaaatgattatataaagtgtaatttattaattgcaaagattttatttgaatatgtgggtatcgtggataccatttttgaaataaaatattttcgggttcggtgactgaaaacttgacggtgtggtcagaaatatcacgacacttaaggatggattattatgggagtatttcagactagtttagaattttagaatatccgtttggtggattagttaaattacc

SEQ ID NO: 90795 - DNA, 686 bp, Cannabis sativa
aactacacacttattataaagagcattcctattggtgtctaacaccgcatcttgtgattagttagtaatacttaattacattaataacgatattaaatctcgaaaaatgttaaacatcgcagtgtcttttaatatttttctattatgaattccattaatctctttaatatatggggtaaaaactaatttggtttttagattttgtgttttgcaacttgaattttgacacatgtattaaatcatgttccttaaattttgcaagttgttaaaaaaaattttcgaactacattgactgagattattggatttaagaacttttatccaatttcgtttaattttattaacgtggtgattgtctatgtgttaaatcgtgccccgaaattttaatacctaccaaatcgtaccatctaaactgtaatatatactaaattatgttctctaaatttttatctatgtcaaacttccattagtaaaattgataaaaaaaaatcttgaatttaataatcttaaaataacaaaaattttaattaagttttacaaaattatcaatcaaacttttattttattaaattataaattagagttaaattttcatcaaaaaatttactacattattaatactattattactaaaaagaaaatattttgagaagatcataaaaggggaacgcatagttgggtgccag

SEQ ID NO: 90796 - DNA, 1276 bp, Cannabis sativa
tgtaaagggttttatttagggcacaaaacccaacacaaattccccgcaattagggaataaaaattgtcttttacaatatcaaaaagggggacccttatcccccaaaaaagaaaagacaaagaaaagaatatagttgtgaagctcagggttgaacgttgacattagcaacagttggggctagtgttggcttctgagcagctatgtcagttgctatttcctgtactagaggctcaaaatctggagcgttagttgaaagaacaattttggcttggaggatgattctgctacctccatatttttggaaggatgaatctttttttctttgtaaaggagtaaagagcggaagtatgattcctcgtcagccaaagccttcaagcagatgtccctatgtctttcccaaagcgtataaagggcggtaacgaaggaaccattcaggttgttgatccttttctcctccacctttgataactcctatttaggctttactagttcctcctcaacttctgcttacttttctcgagcttctgccaattgggttttgtcctttgccagctattgtttaagctcaacattatcctcaacttcttccagcttaacattggctacaactagatacaccttcaaatccttctcagccgccactgaaacatctctgaagtaagtcattaacttctattcgtgttccaggacatggatctggctcttcttgccctcgaggtcttaggtaagctctcggttactttgtagctttctttaggtcaccctctgcctttgcaagtctcgcttagagttccttttcccttttctccattgttcagacatggcctttggcgtcagcaatgcctaccttcaggtagtaaacttttttctccaacttgcagtagtactcctcaacagtagcaacaaccttcatgacttttgctcctagccttgccttaacctattggtcaacgaagcccttcatttttcttttagtctccttaagctcgactttgaccttctctaggttggctagggttcaaccttcttactatcatctactttgtactcgaccctgagactttaaaactccaaggtcatattggccatgacctccaggtagctctcagcacaaagagtcccctaaaaagtgaaaaggacaaaatcagcaagatttgatgaataatggatattaaagatctaaatttattgtcattgttattgtgttaagaaaaaattattaccctaacagactgatgggggagataattgacaaggtagactgggtctttgctag

SEQ ID NO: 90797 - DNA, 1105 bp, Cannabis sativa
  modified_base (394)..(395): a, c, t, g, unknown or other
agagagatatatttcactagatatatttcacttatcattcaaaattacatatactctctatttcaatctctccaccgaaatctcaatacacccttgcttcttactcactctcaccacatagcaaactcacacaaaacacatatttataaagttataaaatttgggcatcaagacagcttggggaccaagacattccaaatcttccttaagaagactcatcaaaacttggtcaccaagactttcctttttcccacaattaataattacccaaaaagaaattgcaactttacatatttagatacataaataatttgagttaaactccgacaatctctactttgacttaaattctctaaactcacaactcaaaccatcaataagagtatatatgcanngaattcatactctcattgaacttcacttgagcatttgttttcacattcttcaatctctcattgattgttttctttttttcaaacaatttttaactgaatttggagtcttctccaccttgtcacattctttcacattagctgaatgccttttgtgacttgactccaccttcacagctccacctaaaatagtcttcccgactaatttatacaaattttgctcttttttaccattcacaactaccaagtcaccattcttgataattatttcaccatcttttgtggaatagacacaaccttgagtatccaaagctcctaaagagattaagctcctccttaatgttggaacatgtctcacatcagccagtgttctcacaacaccatcaaacatctttagcttaacagttcctattccaacaactttagagctagaatcattacccatcaaaacagtacatccatcatatgccttgtaagtgtcaaagcactcattatacgggcacatgtggaacgaacaaccagaatctaaaatctaagagtcagaaaaattttaatcagctatgatagagaacatcagagtaactttcaaacccttcaccagcaacatttgtggaatctaacgtgtctttgcactcttgatttctcattgcttcaagatgcttggtcaactcttcacaattccgcctaaaatgtccctttttgtgacaatagta

SEQ ID NO: 90798 - DNA, 1026 bp, Cannabis sativa
ttttttctttcatgtaaaaatttcatatttttattaatttatattcataaaaaaataattaataattaataattataaaaattataatttattaatttctttattttcttgtcttttttagtatcttttaaatagttgtgtgtctatatatgtacaattactttatgttctttttctttttgatattttttaaatatttttttttttgtttttaaatagttgtgtgtgtatatatatacaatttctttattattttttttttcttttttgttgtctttcaaatagttgtgtatatataggcatataatgtgtgaatcttaagtgatagtttaaaaattttgtttatatattctcaaacttttcatttttcatattaatatatttctctcttacaatttacaaactttatatattatgcatgttttactttttactacaatagttctaatctatttggttatttatttttgttttaattaaattacaattacatatatatttcactacaaaaaatcttatttttattgtgattaaaagtgaaaaagttgtgactaattataaattatttttccaatgttgtgactaaaaggtccgtggcaaaaagtattggtcacaaaaattataatttatgtgaaatttacatggtatactaattaacttttactatttttttataaaaacactaccaggtggtattttttacttttttactactgaatgtatttttagtcacaatatttgttgtgattaaaactaaattagtcaacttgtatttaaagactatgttttaatcacaagtaacattttgttgtgactaaaagtcacatttttagtcacaaaaaaattatgttgtgactaaaaaattgtcatgtaaaaattttttgtagtgtttatattcaaaaaagaattaattttttatatctttaatttttacacagtaaattatatctctagctcttgttgaatttatgtaggttgtgctcttgtttttgcgattatagtttcggtatatactgttattagtta

SEQ ID NO: 90799 - DNA, 715 bp, Cannabis sativa
agtattcgacaagcttgtcttttacagctggtagcatctgcttttctaactccttagtcgatgtgggataaaacctgttagctgcttacattacttgttttcctaagctttcatttggtagctttagcagaaaaccgaagatgtatggtgattggtgagtttactctcttacacacgcaaaagcctcactcctatttctctaaccataagctaacatctcttatgctttcaagtttccataaagagtttagtttgatttgatgctcttcaagttttaaattttgatgctttaagtggttttccacattgcttatgttaaccaaggagaaaaaaaaaattatttattaattgaaataatatggttagtagggaagactacactttttagtaaggatagacattgaatttcgagactcatttaaacaaagcaatactaattaaattatcatgaacatttttataaggggtagaaatggggtttgtggatttggtttttttggttacttatctgatttattatttatttgttatcctcttattaccaattaaatttttaataaagataatatctttataaatttgaaagttacattgtcttcctaatcctattaggattaggagaaagagaactaaaccttattttaataaaattttctaataattgtttgacaagaaaactttatagtgaattccttgacaagaaaacaagtctata

SEQ ID NO: 90800 - DNA, 643 bp, Cannabis sativa
  modified_base (263)..(275): a, c, t, g, unknown or other
ttttttgtttttttgtatttttacggaattctacgtagaaatccctattgctactagtgctgcaacctaaatcgcaacaaaaaatcttacagaaacccctatatttcaagcgctgcaactactttagaaacccaaaccgtaaattaaaaaataaaaagttaaaaaaacagtatatggggtaactccccttaaaaatatctataatattttaagtattttaaatttaaattaattttttttataaaatatctatataatttttnnnnnnnnnnnnntataataatattataaaattaatagaaaatatttggttaagtaataggatattttgttaaagtgaacgtaaaactcaaattttttttgttaaactaagaattcagttacatagttacatttatataaaatagataaataggaaatcccccattaaaataaaataataaaaaaaattgtcatctcttttctatttttattttttctaaattataatattttataatatatataagtttgtatcaaatattagcatattttaagcatattatactatgtagaaaataaaatattttcccctcccttgcaaaaaaggaaaaaaaaatgtcccatattcaacttaaatctgtgggttttttttttttttttt

SEQ ID NO: 90801 - DNA, 1490 bp, Cannabis sativa
aaaatagattacattgaaatggagttttctttagggcataaaacctaacacaccggatctgtgggtgcttggggttaagcaacattaatgccagcattcacttggtctctttgaactagcttaggtagatttattatgttggaaccacagttgtccctgtttctattgagggcatcccaaaggtctctaccccctcaagggcctacacgttcaaagactgacccggttcttggcgtattaggggcatacgactgggggtggtacttggtcatctctaccctgttggggaaattctcaggttgatactgcctattaagggcatacaaccctccagcttgataaccgctcagctcagaatttggttggttgttggcccaacttttagcttcatcatcaccataaccgtcaaggtagtttggacgataatcactattgacttcggggtcttcccttctccccctggacctactatttctcgggatatcattgccctctcgtggttggtcgcgttggttgcgaggtttcccctccctatgttggggtgtccttccactatttccaccatggtcaccaatgttgttcctggggtttcctctaccacttcgccctatacagacattataggagtcatcacgtcccatataatgaccaggtaggacttgttcattggcaggtagtggtcaattattattgcagggaaccctattggaggggtgactcctagccctctcttggttccttggatgatcttcaggtccatagaccaccctctctcgctggttcatcagggtagggacttcttgaggataggtttgaggtatttgttgattgtgggtgtcagtacccaacccttgagtattttggttgaagtagcttcgtattacatcggcaacctcttgagtgtgacagtcttggtcgtcttggcgccttctcatctcacgagcatgatcttcaagccaagatttgaactctctcctttgattagcgagactttcggtcaaggccgctcgagcttgagtttgctcttggtgcatagtttggaactgaccttgcatttggcctatcgcatcttgtaattgatccatctcgaggtcaattccctcgatatcaacatggggttcactccgcggcctaaagacgccaaggcctcagctagtttgatcttggcctatgctgtcagtaggtgggacaaaatttcctgtattaccccttccagtggcaccctcagtagcactatcttctgcggcactggtacacccaacagttgtctgcctagtggcagcagtttggccaattgctctatggtcagcagtttgagcggtggtggctgtgccgctcttccccgaacgcggggggcgttctccattgtttccaacaagattacttgctgattgaacattctgggcactatccatctcttcgtcaagtcgctcttgagatctttgggttaacaccattttttttcagtgaaaaacttcaagattttggct

SEQ ID NO: 90802 - DNA, 794 bp, Cannabis sativa
aaaaccataccaattcaatccaaaacacaatcaaactctcaaatcactaaatagagttgctagaaaacaatagggagttaaaattcacaactcatgctttaaattcaccaattaaacacaccaaaactcagatcaagcaacataaaacacaagctcaacactttgaccgaaattcccccatgaacactcatacaagagttagaattcaagaataaactctacaccaatttcacagctgcaaagattaactaaagaatcattctaactcaaaatctcctacaatttcacaacccaaaatcacccataacaaccttcaagcatagtcaagaatatagtaccataaaaacacttaaatccaaacacatgcatctcaacagaacacacatcaatctcatgcttttctttcaaataaaacccaacaacaacttcaactaaaaaagtaaaagaaactacctcaagtattgcaagactctccttgagtttccaacctccaaaggtagcaagatcaaacttttcaaccaaaatcaaggctaaaaaatttagagtttaagagagtgagagagagggttcaggtaggaggtcaaaagaaccagaaaaatctcttctattttaccaaaattcaatttaattagaattccattaaatggccaaaagacccatttcccccaagggccataaagcatgcataaacactcacaaaggttaatttagtcatttcatgcataatttaaacccaattaatttcagattatccacacataatataatgccaataatttcaatccaaattgcat

SEQ ID NO: 90803 - DNA, 1145 bp, Cannabis sativa
cacatcgtgtcgcacaatagaccagcatcgctgataaaaagccggggtcattccgtctggaccgggacttttgtctgggtgcatctggaaagagccttctttacttcctcttcttggatgggctgacacaactcagtattcatcatggccgaaacacaagcaggaacactttccaccacttctctacaatccgtattagaagaagtaaataatccttggaaataatctttcataacctctcctagattcgaatcccaagtggcccagttaccttgagcatcttttagttgctcaatttggttgttcttctttcgactactagccgctttgtgaaaatagctgctattttggtcaccatcccgtaactaaaattgtttggctctctgcttccaataactctccctttgatcaagagctttaaaaagcttttttttcatttcactataagcttgtacagaactgacatccctctttccttgtagcagtttcaactgtttcttgtaatctttaattcgatgattaagagaacccgtaatttccttgccccattccttcagtttctcagcacaaagatttagtttaccccccagactataatcatgaccaaaatcccagcaatcttttacaatttcagtacatagcggctctttcaaccaagtgttttcaaatcgaaaacgatgatgaggcgcaaagacagtgggaagaaccggttcaagataaatagccgcatgatcagagctagagtaatctaaattagagagagtagcacatgggaatacctgaaaccaagtcggagttgcaacggctctgtctaggcgaatctcgatccagttagtagagcctctactcttttcccaagtgaaagggtgaccttgaagttcaacatcagccaagttacactgttgcaaagtcgaattgaaacccgagattaatctttggggatatggccgaccccccctcttctcctcttgccgaacaatattgttcatgtccccaataagacaccatgggagtgccgaacgactagccagagtccgaatcaagttccatgtatcttctcgcctattccgatttggttcaccatatatcccagtaagcctccaattaccgaactgagtggtgtgaacaataaggtcaatatggtt

SEQ ID NO: 90804 - DNA, 793 bp, Cannabis sativa
  modified_base (27)..(31): a, c, t, g, unknown or other
gttaaaccaagaaatgccgttagatannnnnttttaatatataaagatatatgaagaagagatatgagacgatgatataatattttaaaatctctttaaataacactattagctaaaaataacatatctatttatctatatgtatatataaagctagagtatgagacagtggcagactttgttattatttttaacattgcacaaataaaaggcccaaattctaaatcgttggatcggattggcttaattttacatctaacttcttatatttttcaaaaaattttatataaaagaattaataatattaaaatttaatgcaattttattatttagttatcatcaaataaaatacataatttatttcatacatataatttaaaattttttaaacatccgccgcaaagcgcgggttgtctactagtttctaataaagaaataactacccaaattcaaaccccaaacttcaaatttgattatcaaatagtgcaaattgaattttgattttttgattttaaaccaatcataaaataaaacatttaaaactaactgcatgagaaagatatctattaggccgagaggaagacattactggaaaaacatcagagttgctacccaaattattgttgaatgctaagggcttagaagttggctggtatccaaaccccagatcatcctcttcatcatcatcatcgacattggcggattgcgacaccatgacccgaccaaaacgctggatttgatatatttgactcgggtgtggagaaagagccaaatctgaacaaatggaaaatta

SEQ ID NO: 90805 - DNA, 1162 bp, Cannabis sativa
taccatgcactattagaagaatagagggtatcaatgccttgtgtgatttgagggctagtatcaacttgatgcctctttaagtatttaagagattgtaacttagagaagccaagccaacaactgtgacattgcaactagctgaccattctttggctcatcctagaggggtaaatgaagatgtccttgttaaggttgacaagtttatttttctagctaactttatagtccttgagatggaggaggatataaatgttcccattattcttgggagacccttcttggaaataggcaaagctctaattgatgtgaaaaggatgagttaaaggtgaaagtccaaggagatgaagttgtgttcaatgtactcaaggctatgacttatcctgaagctagtgacaactactttttggttgaggtggtggagaagttggtggcaactaggaagcctattgaagaccctcttaatttgactttggtatgagaggatgtggttaatccagatagaaaagaggcaatggaatatgctttgtagcttgaatcttatgggctattcaatagaaaatattatgaagatctcggagtgattctaataaagtcaatatcatccattgagaagccaccaaaattggaattaaaagaccttcctaatcacttgaggtatgagttcttgggtgagaataagacactagttgttattgtgtcagcttccctttctatggttgagagagagaagttattgagggttttgaggaagcacatgaaagctattgggtagacattgcttgacacaaaggggatcagcccctcaattgcgatgcatagaattttaatggaggaagaagtcaaacaaaccattgatgcacaaagaagactgaattcctccatgaaagaagtggtgagaaaggaagtgttgaagtggttagatgctgaagtggcttatccaaattcaaatagcaagtgggtgagtccaatccaagttgtgccaaagaaaggaggaatgaaggtagttaagtatgaaaagaatgagttgattccaaccaggattgtaaatgggtggagaatttgcataggttaccaaaggctcaacaaggccaccagaaaagatgacttcctcttccatttattgatcagatgttggacagattggcgggtcaagagtattact

SEQ ID NO: 90806 - DNA, 1406 bp, Cannabis sativa
ggcctccgttcagtgcataattttttatttagatcgactagcacactttaatttaaaaatgaggtaagattagcatagaatatatgtatatatatgtgtatgtatattatatgcatgttgtttatgtgattcatatgctaacaacaagagtacagtagcactactgaatgcattggtacaatatatgatgttcaaagggtatgatcagtgtttccagcactagtacaattaagtatgtagtacatgttgtacaatatttagtagtacttggggtacgattcagccctatcaatactagtacaatagcagtacttagtgcatgcggtacagaggtcgtacttcttttaagaatattcttaatcatctgttaagccttgtggataggcatatgagcgcctaaatacaagtcggtaatatattatatgttgtatgcttttcttactaagtttgtcgactcacagatattgtttgtaatgactacatgttagaatatagattagtaaaggaaattagcattaattatttatttttttataattatttatgattttattatgttgtggctcccatttttagaaatgggcactagaattataattctcaatcccggagattttattaaactctaggagtattatttatattaaatatgaattatgcaagttttatgattttactcagtgacaacggaaaatgcaatggatggtcgttagagtcacatgggtaagtttagcatctatttggaccatttgagtcctacgcttattattgcttaagttacaagtaagaagattattttggtaatttttagtaatggaataggtggcttgatcctaggttggtagctggccactaattttctaagcctaagttttatgtgatttaatattattaaagaaaaggaaaaattggataattcaaggcctctctctctctttcttgttttcggttgacttggaattaggaggaatcttggtgtttatcagctgttctttgtggattcttcaaggtttggggtagttcaagctaaaggtaagccctagaaacccttaatctttgatttctctaagttgtagtttgttgtggtttgctatttgtggtttcatgtattgctaggtttaggtttggtttatagttgaattatgagattgttataagttgattttggttgtttgatgttggttggaaaagggattgggcaagtttgagtttgaaaactcaagcttgactcattaatggcactttaggtttttaagtatttttcttgctgttattgtttggaaagtattgtttgaggttgatacaggtattttggaaggtttggtgtggttttgacataaattggacaagatttgaacttgtttgggttacctggtgcgaatcgattaactggttttacaggtcct

SEQ ID NO: 90807 - DNA, 546 bp, Cannabis sativa
atatatatatatatacaaaatactaaatagtaaatacaagatattaaaaacacaattttttttaataattttcaaaaatatcacattttttttataataaagacagttcattagttttgggataatttcaaaaaaaaatacaaaataatacagttgtacagaattttaaatatttttatagtttattagattttatttatataaaatacggtcttttaatatatttttatgttgcactcttgttattttgctgttgagtttttattatttgtatattattttttatgttgtttgttactgttttgatgttgtttttctgttactttcatgtagttttcttatgtaaaagaaaaattaacataaaaaagtgtactttttttttatttataaaaataacagtttatgtaattttcctattagttttttaggaaattataaattttatgagtttttatacttttgtgcaaaaatatgatatttttcaaaaagattattttttgagaaaatggaagaaaagattaaaaaaaatatagaaaaattaagtaa

SEQ ID NO: 90808 - DNA, 557 bp, Cannabis sativa
attggtagaatgattaaaaaagagataaatataataaattttaaaaataaggtaaaaattaaaagcatcaagttaaaagaagtatgtagtagtgtaatttactcccacatcattgtgtgaaaaaatgagtacttgtactaccatttgttggtctcttttagcactttgtttttgtttgatcacaatatttgatacgtttaaactactaatattttataaatgcttgaagaggaaggaacaagctagccctacaaataatgcaagaagagagaatgtagttgcaacatgataatagcattaaaatgctcttttatggttcaaaataagtaaaaataaattaaaaattataattatgaatatgttgcattttgattttattattactttatttttactgtagaaaaatgttgtcaaaattgcaaattattataattacataaaatgtggagagaaaagtgcaaaagcccaaagaaagaatcccaaagtgaaagaaatcctaataggcccaccatgtcttttttattatttattagaggggtttttacaccacatactga

SEQ ID NO: 90809 - DNA, 766 bp, Cannabis sativa
gctcacaacaataatgagttctgaatttgttcacgaataataataagataaaaacctaatgtaattaagcaaaaaagaaataacatagtgaatagagacaattgggcagggtttggcgaatgttcggatagtccatcctacctaaccaggatagtccatctttgtagtcttataaaaataaatttatttaaaccactatataaattttagcaagttaatcatttcattattatcgttattattttatttttttttgcgtattggtctaacaataaagaagtccttgaactttatattttagaaaactggtctctgaatttttaatttcttgaactactaaataatgttggttttgttttatattaatttcaaatatttttaacaatttttttttttatttatttacttaacaaatttttatataaatattaaaattaagtatttttatatgccaaataaaaaaaataaaaaaaagggagaaaaaataaatatatctatttttttttctttgacaatattatcttaataaattgtattttaagatttgtttttaacatatatatatgatcatttttttttttgcatatttaaaaaaatatatataaataaaatatattttaaatatttagttaaattttaattaaatatatatatatgtacttgagaaaaaatatacattaatgcacactatatttctagaaaattattaaaattaacataaaaaaatgtaaaatataaaaatatataaaaggtcaacaaaagacta

SEQ ID NO: 90810 - DNA, 752 bp, Cannabis sativa
agtgtcccatcacgccacaatagaaacactttcctttcaccttcttttcctttgacttagggttggctttgttcttcttgactttaagtgcttgcctgcctttcgactttggcatgccactgctgttgctgaactcttgcttgttcatcacatagttagtggtgaatgctttgaagtaaggagatagagactcaaaaatcatgcttacttgagtcctttcgtcaatgataacaccatgtgtctctgcctcatgcattaggtcaatcatgtgcaatacatgagttgtaatagggaaacttttcttcatcttactatttattcatgtagctacgagtaacatcatgtctagtttgattagactgttgcccaaaacatggcatgtagagaattcattatttcaaatgcattctccatctgttcatgcgtcttacgcaaaatttcgtccatgctaataagcatgatacattcggccttattgttgaattgaatccaagtatcatatttgtcctgaatattttttaggccattagcagtgggcttttgaggacgctcgtcagttaagataaaattctgattaaattttcagttatgaaaattctcaccattcactgagtgctaataaacatttaaagaaattggcatagtagacatgagaaacaaataaagataacaaacgaatatatttaaataaataaatatcattttgaattgcacatatgcttgacacctaaagttcctcttagcattcctca

SEQ ID NO: 90811 - DNA, 709 bp, Cannabis sativa
  modified_base (171)..(175): a, c, t, g, unknown or other
aataacatatgcatgacattatactaatcttacctcaatttcgaattcaggtgtcccggccaacctgagcagaacaacttctcggcgaattataggctcctaaatcacatcgataacaacatggacaagtgatacgctaaatcacaaccaggacttaggttttaaaccaannnnntatctactgtaacttaacatggaaataccctaaactagctgggaaataacaaaccagaaacctgaaactagcacgaatcgacaacccaaattttttaagaatcccagctgcaagaaccagttacccggttttccccaaaaaacccaaaaaaaattcaaagcctaatcaaatcgattccaaaccttaccaaaccttccagacctgcatattatatcccaataaacattttccaagcaataaaacatctacccaagatcagaatctaaaatcaccattaaagctccaagtttgagttctaaaactcaagacttggataaacctactaacagccactaaaccaagcttaaatcaacatatctaaacataactttacttctgaaaacaatatcaaacaacaacaacaacaacaacaacagctaaaatcataattttatggaaaaaattattttcttacaattcaagaaatcaaagaggaggttaccaagagcttacttagaactcaagaacactcaatctatgctgcaacaagcttga

SEQ ID NO: 90812 - DNA, 636 bp, Cannabis sativa
ttaaaatttttcaaaaatttgtaagaataatgttgtaaatgatgtatattcatgaacaacgttataaaaaaaatttaaaaaaatattctaacatgtgtttttgatacaaagatcaactaaaaagttaacagtcttgtaataaataattatccacttaatatctcagccatttaaatatttttctaaattattctttccaacgaattattttgagaatataaaaagcaactaatatagtttagggttgctcttaagtgttttcttgattaggacacttaagttataactccaaaaaatttaataagatagtctatattgtagttataataaactttaaagtggtgtttggcttaaaagttttagttaggtgaactttaattgagaaatgttgagatgaatttcaaatataagtgtttgaagagtttgagattattcaaaaataaaataaaagcaaaaaatcaaacttgactcacacgtatgaaaaagaaaaagaaaaaacaaccatgtctaaaaacatgttgttttgaatatttttttagcgcaataaattatttaaaaaaaataaataaattttaatagttgattataacttatctgttggattaaacctccacttacactgatatttaactaaat

SEQ ID NO: 90813 - DNA, 776 bp, Cannabis sativa
acatcttgggaagtgaactcaacatgattatagcctggtcttcatcatcaattttcaccccaagattatttagatcaagattgattttgttataatcatctagatactttctcaattcctttgactcattcattcgaagtgtgtacaacttatttttgagatacaagttgtttgcaatagatttcttaatgtagattgaagctaacttgttccagagaacaaagacttgtcttcatcttaaacttccctcaaaacttcatcactaagactgaggaggatgacactgtgtgccttggcttcaaattcaagtttctttttcctgtcttcaatcaattccatggcttcagcatcaagtacttcatagatcccttggtgaattagaaaagccttcattttgattctccataggctgaaatcattcgaaccagtaaacttctccaccttaaaccttgttgtagccattcaaactaggttcttaattgcttgaatctgattcttgaaagttcgagtttgattcttgaaatgttcaagatgaatcttgattggttgaatgtaattcttgaacttcaaaccctcaactttgataccatttgtggtgaatgctcaccctcaaaacaggttgttgcagtagtgacattcaagaatacacaaacaaaactaaaccaatcacaaaatgaaaactataacttaaatgaaattagacaagaaaacttagcttgagaataaatgaatcatggatctttattgcttgaatagtcagtagtacacaattgaat

SEQ ID NO: 90814 - DNA, 1885 bp, Cannabis sativa
  modified_base (1817)..(1822): a, c, t, g, unknown or other
ttgattcaagttgctaataacttatatctattaaaatcttttgaaagatctttacataacaagtttattattattattattattttattattattacaccttaaatttgtattacaaaattgttcacttataattaaaaattaaataaagttatctgcccatcctttttattccctttcatttgataatattaatcattttcatttatctaattaataaaaacaaaattttatcgacaaactcatgtttagatttttggataattttatacaagtgttctactaactatattaggtgaaaagtgtgtaaagtataagaaaaatttacataatatatatattaattataaaatgtgataggaaaaaaatgaacatgctaccatgctaccagaaccctattttgtatttacacaaaattttaaattcatctttaatcaatggtcaaaaaacattatctttgatcaaattattagaattgggagagagaaaaaaatgatatactatagaaaaattatttttaaatggtgtggtaagtaacaaattttggtcaaaatgtgaccaataattaatgtaaaatacgattatgccattgtctaaagatgtaaactcatatcatagagtttggtattatttttcaattggtctaagcttgaccttccagtagaaacgatggcttgtgtgagtgatgccaaaatggtcaaatacaatttgattagtatatagacttttttttttaaaaaaaaaatagaaaaaaaatatatacaattatgtgatatctaaatttgcatcgtgtttatttatttttctaattaaagaatactccttgcctttttcaatgataaaatcccttataacaaaagagtataatagaaacttgtgtggaaaatttgaggagttatttaaacatatgtcaatgtgaaatctaatcatagaaaatagaaaatttgcttatttgtgttgtattattagaaatgtcattgtaatttgtaatttgtgttgtattattagaaaagtagttcaagaattttatatattttattatctttctaaactttaataatgtgcgtgatactcttttcttttcaatgactcactattttctaaatcacaatcgattttttttttatttagctttactttttgaatttggtggctcttttttttctctatttttgtttcaatcaacttttttttggatcagattggtgtgttagagtttttttttttttttttactctgataccatattagaattcaagataagatgcatggggttccatatcaaaattaactaattggctatgagaggagtaactcatagatcttatatattctattatatttccacaccttatagcaatgtaagactctctaacgtattaagttgtattgtattgtattatattaaattgagctatatattatatttttatgagtaatttacgacataaatacttaagtttaattctcagttataaataaatatctaagtttaatttttgtcggtaataatatctaagtgttaagtaaagtgtcacatgtggtaattcctaattggtccacgttatatattaaatttttattttttttaaaaaaattagcttaaatatactaaaaaaaataacacgtggataatgatttgacatttaaagatcaaacacctacggagtttcaaaaatataatttaagtattataactgccaaaaattaaacataagtatttatttacaactgaaaataaaacttatgtatttatgccgccactataaaaaataactatatttagtgataacttattagtcacaacataaatttttnnnnnntaaatgtgacttttagtcataacaaaaaattacttgtggctaaaacataatatttgaatacaa

SEQ ID NO: 90815 - DNA, 963 bp, Cannabis sativa
tgtaagcataaaaaattaaatttctcttcccttattgtagtaaaagagaaagaattagtaagattgattttaaactttgagttcctttctcagagtttggtgttgcaaatagtattcttttgagaaataaaatttattcatacataaatatataagattaataaacttgttgtaatccattaaaaaaaataaatgaataacgtgatgcataatacccaacttgtacgatatatatatatatatgccttgacaatatatatgaaacaggaaagaatatttgccttaatttttttttaatatatatagatatatataatatatgctaagttttgtgatgatcatgagcagtcaccatatagaacatggtttgttagtggtttaacattatatgttttagaattaataaactaatttgactaattcaactcgttattacatcttcattttctttgtttttatgggtgttgacatgcttttatactctctagtatgatgcgtaaatgaggatatagttgaattttgtgcaataaatggactaataatgaaaaacaagtggacattaaatttaggttagtttatcgttacattaaaaattgaaaaaacttaattgataccccatctagtacagctattaagtacgtataagcatatatgtgtagccttaatttataatttatagattcatgactttctgaatggtaatgatcattatacttatatatatacacatataagagatacaacgataatattagtttgggggactctcttaccaaaaacaaactaattatgaagatgttaagagtacattccttctttgttgcgtatttttgtggtattctagccttaacaactctagttcatgctcaaactcaatcaggtaaaaaaagttacatgtgatgtgtaacatatataagcttcaaaatcacgtatatgatacacaaagtgatacgttattatata

SEQ ID NO: 90816 - DNA, 649 bp, Cannabis sativa
  modified_base (394)..(394): a, c, t, g, unknown or other
  modified_base (592)..(608): a, c, t, g, unknown or other
tgggacctgaaccagaacaagaccgagacccgtgaatgtgacccaaatcttgactctggatttgggtaacggggcctcgatcaaaccagtagtcggtgtctagatcttggactcagactaggacctgagcacagacgaagaaccaaacccaaacccagacctagacctgggaccaaaaattagaacctgaacaagagtcgccgaactaggaccctaaagcaagactaggaccgtgatcaggacccggaacaagacatagaaccgaacacagacatagcctcagactcaaacttagactagaactcgggaccgaacgtggtcgtctacccagaccggaactgagacccggacctggacctaaatttgcgacccgatcccaaacacagacttgganctagatagggatctggatacgaacgtgtactcggaccaagacccagactgggatcgaaatgctggacctacatctggaccgagattctgacatggaccaaaactaggacttgcattctggacctgaacttggacctggacccgaacctacacctagattggagtccagacctgcacacaaacctggacacagactcgnnnnnnnnnnnnnnnnnacacctagaatcagacccaaaactagacccggacccggacc

SEQ ID NO: 90817 - DNA, 814 bp, Cannabis sativa
ttttaaaagtattgggcaacaagtaaaggaggccaggataaagctcgaaatggtggagaaagcaagtaatgttcaattggaagagcttggaccggccagagataatctaaatgaggtgctggccagggaggagatcttctggagacaaaaatcaagagtttcgtggcttaagcagggagataggtgtactgaattcttcatggctaccacggtagttagaagaaggaggaatttcattcaagagatcaagactgctaacgggacttgggagagagaccagcaaacaattgcgcaactatttattgaaaagttccaaagtatttttgaggacaaaagaaagtcttgtttacctattgagtttggcctggaaggtccagtaatttccagggaggagaatgctaaattgagtaccattccgtcattagaagaaattgaggcttgtatgaagtctatggggcaagagaaggccccggggccagacgggatgtcaactggtttctatcgtcaacactggataacagtgaaggatgatctctatagtatggtctctcatttcttcaacatgttcgaactcccacagtttatcaataacacaaatttggttcttattccaaaaaaagagtgtccttctggggttaatgactatagaccaatagcgttatgcaatgtcgcttacaagtgcatatcaaaggtgctagctattcggctgaaaagtcttttgccccgtattatctcgcctgcacaatcggcttttgttcaaggaaggttgattgctgaaaacacggcggttgctaaggaaattgtccattctatg

SEQ ID NO: 90818 - DNA, 895 bp, Cannabis sativa
aataataataataaatttacttgtaataattattctataatttctcataacttcaaaattttcaattccaaataataataatacaaagaacttatcaaaagtcaaatattgataacatatatcaactctaaaatttcaaactagtgcgtgtatgtaatttatttattcagatattcattattttaatatgaacaataaattatttacctctattattcagatatccattattttaatatgaacaataaattatttacctctatccatcgcttttcttctcttttcttcttctatcttaactatgttctttaatggatccaagactagaaatcttttatttctttaatgttgatcgtaaaactgaaatgtgtatagaccgatgtgcttatttatatgctatttattctaatctaaacaaatttcatatttgaagaaattacattttaatttttacttttattttcatattttttaaaacatacccacttttataaataatttattttaataaaatataatatgagagtatttttgattaattgataaaaaaaaatatttttcaatttatcccaacaagttttcccaccttttcaaaaaattaaaaatgagaattatgattttttattttaactgtgtttttttattgcttttctatttttatttttttttattctatttttagaaattaacagtggtaactaattactacaaaatttatatttaaaagaaatggttaccaaatttaaattggttataataacaattataagaaaaatagatatgtgatatagtattagtagttgcatactactatcaatttaaatttttactttccttcaaaaaaaaattacttttttttttctttttatagtatcaatatattatttgattgctt

SEQ ID NO: 90819 - DNA, 702 bp, Cannabis sativa
aaattatatgaaatttaattagaaaaaaataatataaatgatttaaaaaaattatgaaaataaaattaaaataagtattgaaattaaaataaagtagagtgagaaaaaaaatataaaaaaaatattaagagtaatttttaaaaattatttaaatttattaagaaaattacataaaagtgacagaaaaataacatcgaaagaacataaaaataatatagaaataataaaaaaaaaactaataataaaataacaacagtacaatataaaaataatatcaaaacattaaatgaccactaaaaactgtaaaaaaaattaaaattctatactgtaattttttaattgattttatttattttgaaatagtcctcctaatccctcaaaatttagaaaatgaccaaaacatgtccactatcccattcaccaaacaaagagcgtaatggatcattagtagaggtatagatatcgtacaggcgtgcataagataatagcgtgcatccaccaaaacttatgtcttatgggcgggaactatataagtctataaatagcacctctcactcattttgccgcctattatagtctcactctccattctcccttttcaaactctcccatggccgcccatcaggtatgtttcttcaaaccctaaatatattctttccattctccgatcatgcttgcatttcttttattttattttatttt

SEQ ID NO: 90820 - DNA, 531 bp, Cannabis sativa
actcagggaggccccaaaaacagttacccaaatgacagagtttgtggtggtagacctaccatctgcctacaatgccattttaggtagactagcattgtacatgttgggggcagtcacattaatcaagcatctggcgttaaagtttccaactcctaccaggaatgaaagagtcaaaggagatcaactagctgcacgtgaatgctacaatgtggctatgaggggacaaacccgaccagcggcctagatgttggtcgtaaacaacgataatgaagtggaaaataggggaccgtgttgacttgggtcccattgaagaacttgaagaagttgctcttaacctaaatgaaccaacaaaaactgtcaaagttgggaagcacttaagtaaggagattaagaaggttgttattcatttctgctgtgacaaccaagaagtattttcttgggcagattctgatatggtaggtataagtccaaatgtaatgacccacgtgctgaacctaaacaaggacatgcccgccaaacgacaaaagagga

SEQ ID NO: 90821 - DNA, 681 bp, Cannabis sativa
ttgtttttatttatgtgactacctgacacacatttccttactgagtttagtagctcacccttatcaaattaccatgtgcagacaaaggtaactaaaaatttagaaggtcggtggcgagtaatacttgtgtgtgtgaactcgttgagggacatataactgcgggcagtctagggcgctctattttatttatttacgatattaaataaatgttgcaattatttttatttattatttattttatcttaagtacaaaaactggccagttgtgaacactttcatgtattaaataaaaatacaacattataattttttgcgtttagcacttataaataaaatgaatatttttataaaagtacaggggttaaaagtgtacgcttcggtcttttgtctaggaagcgtgcctctcatccagagaagctcttttttgagctgacatggagatattattactaggagtttgttaagacgttgtaactgacttaacagcttagttactacaactaccgacttagggatccatgtccctaatctataaataccaccatatactcatcatttgcaagtagagagttttttggagaagtgactttgatgttaaagattgagaacgcaaacagagattaagaggtacagagaaaagagagagattgggttttgagatttgtatgaagaatcttttgt

SEQ ID NO: 90822 - DNA, 1083 bp, Cannabis sativa
  modified_base (963)..(971): a, c, t, g, unknown or other
aaactaacttaatcttacatttcattaggaaataatataataaatttgttgaataaaacaaaagagaaaataaatttgagaaattagtggaatcagttcaacaacaaatatcgtacatacatcaggaacttaactgaaaaaggaaaacaaatatatatagggcaagactatagtaggacttagcaaaagttccttaccggtagggaacttttttttttaccattgatgttagatcatgtggttattatgatgtaaggtgtatactcttacaataagactacttgtatacaattaaaactttgtacatattataataatatttaatgatatttatttttttaaaaaataaaatgatattaataattaaaaatttattatttattattttgaattattattatttttttataaagttaatttgaattatttttatattggtatttattttaaaaaaataattgctttcctaaactttttttttggcttctcatttttaggcttttcataatttactgctgtttttttttatgtttacacctagtcttttctttgttttgcttttaggctgtgagtagttctagtctattgactgttttgttcagtgttctggtttttatcttgttgttgtttggctgctcctttgagacgccacttataaaaaaaaaattaattaagtctgttagatattatttttcctgcaaaaaaaaaatgagtactttaggagaagcaagttggtacggtactaattaaaaagcatctaaaattattcaagtgatcctacatcagatgaacttttaaaaataaatatctatatgaaaacaatttaaattaactttagaaaataataataataattaaaaataaaaattaataaaatttttaattattaatattgttttattttttaaaaataaatatatcatcaaattttattataatatgtataaagttttaattgtatannnnnnnnnctatagtaagagtatataccttacatcataataaccacaaaatttaaaattagtggtaaaaaaaattctctactgataggaaacttttgttaggtcctaccatagtattacc

SEQ ID NO: 90823 - DNA, 848 bp, Cannabis sativa
ttatttattaattaacaataaaaaataaattaactaattattataatatgaataatgacccaattaataagttaaatagaactatactaagtagtaccatagcagaaatatattgatcaataagcaaacttaaacttatgaataacattacctttttagcaacatcattgtaacattgtaaaaatctcgatgcatcaaaggaaaatgaagtcataaaccaaccattccatctagaaataccacaatggatattcctgagaaaaaaataaaatataactactcttcaatcccattatttctttcacccaaaaaaaaaaaaaaaagaaaggccaaattgaaagttgagcataaattaagaacctgctatatatgtgcaataagataaactaaagcatgagaagtattagaaatttattatgttgatgaaaaagaaaaatctcatatatacgactaactaaaaaacgtacagtgtgccacgattgattattcattggggcttcggtcgctggctcccctgtcatcaggtcaccaacttccttgaccttccggcactgggcaggcgtcagccctcatacatggtcttacgacggtcgctcaacggataaaagttactctagggataacaggctgattttctccaagagctccgatgtttgatcattttctgcttgcattcgtctgggggctgttgagagttcaaatttgagggcaatttgtgctcaactgagttttagagggcagttcgaagaggaaggcaagcagtctatgattctccctttcgataaaggggtctccgccagaaaagaagggatttcgtaaatcaaacaacagtagttggaggagcccag

SEQ ID NO: 90824 - DNA, 560 bp, Cannabis sativa
agatcctggtaaaataattcccaatactaactccaagagccctcaaattccataacaaaggttcgtaacatatcttctggtgtctgaattgttctttcggactgtccatcagtctgaggatggaaagctgtactgaatttcagtttagtacccatacccactgtaaactctgccaaaatttcgaagtaaacttcgaatctctctctgaaactatatactttagtgcaccatgtaatcttactatctctttgacgtttaaatctgcatactgatccactgtaaaggttgtttttaccaataaaaaatgttcagactttgtgaaatgatctaccacaacccaaattgaatcgttaatagccgtggttctaggtaatccaaccacaaagtccatggtgatatcctcccacttccactcaggaagggtcaaaggctggaacaaacctacaggtctatggtgttcagcattgatctactgataagttgggcatcgcgatacgaaatctaccacattcttcttcatcccgctccacgagaattagggtttaagatcttgatacatc

SEQ ID NO: 90825 - DNA, 866 bp, Cannabis sativa
  modified_base (27)..(35): a, c, t, g, unknown or other
attaaaataaaaaactaaaatattaannnnnnnnnacactacgtggcttggcacgtaataatcacctagtaaaattaaaagtattgttaattttttttgttaagaaaacgaaatttttttattaaaagacacgaagcttgaaaaattttaacaaacataagagctcataaaattaagagcaatttattgtaaaaattttctaccttttaatttttatacatttaatctctttttttttttgtggtattattttttaagtttatttttatttacaaatttgacacttcagttgataactctctataaaaaaatatagagttatatttagctttttttttgtgtgcattaaattagttttgttctcaaatatttttaatttattttagtgacttttatttagctttacttaattttgaataaatattagttctagcatttatagattagttttagttaattttgtaatattttattaattttatttagttttcattttaaaaatattattctcaatattgtgtatgtttgataagagattaaatgtaaaatttggacttattaagtgttaaaatagagaacaatttgaattatatggttgatgtagttgattaatttattaaaattcaattgaagtctaaatattttttgttaatgtccattttatttattaatgggctgatatatttttagtgtgataagcatttaacgaacaaaatacaaataaaaaaaaaaaaagacaaatgaaaaaaattggctgatctttattttcttttttaagggcttggcgtgtgattgaagggttggcattgcgtacatatatatatctttatatattaaaagtgcctatctaacgacatttcttggtt

SEQ ID NO: 90826 - DNA, 708 bp, Cannabis sativa
cataaaatagaatgccagagatactatacgtcctataactatcataacaattgtatcctcaattaattttctagtctatacatatcataaatcaaaagtacttcactaatcaatttaaatcacccaaaaatcaccaacaaacattaatttctcttaaattgaatttaaatatacttattagatccttcttaacgtcacggcaacgattaacttctaagttaaatcaaatttctatttcacaattaataataataataataaaaataataataaacctcttcttaaataatatcatagcataagaaatttaaactatttatttaagtatctctaattatgatataccacaattatatctcacgacacgttatcatatacggctctagaccacttaacccaaatcaccactgtattttaagatattatctccactctctaacaatagaatagataaagatgattatcttcacacatttacgtcttcgtaagaaaaatacttatcaagtagtcacacacaataaaaaaaatataactaaaagttagatgcacgtatttagagaattaacaatatatatgtgtaagcttaatcttgccactagtgactaataactaatttttaaactaagtcacataagctacaatatatctaatttaaataatgtctaactactatacattattcagatagcatatcataatcatataata

SEQ ID NO: 90827 - DNA, 721 bp, Cannabis sativa
aaaaaaaaaaaaaatcaaaagaaacctttgattattcgaacctctagaacctctgcttttgaagatctccaaaaatgacgatcggagccgctaaaaaaaatcaccattaaagctacacaaagcttcgatcctcaaaagtcaaaacaaactctaccgttacttaccgaaaaccttcaatcacagatcaataatttgcattgttccaacctccattattaaggttgtttaaaaatgttaatcgaaggtgccgatataactcaccattgaagttactcaaagcttcggtcatcataattcaaaaacaaactcagtcattgcttatagaaaaccttcgatcaaaaacttcgactgtcagattcagtcaatgtaactcgaagctactaagacaaaacttatactgtgaaattcagtcgatcatttcttaagaaataaacttttgaaaagaaaatacctatgcttccttcgattgtttcaagtttgatcattaaagaaaggagatatcaagttcaagctctctacactaaaaaagaataaagcaatatgatgacaactcctagaatttgatttacacataaaaaagtttcaaaaactactaagcttttcatatttaatgagaaactaaatatataatttatataacatttgattgcttctatctaaaactactactctgttctataacgaaatcatgaaacctttattgttggtactacactataat

SEQ ID NO: 90828 - DNA, 720 bp, Cannabis sativa
caatttttacacccctcgcaatgtctgggacttttcggatgaggatgatgatgagaccctgactatacaagaaagaaactcttcatgaatttctttagtcgttaaacttccacagttggatgatgttcaatatgttcgtgatgatgttgacccaattcaagtgaccaacatgggtcgtcatgagacgtctaaccgtgaagatttagatggcttcattgtttatagtgatgatgaagacactagtgatagtgataatgaaaataatgtagatgttaatgatgatgatgattgtgatgacttgtagacttttaagtattgtaatatagacgccattgttgatttaacgaaatacatgcctctttcgtcaatagtatgattaattaattatttgcaacttgtatttgtagaatggttgatgcaggttcaagtggaggtcagaaaaagggagttagaggaaagtataagggaaaaaatattgaacaagaactagccaagctgccagcaggtcaaaaatttaaattatatttcatatggcgactgggtccctgtagatgactttggcaacaagtttaacaattacataaagtttcttattcgcaatactattcctatggacaagtttgagttcgaggacattgaggctacactcattcagactatatgggatagaatagcagtaatattctaaatttttttataatacatcaaacaaaatcatta

SEQ ID NO: 90829 - DNA, 595 bp, Cannabis sativa
attgcatgaattttaaatttttatgttatatttaatttttgagaatatttttatattattatttatatgttatagatctattatttaatttattaaatatatattttgaaaaataaaataaaaaacttaataaaaatagtagaattacttataaaatatgaataattataaattatacttaaattgtagttttgaactaaactaaatcgttcttaatagtttggtttggtttgagaaatttattgatttggtttggtttttattattaaaaaaaaattataataaaagtatgaaaataccctattgaactcttacatatttagagaaaaattctaaacgataaaagaatattatttaatgaagttgtttattcctaaaagaaaaatgtagttttccgtttgtggtgtgtccacaatgctttctaattaaagtataatgaatttattttttctccttcatatagaataaataaataaacaagtgctaactaatattccactgtataagttagggctgtacatcggtcggtttgggcggtttatcctatatattttctaacccaatttaaagttcgggttgctaaaatttaagtgca

SEQ ID NO: 90830 - DNA, 1048 bp, Cannabis sativa
gccacagcaaactagcctcccaaaggaccaagcataatctctctcattagaagatgtggtgggatttgaacccttcacttaagaaaagaaggatgccagtaaatgcatgcatctctatcactacaccacataacacatggttatataaaagattcaatacttaattatactaataataatatcacatcatgaaatgaaatgtactaaataccattttatttttaatacgagttaaattattattttaataaaattgtcgtgttacgtgtgttgtctaaataaaggttggagcttttcttataataataaggagcttttcttataataataatataataataataataataataataatagagttgtgcagtagatattttaatgataagttatattaatggccacttgattgatttattttagatttatacacacgtaaagatccatcaaaatttctattagtagacaaatttattatatattaatgcccttttttatccatattcaaaaagggaaaacaaatcccaccaagatataatattgtaaaataatcttcaaaaatgacataagatcttttctttttgaaaaacaacaaaaacacttgaaaaagatattgtataccactaacccatgcaccgacagaaccacatgattcatgagtattcactcttcttcataccattatttaatcatataattacatgaacaatatgaagtaaaaggatataataaaagaaatatggattttattattattattatattttacaaagtaccactaaaaaaaataacttttagtaacaatcttttaatcataattaatataaaaattttatgactaaatgtaactttagttacaaaaagttacttgtgactaaaacacagtatttagatacaagttgtcgctaatttagttttagtcgcaacacgtattgtaacgttctcgcttaaagtctccattgggcccttacacccacggaatgatgactcttatacacgagtacatcactttggctgcttcatgaaatgacgactgaccctacaaacc

SEQ ID NO: 90831 - DNA, 660 bp, Cannabis sativa
  modified_base (613)..(630): a, c, t, g, unknown or other
ttttttataattttttatttttatggtttttaaagtgcaagtttgcaaaaatataaattttttcttaaaaaagttattttatgagcaaaattttagaaaaaagttaaataaaaaaaatatgaaaaaaacagtataagatacttggtttctctcttatggtaactggttaccctggttctcataagtgtacttattacccttacttgattttttcatattttttaattttttttctttaatttttctataaaatgaccttttgaaaaaaaaaagatcatattttttcatagaaaatataaaattcataaaatttgtaattttttttaagattatactatatactcttgttattggttaaattattttgtcacataattatgcaagattttagtattgaaaataaatagtattattccaattaatacttgcacatattttattctatatttagtaaaaataattatagatatatacaaaatattcactaaaacattacacccaataacatagcaatatttttaatatattggtgttgtttttactttcttttttcagtgaagcaagggaaacaaaatattattgaaaatgtaaaataaagggtaaataccatttnnnnnnnnnnnnnnnnnnaaagttaccaattggaccctgtgttttgtt

SEQ ID NO: 90832 - DNA, 611 bp, Cannabis sativa
atttcaactctctttttatgttcaccggtgttacttttgtctttttgttcagaaacttcggtttgatgcattctcctatcaattttgacgttgttttcctttggtcttcatacctaatatttatttgccatgtgtagatttttgagaacctcttgattatgaatatatttgtcggcccctttttggatgctcttagacagcaattacagctttcgtaaacacattttaaactgtattcttgagagcatgacttccatgctttgtattggaagttgtttttgattgcgtagtaactactaaggacattcttcagtattttcttgtccttgtatgcctgacctttttcaacttctaggtggtgtttgtcttttattagcttcgcgttgttgacttcgatttatggatctagttttttactgttgttttccagtttttctaccatttctttagcaactagattcggatagtcaactatttcaaatttgttgttcttaaattctcttatttctgactctcctccttaatctaattagtgtttgagtgtgtatgattctattgttgttgcgttgttttcaagcattgccaacttttcttgatatggtgttgttatg

SEQ ID NO: 90833 - DNA, 732 bp, Cannabis sativa
tcgtgcacttgcgagtataaatattaaaacactcacttttgaggacaacaagtttttggcgccgttgccggggagttgctagaaagaaacgatctttccacatggttgctggaattggactttctctcttttcttttgagtctaattgtttagatttgatctctgccttttgtaagagattttcttactgtaacaattttggctctctatttgatgtattttttagtttacgtactgtctaattttattaaggcgtcatttattcatgtaaattattcggccatgatggctacacataaattagctgcgcacgcacttaaagtagatgacgagctaatttggatggaggatcttcaatctcttcttgatagtgtacttaacgctaatttttttctcaataaattttgtttatcgttataaaaaaaataatatatttcttaactgctcttacaccaatattagtaactttgcacatcaactcaaggaatctccatattcattttagtccttctagcctttcttcacatgtctactttgcttcttcaaagcacttgagtaattaatttttactcacattagttttatgggcaacattatttttttttttgtctaacaattatttctaataaaaatcaatgattttttgttttaatatatatttatatatagtttaaatgtttgatatagtttatattatattaaaagtggttttaatatataaaaaaaaattaa

SEQ ID NO: 90834 - DNA, 680 bp, Cannabis sativa
caagggtccagaagggctcacactcgagcgcgccaaccaatgggccctccacctaatgtggaacaatcacgaactattgagagaaccaacaaaactcctccaccaggttttttccgtcgttctaattgcaccaggccttgagatcctgcaaaaggaaagggacctactactcacattgaaggggaaagtcatagactctactttgaaaccggaggttatgagatccgacaagtaaggactaacaaattacttcatactcagaagtatttgcgagatgagagaggtgagttgtgtcattactttgcccactgccccgatgaccagcaatatgagtacttccctggagtacatggagaagggttgaacttgagcaaccagttcaactctcttcgcacttgtgatcctactgaagactatttcgagggaaatagtcactacaatgttccgaatgacagctcccgcatcgcatcatcccaagacgatctagacttcattctgaaaaaattaccaatgttgccttcacaacctcgtgattaggagacatcaactagatataagttgagaggagttcatgatcgacttggaagaccaaaagaccagcgtgatactctaaccagaagatggttggtggaaacgggagcttctagaggggaccctaatcgggtaatagaagtttcaac

SEQ ID NO: 90835 - DNA, 975 bp, Cannabis sativa
gaacgaattgaaaattcatgagatacccagaaagaaaaatgaagatagggaaaaacccaatagagacgacgtacctccggcaccgaagaaggacgtagtgagaggcctcttgaccacacataatctaaggctgttagtagaggaggaagaagaggcaggcgtggacgccagggttaatcccgtaaatatctgtggtttggcggccattgttggagcaaaattcagttcaaatgcagcgacttgggtattgagataggattgaaaatgagtactgagatcactctcgctcactcaccagaaaattgttagagcgaaagagaggagagagattctccggtgttcaggatttgaggtctctactctctttccccttaacgggccttttttgggcctagaattatctaagttacaatccgcccatttatgatcaaattgaccaaaataaccttaaaccgttaactcacctatctccaaagattgtaccattttactgtattttttacaccaatttgatacataatttattaatttctgtgcaacaactcaaattgatttacaccaaatatgataaaaaataaaactattttacttaaaatctcatattacatgttataatcatgtatattgtcaccaactaatttatgattattttttaaaataaattaaaaaaagggggttagaattgaaaaaaaaaatgtactaacttggtgtaagattcaaaatttcacaccattaatggtgcaattgtatgcacaccacatcagtgtataatttagtacatatatgaagtgtaatagtgtgaagatttcacaccaattttatataatgttcaggttttatggtatattctctacttattgggcttattgggcctcttattataacaagctgcaaccggcccattttaggtcaaaaattgaccaaaataaccttgaagcgctgactcagctgtgtgtgtgtcataaaagccaatat

SEQ ID NO: 90836 - DNA, 546 bp, Cannabis sativa
aatcaataaagcaaatgtcagaggagacgaaggcggtggagcatcaattccgaggccaatatggtggtggcacaataaattgagatttttttggcgtatattttgtaattttttgtatctattaattacaattttattttaatttcctttattttaatttatcatttataataaaagatttattactttaatttccttaatttaagtatgtcatttaattttttaatggtatttatctctttttcggcgttttatgtttattaatttgacttttcaaaagaattttaaatggtaactatataactatatatgttaattttttaattttagttatttttataaaaacaatttttattattttattttcttaattattttagatattatttgccatctttattattgtttattttttaaattatttttataccaggtttctctctattatgtcaactttaaaatttttaggtaatgattgactaaatcacgattttaaattttgtcttaatttcatgtcatttagttattattacaaattaaattaaa

SEQ ID NO: 90837 - DNA, 704 bp, Cannabis sativa
  modified_base (548)..(554): a, c, t, g, unknown or other
ttaagtagatgaaaaatgcatgcttaatggaagacattagggtatactatttgaacaacattttcgatgctttgatgtctatcagatatgattactagatctgcaaaaataattttagtattaggattttactgttagtaacatgaacaaaataataattttattcagaaagtaaaagtaacctggggcatcaaaatttaaataggtgacattttataagaattagaaacaaaaataagataaatacaacatattaactttacgttctccatatgtttctttgagctttgtgaagaaatattcccaagcttcatcattctctgaatcgccaacaccaaatgctaatggaaaaatattgttacttgcatccattgtagatgttatgaacaatgtgcctcgatatgaagatttcatgaaggttccgtcaaccacaataattggtctacaatgttgccatcctttgatggaatgtgcatatgctagatacaagtatttgaatcgatctttgtcatttgtggtcaagctagtaatggttctaggatttgctnnnnnnnacatatgaagatacattggtaactgttggtatgattcatctgtctttcctcttaccaattatacagctttttccttgatctccaagcttttgagtaactcatagatactctataatcatcaagcacatctttcatgatatcatttggtgt

SEQ ID NO: 90838 - DNA, 2477 bp, Cannabis sativa
agtgattaagatattaataataaactatttatttctttaaataagaatatattattgcagacacagagaagtttggaaccaatgaaatacaataagtgcttatttatatttttttctgataaaaagaagacatatctatttttatattctacagacaaaaaaaaaaaatgatgaatggttaattttaggtacactgccggccaccagtaggggcaataataattgtaatatactctttgttcatatgctttcattaattattctttgttttttaaatatttttataccaatttattcaaataaattaatttcgtataataaaaaaaatataaccttaacaaataattgaactattttagtttataccaatttattcatagcttcttgtattcatgaactataatttcatattttttttcattgtatatttacacatcgaaaactgttggagattaagaatttaattaattaaatttctccttcatttgcacagtttggtgccaatatataactactttatgagttaactttgtaatcctaccaattttctcctttaatttgatgtatatattatgcactcacttaattcataatgtatattgtttagtagctactacttaaacatatttgttaagcaccgattgattcccactacaaaaggttttacttttaacaaaagttttgatttaaaaaaattgtgactaattataaattatcattcttatgctatgactaaaaggtctgtgactaaagacattagtcacaaaaattacaattcgttgtggctaaatgtgttattagtcacaatacttgttgtaactaaaactaaattagtgacaacctgtatctaaacactatattttagttacaagtaaatttttgttgcgattaaaagtcacatttaattacaaaaaatttatactgtgactaaaaaattatcactaaaattaataatttttttatagtgtccattccaataacttcctaaaacctaaaccccattccttgcaagacttacataaatccttcgaatcaccaaaatcagtcatttctttctagagaaaagacggcattacatttatttgcttcaataccctcttggggaatagcttgatttgcgcccaataaaaatgaataaaaatcaacactgagttaatcaaagtaatttgacctgtatatgataggtgggatgaactccatattatgattcgtgctaccatcttctctataaggccttcacgttcagcatgagataaccctttcatacaaatgagaatgcataaatacttaaacgacatattactcctgacgaagtcatatcttttactcggtgtacttcctgttgacctatatcacaacaatagatagccgattttacttcagtatggaggtctatgaaaattatgccatcattattaagtcaatagtggtatatttatacaaaatataataacaaataatttatttaattttttactttaattattttaatcaataaaaatattctttcagaattttattttttcattctaaaaaaaattgtatacgataattccaaaaataatttttagtatgaacaaaaaagtgtattatttttttggaatcgaattaaattaaaagttagtttttgttctttaagaacataatgataaacgtagttccttaaataattaagggaatcaaaacaatatattttcattattattttgacaaaaacaaacttataaaaaagtatatttttggactgaataaaagtgtttcttctacagcttaaaacaaatcaaacataccatatgcattgattttttaacaaaacaaacatagcattaatcattaacttaaatatacaacattttcaaataaagattatttatacatattttattttaaaaaaaaatgtcttcactattcttcttctatgaatgtatttgacaaagaaaaaagtgtttgtttagagaatatgtacaagtaattagaaacaaattttgcatattattgtagaataaatataatattgttataagaaagatttatagtatatcagaaagagttatcttatttggtacactctttattatccgtttcactattatattatattgttggttatcactcacataatacaaatattttaatttatttattttagatactgtaaattattgttaagagttttttgaaaatttatgagtacttgatcttaaataattatacaatctacaaaattatgataaaaaattagattattaaaagaaaattaaataccgaaacaaatattagttatttacatactgtaaaattaccctttattattttattatacaattcgacttattgaatttaattaataaattaattatatacatgatatattgtttttgttgaagttttaggtgatgtgaatgtacaaattgtagcaacaaagtctttcaagggaaaatcatgtcatcatcatcgcatgtagacctctcatagtg

SEQ ID NO: 90839 - DNA, 538 bp, Cannabis sativa
gggatcaaagttggtaagagtactcagcccataactcacttgttttatgctgatgacgccattttcttctgtagagcgacggtttcagaagcacaacagctgggaaaatgcattgagaagtatgagggatggtcgggacaaaaagttaatagaagaaagagtggtatggtgttttccctgagggtgaagatgaatgagaaagctaacattcaagggatccttgacattaatatgctggataaaaatgagagatatttggggaatctctttttctattcggctaggagaagggatgatttcaaatatttaaaaaacaaactcttgtctcgattggaagggtggaaagccaagcaattgtcgatagcagggagacaaactctaattaattcggtgctgcagaatctcgtgttatgcgatatcaaccatgagaattccggtgtccgtttgtgctgaaatggacagcattgttgctcgtttttggtggaagggatcagcgtttcaggggaatcgatacctagctctgaaaagctgggcggac

SEQ ID NO: 90840 - DNA, 504 bp, Cannabis sativa
  modified_base (352)..(359): a, c, t, g, unknown or other
tcagttatatatattgtggaaagggatgggttatatatcagagtctcttcgaactcaaccacccccaatcttgatttatatatcagttatatatatatatattgttaaaatggatgggttatatcagttatatataaatatatatataccaattttgcaaatatatatttgaggcctaaagagagatagctgatgattgatttattttttgtaaattaagaaatagttacaaatcgattgatatgttatatatatatataaatattatatgtatttgtctggttttttttttttgagggaatgtatttgtatggttgaagaagatgaataataaaaaaaaaagaaaagaaannnnnnnntaaaataaaataaatttataattttaaaatatattgttgctccagaattcgaccttcttacgtggaccagtcgagaggggacacgtggatcagataacttgtaaacatttgctaagtctttgcgcgccacaaggaagcgctgtta

SEQ ID NO: 90841 - DNA, 914 bp, Cannabis sativa
ttttttttttttttgagagaataacctgtatccattaataaaatcatgaagtacaagatacatgttacagagaagattggaaagaaggatttatccagaaagcttcctgctctaaacctaaagctgtcttagctaaacaatgggcagcgtgttttgcccctctagggatgtagctaagagacataatagggaaataagagagcaagcttttaatctcagtgacaaatgggttaaggtgcagattatgggtatcatttttacaaatgtaattgactaatacattacaatctgaaacaatactgtccggataaaaggagtgttcatggcaccaaactaaagctgaaagaagtgcttgggcttccataagtaatggtgtagtgattcacacttctaggctttgctaaattgaggagaacgtcacctgtattagagtggatggtcatgccgaagcccattttgaggagctgggaatcctgagcagcgtccacgaagaggcgatggtgaaatgttggaggcgatgtgcggctatcaagaagtatggaatgatcctcctgcgctggtgaaggtgttggttcttgcgtggtgcagttcttgtattgttcaaagtatatggaggcatcacgaatgatctggtttggagaaggggatagaccctcatgaagccaaatgttcctgcagttccagagcttccacagcaaacaaacaaagagatgataatgtccaataataaattcagtggcagcaagatataataaatccatacatctaagtgaagaatgtgtagaaataaaagctttaaaatcagttagtttccataacttctgggcagcaggacatctgaagagagcatgttctagggtctcatcgtgatactcgacatcgactgcaatggggagaggttatagtctttctgt

SEQ ID NO: 90842 - DNA, 779 bp, Cannabis sativa
aagaaatgttaaaaaacattagtgatgtttagtatttattgcgtgttaatattattattgttacaattaaatattaagtgttcaatagcaagtaggaatgtacaaaagtttcataggactggagactcgtgagaatctacctctaatggggcagagaatctctgacttggcgggaaatagggtgggtatgggattgattttcatttctagaattggggacggggcataatcaagtgtggtactccctgccccaattaagccgcgaatatatataatattgataaatgataattattatgattctatatatatggctcaggttttatattttaattaatgcagtaatttaattttactaacaattaagctcattaatctataatttagttaatgcccttaattaatttagttagtttctatgtatatataagaaacttgtatatgtaaaattatatagcattgctattgtaattaattatatgggattcgatactcaattggaccaatagcaatattgacacataggaagatgctaggcactattggtatcctttagcatttctcaaaattataatattataatttataagctttttactacgcatatgttaactgtcttagaattttgatagccaccaagtatttaaatatgagaattacttgagtagcattttctccataaatataaagaatttggaactttgaaaagattctctcatttcatatatattttctctagtcatttctctcttatgttcagggccggccctaggcatagg

SEQ ID NO: 90843 - DNA, 749 bp, Cannabis sativa
cacctaacttgccaaaaaaggactttacaaattctttattaatgaattggataaatgtaaaaagtggaaaataaagccttaaataggcagcgagggaatgatgacattcataatagaaaagtataacaacctaactgtaatatctaactaaataaactatcttaacacaaagtcatctttattctttgtgctctaacaaaactgaatcaatttctagtgtttcaaagctaaacgtgtggggaaaaactgttttcagagagttccatgctaataataagagttgtactatataaaagaatacttgttaatttaggtatatactaaaaaatattgctcttcttaatatattacaatttaaatttaaacttcaaatatatctcttatcttttaaaaaaattatatcaaatgaccccatatcagcccataaataaataaccaaaaaattatcatattttcttcatgagcttgacgagtcaccatatatattacttttcatcatactgaatcatgaagaaaatattttctttgtagttttgtttacatataaatataaatatatcacaccaacttataattgtactaacagccttttatgtagttggtaagacatcaatttgaaaatcatattcataataatatagatatgtagtataatggttacaatcaaaatgtaacgataataattacattttttatgacttgccataacatattggtaaaatttttattttcgacttagattaattaca

SEQ ID NO: 90844 - DNA, 1255 bp, Cannabis sativa
attttaattaatctcaacatcttgatgtccatatcaagtgtagtatgtagtattatcattgtaatagtatttgacatgttgtattcaatatcaaccttctccagcattacatctcctcagtcacaaaatccttgatattgtgaaattcttttttatatgtttactcctcttaagatatcagattctttactgtttgccaactatatatatatatatgttatcagaaagtaacactagtagttaatctatgattggaataatgccaaaaactgtatagttatttccataggctgaataattatctagtagccttcaaacttacgagacgaccatctcaaatttctcacttgctttttgctgatgatagtctcctcttttgtcaagcaaatgaggactcatatctttccctaaagaggattctagatatctactatcgtgcttctggtcaagctctcaaccccgataagtctgtcatgtctttctctcctacataacatttgttgcacaaattatcttccatagataactctccatgcccctttgtgaatgtcatgaaaattatcttggcttgccctcatattctaaaagagataagaaggaaattttcaacaatataaaagaaaaaatatggagacttatgcacacttggagtgaattttttttttcagcagggggcatgaagtgcttctcaaagcagtagtccaatctatattcctacatatgcaaggagttgctttcgcctatcattttatttttgcacacaacttaagtccatgatggcaaacttttggtggggtttaaaaatcattgacgttcatggaatctgctttgttagacaaaggctgaaggaggtacgtgcttttgatcttttatacattttcatgaagcttcgctagcaaatcaagcttggaggcttttggagaaacctgattctcttcttggtcagttattaaagagtatatacttccttaatagttcttttcttgaagcaaatcttggtcatctctctgcatgacttggcaaggtattcattggggtaaagaattgctcttagagggtcttcaatggaaaattagagaaggaagaagggtcaaatgtaggtttgatccacgaattttggggcataatactttcctccatcttcggtatacaagtccttttgatggtgttgttgcaaatctgatcactgaggaaaggaaatagaatatactcatgttacaccaaagtttctctcaattggatgtggatagaattt

SEQ ID NO: 90845 - DNA, 1135 bp, Cannabis sativa
atttttatttcttttaattgtagcataatggtattacaatttactaatagcttatgttcttaggttcgaagcaatgactttttttcttattttttcttcacactacgctaattttattggcttcacttaacatatttaccttacatcatgcatcaaattttttatactatcatttccattatttaactaatatatttataatgcacaaataataaaatattattatacattatatactatatataattttatattaaaaaatcaatataaaacacgataaaaataataaaatattataactacatttgctaaactccttacaaaaaattaaaaaaaaaaacatttagctaaacaaacactcatgagctaaattactatcatgagttaaatttttgagtattaactatatttttacacactgaatgagtctttttttgactcttagctatatttttacttttgtaactattttaaattatttattataagtagtgaaaactatatatagggtattaaagactaattttgtctttatcatacattacaattgaatataatatgattgtttcgagtattagtagttatttttaatgtaaaatatttttactttcttatcttgtagaactttatttaatttgattctttttacttgaccagcttgttaccttttttgataaatgttctactaaaatcatatagtaatttgtaaatatttttatgtataaatatatggttgatttttttctttctttcttttattgaaaataataaaattttcattgtgcaactgcctgaaatagagtcaatatgatattggagaccctattacaatgtttaaatccaaaaatagttaagagtattacaaatggccaaagtatcaactccaccaacgaaagacttttatgtttttttttttttttgccatttaaaataaatataataaattaaaaaatagaatagatataaatgatatggtgagaagttaatgacatataaaaaaattgaggttaaaaaatagcaatatggtggacgttttcgaagtaaagggggttgattgtcacgagagttatttgagtctcctttattttgtgggacaaagtaagatgggtttgtttttgacgtcattcaggataga

SEQ ID NO: 90846 - DNA, 823 bp, Cannabis sativa
ataaaaagttgcggactcactcgtaaataagttttagaaaaggtaaagattttctgggtacattttctcagcaaccaaacaaaaacaccttccttcattagaaacataataaaaaagaaaaaaaaaatccaaaatggaatcacattgacatgaaaagagttgagaaacaacagatcaaaaaccatgaaatgagaatggagatgaaagaggataaagtggcaaatgtggtaaataacttacgatttcagtccgatctgtgaaaaatttgaatgctttttctgtgcgaagagagagagagagatttgaatggggttttggcttaacaagctgtgtttttttttttctcgttttctttttttttgggtgtttctgttgctttgttttatatattactgagtgactcgtcggcattaacaccgtttcttaacggcataattagaccttttttatttgtcattttcttttgcaaaatgtatttatttattacaacaaacaaatcattctttttcttttcttttttttttttaaatcaatcatttgtttattaagctaaaaaaaatattagtttttttttttttggtttagggattggaattattattttcttttgaatatgtattagaaaataaatacaactatttgcataaatagatagttgtacttgtacacaatgtaatattggtaaaaaaaaaaaatccgttatcccattttcaatttagtttttgtaaatatatttcaaaattatataaataaaaactaataatttgttaaagacccagcgtagcagaatgaaatgatgtcacttattcgataaccacccctt

SEQ ID NO: 90847 - DNA, 2486 bp, Cannabis sativa
aaaatttataaaataaaaattaaagcaatgtacattaataaaattagtagaaattagatttataccataatacgtcaagatacaatgttttctccataaaaacggtggtcggaggtataactatcacaaccactacctctaccttcggtttaccctaaaaaatgagaaaaaatgtgatattttcaggcatatagttttagatatgaaaaatagaagatttagaaacaaaaatgagctaaaatcaaaaaaaaatggtgaaatggggtgattttccgtggtggttggcggagagggtttggggtttctctgatttgaggatttcttggttggctgatcgaatgaggaagactaagggatgggctagggttataaacccttttggtgtcggttatttccaaataaccgacgccaaaagtggcatcaaattccctttcaaaaattttcaaccatatggcgtcggttattaattattatgatgaaaaaagcgtctctaaagacttgtttttaaattagtttataaaatcacacacgtgacgtctctatgcgatagggcgttacacccaatttctcacagaggacttccaacagcgtcagaccggagatctcttccgcgattgtcgaaactcgctccgtcagagattgactttgctccagcaaaacagttgtgtgcaataacgtttggtgagggttgcaggtacctattgaggaagaagatcaaaagaagtgatgatgatgataatgataatgaatcttcatacacgcataaaaacactgttggtgttttcttttcatagtttggggcggacgattttgttggttaggcgagttggagaggggtggggaggatggttgcaggcaagttcaaattgacctaacaaatgattgacctagagaagcgagatatggagaaactataaaatatagtaaaattagttttatttacaaaaatatgacatataaaaattccataaaaatgtaagcaaaatacagaatctatacactaaatatattatttaattatgccataaaaaatgaacactacaaaaactctataatttatgtaatttctcttaggaatttatacaaagtaataaatataaataaatacataattagattaaaaaagttttgaaatgttagcattctcgctctcgcacgccccctgccacagctctggtggagctatctccagctctgtattttgttttaactttcatgcacgtgaaatattaattgaatcaaggttgagactcaaaccacattttaacagtacataaaacgaggatcttgtttttttacgttgtatttctttcttgtccacttgaacccaaatattaattttacatattaaaaattgatgtctcatgtgacaagctatactacaatatgcatactacttggaaatttaaatagtataatttagagtattactattaggcattagtggtgcctagcaccttctcgacatgttgcgttacaattggctagcgatactggctataatattaaattatatgagacccaatacttaattggaccaatagcgattttgaagtataagagagtattggcaccactgatgccccttaacatttctctataatttaatatcaaatctaactattttttattcaataataactagatagtaagttagtacctatagcacaagtagtaaaacatacactaatctataacttgcacatttatataaagattaatagaaagcccaaccatccttcaaaaaaaaaaaaaaaaaatagaaagcccaaccaacttcattaattaatatttataatttattatccatcttccaattaatgacgacatgaaaaattaagaaagagaagaattcataattatcttctcaatttatttattgtgcttatagaaatataatctagtaattaattaaaggtggaatactctgttcgtgcctgaagaagttatggggatcaactttggtcttcacacgtaccaatctcttaaagttttcctcattgtaatacctaacaccccaatgatcagtaattggccaatcgaagcacatgttcttcttgttaatccccaaatcaagatctctataattgacataagcttgtcttggagagttggaaacataaggagtcatgtactcatacacctccctaatccaatcaatgtgcctttctgggtctttgtctccatctccccaggcagttaagtactgaatcatgaaaaggattccctttctgtgagggtatggaattttcgattccgaaatcctactcatcattccacctaatggagtccaaaccatagaaggactctcctcctttaacatccttgtccacaatccttctagggctttctcaggtattggaactgtgacaaaatctgattttgctttgaagtaagttctgaatgtattttttgcctggagaaggctttggactggtgttccttttgggtattcatccacgtaaagaactgattcaacccaactc

SEQ ID NO: 90848 - DNA, 1744 bp, Cannabis sativa
agggatatatggaagcaaagcaaatcaagttttgcagataaagaaatggacatacacactaaactcatggcaaagtataaacaagtgcctgagtggtggtttatagttattcttttagtaaacattgcagccactgtttttgcttgtgaatactacaatgaccaacttcaattgccttggtggggtgttctattagcttgtgctattgcatttttcttcactcttcccatcggtatcattaccgccatcacgaatcaggtaagaaaaagttgaaaaatctagcgacttaattttattatcgtcatgtttggctgagtttctaattatttatgcttttagctttttaagaaattcttcttaagaaagttactaaatttgacttctgttaaaagggtttttagagtttgagaagcttgaaagtaattttcgtattctaattatgatatgaataatttttatttttttttttcaattttaggctccaggattgaacatcataacggagtacataattgggtatatctatccgggttaccctgttgctaacatgtgtttcaaggtttatggataaataagtatgacacaagccattagttttctacaagatttcaagcttggtcactacatgaaaatccctccaagaacaatgttcatggctcaggtcatttttcttgatttctttctttcttctttcattgcttcgaattcgaaatcttgatatgttttcgtgtgtttttaggtagttggaacactcatagcggctttcgtctacttgggcacagcctggtggttgcttgagaccatccctgacatatgtcaagacacatcatctctttggacatgtccatcagacaccgtgttctacgatgcatctgtcatctggggattgatcggtccacgtagaatttttggtaatttggggacatatgaggctgtgaattggttttttcttgggggagccattgctccaatactagtttggtttgcaactaaggctttcccacaacaagagtggattaggctcatcaacatgcccgtgctgattggtgccacgggcatgatgccacccgctacggcagtgaactacaccacttggattcttgcaggatttttatctggctttgttgtgtataggtacaaacctgagtggtggcgtcgacataactatgttctatctggcgcgcttgatgccgggttagccttcatgggtgtgctcttgtattttagcttaggattggaggatgttagcctcaattggtggggaaatgacctcgatggttgtcccttagcttcttgtcccactgctaaaggtgttgttattcaaggttgtccagtttataattgatgaattatttagatggaagaaattcacaaacaatgtgtaaatatcatcaaagatttgttatgtaaattaacatggaaggaaaatcttttattttgaattcttttctaattgaggatgttttgagttttgtgtaaatatgcatatttttttttatgtataaataatatggttgtccatataatttgcaatttatagttattttggactatttacaattctatggttcaatcacaatttttaaaattctctatagccatttaaattaaataaatttatatatatttttatatatatatatatatctttaataattaatatgtatgagtgtgaagtaaatattaaatcaaatatcttttcatttactaatattaaataaataaaaaattaattatgtttttt

SEQ ID NO: 90849 - DNA, 814 bp, Cannabis sativa
aaggtgtatgttcgccgaatggagcgatagagagatggaggcattaattgctcaccatgcagagattgaaagtcgtagtcggcaggctgtcgtgctgatacgaaaagcctaccaaactgtaggttaggaatcgccaacatcatttatctgggtgagacagacgaagatcctgcaatgaatgcttctcaaaccgcaaatggtcagccgcccaatccccgatcacgagttccactcgtgggccaagcggtaggcgggcagaccttgtcaagtaattcattaggagaagtcatacctgatggttccaaccagataaatggtgccattccacccgtcaaccaagcgaatcaatcgctgaggcagccaagcacttctgtattcaaaaggttgggggaaacccatgacctaaggaatgatctgaacaaaaggaggggagtagacgatcaaaatgttacgacaaccttgcaacccggaacccgtactcaaattctcgcacagaatgattctgatgtaattcaaattgaccagaatgccgagcaggttagcccaaccgtacaggctcagctagacaaactgaaaaatatgtttcatggcatggctggacaaagaaacaatgatcttgagctagatcgagcacgcggaactcctttctcacctaagatcaatctcttgccgctgccccacaaattcaaaatgccgacgtggaagatgtacactggaagagaagatcccctttcatatctcaagtacttcgaaatacaaatggatttgtaaggggtacgaggagatgtatgttgcagaatcttccctgccactc

SEQ ID NO: 90850 - DNA, 614 bp, Cannabis sativa
  modified_base (573)..(589): a, c, t, g, unknown or other
cttctgagattggtgatctggttgaggttgatcaatccactgtcagggagggtactgggccatatcttaggattcgtgtttttcttgatgttaacttacccattaggagaggtctgaatgttagatttatgaggatggggagagagatcatcaagttgatcgattttaaatatgaaagattgcttgacttttgctacttttgtggaaaacttgatcatactaggaagtattgtcatgctttcctccagaagtgtgattaaagtcctattcctcctccttgtccttttaatattctccttcgtggcaaagaaaaaccagctgatcaatctcaaccattccaatatccacacccaccttctatctctgtggttcaaatgcctcggggaggtttctcccttccacttgttaccaactatcctaccatttagttctcctctctatttccaaattatttatctgctgaaaatcagcttactaatgcttctgcgactgctggtattatgattcccagccctgttaatcctaataatctggctttgatcactggtcctttgttggattttatgccctaannnnnnnnnnnnnnnnnataattagatttacttattaatata

SEQ ID NO: 90851 - DNA, 547 bp, Cannabis sativa
ataaaatatcttagacaattttgactagagaaaactaaatataatttttacatacatttatacatttaagcagcgactctcttaatcttttacatatatatggatttctttgtagttataatgaccctatttatattatcaaaaataaaatttaaaataatttcacgtgtttatttttttttttcaaaaaaaagatattagcagcaatgatacttgaactatacaaattgttacacttaaaccccacaaattcattttttttgttactacaaaaagcactcttgctggtcctcaatttgtttttttaagaccgtcgctaataaaagtaagtgagtatttaaaatcaacgcttgtagttaagaatatccattagttttaaagagtcgtgaagtatattcatcagttgaaaacggctgtgaaattagaatccctaactgtttataattgttgtctaagattttattgtctgctatagtcagcttataacaatcagctgtattatagccgacggttataaactgtcggcttctctctctctctctctctc

SEQ ID NO: 90852 - DNA, 717 bp, Cannabis sativa
aaaaaaaaaaaaaaaatatacaagaagaagaaaaccccaaatcagcccatcattttcagcaagccaaccctagccgtccaccaccattgcttcaccccagttcatctccaagctcgaacccagccgcaccattcaccactcatccctgcacaaactcacaacttcagccatccaccatcactagcaaccatttcctccatttcaaaccatccactcggcatcctacaccattactcctcactcacaacccaccattcgaatcaccacgtccaatcccaggtcacaaaaatcgcaccccttccaccatttccattagcttcgaactccaccaccgagcagttgaaccatccaaatcaccccctcgctcaaccatctccgacgacagcaaccacgaaccagccaccatcacaagctctagcaagcacattcgaccgaggtgtccactatcgaatgctagtcacacgcatcatctcagcagcaagaagttgacgcctgcacacttcagccaactcaaagtgaatccgggtttgagaatttcaattcaaaatttatttggttaaacagtgttatttggtgagtattgtggcctgtgtagctgagtatttttagggtggaggagcattggatttgtgttgttattctgtgattatactgttgctaattgggctgttgagagaaaaaaaaaaatttgtagctgaattctactaagcaggagtc

SEQ ID NO: 90853 - DNA, 533 bp, Cannabis sativa
  modified_base (65)..(67): a, c, t, g, unknown or other
gtgtttgtatttttctagtatttagtatcattttatattttttttaagttatgttttgtataatnnntagtatattgaataataaataatgagtattgttttaatttttatgtaatttaatatttttacacatttaaattttataatatggatttgtatttttttaatatattagtatcatttttaaaaaaatttaagttatattttgtatgataattagtatattgaataataaataatgcgtaatattttaatttttatgtaatttaatatctttatacatatttaaaaaaaaaaaaaaaaactttactctaagtaaatgcattacactaatattattctaaaattactttaattatttaatggttatctaaatatgaaaaaaaaaaaattattcttataaaggaacacacctcataccaaatgatgatgtgtgtaagagacatcataacggaactttgcactgaaattcttatagaataaaaaaaaaaaaaaaacaagttagatgcaatgaaatgatgagaaaaaaaaat

SEQ ID NO: 90854 - DNA, 514 bp, Cannabis sativa
gctagtcagtaaccaaattaaaatcatttttgataccttgatcagtaggagaagaatctttcacactttcagcactcttcccatcatctttaacatcaacattcacctcatccttctttagatcattatgaacagactcaacatgtccattattttgtctgctctcaagtttattatgttcatttcttcttttgaattatccccaccatcctcattcatttgatcatcttcttttccatcattcttcaatgtatcatcatctttttcagattcatcatccccatcatctcctactgcctcttcttgaggcgtttcgtcatcattatctgatgtgcgtagcacatcatttgagatgttttgattttgactcatcccaacatgtgagctttgccaaataaataaaaacctgcattaagatcaaatcaaaataaattaaaatattaaacacatataaaaaaaaatataaatacatactgttggattaaaaatcctatgtggacacatatgtataatg

SEQ ID NO: 90855 - DNA, 1040 bp, Cannabis sativa
ggatcatttataagctttattttcctacaagggtcaaagtgacctttgaccacccatggatattacacatctgccacagcgtagagctcgggtcgtgacaggaagtatctttgaagccttgccatccctcctaaggttaaggtgtttatttggaaagcttttttggattggtttcctaccaactctaatcttgctactcacaaagtgcctactgctcttacatgcccagtttgtagcgttgataatgagacttcattccatgctctttggggttatgctagtctcggtccgatggttaagttggtggattttgttatcccgtcgacatcttttccaaggataaatctcttctctttgcttcgtgagcatgagtttgtccttactcgtgatgaaatggagaaacttatagtgcttctttgacgtatttgtattggtgtaattattgggttcataattacaagcttctcgatatcgaaggtgttgggatgggctgttctttagctaaaaattttcaagaaactaacatgaaagagtgtagtgtcgatcatacctatgctattttttttttttttatataaatttgatgtgtaaaaatttatagatttaagttttttttatttattattatatgacctgattatcattatctaatatatattgataaatagatgaatattatgtctaaagagatccaactattaaaagatcaggttaattcagaagtctatgtcatattttatattatatcctaaatacaattattgtgaaagccaaacagattattttcctagtatatatagaaaaagaaaaaaaaaaaaaacagtgctaaaactgcaacatttttgtgttaatttatcaccaaaattgacagttaacacattgacatttaatttcgcgacgtaaacaggaaatggaaggttgttttgatagaataaacaaacaaagaagctatgctcttaaggaaagtagcaaaagaattatataacaatcagtaaaaataacatcaacctgttatttggttggaaaaaataaaaatatta

SEQ ID NO: 90856 - DNA, 872 bp, Cannabis sativa
ggatgcactttaaatagaaaaaaccaatgagtccacaaataatcacctctacgatcacaagtcagagcctccacttcactaggagtagatctcattatgggatgagatctttgagcttcacgaaggccgtctttcttcctccccgccataaatatgagataaaaaggctctttgagatgcggagtgatttgatagccaggaatcaacaagatttgcaagagtaaagaagaaagaaatgggggctgcaaaggatctaaatgatgagttgagcaattaatgcagtcacgtggagaagaaaaaacaaaagaaaaaggatttaggggctcaaaaacattaaaaacacatttaatgcattgaacatagttatgatggtaatagattaaggggttggggcaccagaaaccaccacacaactcgagtgggtggaccataaacccatttcaggtaccagaaaggggaacacaagccaaactcttgaacattctagagagatttcgtgcttctctactttttttttttttttttttaggtttgaaatgtctttaaacaatgaatttgaacgtagttttcatctcaaacgaagaaaaatgcatagaagaagcctatagttttaatatctttttgtctaacatagctttaaaattgaaaaagcaaatatctggaaaaaaaaaaaaaagataataatcagtaaaaccatcaaaatgaccgcccactggttgttactagcgcaagccacgagtcaatagaagaaaagtaaaatgtactttatatgagattaacggctgcgattagcgatgaacctaaaaattaatcgtacggccaaaattaaactaagttctctacaaatagttcactctcggaactaacgctac

SEQ ID NO: 90857 - DNA, 510 bp, Cannabis sativa
tttttttttgtttttatctaaagatttcatttaactagatcaacgcggtctcaacaagatcgtttgacaaaacataaaaatctttaaaaaaaaatataaattattacaattcttaacgatactaccaaaaatagattcaaaaccattcaattgtctaaagcttgtactaatatcaaacaattagattgtataacactagccccgggaaaatttcgctataaccacaaaagcaattccttgagagccacaacttcaacaatctatggagaagtacgcttaagccgcaatcacgaaatcccaaccatgacctgacccaattaattctgaacaatcttaccaaaaccataccttccctcctcgccaaacatgcagcatcaatgtttaccttgagtttttcataacctggtttagtctataactcagccccatctacgagataccaaatatcaaacgacaaaaataaacttctttcttgagttttcctctattgatcaagagtgatacgagcca

SEQ ID NO: 90858 - DNA, 609 bp, Cannabis sativa
gggtgtgtactcgtttggtactctgtgctttcaataagagcattgctataaggctggcaccaggcaccaccaagagacggtgtcttgtgattagttaccgatgccctataaaagttattctattaatttatatgggacgagtatcgtaccaatagcgatatgacatgttggaaggtactaggcactactggtgccttttagcatttctctctaataatgctcatctgatacaatgtatcttgaaatcatacatatttaacaacagatcgatcaaattgatacaattttcttgatcaaatttgagttcagataccaaatatggacattttcaaaagtcagagtttatatgagcattattcaaaacatagggtacaaattctttcttttgataaaaacacaaggtaccgagtaaatatgttcaccatatttctttcacactctattttcttgtgtctcactctttctttcctctttcagcaatcgtagcatactttcccaagtcgaaaaatgataagaagaggagtttattgggagcctcttctgatgaccctcaaactcaaactcaaactgtaacacaggtatgccctgtccttttcttgttttttactc

SEQ ID NO: 90859 - DNA, 543 bp, Cannabis sativa
cttcatggtggagacgacgagacttagttagagtgagaaagtgaaagagttagagaaggcttttttgaaatgtaagagtatttttaggaagaaaaaatattaaaagtatatatacctacttctaattggataatggggtgatatattaaaagaccatattttacatttaaacatgttaagttaaatttgtgacattttatttttattttgagttttagtgtgagtatttttatgtttatataataaatattcaaaactcacaactaacaataaagtatttagagttatcaataaaaaagaacacaacagtatttggcatgtaagattaaacgaagttcagaacaaaaaaaaaaaaaaagatttaaaagttggataattaatggcaagagttcaaattcctaatatttttttttttgaaataaattgtatgatgcattaatacatatgttgataaaaagaattgagtgacagcacaccagtgattatatttaggataaatagtggcataagtactcaaagttttgagtttgtaagctgtataaa

SEQ ID NO: 90860 - DNA, 554 bp, Cannabis sativa
tgtgtaattttaaaaggagataaattttttttgggcccctgagctaggtgggccctaggcacaggcctagcccacctatgctcagggccggccctgggtcgaactccgacaacggcgacaactctaacgtctaactttggtgacaactttgatgtctaactacggtgacttttcggtagcgatgacttttcgacgatgatagcaattctgttgaatattctcattctattttctacttttattgtagttaatattttgttttagtggatagtgactattttgtgtagtgggttaatgctcgagtcttggagcttctcagaaatttgtaattggttttaatttgtgtcttgtgttagttttagtttttgtagtgggttggtggtcaagtcttagagcttctaagtaacatgtaaagtttatatatgagttttggtatttgtacttaattttttcgttaaaaaatgagtaatttgcggtgaaaataactaagttttatataaagtagcacttaaatacctaagttttttttttggcggtaaaaataccttctgtta

SEQ ID NO: 90861 - DNA, 576 bp, Cannabis sativa
tccaataccacccgcctaatttattatatatatatatgtgtgtggaagatcttctataaagatatgatatgcagtattttttgtttttgttttccttttatctcttgaaaaaaaaggtttgggttgtagtcagattatactaaactgatccattcatatatatatatacactgcttgtgctacgtgtctataaatgagaagcttgcatgcatttacacgtggggctattctaagagaaggtcttacaggtgttgagtttccactgacccaaggtgtataattcttttaaaatttgtcaacaggtgtaccggagtggatattataaaggaacctctactcgtgctgcatgtgccattctatctctaaattatttatttaaaaattgaataattaatatttttagctttgattattgctattaagcatttgtaaaacgacaattacgtcttactttataattaattagtaaaccttctccgttttgcaacggatatataaaatattttaaattatatataaataataaattatatattttaattaataataaaaacttaataaaattatattaaaatt

SEQ ID NO: 90862 - DNA, 610 bp, Cannabis sativa
tcattggtatggagtacttgacccgaattatgaacaaagtaggatgcaaaagtgattttgcatatcatgagagatgtgaagctttgaaactcactcatcttagcttcacaaatgatgttttactcttttgtagaggtgactttaaaagcataatccacttgctccaaggattacaacccaacaagacaaaatctacaattttttgcagcaatatggtagatcaggatgttgttagagtgctggaggcatctggttttacaaagcagcagacaccctttagataccttggtatccccatatgtactagaaaaatttcaaggcaggagtgtactattttgacagagaaaatgactgctagaattcgatcttcgagcaccagaaatatctctttgctggcagggatgtgcttatcaactcggttctcacagcaatacactcttactggtgccagattctaaagcttcctaaaaaggtgatttatgagattgaagccatttgtagggcttttctttggaaaggccaatatataatgcagggagctggtttattgccaaaaatgcctgtcaaccaaggacaacaggaggttcaggcatcaaaaaaattattgaat

SEQ ID NO: 90863 - DNA, 524 bp, Cannabis sativa
taatgtttgaaaaagagtactgacattccatccggtcccggagccttatgactgttcatagcaaacaaggtactctctatttcatcctgagaggggcagagaatagtcccctcctggtcctgaagggacatcctccccttaaacaaaccactgcaatccaggctctagtcaatgtctgatccctcaaagatactcttgaaaaagtcggtaaattcacggccaatagcatctctatccgtgatccaaacattgttcttgttcaaaatactctcaatggcatttctccttcctcgaattgttgccgtaaggaaaaagaattttgagcatctatcgccttccttaagccaagaaatcctagctcgctgcttccagtaaagctctttccgggtcaacatttcattcagcgatttccgaatttcacattccttcctccactccctggtttcggctgggagtctctgaatactatccagttgcttttcaaggtctttaataacccaatcaatcctaccatactgcgttct

SEQ ID NO: 90864 - DNA, 607 bp, Cannabis sativa
aataattattagtatagtcaaaaaaaaaatatttctaaaatttatagaaataaagaaagagaaatattttaatatagagaatatagatagaaaaaaaaaatgataatgtgtggaaggagaggaagagtaacttgactggtgtaaagtgaaaagataaaatcacattaaagtatatgtgcaaagtaataatattagggacgagataaatttccaattgcatatatataaaaggtaatttcggtatgtgattgttatttcatataataaaaacaaatgagcatatttttggaaataatttgatatttacgttggaatgcgtaattttctacttattttcaaaaataaataaataaataaataagacatatgattcggtgtattacattcctttaagtcatgtgattgttttgtaactcaaaatcatttcaaacacacaaaaaaaaaaggtcaaacatttgaccgtatcaaagaataatgatataatatttttgtccacagtaatatatgtatatatatggtcgcgaatattgtatgtctacatatatacgtgtattttttttttgatagtagatacatacgcgtattttaataaatgataatctatgaa

SEQ ID NO: 90865 - DNA, 542 bp, Cannabis sativa
tttgctttatcagtggaatgttttcactttacttatgacattcaccactctccacacttttgcttaacttgctcgttgtacttgtcaatttgaaattgccaaagcaaacaaaactcttatgactacaagggtcgactacccctaacgatccaagaagagagtgaaagcctaaaggtaattccacatgaaagagcactcataatgatgaggagaatgcccttgaaagttagccctaaaacatgtatagggaaatgagtaaaatatcaaaaataaaaggtcgagtcgattcatggaaccatcatctcccttataaatatcaaaaccaaaaagtcgagtcgattcacagaaccatcatctcccttaatatattacaaggaaaataagaatagaatacgactatgagagggacgcctctctaaaaggagtaccgatcctttagcacccaaaatgcgcactaagtatcacaggtacaatataaggggttgagcactgtctaaaaagctgcaaagtcccccaatatggtcctagatttattaaaaggt

SEQ ID NO: 90866 - DNA, 535 bp, Cannabis sativa
  modified_base (65)..(81): a, c, t, g, unknown or other
agcacccttaaaacgtgtcaccttgcgattggctatcgatattccctaaaagctattatattaannnnnnnnnnnnnnnnnacttaattagaccaatagcgatattgacacgcaagagaatacttagcaccactggtatcttttagcatttctcaattatatattcatctttgcatggcatatgttaaaccctaaataaacaattattacgtacaagctatagtagtaataatttacatgcatatgatgatacctaggtaataatttcaatgagtttagggcttactatattaactactatacattttggctccatatattgtttattatgaaaaaaagactaagaggtcaagttctcaagtatttctaggtcatccatcatcatattttatttttcttatgctattatatataatattaagttgaaattttggatttgtctaactatagaatttcactttttccaatgtttagaaactcttctttatatatttatagtatctaaatgtacatattataatttacaataaatatt

SEQ ID NO: 90867 - DNA, 1090 bp, Cannabis sativa
aactggagaaaaggataatattcagagattacgaatactgaattactgattttttttttaatctgatgtaaatttacaattcaagagctgtgtaaattgttgttgttgttattattgttgttttctctctaattttctgtttggttctcgggaaaaggagagcgagagtctctgattcaatggttatgatgttgagatttttttcacaaaccgcccaaaaaactgcataaaaccgccctctaaaaaaccgcccaacccaaacttttattggccagttatgggttgtgattttaaaaaaccgccaaataaaaaaaaactgccaaaccgcccaaataccgcccaacccaacccatgtccagccctaatgcttacagagaatattgttcacaaaagtgctcttagagtcaagataatgattttaggttcgggtcccctttccttgtgaaaatgtttactatttataggaagtaggaaagtacatttgaacatttaaaatataaaagatacataaaaatccctctttttttaagggagttacaatctgtttgaaatgcctatacttgtgggttgaagagtcaaacccatatttgtgggatgtcgttggggatattcatagagtttgttaatgatgaaatcaaggcctgtgtagtcttgagcgacctttttgggatcatttaccctggccagccagccttgggactgcaccatggttggccagcttgccctccacagtggcctgaccaaccaagaggtgctctgcagggtttcctgtgcacttctacacgtggacaacaactcctgggatgcaaattgggctgtaaaagcccaacagaatggttgaaaagtatctagattcaagggtattttagtcttttgtaattatgtaacaaattatgtaaatacctagggtttcaaattgtaatcaagggtttaggcctcctatataaaggccttaaccctagtttagaaacctaagttgattctaagcctgaaaccttcctccaagctctaagcctaagtctgacaacttttctcttcctcacttcctctctcacacgcctacacaaacatcatctcaacacttgagttt

SEQ ID NO: 90868 - DNA, 985 bp, Cannabis sativa
tcattatgtgaacttttggtgaactttggacttgatttcaaacaagtgaacatgtgaatttttgcatatttgattttattgtgtgtctatatgtttgaacacgtgaaattgaatgtatttagtgtgcctataactttgttttaactgaaatacgcttgaaacgaatttttggcgctctacttgttgattttataggtttttaggcctaaaagagtgtttttcgtcaaactttctcatttttcaatatttttcaattccgtaagtttgtacacctcatattttacatcatcaaactactggaaaaagagtttttcaatttttttttgcataaaactcattttcggtaaggttctagttttcttggcattttttaaaaagcttactgtaaatcgtcgtttttcaacatttttctatttttcttgtttgagcatttttattttatcatatttgaggtattagaaaagatttgagatcaaacatatgcttaaaacctgagttatggccaatttatgcccactgcccatgtgctgagaaaacgacagtccgtttttcccagtacctaagaaaacggactaccgtattctacatgaaccgtgggtatgggccttttggtcattcaaaactagaattttttctcataaaaccattccaaacccttatctaaccccatttctgatttcctaaccctaattggaagcctcctatcctcttctatcaacatttctcctaatccctcttttctcttttcaaaatcctatctctttcaaaattcaattatcttcaatggcttcatcatcaagacaaggaaagaggataagaacttccatgcaacaagaaaagctaaggagcaaggctaggcatgaactcttctcccatggaagatttgcacaaaaatttcaagaggatttctcaaagagggacatactcattggtaaaaaaatgtgatttgaatgtccttaactttgttaattttagcaatcttttt

SEQ ID NO: 90869 - DNA, 1128 bp, Cannabis sativa
aaaaataagcttaatctcacttattacagggcaggtggtgaggataggagcagatatttataatgtcgaccgaggatattattgtcatcctaataaaggtaaggccctcctcagtccgcgtgagggtctcacaatgtggtaagccctcacaatgttctagatgctaattaatagtaaattttctttgtctacattcctttttttggttttttctttttttgagaattaatacggcaacagtaatgttgaggatataatgttgcaagatcataaaggaaagggtaagggcctgacacctcattcacataagggtggagctagatacaagatatgttggatgggcgaagggaagatctttcctttatggacaaatatacacaacaacacaaaaatatctttcctgttctagtaatttacaaaatatcgttttcaccccgtatcactaaatataattatttatatacatataaatgaaaaacatttattatcggcaaaaagacaatttttgcatgcaaaatgacttgtgtgttggatctattgtaattcttttttcctaatgaagaaagtgcattactaaaccaacaaaaatttcacttatttaggaagcataaaaggagtttttacatttggtgtctaaaattacatctaatttatgggaataacatcgtttttagggaatagactttatattacttagagagtgatgaagagaaccataaactaaaaaaaaatcaatactatagattacaaaatttagccctgcacagaaatattataataatgtcttggaatatgaagattattttatttgattgacaaatgaattgtaactcttttctttttaacaataatgattaatttttttttgtaagatatacatttttttttaaatatttttacaagaaaatataaattaatattttatttataaaaatacctttataaggtgtgggttcctttattgaacttttatttatcaaaataccacttacacacactccatccatgtgacctcaaattgcatttgtttttccttttttttacttaatattttcttttagttttcagtttctctttcctttctattttcaatttttcgttcaaaaaattcattcttccccacaatca

SEQ ID NO: 90870 - DNA, 571 bp, Cannabis sativa
tgtccaatggtcattgacaaaacattaatgaagacgttcatttattgtatgaaaagaacacctgcttttgcccatgtgaaaggatccccgatatatggatgtatattcgaatgtcaccgatcaagaatagttcgaaaatgttccatttgagtgtcattccgtaaaagccccccttgtttatcttggttagataagatttcattgaaatctccaatgactaaccctagcagcaatggggaagtgtcttttaaacattctaaaagagcccaagtgtattctaaaagagcccaagtgtgcacgctttcctgagtttctggtgcgccataaaaattagtaaagtgccaacataatccaccattaaaagccatgtaacagtcaaatacatttgcattaaagttgaggagagttacatcaacatcatcatttcgtaacaacataagacctccactaaaacctactctagggacttcaactccgttataaaaatataaaatttggcaaaaacgagaaattacattactactaagttttttttttatgaatcagctgattttcattactccaaatcaca

SEQ ID NO: 90871 - DNA, 568 bp, Cannabis sativa
catagcatacaatttcatcattcacaataaatatttatggaatacataatcgagcattacatgacaactatttgtctaataagacgaactattcttgatgcctcataaaagcatccttaccactcgtcatccacgagctacatatgtcactatcgttgctcgataatacaatcaataagtaagaaacctatctgtagtttcaagcgagtaattactcattcacaataacggtaatgaccgtatctttaccttaatcataatcgagttacaaacgataataatcatttctcacttaacatgcttagcagtacaattggctttcatacctcaatccaatatcaggtgtgcagaccgacctgattggaactacactcaacaatttcagatcctatgtcacgacaacaaaacttggtaacacaatttaatcgaatttcagaataaaaccctaattcataatgggacaaaccctaactccctattggctcaaaaataggctatgcatcacttaaataccctaagctaggttctggaaaacaccttgattcaaaaaccaggttcaagaaaaacc

SEQ ID NO: 90872 - DNA, 609 bp, Cannabis sativa
gtaaatctgattatatgaaatgaggtttatttagggcataaaacccaacaggtgccacccgtggaggtgctcagcccaggggtgagggtacttatgaaattgaaaatgaccatcttaggcgccacctggaggaggcaaactggcggaatgctgaattagtgcgtgatgcagccgcagctagggcggcacagggggataacactcaaaatcaacctaaccctggagtgagaagacctcgtggctcatgaactaggagacaggaaactgctcaggaagaatagcctcgggaaaatgaggttccccctgaaaatccaaatgatcagccaaaacactctcatagaaatgagaatgggaggcaaccagaaaccaatgaacaagaaattcctcgtggaaacgagaaagacctggggacacaacccaaggaacgtaggtcaccgacgaggaatcaccagcgttcttctcgaacccataaagagagggctcgtacaaacccagtgggagaaatacaacaaaccacgcttaggggggaagaatagagcttgaagaagaaagtgtgacctcagggcatttaaggaaccacagtcaatcaactcgaggagtagagagtgc

SEQ ID NO: 90873 - DNA, 562 bp, Cannabis sativa
tcgagcaatatggaaccatgacagatagggcaagttatttagacacgagttgggatttagaaccccttaatccctatgatatattcatgatcacgggttgtagggattttagtggatattatagtccttcttcctcgtcttgtagtgattatggtaaattccctatgtaggaatttatgccccaatctccccttttacttgtttttcaataaatactaacactttatcttgtctcgaagaaatgaattttgagggtcttgtccaaagaaaggggaagaagaggctgaccatctcggaggccccattagatgttgaggtgaagcccctaaagaggtccaaggagactacggctaacaagaagcaagcctcccagaatgttaatctcgaggtccctgaaacagagacccaggatccaatctctcctctggccctcgtaagtaccgatgagcctattcctaaagcgacccaagcttctgcctcctcgagccaagctctcaaaactttgcctgtcgaggctggaaaaactagctaagagtacactgcagagtttggcgcaatatgc

SEQ ID NO: 90874 - DNA, 743 bp, Cannabis sativa
atagattttaaaaaagaaggtaaaaataaaaaatgacaatataaaaaaggtatagaatctaatttcctcgataaaataatagcttgagatcaaggacgaagctacatgtagactgagtggggaggtctccccacctaaaaataggactggtcataaactatttcgagtgtaggtgtaaaaattatatattattttacatttgattatatgtaattaggtaagttttattaaaactttaaagtcttcacgtaatataaaaatatgtaatcgtcttagtgtaattttattttaactttatccttgtttggaataattttatccaatccctcaaaacttaaaaaagtttccaaacattagtttggattatattatccaaccccattttcttatcctttaaataaaacatgactttagcgactgcgactattgtcatactttttttttatatatatatatagcaatgtttgatttcatggaatgaaattagaaggactaaggttggtcattataaagcacagcaaagggaacacattgaaagtgtacatcctcatttttttcgtaatgttagcccatcaagcaggattgtcagctaaataattaaattttcttgaaaaatttacataatatacttagggaaatttcattaattgaccctaataaaatacctcatttcaaaatatataccctccactaatttatacaaattaattccactattaattactcatttgtacccaaaatac

SEQ ID NO: 90875 - DNA, 519 bp, Cannabis sativa
tcctttcttgaggttctgcagcttagtttggaattcaagaatctttgctgagacctgtaaagtaaaatacttttcgagtgtggaccatatttgactggcagattcacaccctaccatgcgagttaggagacttggagtcatagaggacaggagccaagacaccagtagttgatcttgagcctcccaatcaagatactctggattggagatttttctggtgcgatcttcatcagtaaggtattttaatggaggatcggagcccatgatgaagtgttggagtcgattccctctgattgcagctaacacttgttgtttccacaacaagaagttgtgatcatttagcttgatcgatagactgtggttgaaatagactggattcgattcttcagaattctttcttcgagtccgttgcagactttgtgtttgatttgatgattcctgttgaccttgttgtgagttgtctgcagctgcactcttctttccattgccagtaacgacatttgccattaatggcggaaa

SEQ ID NO: 90876 - DNA, 1561 bp, Cannabis sativa
tcaatatacttataaatactattgaacttgcattttgtggattctaatatcttaataattttattttacacatcttatttgaaaactattttcatattcactcatttttatttttaaatctttttattacttgtcttttacttttctacaccgaaatctcatcaaatatttgaaactaggttagaaatttcttgttttgtttaaaaaaatttcttttgatgttagtcaactctcatgggtttgacctcatacttacatgaacattatattccgaaacgattcgtgcacttgcgtgtataaatattaaaacaccctctttctggtacaacagtaatgtcccaaaccccgaagcatacacattttttcagttactattctactagacacataggaatgggtagcaccagaattaaagaacattgtataaggaaagttgttgatagaaagttgacatatcaccactgatgggctagcctctccatcttcttgagtaacaatgaatagacattctgaattttgggttttacttttcttaggttcttctctctctcagcatgaggacaaaatttgatgacgtggcctacctcgccacttataaaagcatgtcgtagcctaacattcacctacttgatgccattaatacatttaggacacttagagtaagtcttgaaaccatcaccacgatcttaatggctgcctttgttacctccgaacctcttattatgcactacagaccccgaagtctcaaactttcttttctgatttgataacccaccacccgcccccttaccaaaactgcacctagagctaggagtttaagccatggcagcatccttagcaacttattttctttacaatctgctgctctgtcacgttagcaataatacctcactctaccatttttttttctgagaaagtgttgtgatctatggtaattttcaagtcttggacaattgtaacatctaatcatgtaatatacttctgtttacaagtgaagtctatcgctaccaagtctccaacgaactttgataaatgatcaaactctgtactcagctactgtcatgtcgaaaaatgcttcctcatgagttgtgcgaaaaacaatgtggcactactacaaaatgggctttttacgtcagtcaatacccaaaattgacacaaaaacatcacataaaacttttacgtcgattcagaactgacgctacttttgcatcaattcaaaactgacatttagattatttgtttcggtttatagcagacgttatgaagaatcagttacaaaccgtcgcaacaaagattaaactaaaaagaaaggaccaagcccatttacaccacaaaaatcctatcatatataataaacttaaactttaattctaaccctaccacaatacacagccgccccatgttctctgtgtgtgtgtgtgccataccacctccgactaaaccctgacgacctaagcccactctgactccacctcgaatcaaccccgacgaccccaagaccctgatggtcactacgtcgattggtccccacagaagcagcctttagcggagtcgctccccc

SEQ ID NO: 90877 - DNA, 1911 bp, Cannabis sativa
  modified_base (1572)..(1572): a, c, t, g, unknown or other
gaaagatagagaaagataatgaatattgaaaaaagcagcccctcactgtaattaattcatggaatggatggaggctttgagatttttgaagatttaatcaattattataatttatgatactaagaagggatataattagttccttagtaactttagcctattaaatgaaaaattaacagagatagaaaaagagtcacttagcgagagagacgaagagagcagtattggagttggagaatatatatatgtatacctaaactatttttatacgtaaattatttttttttatttattaatattaatataataataatataacttatatatatacataaacttaacttaaatagtatacatatataaatttatttatatttttttataaattcagtcagtttcggtttttccggtcggtttgctaccgaaataaaaaccgaccatttaaaggcggttttaaccgttaacggttttttcggttttcggtttaaacagtttcggttttaacggtgtttggtaggtcggtttgaacggtttgaacggttttttggattttttgctcagccctaagtagaacagttatatctaagataattactgcctattcttctaatgtgggacttgagttgataccccaacactaccgtaggtttttcaacctttggaaacaaccttcgaagccacacaaactttgataatctttattcaatccctataaaaccaatacaaagtttgtccaaaaactttacaatcaaaagacagttcttagagctcaaaaacactcagacatctcataatatctctatattttctaataatgggattacattagttaagacaagccttatataggttttggtacaaacactaatcaaccaacttaattgtcttcttatttgagtgttgctagctactaataaagtaccaagtaagttgatcacaacaccacattattaaaactatattattattattattattattattattattagggacatttactgcataactacttaatggatttataataggtagggatttattaaattctttttaacgacaaaactatctaattttgttgtaattttatccaatatatctttctcaacacattttgtttttaaatttgtttgtacatatataagaacacaattaatacccatcgttaatctttattaataaatatgtattaattgtacccttaattaaatgtgtgcgaaaaaactcaaaaatatgaaatgaacggatgaaattgaacaaaattaaataaaattacacttttagtaatattagatagttttgtcactaaaaaaattaaaaaaaaaaaaaattacatgttacaaactagttatgtctcaaatctctcttctttttttcttattattattattattattattattatgagtaatttatagtataaatacttaagtttaattttctgttgtagataaatacttaaattttatttttgaagttaattatacctaagttatatttctaaaactaagtgtcaagtcaatgccatgtggtagttcctaattggtttaggtcattaaatttttatttttntttaaaaattaatttaaatatacctaaaaaataacacgtggataatgactttacactacgtttagatacctacaaaagttttaaaaatataaattaaatattattaccataaaaattaaatttagttatttatttataagtgagagttaaacttatttgtttatttcataaattactctactattattaaatatttttattgttattgacctagagaagggctatttttgtaaaaacaatgattggtaagaacatgtggaaactagtgaagattttgagtggtgcagttgttatccaatagattaaaattaaaataaagaatatattatcttatttact

SEQ ID NO: 90878 - DNA, 991 bp, Cannabis sativa
aattttatatcaatacctaataaccaaatttctaacttcatcctttattttggcgtttaatttttttttttgcttgctaaaaaactagagaataaagagacaaaataacaaagagaatcagaaattaaaatcaaagagaaaaaaagaaaaaaaataaagagacaaaaattgaaacttaaaactcaattatgaataacaataaaaaaccagttatgaaaactagttacttaaaaaaataagttataaaaataataaaataatatgtgtgtcagaaactaattatttaaaatgaaacaaaaatgattgttcaaatatcatacaataataaaacttattaaaaaaacttacaaaaactaaaataatagtaatataattttgttaaggtaacaagttaagaaaataatttcttccatataattaaaactattttctcaatgaaaaatttagctatatacaattaccaaaactcataaatttcacatgtttcttataagctcaaaaacttgatcatcaacccattacaaaaattaataccaacataatactaatattaaaaccagttacaaacttcttagaaactttaatactagaccatcaacccactactaaaacattcattatccactaaagcataatattagccacaaaagaagtaaaaaatagaatgagagtatattcgctagagttgttatcttgatgaaaaaaaccagttacgaacactaaaattataaataaattttacatacttatattctagatactctatgaaatcttgaacaaatcaaatacaatacaaaaataaaactagttacaaacttctcaaaagttccgagacttaaccatcaacccactacactacccaaaacaatcattatatatccactaaaataaaatattagctggcaaaagagtagaaaatggaatgagaatattcgccgaagttattattatcgttgaaaaaacctccaaaaaagtcgtcagagttgtcttc

SEQ ID NO: 90879 - DNA, 681 bp, Cannabis sativa
tgttgtgtgaaatttttatgtaaattattgttttaatattagtcgagatattagtattcttgttataagtatgatcatgatgaaatggagaatatataactggcattattaattaactgaatgccattatatatataatatatatatctttctggttgatgtagttgttgcaatttcgatttggattgggtttttacatcattagaaagagtttcctggaatttttcctcccaaaaaaaaaatacatttctctatgatgatgatgatatatatgtataatataggtgatcatgtgttaaatatatatatggcacgtacgtaatcatttgaagcaatggcgtgatctaactcagatcgatctatcatgaaatgatgatcacctcatacagttatatacatttgtatatatttatttatacatatattgatagaagatcatgttcgttctgcgtacgtgtagctactaattaagatgtgttaattagagtacttttataaataacttctgtttttcttttttgtttttataagctaatatatatatatatatatcttacttcttattagctacacaatattattgtaagtagaataatcagaaattttgcaaattttctttccttttaattatatcctgatattaatgatgaatatcattctcacttacatatcagttttagt

SEQ ID NO: 90880 - DNA, 603 bp, Cannabis sativa
tgtgttaagttttcactgttgttctactggtgttttttagttgttctaatgttgttttgagttgttctgctttgtattccactggtattttataaaaacacagtatttttaaaaagatttctgtgtgacagtatttttgtaaaaattaacctaaattccagtatttttgtaaatttctctaaattttatggtattaaaaagtagtagtattcgtattatgttactttttattattgtctttattatttctatatattaaaaattaacagttttttttcttcatattaattagggtaaatggataaaataatatgttatttcattgagtgttgaactagcaaacttaaattccaaattttaaaaataaaataaaatgaaaaaaaaaaaagttgagattagtgacaaaacatcataggcgtcatgtagaatattgaaagccatgggtgtggaagaattaggcaattaccaatcttttcaataaaaaaggatagaaaagaatttaattgtcacaggaggataaaaaaatgaaggagaaaatcatagtctaaacaaagtactacaacacggataaaaatagacgttctcaacttcacaagtcatcac

SEQ ID NO: 90881 - DNA, 707 bp, Cannabis sativa
atatatgcatgtaaatgtaatgcatgtattatgtttataaatagtgcctaacagaagtactacgtacccaaatcacaaaccaaaacaattaaaaagattttcttatatatatttttatacgtaatggcgactgaaattaggcttcctattattgatttttcagttgaacaggtgcttaaaccgggtacacccgagtggaacacgataaggacccaagtccgcaaagcactggaagaatttggttgtttcgaggcaaagtttgataaaattccaatagctattcgaaaggccttatttgaggcagtagaagaacttttcgatcttcctttacaaaccaaacaacgaaacatttcaaagaaactgtttcatggctatgtgggtcaatacccacctctgcctttgtatgaaagcattggaattgaagatgccaatattcctgaaaatgttgaaattttcactactactttatggcccaataatggaaacccaactttttggtacgtacgtacgtaaattatttttattaattttactaataataatcatgtattgattaattaatgtacaatacaatgtggatgcagtgaaaccattcaatcttattgtgaccaattatctgagttggatggaataataagaaggatgattttggagagtttgggagttgagaaatacttggaggaacacatggactccaccaactacct

SEQ ID NO: 90882 - DNA, 1179 bp, Cannabis sativa
ttttccaattttttattcttcgtctctaagtctataaattttaagatagacatgacttcatttagggtaatataagttcttccatatttgattgttgtctttactttcttgtagaattctagtaatgagttgagaatgatgattgcgtggttttaatcactcaatgcttcacgttctttggaattagccaactctatatgcattctcattaattcatctaaaatgtgttcaagactcttagatttgttcatcttgtagccaaatgtcatttccttaagaaagattttatttgttagtgaattttgttgaaattgctctttcaacttcttccatatctttactggagtttcttccttatcaaccaacctaatgattgcattcacttatgttgaatatgataattcatgtagctgtttcaagatactcttctggttaatttgaatttatatgcatacatttagtgtatattaaatttttgaacacaagcttactaaaattaaaaaaaaaatgcacactttatattcatactcataatatccttctctcttctcttctcttctcttttaacttcatcatctatactctccattcccatctacactgatggtggttcgatgggagtccgatggtccgatggtggcccggtggtagcttgatggcttgatgctacgatgctacctattttttttttttaatttttttatgtttttgtacataaaaaaaggtagcatcaggccatcatcggaccatattctacatttatagatgttaagcttcattcattaagctcgtcaggaaggcatcggaccaccatcgacccaccttcggactaccatcagacattcgtcttcaacctttacttattttaacaacaagaaggcatcaaaccaccatcgggtctggtaaagaaaccagttttttgcccaaaacttagatctggccattttcggccctaaatctattctcacatataataaatattaatcatataatttatttctttgataatattgtcgatggtgaagccgtggttgagggagaagtcgttaggtctgtaggttgctcggtccgcggtggtcattggatccgtgggtcgttgggtctgtggtcgtggtggttgtggagagaagggaccaaggttgtgggtggtgggttgtgggtcaagtccttggggtaagt

SEQ ID NO: 90883 - DNA, 724 bp, Cannabis sativa
atcgatagggatttagagattacaaactttcctttcatagaaatgtgaaattaacttttctttatataaggggttcatgaaacttattctttgtcatctccatgtgaaaaagaaaactgctaagatttccttcttaaaataatttcagtagcaaagtgaaaaatggtctttgaggagtaaaatttaagcatatgatgcctcaaatttacaaccggctgctgcaattagagaaaggtttcaattcattaaattaaaagagaccataataacgttatatggagaagacgaaaagcaaaagaccatttagcaacgaaattttattttatgcagcaaataatagttgttgtactgctagcaaggtaacccaactataatttgtttttggaaacacttttgcaaaacaaagtgttttacatctggggatggatgagccgtaacaagtaattaaggacaagcaaatatcttcaagatttataattgaaaaagagcattatttaaatcaaggactagagttatccatggagttgtagataatttaaattaattggttagttttttacttgattatgttgatcggattaagaaaagaattgtcccaatgctacaacaacgcatagattcctgtatactgtagaacaagacaaacacataaaacacgaccatcgattgtgataaaaaaatagacccaaatatatgtgggaccaagcatagataaaaaaaaaaa

SEQ ID NO: 90884 - DNA, 755 bp, Cannabis sativa
aaaatatactaaacttaatctaaaattaaaactaaaaataacctaacactaagctagccttagtggcttcaccacttaatcttaattacactaagatattagtatagagcatagctataacagtagtgtctaatactttttaaaagtggtatcttaaaattagatagtaatattttataataattattaaattaaattatacataacttaatatttaattttacaaataaaaaaagagaaatattaaaaggtactagtagtgactaagcaaaagccccctgaaaaaaaatcaaaaaaatgtatatatatgtattttagttagttacaatatatatatatatatatatttatcataaaaaatgatatatagagacataatactaattgggatttggtgtaatgactaagttagaatcaatggttcaaatcccactaaaattactttatttttctttttaaatttatttttgctcttgccttacaaaaaaaaattatgtcctgacacatctaaaaaatattaagtacaaatggtactcaatatcaatacttaaaaagagtattgttattaaatactactagtgtctaacatcttcgtgttatcttataattggttagtaatatttttaaagttatgaaacaaaaaaattaattaaactgtagaaatatatatagatgttgtcttcacattgtattagttgcatttgtactgtttctggttttttactgtagtgacagttaagttagttatcccaact

SEQ ID NO: 90885 - DNA, 823 bp, Cannabis sativa
tagtgtgtgtagaaatatttagttagattattgtttggaaacttataactgtttttagttatgcataaaaaaaaatatgattatcttgtttggttgaacacatgaatttaataaattgggatttttacaaaaataatagatttttgataaaagcttacaattttgctgtcatatgattttttttacaaaaatactgtcttttataaaacaaccgcaaaacaacaaaacagaataattaaaacaacagtaaaacaactaaaaataaccgtgaaacattagtgaaaacttaacacattacacattataaaacttacacagtttttttgaaaaaaaattcgccctacaataaaaaaagtataaaaattaaaaatttcaatatgtagtataaaaacaccacaaatctatagtattaagattaaaggtaatatttggaagtcacattttttttttaaagaatataagattacccataagaggttaatcttattttttcatagtaataatattcttatcctttaaatagaaaaatctcatactagatgggaatataaaatagaagttttttcatttttatatttcaaaatagtttttttttttttttatttatttttttatttttacggaattttacatagaaacctttattgcaactagcgctgcaacctaaatcgcaataaaaaatcgtatagaaacccctattgcaactagcgctgcaacaacttaatttataaacccaaaccgtaaattaaaaaaaataaaaaacaatatataaagtaattcccgtataaaatattactaatcctgtttaaaacatcaattcata

SEQ ID NO: 90886 - DNA, 633 bp, Cannabis sativa
  modified_base (178)..(185): a, c, t, g, unknown or other
cttttttatttttctacttcaaaacaatttttttttttttttttttgtattttaacggaattctacatagaaaccctcaactagtgctgcaacttaaattgtaacaaaagattgtacagaaacttctattgtaactagcgttacaaccattttagaaactcaaatcgtaaatttaaannnnnnnnaaaaacagtatataaagtaattctccatagtaaaaaaatagaggctaatatatgtattttaaattttgtgttatgtttatatgaagctctaatttgttgctggtggtataaacaacaaattcaaacttttttttttttcacaagaacaacaacaaatttaaactttgggttggaagacattgccaaaagacaaaagaagaaaaaaacattgacacgtttcataatttgaatggttgttgaccaaagattggtgtcttttattcggaaattaaacacgtggctataaacccaccgacactcattctctggctggacacttcagtggactggctcatatttattcaccttaaattcaaattatcatacattttctatttctattaacaacccaacaaatgattactgtaatgaacatgttttttttttttttaaagaagtattctatata

SEQ ID NO: 90887 - DNA, 569 bp, Cannabis sativa
gattttcgttaaccaaattaaataacctttttgcaataaatatactacaaaaataaatatataattaataaacaccagatattttacttagttttgtagttaaagtctacatacttcacgagttcttattattaaggatatgttttgagtacatgatacaatatcaatatttaaataacaatattttctctctcaaatttgtcgtctcttttttctatggattctgctcctatttataggaatatacgttggcagttattctttttggggattggttcattcataactgtttatgaaatgtggataatccccacatttcatttaatcacacatgggataatatttaataactacccaactctctttatttttatcctctagacggttattgctgacttggaaagttgtgtctcatcatatatgagttctcttcttatccatattagtaggaaaatatcgctaagtgttggaaaataatgctgtattcctttattggtattagcaatgcaaggtgatcttctcgctatgtgtaacgcgaggcgattttatgttgctacatttaatctgct

SEQ ID NO: 90888 - DNA, 761 bp, Cannabis sativa
cttacgtccttcttcatgggagcaggttttttgtatgggaccatagattgagttgttgcgtagattgtctctaggtcatcagtcaaaacagagaagatagtaaacttggaagtattttctctagggttgtgttcggcattgcctgtgaactttcccttttttctgttgccttgcctaccactgttgtttgacctcttctcgctcggatttgagctgctaggatattgtggactctaagcaggtctctttgccgaggggatatgtggctggcctggcttatgttcgacggcgtccactcgccgaatagcctcctcgagctcaataaacccatctgcttggcccagaaattctgtcatacaccccacggggccacatcttttgatgtccttctccgagtggctcaatgccccccaatatggcagccattcttccatcctcagttaaccttgcaacctttatagcctctgtcataaatctacttatgtagactctgaggagttctcctggtatttgttttacctcgaccaaatcttctaggtgcgaggggagttgacgagaagaggagaactgtgcgtggaattagggctgagcatcggtcggtttggttagtttttttctatataaaaatccaaaattcaatgttctgtatggattagttcaattcaaaaaccaaccgaccaatccaaaacctatcttaaaaccgactgttttgaacctcagtttggtcggtttaaactgcccaaaccaaactttaaaaaaaa

SEQ ID NO: 90889 - DNA, 617 bp, Cannabis sativa
tttacttttggatgaggtgggtaagataaaaatggctaagtaaatgaatagagtagtcaatcatataaaagaaagaaatgaatagagtactctgtggtccagcgccaactaactactagtctagtatgaattaatttgaaatattgaagagatggaggaattaaggagtgagtgagttgtagatttccttctttaaagtgtacactgcccaaaagcagggtgcaaaaccagggatcggtcattttttataaacctctacaatatttccggtggacgtctttacccaaaactatacccattccaatcttttattaaatctctctactgaggttcttacaattatatgtccaccctttttcataaatttctttctcttttcgtttaaataacagaaaggattgatttgcaatagaaaataaaaagtattttaattaataaataatgaagaattgtaagataaaaaatgggtgaaagaaatcaactttcgtttttgagcggaaacaaaaaaaaaatatatacatatatattaagtatcagtaaaaaatactaatttgcattttattaaccaaattaaaatcgaaacgtattacgaaccccacaatagattatttttcttt

SEQ ID NO: 90890 - DNA, 1210 bp, Cannabis sativa
ttgtcacatatttgcccatttatagcaaaaaggcaaaaaaacgattgccatttatttctaataatcattttgccaaaaatatatttgatttggttcacatggacatttggggtcctttccatataactactatagaaggctataaatatttccttactatagttgatgacaagtcaagatttacttggatttacatgctcaagaacaaatcggatgttcaacaaataattccaaattttttcaatatgatttgtactcaattctctttgtctattaaagcaattcgctcggacaatgcaaaagaattgaacctacaatctttttttgcctcaaagggcattattaattaccactcttgtgtggaaagaccacaacaaaactccgttgtggaacgaaaacacaaacacatactaaacatagcccgagcactagaatttcaatccaatttacccttggtttattggtcatacctagtccaaatggctacatacctaatgaatagaacaccctccaaattattcaaaggtttaacttcgtaccaaattcttcatggtacaccccctaaatatgaccacctaagacgttttgggtgcctagcttatggctccacccttccttccaaaagacataaattcacacctaggagtagggcttctatcttcattggttaccctcatggcatgaaagcctatactttactagatattgaaaccaaacaaatttatgtttcgcgagacgttgtcttccatgaaatgatttttcctttggtttcatcaatatccacatctgaaatacacaagttgttccctgatgttgtactcccaatttttaaatctatacaacaacaagcatgtccaagtacatatatccaaaactcaacttgtccatctggtttaaaaccagcaataacatgccccaaaccagcaaccgaatgcacatcttcacctggtttcaaaccagcaacaacatgtcccaaaccaacaaccgaatgcacatattcatctggtttcaaaccagcaataacatgcacaaaaccatctggtgtaacaccagatactattgaccctatgccacaatcccaaccattgaaatgtggcttcgacaatttggtttccacaccagaaaaccatcaactcaacaattcagcaactggtaacatcaacacaccagcatccattaccaatagaaaacctcaacaccttccacaaac

SEQ ID NO: 90891 - DNA, 720 bp, Cannabis sativa
ttagtgttatttgtgttattttagttattttagcatattttagcatggagttagcatggaggggcatggaggggcaaattgatcattttgtcctcattttgtcccaattttgtcccatttttgtcccattgttattttgtcctttagtggacttaattattggaattatatgtgttttatattgtaattgttggctgaagtaaaaaggggttaagttacttttatttcattttaccaaagatttaaagaaaaggaaaaattcacaatcactctttctctctcaagctctctctctttcggccacccttagagcagctagggcttttgatttttctctctcaatcctttgtttccaacagctctttgtgtaatccaagccaaggtttaatctctaacaactttctttgtattttcttgagttataagaaaagtatgatagttgcatgcttgttaaatttgatgttgttgctgctgtgtttatgtgatattttctgaggtttaatcttgttattttaagtagattagagctagtttaatgcatgatttttgctttgattcaagattggaagtttttagctcaaaactatggttttcaaagaaatatattgaatccgttgctctacttgctgtagttgtttgctgctattttcagaggttaaattatgcatgattaagtagatttgggctgaattaaacgcatgttagtggtgtttgatcaag

SEQ ID NO: 90892 - DNA, 1205 bp, Cannabis sativa
aggatgttaatgaaacatacttgctagtaaatctagatcctgttaaaataattccaacagaatgtcctttttaaggcattaacaaagtaaactagtatcagatgtattggttatacaccatattggaccgatattgatagtggaaaagacatcataaacttactgttatgccttttttaagtcaatgtcacttagttgatcttaggtcaattgattttaatcctaagatggttaagttctagcctaattttactatataggttctttgacttgtttgttacaaattaccaataggattttctcaatacttgggaactcggcagtttaattgagtagaagcgttaatcatagatatagaatatatagcttctattagaagtaaaatgatggtttccttagagattgacttaatgggataaataatagagtgcttattttatattagtttactaaaatatcatttacaagtagttaagtattttaaggatataatacattgaagggtaaaacagtaaatttatccttattcaatataaaatttctatagaggatcattgactctttagattataaaaaaatggataattcataaggtatctatatttggtatatatatcattctatgtaatcatgagtgcaattctaaatagtggagtcagaaagaattaataagatagaaaatttacttggtaacttttggatctacttattaggagcttggttacataggctcatggtccttacactaactgagataatattattttgtagtctcaattaattaatttatttaatcaattaagattctaagtaagactatgtcttgcttgtgaattttactaagaaatgacatatttgagaagaaaagagaattcacggtttgtttattaattaagagatcgtggatgatctaattaataaatatatttaaatagaaattttttttactaaataattataattattaaatagataaagttaatatttaagtaattagaatagataaatgatattttttaagataggaaaaattatctcacttttagaagcaaaagtgtcaaaattcaaatccatgggccttaacattgagttaggccgaaggggtgaatttaaataaaattttagggaaatttacaaaaatactgtttttggaccaaaactttacaaatatactgggacacggcaaaaacaacatttttactgcc

SEQ ID NO: 90893 - DNA, 1247 bp, Cannabis sativa
catcgtgtcacgaactggaatgcctaggagcgtagctatttcttgcttgatcgcttgggttgtgtttggggagaagtataaggccgatttagtgaagttaaccatttgtccagatgcatggctgtagtgacggagaattctttggatagtagtcgcggcttgaaccgaagctgagctgaaaaggaggctatcatcggcgaaaaaaagatgggagatggttggggctcgccgtgcaattttaatgccaagggaatgactctgaggttgccgttgctgggttttgtaattgatgagcgaagaaagaccctcggagcatagaagaaataaatatggcgaaagggggtccccttgacgaatgcctctggtaggcttgactgttcccattacttgttgattaagggaaaaagaaaaggtagcagaggaaacacaagccataatgaggtcaataaaatgctttggaaataaaaaatgttccataattttgcgaataaagacccattcaaccctgtcgaaggctttggccatatcaagctttaaggccatccaacccaatttacccgatttacgatgagtgagagaatgcatgatctcctgaccgatgataatgttgtcacagattaaacgggagggaagaaaagcgctttgtgatggagaaatgatacagctgaggatgggtttaaggcgattaactaaaacactcgaaatgattttgtagaaagtggaacaaagactgatgggtcgatagtcagtgacctgttcaggatttggccgcttgggaatgagaacaatgagcgtttggttgacggtcgataaatctgcatccccatttagaaagttgagagcagcagctgtaacttcttgacccaacagatgccaattcttttggaaaaaactgccattaaaaccatctaagcctggggccttgtcatgagcgagttggaatgtagcagttttaatttcagtggctgtaaaggtggcctgaagaaggtcaatttcagccggagtaaggcgctcagtgatgcctgaaagaacaaattcaatgacgtcattgtcaggtaattggctttgaaacaagttggtgaaatattgctcaatagttgtcaaaatggagtgtgtatcatgagcccaggtaccatccaatcgctggagggaaagaattttattggtagatcgtctcgtggaggccatacgatggaagtatctggtatttttatcaccaagttggagccaagtaactcgagagcgtt

SEQ ID NO: 90894 - DNA, 630 bp, Cannabis sativa
caagtattccttgtgtgttcttcctctctgttctctcttatttctcaatcttcatggtatcagagccacaaacctctgtcaatggcttcttcttgcaacaattcgtccccatctggtgtatctgatcctggtgctcctccgcctgctacaacaatgtaatcttggaatacattctctcactctctgacttcttctcttacgatcaagcttgattgcacaaacttcctagcttggaaatttcaagtgcttccaacggtgattagccacgatcttgatgaaattcttcttactgatctgtcttcattgtgacttctagtcaacggtgctccaaatcctgcttatcaagcaagaaagatcagctcctttcttagctcaaatcttcaatagaaggtattcttggtattgtggcatgttataccagctcaaatgttgtctggaaagcgttggaacaaaagttctcaagtcaatcgaaggctgaatttttgcagctcaagaatcaattatccaatttgcataaaggtaatcaatggatctctgactatgttgacaagattaaagtcctttgtgattattttgctattgatggtcatcaaatttcttatattaatctggttcttcatctgttaaatg

SEQ ID NO: 90895 - DNA, 762 bp, Cannabis sativa
  modified_base (62)..(78): a, c, t, g, unknown or other
catgtgaaccatgcaacatataattatttctgatcttcattaattagtaaatctgattatannnnnnnnnnnnnnnnntagggcacaaaacccaacagttaagtgttcttaaagttctttggatgaaatgtatgtggattattgatgatttgaggtgaaatcttggtgcattttgtgtgtttaagcttatgggagcatgtagattgtatttagcatgttttgaaggattttagggttgagaatggtttcttgaattctgtgttttgactttgatttttttgggcttttcttattggtttacatgctttgtgttcaagcatgtgaattgggaagttatgttgattttgtgacaagcttttgtgtgagagctttaaattgatatttttagctttgtttggcttggaaattgatgtttatattggttataggttgtactagctttgaatttgagtttatgcatgttttggttgagttaattttgaattttaggtttaaaattcgaagttatgaaaatggcagatctttgggttacagggcccctcgccacagcgacgactgggctcgccgcagcgaggacctatttcccttaggaatttttgggtttttattttcaccataacttttaactcgggactctatttgtgaagttccttatatcgttagaaggcttgttccaagctctatatgctgatctgtaaatgaaatgccaattatgtgattatttgaaatagaattttgggattaacccaatttatgaatttc

SEQ ID NO: 90896 - DNA, 530 bp, Cannabis sativa
taatatttaacatatttaatatacaaaataatataccttaaaaccaaaaaacccaaaaactaatatttactccatttcaccacactaaacacaacccaaatatggtggtccaaggaagaagagtagctcaccacaaccagagctattttcatcaggatgaaaaaattagatatggaagggttcgctttttcttaagttttctttgctgaaacttcttagaaaatcatacccatttatatgttcttatatgtatccatactacctgattatacatatatacccgattaattgaaagtatttttttcatattataaagtaatatcagttatagtagttatacccatttatggtcttgaaaaaagttgataaattcacacaaatactaaaatagaatcaccacatatatgtatagtttagtgttattaccatttcaatctaatctaagaaaaaaaaaaaaaaaattaagctactactccaatctaaaaaaaatctataacaaaacttttaaagtttatgtttttaccttatta

SEQ ID NO: 90897 - DNA, 615 bp, Cannabis sativa
taagaataaccctggtgtcctcctttgccttgaaaccctcggaaccgcttgttctgtcttaaacccaccactgatgacgtaggtttcctcttccgctcaatgatggagctcctacaacttccaccatattcttgattcaggcaggtaatattctaaccctctaccataatctcctgaggtctcataataatttcctcagcgctttcagcccaagaaacattcttcatatttgaacctccctgaaagtctgaagattcatggatccaaatctttccatgcaattgttccacttgattaccagccattccatgcttcgctggtaataccgaatcaaaaatgattggcatatgtggtaaagatgccacaggagacctttgtagtttcaacctctgaatctcttcttcatgtcgttgaatcacagcttccatttttccaaacctttgctccaaatccaacagaccctgtgacggataattatcacccccgtcggaagccatccaagggctttcaccttggttttggggacaacttggactccattctctccaaccgttactagccctggccactttactctgactctccatattgcacaaggtgtccattctataagac

SEQ ID NO: 90898 - DNA, 1722 bp, Cannabis sativa
agtcagaaccaactctaacatcacagttgatcttgatccagtcttcaggaggaggaacccaaacaggagacccaactaccttcaaatgattaagtaaactcgagccataatcacacaagtggcatccacttttaattcggatatgaaaatgaagtcaggattgaacgaccgaatcagggctttcagttcaagaactatagaggtctgccctaaccctctacagttacaagcgacacctttcacggctcctgtggaggagggacaccggcctcctccacaggggtcaaagacaccaccgccacaccaactgctgaactagcaatcttcaatttgtatgcccacattgcgtggaatagagagatccatcagccgggccttcatcttccaagtcgtgagtctctcagactgacccaccgagactagttcaactcctttacaagagggagaaacgccaatcttagcgcatccactttgatcaatttcgtcactctccagtggttcctcagtagattcatgagaggcatgatcacacaaattattatccacccgccccagtggtcccgtaccccgaggataatccctgaccacccttttaactctacgcatagataccaacggggtgactcccactgagtttttttttcttgtataatatatatatacggtcatttacggatttttgtccagaattttgacatttatatataatatatatacggttatttacgaatttttgtccagaattttgacatctaataatatatatcccaactttacataccattaaaaatttctcggattaagatagtgaatcaagatgtcctcttaaaaagttgtgtgttgtgttaaaccaatctaagtttgacacgtcaactaattttttatttattaataaattaaccattaatatatataattttttttccttaaaatactcaaattaattgctgtgtcacaataaaattggtttaatatactataaaacacaaccttttaacagaatattctaagatagttggattgaagagtttctgtataatttaagtgaaaattacatgagattttataaaaaaagttataaaaatatagtatttttaggtttgctatttctttatggcatttttttacatttaaatttttttatagtatttgatatgctatatttttataaactaatatccaaacacatatttgatgtttttgtttctagtttaattagttttattttttttttctttagtttattttatatttacattttagggtttttttttcaaacattatatttataatttgataataaaatttttatatttatactttcttaatttttttttctttttttactgttttttacttattaaagcttcaaaaaatttttttgtctttttatatatatttgagtcaattttgactctttttttctttttattatttaagtcagatacttacttttttttttctttctttctcttctcttatttttcttcttttatttttttttctaatttctctttgtgtccctttttttttctcaaactaattttttttatctttgtatatatacaataagtgtacatttttatatcttattttttttaacagtctttttcactcttacaaaaaaattaagagcactcctcctataatatttttctatcttttacgtaattaataaaaatagtatatttttttggatgttttgtagtttatttagagtta

SEQ ID NO: 90899 - DNA, 1025 bp, Cannabis sativa
ttatcgagtcaaggataagagctataggagactgcattggtggtgcttgaaggacttgtggtatcgaccaaaggcgaggatgttgtgttagatacgttgcccctggtgaatttagttgttatccaccagagcgacttatctgcgaggaatgcaggggctagtggtgaaaccagtggcgaggccagtattagtagctcgattgggataggtgcttggagcctcgagcatatcaaggctggagcaactctccccctgagagagtactttaaagagttcatcaaccatcttggaattgctcctttccaattggttctaatttcctacaaatccttacaagtctaaatgctatgtatagcattttaggatgggagtgtcccacaccccaaaacattgtttatctttattctgttaaggtagttcctgcaaggaaacgttgtgcaggaggtttctactatcttgtgactcacacaaacaatcgcaggatcattgtaagattaccaaacaagattgcttttaaggaagatttcttctggacaagtggcctttccccaatcaacacaaccacatttcgcataatacgtaagtaaatttttatctaaaacttggttttgaattactccatgtttataatcttggcctcactgatttatcttatttaaactgttgatagtggtctcaaaaagaccaactctaactcctgagatggccgagcggcgtaaacttttgttcggtcttccattccgactgtgatcggccaaatttcttctaaacgaggccaatttgagttctgttggccttctcacttcaaacaagtatacttgtgattacaagtttcccaagtatacatggtgggagaaggtgccaattctagctgatgaggagagtcaagattatgtggctcaggtgcattatctccacaatgtagcccctcgggaagctgaagaaggggcatcccgatcgtaatcaatgtggatggtctcccactgttcttagggcaagacgcactttgtgttgggttttatgcc

SEQ ID NO: 90900 - DNA, 521 bp, Cannabis sativa
tgtttatatttatgagtattttttgtgttttttttttcatttggttgattgatgaaactggtttcaattattttcattgtatatcatttttgttttgtaatcataatttttattattgttgtgtaacgaaactagttcctcgatgaagaatccactttcttggtgaagaaccactttgtaggtgattttttcggtgattttgctggcgacattaacgagtctgacgactttttcgatgctggcaataactctggcgacttttctgacaccggtagctactacggtgacttttccagtaccgatagtaagctctggaatattcgtcagaattggtattgtcgccggtaaaataccagaaaaatcaccaagaaaccaatttcttgaggaaaaaattgatttcttgatgaagaaaccagtttcttggttatttttcttgtgatttttttttacgacaatactaatactgacgactttttcggcgtcggtggcaactccggcgattttttcggcaccggcagcaa

SEQ ID NO: 90901 - DNA, 543 bp, Cannabis sativa
gacatgtattaaattatacctcataaaattttttggtcgttaaattttttccaaactattgagacatggatgaaaatttattaaggaagtacatatatattaaagttctcaagggacacaatttaaaacttatcaaagttcgaggaacacgatttagtacaaagacatttgtcacgtaagtaaaattgaataaaaattgataaatgtacgtctttaaatttaataatctcaaatatacaaaaagaatttttaaccgttcaaaaatttagagacaaaaatcctaactaacctaaattaatcatatatatatatacatccaagtaatttataatattttaggttttctataaacatgtacattcatgcactcataatttattactaattaaaacctatatatatatatataatatttatataaatatgcaggaatggccactaaagagtaaacttgatccagagatctatggaccagctgaatcagcaatcactgcagaattgattgagagggagatcaaaggattcatgactattgatgaggta

SEQ ID NO: 90902 - DNA, 680 bp, Cannabis sativa
  modified_base (468)..(473): a, c, t, g, unknown or other
  modified_base (654)..(655): a, c, t, g, unknown or other
aagcctatattacataaaattagcttctagatgtcaagtggctacccctgcttggctagtaaagcagaggccactatttaagaacagtgggagaccatgcccaaaagggtcgtgggtgctagcactttttctactctaatgttgagtagatagaaccgttaatttagagtagagttatgtaaggtggttactgatagtatttgcaaaggtgctctccattccagtatcttggtaggagaatgagctccatgttctcgttgtaccttcccagcttgtaggctcccttactatttatctttgtaagttgttaagggccttcccagttaggtccaaacactcttgctgctgagtttttagttcaggaacactcttcgtagcaccatgtctcttatgaataattttttgctcttaacatgtttgttgaagtgccttgctaccttttactagtaggcctgcaactttaggttnnnnnngttttcttctttcttctacttcgtccagggactctgccagtagggtgctatttgtttatttattggtcataggttgttcttttgtgagacggtggcactagctctacagacaacattgcctcgtatccataagctagaacgaatggagttttacctagttgttgttgttgggttttatgcnntaaataaaactctgtttcaatgtaa

SEQ ID NO: 90903 - DNA, 578 bp, Cannabis sativa
gagagagagagagagaggggtaatttaggaagaggggtaatttaggaatatagcaattattgacctatcttacccatattaagtatttaagatttaggggaaaaatttcagcttaatgtaaacataagaaatcaaaatttcctattaaaaatatgtttgaaaagttaaataattaaaatattggaaattttacatagaatactcattaaaaaaagatatattattacatttgtactataacacaattttttttacattattataattttttttactcttttgttactatacctaacaaccacacctttttttttatgtaatagtcgtttatgatcttttgatttatgtgcacatatatttttatagtttaaatttgataattttttttattgtatgtgtgttgctttgtagatataaatatatgtatttagtttattttcttgaacatttttttttaaaaaaaatacgtacaatgataacttttttcattttttctaaatgacataatgtgcactagtaaatattgacgtatattaaaattatacttttatctagttaatttttttttaattatatat

SEQ ID NO: 90904 - DNA, 872 bp, Cannabis sativa
tagtatccttgtcgaattattttctttgacaagctttgccaacctgcatggtctccacaaaagccttcatggatttctttgataatattgtttgcttttgtggggagaacacaccgtaggagaggcattgaatagccccttctatacaatttgccttctattatcatgttgcgaggcaccgaatacaaaagttttgatgcctcatttttttcagctgaaagttgcctgttgagaagataattgactatgggtgtcatccaagtaggtgagttgtctatcataccttttcacatatacttggctcatcttacacttccaccggtaccaagttcaattcatcaaggttgttctatgaggccaatttcgccagggcgtcggcattagagttttgttctgttggactttgttcgattttaaaatagtcaaacatttccaagttcttctgaaccttctctaggtattttgccatttttaatcccttagcctggtattcccttaggacttggtttacaattaattgggaatcactatggcatataagatttttgacctttaacacttcagctatctttaaaccaatgatcaaggcttcatactcaaccttgttgtttgaagtctcaaattgaaatcttaaggaatagtgaaacttaaagccttctggcaacatcagtatcacccatgcacccgagccttgtccattggatgctccgtccacgtacaacaaccaagtattcgtgtctcattgaacaagcgaattttcatcttgagttattccctctatcaggaagtctaccaagaattggcccttgatggatgttcttgggtaataagttatgtcgaactgccgcagttcagttgaccattttatcaat

SEQ ID NO: 90905 - DNA, 552 bp, Cannabis sativa
cctaatagcctctgataatactcaagaaaagcatattgaactttgtttggagaatcacaccatttcccatactcatcctcaattgagaaaatcttattttggattctcctcaattttagagaagcatggaaaaggtgggagttgtcatctccaaactaagcccaatttattttagctttttgagtcatgaaactagcatcggccttactgatttctgcatatttctcccttaccatctgttcttgcatcatcaagtcttcattccccggattctggttcagatctccttgtatctctgctagttgtgttcttgctgcagtttctgccttttgaattttagaaaaattagttctgttgatctgcttcaatactgtttttaatcttctcagcttatggacaattcgaaacattttcgagcctctactctcttcttcccaagactttaccaccagcttgtcatactcaggagccatcttccacatattgtagtacctaaatggttttttcccatagcttttatcttcgtaaatagttaccaagataggactatga

SEQ ID NO: 90906 - DNA, 670 bp, Cannabis sativa
  modified_base (410)..(434): a, c, t, g, unknown or other
gttgtttaaataagttgtatatcaatataatataaatatatattataagaaatttttatagtagacacataaatgatcgttctagtagattctttatttgtatcggcatctaaaaaaatttttacactatttttttgtatgatcgcgtatgttgtagctatttagggttatttgtaaatttttaaatttttttaatagtttacagtgttgaaaataaggtttatataattacttatcacgcgtaaaagaaaaaacattcacatgtgcaacacaatatgtaaattatatttttggtattgtaaactactcagaatttttttaaattttacaattgatcttaaataactataatatacatcattataaaaaaaaaatgtaaccatgacctcctcattattattattattatnnnnnnnnnnnnnnnnnnnnnnnnnattattattattatttctttttaagactttgatgccctttggctatggtataccgaacttaacaacctatttagttgttttaaatatataaggttttgagctccaaaaccctattcaagataaattcaagatttacgggttacccacacttccgagttactctgatcaaagttggaatttttggctaatttacaaacagattttaagctctatggtgacggaaaagacgaccaaaa

SEQ ID NO: 90907 - DNA, 684 bp, Cannabis sativa
gattagaacgatagataactaatagtgtctctatatattggaacatagaaaacgttctatataattgattatttatttaataacctcttattatgtattaattaaacacatatattataaggttcttttataatgtatccacaaaaatgtgtgtattggtgcaacacctaattgttttggcatttagaaaaaaaatttaatttaattttttcataatcgtgtacgttatagttatttaagatatactgtaaacttttgaaaaatacagaataatttacaataaagaattcaatgttcaaatcatctatttcagacgagtataaaatataaaagtcatgcatgcaacaaactctttgaaccttatttttagcgtgttaaattttttcgaatttctcaaaattttacaagatgtcttaaataactataacatatataaacataaaaattcagactaaattttttattagaaccgaaacaaataagagtgtatcgatgcacctctttcatcaagaggtacatcatagaattttcctatactatatcactttagaaaattctgtaatgcacctttttaaaaaagatataccaatgcacccctatctattttggtatccgaaataatttttttgttaatttttttctcatggtcatgtaggttataattatttaagacatcatgtaaaa

SEQ ID NO: 90908 - DNA, 1181 bp, Cannabis sativa
ttaaatatttatttgtaactaagatttaaacttaagtatttataccgcaaattactttaaaaaaaaaaaaacttaaaaaagaaatacaattttaagtgcttgtgtaaattttcataatttttatattttacctagatggattttggtatttcatcaaggtcacgactcatgtcgtgtcgttttaggccaattacatttttagttttgggtgacagaacacttcaatcgaaccagatagttgaacataactactatctttttcagattccagaatgtgcagggacgtcaccaactgagacgaagagactttaacggaaaccatattgaaggataaggagattcaaacctgaaccgttttcagaaccgcttgggctcccatccaaaaccctaattcggactccatcgtcgtcgcctctagtgacggatcaccctgtgatatcgaggaggcatgcgagcccacttagcagaattgtgtgccataaaattttgctttcgattaattttcattagcttggagctttcgagagagagaacatcacttctgaaatgcaacaaagcaccttccaacatagtgaggcataattcactgtgtagattattaaagctagtaaccacagcctcattgtcacaaaagaagataactctcctaaattggtttttcgctacgaaatcagcagcacacaccatcatttgtgcttcaaaaagtgcaggatcagtagcaccgaatcgtgtagagaagattgcatgaatgtggtccttgcaatccctaaacactgtcgccctgaacgactaatctgaacagatgttaacataagtgcagtaggcaaaccaatcaggcagaggggataaatgaaccaaatattcatcaatgggaggattttgataagaggaatggtcctgaaattggcggcacactaatttgattgcctccaaaacctgtaagaggtggaaccatgaacaacgttattgtgcgttctacaaataacatcaaagatacacagggcccccataaaaaagctgtcaaaattaagatgtgggggcctattgttgttacaacgaacccactagatccaactgaaccaaccatcacactgaatggaatctgttctgattccccaaaggcttccaaacaataatgccttggcaaaagaacattcccagaacagatgtaacgatgattc

SEQ ID NO: 90909 - DNA, 3016 bp, Cannabis sativa
aaagaagtccgactctttgtgattttcttccttgtgaataaaagctactcctatctcaactttatccttttaagaatctttgatcttcttacccttgtcctatctctgtagagtcaactcataattctgtaggaaacaaattaattcatctaagtcaatcccgacattcctcaattgaagtcactttagacatgaatcttttgggtaagactccaagaacttttttgacaaattttttattggaatagacctttccgatggcataagattcattcgatatatcatagattttggcatgaaactcaaagaccgactcattttcatccatagaatttttaaaaggacttggctaaaccacttaacctatcatttttaactgacttaggtctttcattctttatcttcaacttctccgaagaatccttaacaatctcacaattaaaaattactttgacctgatttgtggagacaacattaaagagagcctgtagagcttttgaatttaaattttctcgttccatctcctcagttgaccattcactgaattttttgttcttttcccccctcatcagaacagtaggtggagaccaaccttcggtaacagccatccatatacgttcatccataactttcaagaaggctctcatcttggtcttccaatagggagaactacatctttctagcattggtggacgagaagaggatcctcctttgaaaatctctctttcctatcaacctacataaatcataactagaaacaatgttgcactgcgagataaatgtcagagtggattagatttcctgaaataacaaatcaagaaagaagggaaaaaaattacacaagaacctaatcagataacaaggaaaacctaactagaaattacttagctatatgatcacaatttctttacataaaaaagatggctctaatacaaattgaaagtttaagatatttcgaaagctactaagtcataattaggttttccagtcacaagtataaaaatagtaaatcaaatgaacactgtaattacaagcttcccctgcattggaaactcattctaatcgagtagtgcttgggtccccaagaatcgggtaagataatatcttcactaagaaatcattcaaacatacattctccagttttgattaacaaatcaaacaatgtaaacttaaatgattccatacaaaagttaccaataaacttgattacaatcaagaacaaagatttaagttcccttagatccgagatgacaagatcccctttcttctgacaacaactccctttaaaaatcagtctgaactcccttcaaacatcgcatattgacattccttcttcaaccttgaagatccaacaaataacaacctgcaaaaatacaaagacattaaatttcgccctagcagaacaagaatctcaaattgattttagtaaatatgaggagttagatagaaaacgctagctgagctttttatacttaacaactctaaataatcgaccaaaccaaacaactaatttagctctgccatgttagcatgaacttaaaccacaaatataataaattaaaaactgacatggtaaaaacaagatgagaacatatttgacagatgcaactaacacagtcgtaaatacgcagataagaacagatgcaactaaacaattcgtaaataaactatcaagaagcataatttactaaagaaaacatggcacttaaaggcaagttccaaatccttattgatgttacttgttatattttaatatattaacaatacgtgaaagtagtacttaagcatgatttttccacttggaaccacattaattgattaaaagagattaccttgctagtagtattaattaataagataaatttttgtttttaatctttaaactacacttattcctatttttaatttattttttcatcatttcttccaaccaaatatcacttaataattatatgaaatttgttgtatttttcaataataaatatagagagtaaatgatcatgtgtaccttaatttttataagatagaattaataaagattttatttattttcttgaattgtatataaacttaatgggcaatgattatatctgtgccaaagtatggccaaaagaaaaaataaaaaatcactgtgatttatttaattcaaatccttttcctgccattggttcggcccttgttcaataagggaggttccttataatttcatgaaaggaggataatatcatcaattaccaaacaaataccgcatcttattattaattaattaattaaattttagaaaaaaaaccattggatattggatgtgtagagactaatcaactttagattttgtatatacatataaaattttatatacatgaggcgcctgcagttattgttaatatatttaattattatataattataacctacaggctatagttaagaacctcacgttgaaataacacatccgattgaacaactatatatttcttaatattaaaataatgatgaggttggcataggaagaaacttatggttaattattatatataataactattatttatatgcatatatactttaagattagaaaaaataattaacaaaagattacaatgccaaccaatcttgttatcaaagcttaataaacagtgggaataagacaccatactaaacctccagaacaattgattaaggaggtaatattaataaattataatagtaaactaagatacattatataaatatatatatgtaggttcaatcttccaactttactttaatgaatatttttcaattactgagctagatatatcttttatatatttataaaagttgattacagtggatccatctttttcattacactaaaaattctaattagtgacaatttaaaatgttaaatgtaagtgactaaaaattaagtgtcactaattaattttcaagaaaccttttaaaaaacataaattatggtaatttcaaatattaatgtcactatttactatttatttattgaatcaaaaattaaaat

SEQ ID NO: 90910 - DNA, 4161 bp, Cannabis sativa
atgaatgaagtccattcccaaaccgatgataccagaagaggttaaaatatatctaaccataatatacttcatttgtggtcacaaaaaaatgtgtcgacaacaaactactttaaggaaatttaaaatttccagctagattgccatataataataacaaaaaagagtaggtaactacagcaaaatgcaaaatcgagtttgtaattgtaacaagtatttatgtggctaattaaagaaataaacaaaggtcaagaacatcacaaaaatagactaagaattcatttagtatgcaaaattggattagattgtgtggacacgattggaaatgattgaattaagcttagcttattagtcgtgattagtaaactctcagattaagagacaagataaataataatgtgtttggtactggattggactaatcagcgagataagttttttatgagtgtaatattatcccgctccattttgtctccggacatgggatcgtgactacttattccaatccaggttacaatatcatgctccaaacaaggcctactataaatcaaaaaattagcctaaaaaattaccacaaaggtaaatttttttggtccccttaactatttttcttgtagaatagtggcaaaaattttagttcatattatttttttgaacaacttgttgatgtagtcacaggcaacatagttaagggccaaggaattttgttctctgcagcatttgacatttaattaagggcctatacagatgcagattgggcagcatgtatagatacaaggaggtccacaacagggttttgcgtatttcttaaagactatcattttctaaaagagtaaaaagcagcatacaatctctagatcttcagcagaggttgaatatcgagcaatgacaaacactactagtgagttaatttggttattgtcacagcttaaggaattgaaaagtgagcataaaggatgccttgatgtattgtgacaacaacgctactcaacatattgcagtaaaccctgtgtttcatgaatgaacaaaacacataaagattgattgtcatcttactaaggcactctttcctaaccaatttaaagctcttaaagacaagattggattagttgatatatatatcatccatctatcaagactgagttagttttcagttagttgttagggtgtcttttcaattagtttttgtaactaattttgtactgggctatataagctccattcttgtacctttccaaattaatcaatatactgaatattgtttcactctgttttctctcctttctttctcacttccgcaactaataagtctatcaaatcaataaatgacaatgtagtttactatagattataatttaaaatagttgaataatatccacatgttaaacattgaagaaggaaagtataaacattaaaaccgtggcccttctattgcatattgttaaggtaacatttatgtagaactcatgtgctacaattttatagtccaaatggaaaattcatgtatagatgatggtgataactttgatagagaaatactaaatacactttatattacactctcttatacactttttctcaaatcaaatcaattgaatgacattttctgattacaaaacttctcttaaatcaattttgtaagtgagataaggtttcagaattaacaaaagatatacataagcaaacatcaaaaagagattacctgatatcagtatacacaccaaaatggcacatctatacttaataagctatttctgcttcgtctgcaccaaaattcaactacggcgagtattgtcagactctgcactctctgtggctggttctctgactctaacaaatggtttcctgcgtttgcctcgaatcggtcttcccattaacatctgaggacaaaagaacaaatctccattgtaacaatgtctcatgaaatttggatgcagaacaaagctccattgtcaaggtccatatttataattacaaattagagattttaataagcaacatgaacaaagctgaattacctttccttgaacagaagttagagctgcgtcggcatcattcttggatttgaaggacacaaatccatatgccaaagatcttcttggattttcactgaatacaacttctgtagaaactacactatgaccctcagaggtaaagaagtctctgagatctttatctgtagcttcaaatgacaaatttgcaacaaacaaatcgtatgtcacttctagcgtaggctgcttagaagtgccagctttatacttacttcgtctgcaataatcaacttttaagaatccaccctccacttcctatatcatttgatttgcttttagcatagagaacatgacacatataagagtgcaaaatgaaagtgatacagaactattgctttcactttcgcatatattgaaatgcagtacaagtaaccatttttcattaaagaacgaaaaaagttcccaaagttttatgtttgtaactagcatagaaccaataattttttatagcactcaaaatacccaaaggcagtaaaagagtaatttcgttaatctccgtatgttagactctattaaccatgctatacagagaagtatgcaatacatattagactttttatttggacttatattaacttctattggttttaataaaataaaggttgattggatagctctttggtgtgggctagctgtgtgagtttagttgaagtagaagtgtggactattctaattaactgaaacctttgatcaatctaactatgattatgtagctaagttctctccctaattctataaatacatattgtttcatcacaattatataccttttgaaaactgcttctgatttagagacattaacaagaagacttagttgatagtattatgaatcaatcatgtatgtatacctaactcttattattattgtgttctagattatatacaaatttgtatttgggttatttaactttctaacaatgcacacattaagtttgttagttatttagttcttccaataattatattaaatcaaagaaagcaaaaacgtacattagtaacaagagcagaaccatttacataataaataatattattcactagcaaaaaacgtgattactcatagtgccaaatatatgctatgttttgcaaaatgaccaaaataaaaaaagaatggaagctacaatttatagttgtttagtttcctatgacacatagtaatcaagaggattaaaccagaaatatgcttacatacgattgcagattattgagagccacaagagcttcttctggtgaacccattgtaacaagtgcccggccactgttttgtgtcttgttaggcctagaaacctaaacaaacccagatcagaaacacataaaacttaccaaaacccttcaaagaaaacacaacaattcatacccaataaagaaaaaggaacagactaatatgagtattaaaaatctaacctcaacatctacaacagtcccatacttcttgaatagagcaagaacatcttcaggagtgtaatcccaaggcacgttatcaacacgcaatctgtctttataaacatcctcctcagtgtctgactcaagttcttggctttttttcgaaccactcaccggggaagactcaagagcttggtgttgggcagtggaagagaaatggagatcgaaattgttaatgaatcttttggtcttaagagagtttggagtttgggtgagtggaaatgtacaaggcctacgaaagcaagaaacggagatatgggaatggtgggaatgagtgttgttggggaatgaaagtggggtcaaagggagttgtcgttctatgggagaacatgccgtagctgcggagaaaataggacggagtgatgaagccattgatgacaagtctgagcttcgagaacttcagtccagttatgattgatatgtgtgtactgtaggttttcggataagcaaattgcactttgggccctatgaaacgccgaagaattgccttcatttcgcaaagtaggacgtaactaaaaacaacaagacaaaattaaaatataagaaataaaaaagaaaaaagaaatgtaagcgacaccctcgagaatacccttatggcgcgtttactacaatgtaattggaatcaaaataatcaatgagagaattgtatcggtttaaaataaaaaataat

SEQ ID NO: 90911 - DNA, 562 bp, Cannabis sativa
actttctactttttgtactatatacattgtttcattttttttaaattaataaagattttttaggatcactattttttttttttgaagaaactaatcaaactttattaatttttaaattcagcaaccaaacacggaagcaaatcagttggaacattccccatactaaaaatacgatcaagaaatagcagctttagcaatcgcatgagctactaaatttgctgatcgtttcacaaaagaaatagtaacaccacttaaactcacaagcaagttttgacactctttaattacatcaccaaataaagagatcatatgaactgaattacgaattgcttgtaccaccaccaaacaatctgtctctaaaatcacatgtggccattgtttgtcttttatccagcttagagcctaacgaacactaattgcttcagctaactccggtcgtacatttccatgacaaagccgagagacaccttccaacataaagccatattcgtctctagccacaattccataaccatagtcttggctactcccaaatattgatgcatccacattaaccttgatt

SEQ ID NO: 90912 - DNA, 2420 bp, Cannabis sativa
ttcttgagtcaatacaaataacgaggattagactattaccgaactgctcggggctgaacctcgataaaattcttgtgtctttactttgctttaccatatattgattgctgtcaattacttatcgcttactaaataagactcactgtcgttggctaaaagcgaggtgaacaccaactatgcaaggagaattggaagtcacatgcgaggcaaaagtcagatggatttatgacggttattcttgtctgacacagaatcagatcttgtctcttatgtgcaagcctttgccttacatgtgccctgcactaacaatggtccccactgtacaactagttcgccacacgagaaagaaccatcttggggacccaattgacaaatatttaatgtattttaacccaatagtaggccttttggtagaaaccctagacaggtcgtggatattcccatgcccatactttaccctataattacgcctttatttcctcataaaggggggatcaaaaaaagtaatacccgaaactctaagaaaatctctctaagctttctacttttttaagagaaactaagagaatagagttagggttttctattataaacaccattgaatacattatacaaggcttctaaggccaatatacaaactcatgaattagggatcagtaacgcctgaaccatgtaaaaatcattgtctattttatttattgccttttctatttcttaagctcttatttaatttgtttttgaaaatctcgataaacagtaattaatattttcaagtaaaaggaaaatagtaattgaaaaatttaatacataccatacaaatatattttcaaacataatatatcaaatgtatatttcattctttttttatatggaaaagataatcaaaacaaaatcaagcatttccttctttatataatactttttattcttctttagaatttgttatttttttgttttacttattttaatttgtagttgaagacatcaaataacaataatttgttttatttttttgtttgtaaggtggaattatttttaatagatataaataattcaatattaatgtaaccaacccaatctgaactattgtggattggatttgagctattgtgcagattggattgaatccaaaatatgaaatctccacctagtgcggatcacatgcactccaagccaaatagtatggattggattaaatgattgatggatgtgtatgttatgcattcatttactcttatttattcttgtttaaggttatttttcttgactttttagttggatttgatgtgtttctttaagtgtgtaggtttgtgcttaaaagataattttatgatggactgagatatttatgaaatttttgaccatatttccttcatttttttgaagagctatgaaatacaaaatgataaagctctttcttagcttttcaaaacatgttaaatcatcccgtttggagtccggatgcaaaaattataatgttttactgagtaaggtcgaatcaataacagaaatgaccaaaatagcttttggcactgtagcgcctgaatagaggtgatacagcgcttgaaatgggaaaattggatttttgcacaaaaacgaaacctcagggaaactcgcttggctccattgcactgtatcttaggtgccatatcatcgactgtacggaatttaaatttaaatttaaatttcaaacatcgtcttttcaacttttctagtgtataaaaagaacattataactttggctctagaaggagagacaacattaagagacatagaataacaatttaaagtagaaattttttttgagagatcaaggaaggaatctgaagctgcactcaagggttttcatgagtttttcttctttcttcttaatttctcttttattattcaaattataaataatattttgagatggtaaaccacactatgcgtggctagttttctttaatgttagggtaagatagatctctaattatgacattaattttatgatttaatccagggtttactttagtctaatatgctttatgtgattctaccatatttaattgctatcatgattataatttatgtataattttactttatgtgattataattaaggctattgtctagatttcgtgatttgttactcgagaggtgaacttgtaaataattgggcattgggtagatcaacttaagttgtgtgagatcaagagataagtattgactaaggtaaccgaaatagttttaaattgtgagatcgaaaggtgaaagatttaggattatttcataagtgacacttaatgaaggtaaggtataactgtggaaggttttgccaagattgctactcctttgagcgagctgactcgaaagagttataaatttatgcagactgataaatgagagaataactttcaagaattaaagaagagattgat

SEQ ID NO: 90913 - DNA, 934 bp, Cannabis sativa
ccatttattcattttagcaaaaaaagtaagagattgctattgggtaccagtggtgcttagcaccttctagatgtgtcgacttgtaattggctagcgatactctataaaaattattatatttttttttttgaaggaataaaaattattatattaaactatatgggacctgatacttaattgcaccaatagcgatattgacacgtaggaaggtgctagacaccaatagtaccctttaacatttctcaaaaagtaaatatatatatatatatatatatgaaaatggattcattacttctttaactatataggcttttattatttgaatagatagatatatgtataatgtcatgtgtatgaatgtagggaagcaagaatggagagagaaatagagagtttaattagtgtagtgattggtataattattataataagtaatgttattattattaatgtcattttaagctcttataatacacaaatttaatcaattaattaagtttgtcttccacattgtaatctcttaacacttaggtcttaaatgacgtgttatgtagtgtagtgatagtttttatttttattttttttgtttgagtcatggaaaccaccaatccctcttaaagggattatgcttggccaacttagtttcatcttaaacaagaactctcaaagtgttacccataattcaattaaagtaattaagttgaggtacaaaatttttataattgacatatagtctcaaaaattattaaaaaatttaaaaagaatgtaatacgtgataataaattaaattggtctttaatatatagagcatcagttaaaagattaggatttaattttcaatctatatttttttattttcagaaccatcaaattttcaagaaaggtataaaaattaaaattttattactgtttagaattattataatttcaataa

SEQ ID NO: 90914 - DNA, 675 bp, Cannabis sativa
tagtaaagaaagtctaacattgatgaaaattcaggaagtatgatttggtacatgtcgaaattcgagggacataatttggtagatagcaaaatctccggagcatgatttagtacataaacaatcactgaatcagtaaaattgaatggaatttgacaaaaatcatgacaatctcaatagttcataaaaaaaatttagcggacagaaatattcaaagggcatgattaatttggtacatatgtcaaagttcgggtggcagaaattttaattagcatttatatatttatagtgtttaatcccaccacgacgatgtgaggttaagagtgttatgctaaatttttattttaggcttacattaaagttttattgttttcttaaaatatggatttgatgaaaagttttttattattttagttcatatagttagtgattaataattaatagctttagtatctatgtgaagtttagttgaagcaaaaatataagtttttctagtcaactgaagcttttaatgatgaggcttaatccaactagggttctgttcctagattacatccttaactctataaatactcatcacaattgtatgcttttgctaattagttgatcaactagcttctattctgttttagacatctaggaagacttagtaagttaattagtattgtaatgccaaat

SEQ ID NO: 90915 - DNA, 588 bp, Cannabis sativa
agaagggatagttttgggacacaatatctcggaagtaggtattgaggtggataaagcaaatgtgtcaacagtagagaatttgcctcctccagtttctgtgaaaggagtaaggagtttcttgggtcatgctggtttctactgaagatttattaaggatttctccaagatctctaaaccgttgtccaatctacttgttaatggggctccttttaagtttggggaagaatgtttgaaggcattccaagttcttaaggataaattgatttcagtaccaatagtcacttcgagttgatgtgtgatgcaagtgactacgcaatcggagcggtcttgggtcaacgggttgacagggcgtttcatacaatcttcgatgctagtagaaccctgaatgatgctcaactaaattatgccacgacggagaaagagatgctggcaattgtgtttgcatgtgataagtttcgcccatatctaattgaaaataaggtaatagtttacacggaccacttagcgattaagtaccttatgaccaagaaggatgcaaaaccaaggctgattcgatgggtgctcctactccaggaatttgacatagag

SEQ ID NO: 90916 - DNA, 1093 bp, Cannabis sativa
aagcggcgtttggttgacagaaataaaaatatataaataagaatgagaatagaaaataaaatagaatggaataaaatttaaaatgcataaaaaaatttgttaaatttttttaaatcttatattagaataatctttacttctattttaaaatagaatagtcattttactaaaatgatagaaagatcattctaattgggatgatattctaatattttaaaatgcaatcaaataaaagaattgaatgaaaattatttctttttcattatatctacttcattacctccaaccaaatgtcaacttagggaatattactaatcaatcacaaggtaacatgtctaaaggtgttaggcactattagtgtccaatagcaatactctttataaggattgtattatgtattatggagaaaaattagaaggtactagtagtgcctaatattttatgtgtcaatattattattggtgtaattaaatattgggtttcatataatttaatataatagcttttagagagtatcgctaaccaattgcaatatgacacgtctagaaggtactaggcaccactggtgcccaataacaatgatatgtattatggtacccaatatagtactggctaagtaattagtactagaatattataaggtagtgatttataaataataaagtgtatagtatactttataattgtgtatgtaatagttatttagagttacatataaatttttagaaaattttgaataatttacaatgttaaatataaagtttaaatattttattgcatatgtaactgttttttcttatacgtatggtaaataattatttgaattataatatatattatcatcaaaaaattagattaaaaaattttcttgaatgttgaaacagatagatgatctattaaaataattttttaaaggtgtaccatgatttttttctattttaattgtaccgtggggctaaaaaatatatgtaatctttattaaagtaaaataaataaaatttaattttaaattactctttagcaatattaattttatgatggtatatttctcatattatattcatattgagatatgtgacatgtcacaccactt

SEQ ID NO: 90917 - DNA, 3609 bp, Cannabis sativa
  modified_base (39)..(67): a, c, t, g, unknown or other
  modified_base (201)..(203): a, c, t, g, unknown or other
  modified_base (2032)..(2033): a, c, t, g, unknown or other
  modified_base (3582)..(3583): a, c, t, g, unknown or other
tctctgcaatctgatccccaagttatagggatttctttnnnnnnnnnnnnnnnnnnnnnnnnnnnnnctaagtgttggttgctctgcgcagattgttgatcactttgcttcaggcatgcatatgaggcatcctatttggactgtattctccgagcagatactcgaagtcggttccgtgtcaccatcatgtgatgccacgtnnnagtgcaaaaattgggataacatgccagaacaattctgtaaggtgccttagaaacttgttctgcttcttgtaccaaatcaataacaaaatctatttctctatgcagtggtaaacccggaagttcattaagaaaaacatctagaaattcttgaaccaccttgatatcctcaggccgaattgtctcagcccgtgtggtatccaataccactaccagaaatcctatatccttcttgtaaaaaatctctagcggttaatactaaaattattggaatttgggatccctaaaccgataccacaaaaataaacagttcctcacccttaggttggaagatcaccatcttctgcttacaatcaatactagtcgagtacttagataagaaacccattccaagtataatatcaaaatctgcgaaacccaagtctatcaaatcagtactcaactccctatcctcaattctgatcggcatagacttaatctaccttttggagataactaattctccaccaggcattagggttccaaaccctttatcataactatcatgtagtctatctaatttaacaaaaattcaggctgtgatgtaagagtgagtggccctagagtcaaacaatacaaagaagtaagagttgttgaccgagagctgacctgtaacaactgaggggctagcttctacatcagcatgagtgtaaaggctgcttagttttaacttggaaattagcaggtaattagggtttaattatgaaactagaatattaattatgatttatcattttatagagattcattgtattcaggatgtattgtttatgccatatatggaattttatatttttgcatgttttgtggcccgcaacattagaatgcggcgtttggctaatagaatcacattttaatattttagtagtagcgaagaaacttagttagacattgggtatgttgagaattattcgagttttagaaatgaccaaaatacccataagtgacaagtgtgctttttggcttaggcaagggcaaaatggtctttttagccttttgtcatttttgtcttttagtgagattcacttaggtttattattcctattttacttagttgatttagtaaataatacctaagtatattatttttattattcataagaaaaatcaagaaaaaataacactttctctctctcacaccctagaaccagcaagaggttagggtttttgctgcttcaattcaagtttgcagcaagtttgtagtgtctcaacttcaggtataacccttttgtactttcctttttgaattcttaggcttggagttaaggttttatgcatgtttttgggatttaaggttgatgtggatgttgttttgttttgtttgagtgtttaaggtgttattgatgttgtttgagcagattttgagctatttggtggtttaatttggtgtttagacaaggtttgagctttagagctcaaactttgctctttaatggtgaattgtgtatctatgggtattccttggttttattgcatggattttgtttattgtaatatatttagtaggtttggaaggttgggtaacatttggggttaaattgaattgtttagagtgagttttgtgtttcttgcagttgaaccaaaattccggttcagggggacttgtaggaacgatcgactggttggtccccaaaaaaccccaaaaaactggaattctggttggggaaccggtctactagttggggcattttaaaaaaccctagttcttcccgtttttacaatatttaggatattgccatgttatctatcgatagggaaacttttagtatcaagtttaagtccccaaaaagtgnnttagcgtgtcactcatcagttttgcgaataatgtgatttaggggtctgtaaatcgtcgagcagctgttccactcaggttggtcgacacacctaaacttggaaatgaggtaagattagtataatgatatgcatatgttcttacatgtttcatgtacatgttagttaagcttgttagattacattataatagtggtatcaatatatttagtattatattagatatcgataaatgtatgttggcttaagaactactcaacagtatcacaccggtacgactagagtacgactagtgtatcgagtataggatgatattatagtcgacagtactatactacttgacagtattacatcggtatgactagagtatggctagtataccaagtataggctgatattatggtcagaagtactgtcgtacgaacattcttgactcagtaccgtgttggacacagggataaagttatagttgggtgtatgggcacctgattataatccgggttattgctatgttattggttatgcttttcgtactgagtttgtcgagtcacagatattttttgcatgtgtaggtaagggcaaggctaaggttgagcagccatgagacagttgggcctggagcgtacgatctttgggacagttgggcatattttgtatagtcgctaggcgacaacttttttactatgcactgtaaaatttttgtaaatattttgttaacaggatcccgatttaatataagtaaattattttgggtatttataaatcgttaaataaagttttaattattcaggctaatgcagaagctagcccctcaattgtttcaggtcagctgtcggttaacaactcttacttttcagtattgtttaactctgggaccacttactcttatgtggtagctagtatttttagtaaattggatagaccgcatgatagttatgataaagggtttggaaccctattgcctggcaaagaattaattatctccaaaaggtggattaggtctataccaatcagaattaaggatagggagttgagtgctgacttaatagaattgggtttagcagagttcgatattatacttggaatggatttcttgtccaagtactcggctagtattgactgtaaatgaaagatggtgatcttccaacctaagggcgaggaaccatttaattttgtgggatcagtttagggatcccaaattccagcaatttcagtattaacagctagagatttattacaagacaaatttttaggatttctggcagtgacattggataccacgcggcttgagatagttcgcttggaggatatcagggtggttcaggaatttctagatgttttacttgatgaacttccgagtttaccaccacagaaagaaatagatttcattattgatttggcaccaggagcagattcagtttctaaggcaccttacagaatggctccggcagaactcaaagaattgatgattcaactttaggggatgcttgacctagggatttcccgacccagtgtgtcaccttagggagctcctgttgggttttatgccctnnataaaactctttacaatctgattagt

SEQ ID NO: 90918 - DNA, 678 bp, Cannabis sativa
gctttagttattttcaataaattagtttattgtttctattataaacggttttaaacggactagtaagtgtgacgtttcgggaaatcggggcgttacagattcaagtgggattcaaaccaaggtaaccctagaattcatagacttgtgtttttgtagcttttattttggttgaggaagcaattttgagatataggggctgttagggtttgatctgtgtatgattcaaattctaagctttatttgagttgattttaagttattgttgttgtatttgatggttgtggtggtggatgatcaagtttgagtttgaaaactcaaacttgagtcataaatggcatatttttaatttagagtgtttttctggtttctatttcttggaatatgttgtgtgaggtcattataggttatctggaaagtttggtagcttttggacatgttttgagcaggttatgaattgtttggggaaacatggtgcaaactggttcacctgtttgccaggacctataaaatcggttaaccaattttggcagattctctgaaccactcatttcctcgattcgtgtccattttagtgccttgtttgggtgattccctgtttcctaggatatagtagttccttttagtaataacagaacctcaagtagttggttcggctttcccggattagggttttaacgt

SEQ ID NO: 90919 - DNA, 1218 bp, Cannabis sativa
ttatacttcaagtgaaaaaaaaaatacttattttcaaaataaaataaaaattgtactcttttcttctttcttttttttttttcttagtgtaatgcaatctttataattttgttggtatttttttatgggtaaattctattttaaattttaaattttgtaaaatttattgattaaaccttatgtttcttttaataaattaaaccttaggttttgttaaacgacaaattaaattttatattttttaaaatagtacaaagtagtacatggactaattttttgtaaaaataaaaattaataataacccattttctgcatctgtttttattctttctaaccaaacgctgtcaaggatcatactatgaaactataatttgtatctcaaatgagaaaagaattgttcgctattatgtgcaaaaatctcgtcaaagtgattataaagactcaacctttagtcgaaatagtcagactcaacgaactctgaccgttaccgccaccattgctgacgaccaaagagttttggtatgttgataagtaggggtagacattcgatccaatccaacttttatttttctcaaccgatccaatccaatcagtaattggatttggaaaatcatcatccgatccaatccaattagaccccaaaatccaatccaattactaattggattagatcgattttttaattgaatatccaattacacattcaaattttaatattaacttaaaaatatgaagaactaagtatcaccttttatttacgtttaatacttcacaaacataccatcgttacaagtgtaatgtagctaaaagttttaaataattaagacaataacatttctaagtaataaaatagaataaaatattatgaaaataaatacacaaaacaactaagtattacaaattcaacacacacaaaaatctgataaaaatataattaatatacattatattttttaatattttttattatataattttttaacatatataaatgtaattgaattagatcaatttttaattgaattttgatattgacatccaataaccgatccaacatgcaatccaatccaattgtaattggatatccaactttttgtaattggattagattcaatcggttcggttcaattagattgaattggatgatgcccaccccctatataagttacttgatgcttttgataacgatgggtggtgggtcagaagaatttttgggag

SEQ ID NO: 90920 - DNA, 567 bp, Cannabis sativa
atgaaaagttcaattcctgaacatatcttttgatggtttgccaaacacctcaaatgctaatgaggttttcaatgctgtagaaaaattatatgacacttgtgaaaacactgcagttggacattttatggatgaaatgacaaccattcagtatgataaatcaaaggagtgcgaggttttattttgaaaattagtaatgttcagtccgagttgaaagatcataatattcctcttcctgacttttatattattcatcatgctcttcatgcacttcttgcctctttttagccttatcaagtaaacctccaacacttacaataaaacatgtagtgtcattaacctgatttctcaatgtgtagctgaggaaagaaactaaagaagcataagaatgaatcttcaaactatgtttttcaacttaagctcaacaaaggatagaaaaatttataaaagaagcaagcacaaccgagggctaagggatctcagaaagccaagtgagagggagtcaaagcttaaaatggacacttatatttgagttgacgttatcttattggcacatttattcttgaatta

SEQ ID NO: 90921 - DNA, 599 bp, Cannabis sativa
atacatcttgtatggtgtattatagagtttcatacaaggccaagagttcagttacatttttaggccattaagaaaattttgtgacaaattcagctacagtatttatggttaagaactataaaagtgttggtcgaagctagcatatcgacattaagtatttagccataaataagtgtaagtagtaattaagcaagcaacagtgaattgggtgattgcaatatccttgactaaaagcatgttgcaacataaattcaaagatcttaaagtaaatattggattaagttaagtataacatattgacattaagtatttaaccataaagaagcataagtagtcattaagcttgcaacactaaattgactaatcgcaattttcttgtcaaaagacatgccacaacataaattcaatgctcataaagtaattaagggattcagtaactccttacgcagtttttggttttacaactaaagttattcaaacggaactctaattttaatatttttttcatatttatgtgcaccttaatttcatttgagaaaattatcttcagaggaccagaataaacataagattttgagtttattcgcttaagtacattg

SEQ ID NO: 90922 - DNA, 928 bp, Cannabis sativa
cttttttgaaaatattattggaaatagcttcggttaacaaaatgtcaacttgggcactgagcccaacaccaagtgtcaacttgggcattgggtttagtttcaggccactaaatggttttgttggattcctggaaacactttttatcttaatctttaactaaaacaaagaatatgcctggacgaattatcgaaaaaattccttaaaattggcctaggttggcaaaatgtcaacttgggtgctggaccagcaccaattgtcaacatgggtgctaggccctctttctggctcccaagtcagtctgtttcttccccaaaattacgtatttccttgtttttgatgaagatgaagaaaatcacaagataattcttcaatttgatgattggaagtgccccaggttaacaaaatgtctacctaggtgttgggtgcttaaacacctggtgctccgggtgctcaaaaatgaaagtgctcctaatttaattttgatgccttaaatatgtttgtgacatgtctaattcatggcccagtataaagtttgacccattttcgctaagacggtccttgaaacttaacctctagttgggttgtcgacctgggtgttgggtaaaaccctagacgccggggttgatttttgtggtgttgtttcgtgtatttttaactcatgggccttggacttggatgctttatgtatttatggtacagaataatgaaacatggtgagttgggagcaacttggtgggatccaaacaaccattctagagttcctaaagttaacctaggcgcatggcttgggacccctcctaggtcaactgctttgactcgggattgcttaactctgagattgtgacagtcagtagtctcgtgatccgtaaggggaaataccgggtaagctgtgcaatcccacaccgcctggggaaggtcaagtgggat

SEQ ID NO: 90923 - DNA, 807 bp, Cannabis sativa
ggtcttatgaaccacctttgaatgcaagttggtactggcggagattagtggttgttaaagatcaatttaaacaggttgatttgcaacagattttaggtgtcaaatatcacatatctcatggctataagttgctatatccttcccaaaacaaagtccgatggagcaatgaagtatgggggagattcaacataccgaagcatagttttgtattgtggattgcgatacaaaacagattaaaaactaaggaaatgctgctgaaatttcgtatggtgactgaagcgaaattgtgttttgcaacacaaacattgagtcagctaaccatcttttcttcctttgttctttgcgtcttaaatgtcttcagcaggtgaaaacatggctctcttggagggctaaatcgaaccagttgagcaatctcattcggtggattgggaaaggcaaatgcaccaaatttcgcaagcaagtttatttagctgctatggcagctcttgtgtatcaaatatggcgtgctagaaatgacatagtgtggaattcgaagggagaaaatgaatcattgatcaaaggaagataaaaaatgatgttaaatgtagaattacttgtttttggcctaagaaaactaatgttatagatactaattggttctccaagttgtaaaaaagaaagaagaggataaagggggagaattgaatactcgtatagtgattgtatgttttcataggcctctattgtaggtgctatttgttgtaaagttatttttggagtaatgaaaaacttgctaattcatcaaaaattaataaatttttttattgt

SEQ ID NO: 90924 - DNA, 529 bp, Cannabis sativa
taattgttattacacgaataatgaattttatgggtgccaccggtaacgacaaagtggcctaggccacgttccaattccaggaggacgccctggttttgtgggatatggtggccttggctcggatgttactaccattacctgggaagagttccaagaattgtttaatgcaaagtattacaacgaggtagtaagaagtgcaaagagaaaggaatttacccaactgacttagaaggagaatatgaccgttactgaatacacaactcagtttgatcgattggctaggttggccttgagaattgtgccaaccgacttcagcaagaaagaaaagtacatggattgactaaaccctaaaatcaagaatgatctgatgattaccactgatgataacaccatctatgctgatatggtgggaagggcaaagttgagtgcatccaagagttttgatggactcaacttctgggtggaacccctactcctcctacctctggttatggtatgggtggtagtgattcgaccactgaccagaaaa

SEQ ID NO: 90925 - DNA, 626 bp, Cannabis sativa
gttggctaaaagagaagtcaacaattttcatgggaaattccctaacagaaatgctaagggacctccaatgaagtctacttctgctaattttactagaggtgaacagcagaaaagtgaagatgctcctggtgaaaaggaattaatctccagcttgtcgagttctcaatcccaaaaattgatggccatgctatcttagaaggttgctgatcagtctacatctgatgctgtcaatgaacaacctgtgttatctcacttttttggtatgaattctaagactcgagcttttgattggattattgatacaggtgccacacatcatgtgtgccctgatttgtctctttttcatgatgtccatgctaatcctaagctaaaaactgttcttctacctactggaattcacaccaaaatagattgcataggatcaatcaacttgactcctgatttgattctgaaaaatgtgctttatgtccctagttttaaatgcaatctattatctgtgaattctttgccagcaacatctaattgcacattcttattttctcatggaaaatgtgttattcaggacactatgtgtaatatcccagaaaataaataatatttaaataggtatattttattaaatatgt

SEQ ID NO: 90926 - DNA, 797 bp, Cannabis sativa
ggccgtgggtggtctgccgtgggtcacgtaggccgatagactgcatgagtggtctgccgtgggtgggtggtttgcgtgtgtgggtgcggcaccgagcgaaagagaaagagagaaagagaggcgaaagagagagagagggcaggtttaaaatggggggagtaatgtgggaattaagtaaatttaagtttaagaaaataaattattccctaatatatgcattgaaattcaaattttccttttttttatatgtaatgagtgtgtctaaaacaaaacaggtcatcaacattaaatatattaaatatatatgtaggtgtggagaattattagatttcactattttggtctttgtcctaatacagttaattctgttatttaactgttaactgtttcatagtcagttagctatgttttagctaattagttaagtccatatgtcggttcttaacactatatataattgtgttctgccactcttgtaatcacctgaaaacctttctaattcaataaacaattttttctctgtttcgtgttatggtatcagagcgggaaagtgtgctttcccaccactgatcctgatcgcttccacttctcctgccttgccgtgtcttcgtcttctccggcaatggtggcgtatgtcaaaaattgctgatccaacattccctgctctttctctgtttcttcgctttctcaagtttcattcagaatctttttcttgattcttccctcatcttgccatgtcgaataatgatcaagaagcagaagcagaagttcctactccgattatcaccacaaatccc

SEQ ID NO: 90927 - DNA, 1453 bp, Cannabis sativa
agaacttgtagttaaatataaactttgtagcgtaatcttcacagctgaagtatggcatacttaaaagaagtctttatctgtatttgaaagaggactaaaagcaaactaaatctaaacgaagagacaatagaagagttattatgtggagaatttggttgacatgctataatgttagtttagcggtatgatacacatgtttagatttgatttgagcaagctgaaactttaaagggcattacttgtgtaatataatagttctttgttactcataccaatttattgaaagaagacacagaaccagttggccttcgttcttattttttgttttttgtgttttggtttctgtttttcttgaagattgctggttacaaatatatttttctcaatttcagaaaatggagaagacatacaggtacttagatatgaagaaggccagaaatatgaaccccactatgattactttgctgacaaagtcaacattatccggggtggacaccgcatagcaactgtactcatgtatctcactgatgtagtcaagggtggtgaaactgtattccctcatgcagtggttagttaaatttttcacttaatgagattcacataattgtcttcagacattatttgttggtagatggtgttcataattggctttacagagtcttgcctggttttctctaatttggtctgtcaacatttcatgtgtcttgtcttgaaccaaatcttttggatgagcttgcataatattatcaaatgtacaattatcttctaacaattgaactatacatgacaacctgaataggttgactgataaaagtaattataaactgccaagaaaactcttccattatctctgcctttagtttgtccttctataacattaattaacaattttttatcttccttcaggagaatccacgccataagccttctacaactcacgaagatttctccgagtgtgcaaagaaaggagttgccggtactaattacaaataaaaaagtttcaattattgttatttaattctacttataccatggttttcgtccaagtttagttaatgactacggactcttttctttctcaccatgtcaatactcagtcaaagcacgacgaggggatgcccttctcttcttcagtcttctcccaactgctattccggacacactcagtctccacgcagggtgcccagtcatcgaaggtgagaaatggtcagcaacaaaatggattcatgtagattcatttgacaaggatgtgtcagctggtgggacctgtacagacatgaatgaaagctgtgagagatgggctgcccttggtgaatgcaccaagaacaaagaatacatggttggatctccagaacttcctggatactgtaggaggagttgtaaaatgtgctaaaatcttccagtcctcgggttagtagtatccattcattttgttcattttcaactggtttta

SEQ ID NO: 90928 - DNA, 638 bp, Cannabis sativa
gtgccaatcacaaactgtaaaaataatttgtttaatttcactctcgtgtgtaatgcatgctttaaattaacaacttcctttgtcttttcaatatatatatttatggataaattataattttttttatttttatatataaatgtaccacagtttttagaaaatgtgattaatttagttttattataaaacaacttatttttaaatattatgttataatttattgtcgtgccaaaattaaagtctccatctattattgatcccacaattttttttttttttaaaaaaaaaaagaaattctgattaattttcatttatatatatatgatttgtacacatataagagctagttattattaaccaggtaaaggaaaatagagctaattatgaatgcgtgtctttgtctctccaattcctttcctgtttcgtgcggctccctgtaatgaagaaacaccttttttgggcaagttggcggacctaaaatttaaagtgaggaaagtataattttttttgtaaggaggggtaaaagtaaattggtgggattagaactcttatatatcctttaagagtaaatagtggcataagtattcaaaattttatgtttgtaagcggcataaactcaatatttatttttagcggca

SEQ ID NO: 90929 - DNA, 514 bp, Cannabis sativa
gaattcggaaaagtaatccaagaattaacaacagaagaatccgtctccactctcaccaacttgtagcccagcatggacgcccaccgcaactcaacacgcatagccaaaagcccagctatcgcaacctgaaactccccaaccccacccaccgcccaggccacccacacctcaccatccccacctcgaacgacccccccaaacccagcaaaccccctacccagagtaaccgccgcatcaacagacaactcaaactcgcctcgcaaaggaggacaccatctacgaggcacgaccgaaccaccagcaaccccactcctcaatacagccccctcaacccccacaccagccccttgaaattcaaccaatgcctcgtgcgcaagctcgacaatcccacacaactgcgattgtttttgtccgaacaagacagaattactatcataccacacccaccaccacacccttaaaatcaactcaaactcctccttgctacatcgaaaaacgctactagttacatgac

SEQ ID NO: 90930 - DNA, 747 bp, Cannabis sativa
tattatcaatattagattccatttaaagtaaaacaaatcatcattccaaatgaaatattcaaagataatgcttttcttagagagattgtgtttttttatatgaatgtttttatatataggtagtattaattaatctatttaagttatcttcaactatgtagtctcatatctaaatagtctcataattatcttacttggtattctctaagcgatgtgggattgcacaatttacagagtatttctccttatggatcacaagactattgattatcacataataactacataattacatatttataaattttcacaccatatgcaaattactaataagcccttattatttttgtagtgaaatgtttttagcttattgtatttgtgtattactggtagtaggtatattaatttaaattgcacttaaattttgagatttgatgaagaagaaattactacttgtatacatgtagcttagaggttcacttctatttttcatacttgtagtgaacattatgtctttcaagtaaattttatttattagaattttgtttgaacactgtaaatttttttatgaactctttgctagatacaaaattaaaccgagtcatgagaacaatattattaaaccaacaattaagattaaatagtcactttctatatttataggatgtaattataaaatatggaaaagaaataatgagttacatcaattactaaaaaagaatgattttatttttttgcattattttt

SEQ ID NO: 90931 - DNA, 608 bp, Cannabis sativa
cttgtggatcaaatgggtacacaatgtgtacatcaaagaggaatattggtggagttatcaagctccactacaagcaagttggtattggaaaaagatagtgatagccaaggaaatgcttaagcaatctatggaattccaacaagtgatgaatgcaaggaatttccaaatctccaaggcctatagcttgatcaattgtcaaggagataaagtgcaatgggctcgggttgtttggaatagaatgaacatgccttgacatagctttttgatgtggatagtagtgcaaaataggctaagaacaagagatagactatgcaaaatgcaaaatcaatctaacacctaaggatggatgcttactctgtagggatggcaaggaagacctggaacacttgtttttctgctgcaatattgcagcagaatgtctgcaacaactcaagaaatggcttcggtggcaggtggtttccagctctcttcatgggctggtgcataggctgcagttgcagcattagcatataacatttcgcaggcaagaaatgggctgttatgggaagaaaaaagagtccaaaacgattgtatagtgaacaaagcaaaaacaaaaatattgtatagaa

SEQ ID NO: 90932 - DNA, 889 bp, Cannabis sativa
cggcaacaattcatttttctacttcgacctttctcgatcaaatgtacataactttcacatacaaactccaaatgaggtgattcaggatgcattggaaagctaaaaaaagaactaaaacttctttgttttgacattctttcaaaatttgaacagaacagaatcgaatttaggcttgaaggtttaactttattttcttgaaattttttgtctattttatagatcgtcgtatttctgatatttgaccaatttatacattccaagagtcaaaacctgaaaccaaagaaaataagcataattatgttcaaaaagtgacaataaagaagaaaattaactctaaaaatgactcgaacaataagttaaaaatagcctaacaaacatcatactatcggatggcgatctttccgattctaatgaccctgcaagaaaattcaatacccattagaactttacctccatcaactaatttataatcaaaaaatgattttcgattcaggcacatgtcataagtgcacccagaattaagaatccactccctgttcattgaggattctgagatggaaaataattctccatatgtgagtagtcaacattgtcctctgcaattgcagctgaatctttcttcttgtgattatgcttgcagtccttcgtgtctcacttataagattttttgaagtcttgttgctccttgtacttcttgcagtatctttgcaaatgtctaggacttccacaaaaataacacctccatgattccttctccctgaatttcgatcttgatttagagatgtagtgtttactcttcgaatttactctctttggtgatctcccacttgctaggtacacttcgtccttcttggattcattctccaattgcaattcaaaatccttggac

SEQ ID NO: 90933 - DNA, 762 bp, Cannabis sativa
tttatgttatatagtcaataataaataattaattgttagaaaaaatattaattccaggcaagagcaacaaaaaataagaaaatcggggtaagataaaatgttaaggaggctggggatcaaagcctattgtttcacatgttgtcgctggggtaagtttatataatacattatcattgatttaatattttttttttgtaaaaataaaataataatatttttttttcttaaatataggcgatataggagaactcccaactgcggtggaaactttttacaagtttcaccataaaggcaacaattggcgcaacgaatacgcgcaacaagcttacgtaaatttacctttaaattaatttctatttatttctttcaatttattttgtatttaaattaactatttaatttatttgtttattttaggagcaaatatttgaattagctgtaactcaactagcgcacactgagaatgagcctgatgagactgttggagatcccacacagtatccccgagacttcccttttatgacgtaagtactcggggagcgatctcgacatctaagaggctttggccatctcccgaggttgaaggcaattggggcaaaaagagcccctgccatgaattcttcagccccactgaccattactatggaacagtacgagtccttacagaaaaaagtggaggaagcagagcaaacaactcaatatacgaggcagcaatatgaaatacaacagctctacctgagacgattccaagatcagtttgag

SEQ ID NO: 90934 - DNA, 872 bp, Cannabis sativa
aaccttgaaaaacgacaagaatactaaaaatacataacgacaataaatgatgataaacgacatcaaacaacaacaataaccttgaaaaacgacaatcttctcaagttgaaaaatcacaatgctattgattcttttttgagattagccttaaaatatattgagtttgattgtattttgtttaattatctttgtgttctagttgctcatattttaactaagtatgttttattagaaatagttaagtgtttgatgatcgagttatcctatttgtatttagaacttttttatggtgataccaataatcaataagtttatgtgctcccagggccggcccaaaaaataggtaggctagcctcgtgcttaagatccactcattttaaggagccaaataaaaaaaatacattttaaaaaatatgtatatttttttaataatttttaaaaatattatttatatttatggtaagtgctattttttttttttacttatgacctatttcaactcaaggtcggccctatgtgcttttatatgttaatttgtcacttttcaaaaaaataaaataaaatattcatacataaatataaatattgttttggattttttaaaaatgaatattaattattttgaattttgtatatgtgttgcaaaagttactaattaatttttttatttattaaataataatttaaaatctatattatataaaataaaacataatgatactctgagcagtctgaatctgattttattaaaaaaaatcctaaaacttactctttgcctatgtttaaaacctatcttcatcaccctaattccatttcaaatataatcatagtcttaaaattgtttgaccaaaattgtgaacataaagtattat

SEQ ID NO: 90935 - DNA, 554 bp, Cannabis sativa
gtgaaataaaagataaatggttaaaaaaatgacaaaattataactagtggggcccatttatatggccagccactatagtcttaattttgttattattttatcattttttattccatataatttaaatcctaacaaaaggtataggatgatctaattctcatcaaatgcatttaacctagttttcattttgttaaaaaactagagtttttgagagcctcctttcattctctatttcgaaatcctctctctccctcttcataaattttgaacctatgactacaagaaatgttacttttgccagcatagttcactactgcgctggtaaaaataacttttgcaaacactacaagaaactgacttttgatgtgccgtcaaaagtacactgaatgcgccgttaaagctttgccggcggaatactgcgacggcaaaacatgtctgagaatcttggtcggtaaaagactttttacccacacgtagagtaaatgcgccagcaaaaccgtgttttaccggcgagaaatcacgccggtaaaagggaaacgccggtgttaaaagat

SEQ ID NO: 90936 - DNA, 539 bp, Cannabis sativa
cttataaaaataaatcttggttttgtttttagacataggctatgactttacacttcaaatgtaaagtatctcatttagcattagaacttcaccatttcggtctctacaggggacataccaccctgccatcagcttgtacacttgtgggatgaattgaaaaggagaaactcccactttcgcgtagaaattggcaaaataacccctgagaggtagctgcgttcctaccacaatgtgcgcccaactcctggcgctaaattcttatgtacgcacacaaggcgactcccccttgtgcggagatctattctagcatagaccagggatattagggaccacacgatccttttcgtaagacaataacacttcatagctatggaatttgtttacaatttgatccatctcccatggagattaattgtaaacttcttctgaggttgtatctccggattgttccttgatcagatcctcttcctcaagttggatgatgtctgccatggtagtaattggtaaaggataagagacaaaataagtagttaatacca

SEQ ID NO: 90937 - DNA, 693 bp, Cannabis sativa
ggtcacgggtatgcccttcaccccatgtgcgcctataaatatcctcgttcgtacgaagggtaaggagagaccttggatgtgtcatcaccctactaacatcttagcggtataacttcttctaaactagggttttcatattgtaatactctgtaatcaaatactatccacccaaagaggctaataatatagactcgtggactaaggatctttaacgcctggaccacgtaaaaatatgttgttcttattaatcattacttcttatttcctttattctctcaaaatatttggtttctgaaaaactcagtaaacattttggtgctttcattgagagttgaaggaagctcggtggtgttcatcatcccccgatcatggtgaaaatgcaacaaagctctggcaaaagaactccattagatatgattatagaggaaggcaccttttgtgcaggcgacactgatacactatttttactacaagcgtacaatgctgttatagcaaagttttaatattagaaaggttgtcgaacccagaagagtgattatttttaactaattattatactttttaattttatactttaattagataacacaaattaaattataattaaaaatcaagtaataagataaatagaaaaataaataaacaaacaatgatttttaatcagaaagtaaaaacctagagcattgatttccc

SEQ ID NO: 90938 - DNA, 558 bp, Cannabis sativa
aatagtgatttgtaattagtcacaactgttttacttttagtcacaaattttgttatgactaaaaataagattttttgtagtgtaagtgtactaaaaaatttctaattatataaatactagtcggggactacgtgccagaggcccgtaatacccgttaaaatttgtatctcttattttcatcaattatatttaaataattattaaattaatatgtttaaacaaggacataagtgtggtatatgttcgcttgttgaatgtaaaatcaccaatcatcccgtctaaatgtaagctcatatgattttctcctctattatctactaataagcaaagtttagaagaaaaacaaaattataactaacaaaaaattatgaagaaaagaagaataacaaaacaaaaaagattaatttcgtatgttcatataataacatatagtttttacactattatatatttactaataaataaataaaaaaaaaacttaattaaaaacaataagtaagtaaaattcattaaaaaatgggagaaaaaagctggtaagaaatatacaaaagacttaaa

SEQ ID NO: 90939 - DNA, 617 bp, Cannabis sativa
gtgggtctttcatgggctaatagattggggttttctgtggtgcgtgtggagtcagattctactgtggtgtactcgtgggttaattctctggataatattcttatgtttaaactaattgttgaggagattatttctcttttagctgctgttggtggtggttcttgttgtgtcatttcgcgtgatgcgaatggtgtggcctacgcactagctaagtctgttactagttctatagaggttcatttgtgacctgatgcttgtcctaaattttttagtgctcctgtaacagctgatttaatttgatttgaataacatactttctttctaaaaaaaaaaatacataacacacctaacaaaggttcataaacatcatgcaattcatgtgtaattaggactagtcatgagtcgtcactgtaaaactgaaattgtgtggaccccacatatttattcaaaatataaataataaataataaattttcaaaaaacaacaataaatatattagacccactcttatctaccaataatgtccttttcttcgcatttatttatttatttaaaaaaataataattacaataattactttgaaaaaaattaataacaataattcaatttaattaa

SEQ ID NO: 90940 - DNA, 999 bp, Cannabis sativa
atgcgcaaatgtccatagatgttgctggtctaagtaacagtccatcaacaattgtccctttgagatacctaagtaaccgtttgcatgcttcccaacgagtaacagtgggagcatgaataaattgactaagtttgttgatgatgaacgcaacatcaggccgagttaaagtaaaaaattaaagttcaccaagagtacttcgataaagagtaggatcttggaatggatcaccatcggttaggggcaattttttatgagagcttgcacgattaggacaacttttgactccatcaagttgtcatctagtaagtaaatcagtgatgtacttacttagagagagatacataccactagcatctctgtaaatttcaatacccaaaaaataatgaactggacccaagtcttttaaagcaaatgaattattgagattagtcaccaatttggagataagggtagagttttgtccagtttctagtatgtcatcaacatacactagtaagatgatcaagttggaacctgtaccatagataaaaagggaggtgtctgacctagaagcatgaaatccccattgcaatagtgtgttcctcaatttttcattccaagctctaggagcttgcttcaatccatagataactttgtgaagatggcacacatgatttggtctagttggatcctcaaaaccctttggctgcctcatgtagactgtctcatgcaaatcaccattcaagaaagcattactaacatccaattgtttgactggccaatctgaggtgacagcaagagaaagaactgttctaacagtgacaggttttaccacaagactaaaggtctcttcataatcaaccctaagagtttgtagataccctttagccactaatattgacttgtaattatttagagacccatctgcattaagcttaattctgtagacccgcttgttgtcaataacatgcatatatggatgatatggaacaagagtccaagttttggacttgatcaagg

SEQ ID NO: 90941 - DNA, 1011 bp, Cannabis sativa
tttatcaatacctatttaaaatccgaaaaatttagtctatttggaaaaataaaaaataaatatatatatatactatattaaagttacgtggtacataactttaattttgtgtattcatttaagtgtgaggttatggttttttattgctattaaagttaatgttatagataatttaattatataaacaatatttttaaaaataacaaaatattaaatataaatataaaaagaaaatacataagtattttgtaaagactaaaaaaaatatgtaatttacactttgaatacttattcataataacttaaacccattcacttacaatattttccaatataattatcagacaattcaatgtgttattccttataataattattatgtgtgagtttattttaaaaaaattaatattaaatacacttgagagcattgactgttaaacatctatcccaaatttttataatcaacattgttacttaatatgtaagatcacttttcattaatctattttttggattagataacaaattgagctaaatgtactaaaaatatcaattagtagctcaaatttgtgattttggaaagtaatgtggaaagttgcacatattgatctcaattaattcaataaaaaaattaattacaaatcaaattttagagaatttatggtaaataaatccaagagcattaaactaataaagaaaaatgagattaaacctgatgaggatgatggtcgggaggaacagggctggccctgtaaatatatgggcttacgacgaattaataagttttggggccctaaaaaatatataaaaaaaaatatcaaatgaagagtattatgagatttgaactaatgaccttgaataatatgtcatatacctcaacaaactaaattatgaatatttattaattacaatacacttaaattttacttaaataaaatcctaataaaattttttatttttttattttgggcctccggaaagtgtggaccctaggcatgggcctagcccgcc

SEQ ID NO: 90942 - DNA, 788 bp, Cannabis sativa
tattacaagagaatcagggaaagaactctgtttttattatattgagagaattgaattaattatttacagagtgaagaaatggcatatatataatatgctcagctaagtgtacaaccaactaaccgactataactgaaagtaaccgactaatcctaacagactaatcctaacaggatgaccattgctttggagatttttaattttatttctggattttaagtttgtaattttatttttatttctcgcttagacaatcgggctacaaactatagtaagaaaggctagagtgcataatcttttgaatggtgtttaccataggaagggatcttctgttgtgctttccaattacttattttattgaataaattcatgttattccaaaaaaaaaatatatatatttaaatgcataatatttcgacaccttttttaccctaaatgaatataattaaaatatctcttttcaaatgtattaaaagtagattgtctataatttattatgcttaattttcatttaataaatttatctatataatgttcactatattcattgccatcatcatgatcaaatgatttttgcattgctatataagcattcttattatgtattttatagtgcttaatgtggcgcgtcatgaatagttaaatattttttaatgttatttattaaattaaaatatgtgagacttatatttaattatttgcaatatatcacttcttatagtatttaacactataaagtattccatattatttttcttgttatgatggtttatgttattgcatttcag

SEQ ID NO: 90943 - DNA, 672 bp, Cannabis sativa
aaggatattgttatccaaaagaagcccattgtgttgtttctttgtgagacgttggctaagaaggatgtggttgagaagcttcgggtctctcttggcttcgaaggagctattagtgttgatgcgcaagggaaaagtggtggagtggctttactttggcgcgaagcggaggaagttcaattgctcaggtttggttctaactatattgatgttgttgttcataatcgtgactatggagagtggagacttacggggttatatggtgaacctaatcgtagtttgcggaagcgaacttgggatcttattcgtgctttgaaaatggagagtaatttgccttggtgtattggtggggatattaataatggtacttctcaacaagacaaaaatggaggtaacttatatccgaattggttgattaatggtttttgtgatacgttggaagagtgtggtttacatgacttggatttgtgtggctatccttatacgtgggaacggggtagaggaactgattcatgggttgaggctcggcttgatagagctcttgtttctcatagttggcttgcaaagtttcctttggctaagctttctaatatggaggtgtccacttcggatcattgccctcttcatttggtcgctgtagccgaaacaatgcaagtgtcaaagagaacttttagg

SEQ ID NO: 90944 - DNA, 704 bp, Cannabis sativa
ttgtctaagatgagtaaaatcaatatctacaactcatcttgaggggacgttttagaatccattaatattgtttatcatagttagttatgttggttaggagttagttataaagagaagacccagtctgttatatattcagggagtaacaaactttggttactgcacttgtgtatatatactcgattattacataataaaattataattttgcattctaataaatactactattagaatagaatcgagagcttctagccaaataatgtgttactcgatttgtagatagttcaacaaaaaatagactaacattatttaaagaagaaaataacttttggcagtcatgaatgatcaccgaaagtaaaaaatattggaagatgattgcagatagcttgaactgtaaccaaactgtctgtttcaataactaagtttgcaagtggaattgttttatttaaaaattataacttaaattttattataagattctttatattattgtagctattattagtagatattgcatatatatttttaaaaaaattaaaataatttattatgttaaaaaataaaatttaaacattcaaggttacaaacgtgattttttttttttttttacgtttgcaatgatgccaatgaaatgattgaattatattttgtaaaattaattattcaaaattttctatataataataaataaaaagtttact

SEQ ID NO: 90945 - DNA, 764 bp, Cannabis sativa
  modified_base (29)..(37): a, c, t, g, unknown or other
tgtttaaacaacatgcttgtgagtagatnnnnnnnnntggtaaaataattcccaacatctctgccattcaagctagtttcaacaagtgtgtagtgatttcctagcgaaggtaagctcctagcaacttcctttttagttttcttgaatttcaagttaaggattttgcatgaaattgtgattaagcttgttttggtggctgttagtaggtttgagcaagctttgagttttagaactcaagcttggctctttaatggtgaaatttgattctgaacttggatagttgttttattgcttggaatatgtctatggggatataatatgcaggtctaaaagatttagtaaggtttgaaatcgatttggttaggttttggaatttttgggttttctagtgtaaaccggctaatcagttttactaaatctgtaaaaccggttacccagatttgctcttgggttccctgaaaaatttgtgttatcgattcgtgctagtttcaaagctttggttgattaatttcttgttcgtttagggtattaccatgttaagttacggtagatagggtttgggtttaaaacctaagttcccagttgtgatttagcgtgtcagttatccgtgttgttattgatgtgatttaggagcctataattcgacgagcagttgttccactcaggttggtcgggacacctgaatttgaaatcatggtaagactagtataatgtcatgcatatgttattacatgtttagtatacatgttgtttatgcctgttag

SEQ ID NO: 90946 - DNA, 783 bp, Cannabis sativa
ttttgagaagttacattctttgggaattaaaatgataattatctcattttatgagataataaaagtgaactatgagagttacacttatagaatttgtcttgtcatagccagaacaaatggatcaaaagtgaatccaaacttgtaaaatgagccataaaattagaaaaataattttagactcaaataaaagtgaatcatagtggattcaaagatgtgaaaatatgactggttctcttttagatgatatttctagtctactatccaatttttctgagccgtccctgattcatgttagtcggtcggccaatatggctgctcatgaattagctgtgcacgcacttagggtggatggtgagctagttttgatggaggattttccttctttccttatcgatgtactgaacgctgatttttttcaataaattttagttcattgttcaaaaaaaaaaaaaaagttgtgaaaatatgataaaattgtagaagcgattttgaatcttaaaaatcaaaatagtgagcaaaatgatgagaatttcgttaacttttgcataattttggactaatctcaatgaggagttaattctaaaataataggtaaaaagaattttgttattttatgagtaatgatgtgagtttgatattttagttttgttgagaaaattaaaaatgtcaaatagtattttttaaagtgaccttaaaagttattttaattaaaagagaggaaaatacataaaaatggtattttgagagattatcatgtaatctcaaaagattcatgataaactt

SEQ ID NO: 90947 - DNA, 683 bp, Cannabis sativa
ggaggtaaggttagcagacttaacccggagtgcagtattaggtaagcgaatcccctttcactatatccttttatctggggtgcagaaatactctcccgtatctttgagaatgccttagaattcggtatcattagaggaatcaagttgagaaggaatggccctcggctctcatacttgttctttatagatgattaaattttaggtggtagagccacgatggaggaagctacgagggtttggtaatgtctagagaaattttgtgattggtcggaccaacatattaataaactaaaaatctctattttcttcagcaagaataccagtgatggaatgaaaagaagtattaagcgagttcttgagctcagcatagtagttggtaacatgaactacctcggtctcccattgttccgaaatcgtttataaagatgatgatttcaattttatcatggataacctggtcttaaagctgcaagggtggaagttgaaatccttgtctaaagctggtcgtgctactctgataaaattggtgggactttcattaccagtttatgcaatgtaaactataaagttgcccaagaaacttgcagctaaaatagatggtatgattgatttttggtggggctgtgaataaggaaactgtggtatctatgtaaaggcttgggatcagttgtgcctcccgaagt

SEQ ID NO: 90948 - DNA, 726 bp, Cannabis sativa
gaaccacaaccgaccactttctctcaactcaattccttataattccttacttaaataaaagcaaaaaataaaagttgttacataatacatttttttaattaaaaggaaaaagtggttataaaacatatatatattttttttaaaacaaattaaaaattctacttttatttttgtgattaaaaaattttaaaaataaaagtgttaccaaacgctatcaagatttttcttaaataactgttgttccaagagaatgggaattcaagagaataaacaccaaacaaacttaaaagaccacacttcacaccaatcaacacactggacacatgtggtttgactctgtggtatagtccctccaaatgaaaaaaggtctccaaaagttattcttggaaagttatttatctcccgaaagtatgttctcaaacaacttacttgtccatctggaagaagtctcgtggaatgattgttcccatcaaaaggtagttcccggatgactatcatgtccactccgggtgtagacttcaggaaaactagccctcctccacaaaggggttctggatggctagttgtttctcctggaagagactctcaaatagtcaactccaactgttccttcagcgagtgccttggtccgtgattctaaaagccttcatacatgtttccagatacactcttacttatgctgatgtggagatctcactcataggagagttggttaagttagttatt

SEQ ID NO: 90949 - DNA, 522 bp, Cannabis sativa
ctaagcacattacaaagagctattagcctcaaatctcccatcaccgtagcattgcgtttcttaggaataagaagtagattcatatcattgagattacccaatatcagactctaaaaaaatagtcgcgaacattttgaactgcatcacctcccacaactgatcagaatttttgatagaaaattggagtcgggtcattaggccctaaaaatttgtcgaaatgcatatggaatataactgtcttgatctcaacattattcaaggaagaaatagatggccgaaaaagatagcacataaaaatagaccatacatacccttaagccaaataataactttttttttgataactgttacctccaaaaaggagcaacacaagaacacacgaaacagagcaaaacaacacaagcagctagaagctaaaacagaacaaaaactaagggatgaaaccctggtagacgcgaactaggacagaaaaacaatacagtagaaacaaacaacagtaaaaaaagaaaagcaaaaacaacc

SEQ ID NO: 90950 - DNA, 1249 bp, Cannabis sativa
ggcataaaacccaacacccctatcatatcattatagaatctctgcactttgaaattgcaaccggttgcagcaaggttcaataagcttacattcgttgagttttgaatcttcaaaagcttcttaaaataccaacttacatcaggttttaccggaaaagaccaaacattctgtccctttaagtaaattgagttgatccatttcacccaaaggttgtcttgcttgttggatagagcccacaagtgtttagctatcaaagccatattccataatttcccttccctgaacttgataccatcataatgtttaggaaggtaaacttttccccatgagggggtgtgaagcttgctcctattacccttcattgcccaaagaaaatctctacatttcttatcaatggctgcaactattttttggggtaagatgaagaggctcatccaaaaattacaaatgccgagaagcatagaatggattaactgagcacgaccagcaaaggagaggttcctacttgcccaaccatttaacttcaaactgagcttatctaaaatcacaccacaatctgaagctttccacttagttggtcttagctttacacccaaatatttgaggggaaaagatccctcttccatttgagttaaagccaggattttgattttggttttctccttaacccctccaaaataaacatgggatttcttcttattagctgaaagccttgtcgcttggcaaaattcctgaaaggcatcattaactaattcaacagacttcatatttcctttacagaaaattatgaggtcatcagtaaaacagaggctcgttaatctcaaattcttacgaagggggtgaaagccaaacccttttttgctcgaaacctgagataaaagcctcgacagatattccattatcaacacaaacagcagatgaaataagggatctccttggcgaagccctttttctcctttaaatgagccatgaattctaccgttgagtaaaaggaagtaagtcgtacctctcaagcagacaagcaaccaatgaacaaatcttgaaggaaaacaaaggctattcaaaatgtcctccacaaaatgccagtctacagtatcataggctttgctcaagtcaatcttcataatgcacctagcagaaacatttcttctagtgtaacctttgaggagatcttggaagatcatgatgttatgagcaaggagtctatttttaacaaaggccccctggttgtcactcaccaaacaaggaa

SEQ ID NO: 90951 - DNA, 931 bp, Cannabis sativa
tagttcgtccagttgtgcttgcactgctggactaacctgttcagcattttgaccggtctgagtcacgtcagtatctttttgagcaggaatttgagcacgggtttttgggctgcacgatcagcgtgccaagctaatcgtctactcctctccttccattcagatcgtttctgagatcatgagtcattcccaaccttttgaatacagatacgcttggctgtctcagtgattgattggtttggttaacatggtaaccggcaccattaacctggttggaattatcacctatcacttctcccaatgaattactagacaaggtttgcccacctactgcttggcccacaggcggaacctgtgatcggagatttggcaactgaccatttatagtctaagaagtattcatcgctggatctttgtctatttcacccaggggggtgacattcaggggttgctgcccgacagtttggtaggcttttcgtatcagcacagtagcttgccgactacgattgtcaatctctgcacaatgagcccttaacgcttccatctctttgtctctccattcgacaaacatgcacgcctctactcttcgaatgcgagatttaccgtagcgcggagttcctcttgatcatgatgtagagtgttggtatgacattgcatgagtcgaagagcagcgcagatgtttcggatctcagtatcatctccaatggtcgttcaaacgttggtagcaggcgaaacggctgtgttatgaatgtactcgctgggtgctgaactggtattcccactctcttacacaccatgcgcaatttcatccacaagagtcgtcacaccatgacccacgtttcacagttgctcgggattaacagttggcggaacccttgtgtttcctgggtttcgcaatgcaggatccactgcctatggatttgctggatcaacc

SEQ ID NO: 90952 - DNA, 684 bp, Cannabis sativa
attcattctcatgataaacaatgccttttcagaagataatgtcatactattttctttagaaacttttttctttttgagaaattcaattggtattttttacactttgaatagataaatttacacagtattatttttggtaaaatttttatactcttacattcaaatatatatttatttatatttattcgacgtcttataaaaaacacacaaataataaaaaaattatacgaaaataacaaaaaaaataaaagtaattacggtataaatacttaagtttaactcctaattacaaataaatatctaagtttaatgtttggcggcaattaagttatattttctcaactcatgtaggtactcatttgttaaatattaagtaaattgtatctttgattggtctaagtcatgaatttttatttttttaaaaaaattaatttatatatatcaataaaaaaatgacacgtggataatgacttaacatttaatggtcaggtacttgcagacttattattaccgtcaaaaattaaacttaggtatttatttacaattgagagttaaacttaggtatttacgccgcaaattactctaaaaataatatacaaataataataaaagcaataataataaaaatacacgcaaaatttttatgaaaacataaaaattcatattttctgtaaataaaatttt

SEQ ID NO: 90953 - DNA, 592 bp, Cannabis sativa
cagctgaaaaatattccaaccagtaacctcaccttttttttttaataaaaaacctcacctttttatatgagcatcagataaaaataaacccaataaaactaaatatacacccaaaaaaaaatataacacgaaactttttaataatttacttttaagaaatcttattccattccattaataaaattaatagtagattcaataacatttctcctaaatatttgattgcattctttaatttgaattcctaaatatcgtaccaagttcatttgttaaaatgtattttcaatattcaataactaaaaattatctcatttaaccacaacaaataattataaatttaatttaaaagggagtatgatttataaatttcatatcttttttttagttataaaaaattgtaattaagatatttatatttatcatgcataattaatttagagaagtcgagaaaaattcttaaagaagaaattaactacgatgatggcgagtctatctaagaaactgcttatgaaaatactgtgcatgtttgacatcataactaaaaaactgttttttgtttttaaaaacggaaaattatttttaaaaacaattt

SEQ ID NO: 90954 - DNA, 764 bp, Cannabis sativa
aaaataatttccaacaggattatggtctgacctatgagtaagcgaaaggagaattagaattcaaagggttcgtggatgctgactatgcctcgaacagagataccaaaagatcaaccacttcctacatttttttacaaaacagaactgtacatgttggaaggcccagttatagtctgtggttgccctttccaccacgaaagcagaatttgtgatgtcacggaagcattaaaggaagcattatggcttcaaggaattttttttaattgaagcaattaaaaggtggagtgactatgtactcgcatatctagtcttccttccatccacctctgcaagaagaatgaattcagttttatctatcatatgaaaaaaaagagaaaacatatagacataagactctactggattagagaagataaaagaagggctggttgatttagagaaggtcattacgaaagataatcctgctgatgttgggactaaggtcttaacactaaacaagttgaagcattgcttgaactttatcaatctcgaaagttagtaaattgagatttctagaacaccaactagatggttgcattctttcttcatcccctgtcaataatttttaattttaagcaaaaaggtagaattgtgatattgttcttccaaataaaaaaaaaaacatctccataagattgtcctagtaatggaaagttattaatctaccgaaagtatgtctcagatagctaacttgttcatccagaagaagtctcgtggaataatag

SEQ ID NO: 90955 - DNA, 885 bp, Cannabis sativa
  modified_base (397)..(415): a, c, t, g, unknown or other
atgtttatttttctttgcaaatttgacacgcaaattaaatattaccgttaaatatcaactggatgaccactgtatacacatgtgtatatgtaacagtaaaacttgaagtcgatatagtagtaatccaattagtatttaaaagcagtaatatttaattaaaactttaaatttgcaaagaaaattaaaattaatgggtgaggggggcacaacccctgttggggtacatgtggctccgcccctgctccccatcccctctaacctctccatccatcctactctccctccctcccaccaaacatagtcttacgaatttaggttaggtttatttgatatcactgaacaaaattggggatggtttatttgagggatttagttttgggaaatttacaaaaatacnnnnnnnnnnnnnnnnnnntacaaaaatactgtcacatgaaaatcttttcaaaaatactgtgtttttaaaaaataccagtaaaacacaaaacaaaacaacttaaaacaacagtataacaactaaaaaaataccagtagaacaccaataaaaatttaacacagtataccgcaatatgaaactttataaaaaaacacagtaaaaaagtaaaaaaagggtaaaagttagcataccatgtaaatttccctttagtttttttgtttaatatctgaaatcgggccgggttgggcccgatcgaaataatatgtaccgagttgggccgtgagctcgataaaaacccaaatcattcgggccaaagtcatcccatcgggtgagggccccacctgcgaaaatggcccaaattgccattcctaatcatctccaatatttaatttgtatcaataaaactagaatagggtgcaactttttagcatttttcttaatcaagatat

SEQ ID NO: 90956 - DNA, 678 bp, Cannabis sativa
tggcctaaattaggacttgatttttttttataacaaattagaaattattctttaatagagtattcttaaatagaggttctactgtattaattaagtttactttcagcaatgaaatggaatgaaattctcacccccaatgtatctctctctattaatagtgctattacaaagactagagccaatatttttattactattattttggataactacactagagccaataattactaataaagggaatcaataataaaataataattcttttatatttgtgtacttacatcatcaaaattaaaaaatagaagaactcgattaaataagggataaaaaaaaaagaaatactttttctatcaattttataagaagtgtcattaaaaataatgaattttatttattttttaattaaatatataatgataattttgttctttaaaatatatcttacaaaataattatcatatactatagtttaactcaaaatgacaatttaatcaatttaaacattccgattacgttctcgataaagtaaacaagataaattattattattctattttcgaaaaaaattagtaaacaacttattacaaatattgattttgattattcttcatttattctgtttcatttctctattaatttattctgattctgaatattgtatagtaaacgtgccaa

SEQ ID NO: 90957 - DNA, 606 bp, Cannabis sativa
tgcaccattattttttgtactctactcgatgtgatatcttgtcaatctcttattataatatcttaatccatttctatactcaaacatatatatcaaaatatttcttttcaaaaaaaatttcacgatgatatctcttatagttacagcatcatctatgtcaatctttgaaaaatcgaatagtttacaataccgaaaataagtttgaagtttttaaacacccatagtagactggaatatcaaaaacactattttcagtactgcgaattattaagaatttttcaaaaatttacagagatgatattgttgtaactataacgaaaatctctatgaaaaaaaaaattaaaaaaaaaatattccgacatgtgatttcggacgtggaggttgactaagaggttgtaataggaagttgtaattagcactcctctaataactttaagggagtatcgctaaccaatcccagaacgatacctctaaaaaatgctaggtaccactattacccaatactaatatttttttttattatatgtaccttaaagtgttcaatattatactaaaacaacctattataagtaatttataattttatatattattaattaaattaaa

SEQ ID NO: 90958 - DNA, 4543 bp, Cannabis sativa
  modified_base (4072)..(4072): a, c, t, g, unknown or other
accttataaacaacattgcacagggaaatcggcctaaagtgggacactttcttagggttcaccaatttagggatgagggtcacattcgtaacattaaatccattgtgtaaattccccgattggaagaagtcatccaccgcatcacagaaatctttcctgagatttataccttatatcaaaattatatttgttatctaaatttctacataggttgatgtgccatctacatagacgggaaaacaagattcattgtctcacattaaatactataaaatgcaaatggacttacaagcagtgaaaggtgatgtacaatgcagaattttcccagctaccttcatagaggtcgcccaatagtggtactttaagttagctccagggaagtttaattcatgcaattctttcatgtcaaaatttcatgcacggttctcctcttctcggcagctcccatcccacctagaagacatggtcaaagtgaaacaaatactaggggagcccttaagaacttacatcagcagattcatcactgaagctacaaaagtgaaaggattaaccaaagaggggagactagacgtaatcctaggagggattgaacctctaggataattttgaaaagacatcaaaagacttattgtagggtcaataacagtaaaagtacaagttttaatagattttgtggctaagtgctcagacaaggagggaaacagctcaaaagacaacacctagccagaaaaagagcaatttggaagttactgttgggatcttattccttaaataaaacccaaataaaatcatatttactaattaataaaaatcaaaaatcatttaatggtacatattttaaatgattaatttcatgattatattttaatatataaattctattaaatatcatacatatagttattcatgattatactattgtctacacagtgaaaaataatcataattatatgcttcaaactattttttctcacgatttatcagtacactagatttacagtgacgtgataatcaacgatgtagttcacttatatttgtataagtggaatgtcctttctagggcgttagtaaagtaaactagtatcggatgtatcgactatacatcaaactggaccgatattgatagtaaaaaagatatcataaacttaccattatgtctattctaagtcaatgtcacttagttgatcttaggtcaattgatctcaatcctgagatggttaagttctagctatacgagttctttgacttgtttattacctaatcactcgtaagactagcccacacttacatcttggaaattcggtagtgtaattgagtgtgagcgttaaacatttggtatggattctatagcttatataactattcgaagtgaaataatagtttccttagagtttggcttaatgcaataaataatagagtgctcatttcagtaattatattagcttatgaaatatcatttataagtagctaagtgttttaaaaataaaatacattgactggtaaaatggtaaattttttctaatcaatgtaaaccgtctatagagtatcattaattatttagattgtaacaatggataattcataatgtatctatatttggtatatagagtgttctatttaatcaagagtgaaattttgaatctatattgtagttagaaggaattaataagttaggaaatttacttagtaaatttcaaatctacctattaggagcttggttatataggtccatggtccccacattatctaggataatatcgtcttgtagactcaactaattgatttaataagtaaattagaattcaaaaaaagactatgtcttatttgagaattttcaccaagttcgggtattttttagaagaaaagagaaagatgagtttatttgttaattaatacactttgtgggtgtaattattaaataaatttaaattttatcttatttgataattatttatagttgttaaaataaaattggtatttaactaattagatgagaaaagtactaaaattacaaaagacacttttgtttcattagttgaaataaattggcaaaaatttaacgctaaagcccatatgtatattcggccctaagtgaaaaattcagtccaagtctttactccaagcctatctcatctaaagataaccctatgtgagtacctatataatgaaagagtatagaattaaaaaaggagatgtcatttcttcctcttctcttcattttcgaattcaccatgaaatctctctttcaaatttgtttcagagcaccctctttgagtgctgcaattctcaaatttgtccgaacaaagaccctgctagcaaggtgttctgtactcgtacattggtctagggaatacctaacgcgcccaaacaaggctgcttgcagcctagcagattcgaacaagggtgcttttgcacccaaaatttaattttctattatttttttcacccaattttaaattttttcaattcaaaacccctaaatttagtgtaaaatattatttttaatatgtaaacctaaatgttaaatttggaaattaataatatttaattattttaatagtttattattaatttttgatattttgaagcttgaattaaaaattagttattttatatttgaattatggttaaatttttaaaatttgttaatttcttaattttatagattatttaattataagattagaaattttaatattaaatatattttagaattaaaagatatatttctcgttttaaattaaaatattttattataaatcatcttatatgattatttaaataataataaatttgaaattaacttagatatttttataaacatcttaatcatgtattttaaattcaaaatttgtcatttaattatataatttattatttaaaagtcctaagttagaaaattgatatttattgcaatattatattactttacttatcatagatatataaataataaaatatatgtttaaataacctagatatttttgtagatgtttaaaaaaagcataaaatagtgatttttagtatacaatttctaaatttatcatttatttattattttatttataatataatactttcttaaccatatctatttttaaattagtttatttcattattttaattttattaaattataagaatagaaaataatatagaaaatatcctagttggttatatcatatcatttatcttcttagatatttaatttaatttgataatataatcctagtaaaacctagaaattttattaggatagagctagctccttgatgtcaaatataccaaaagcacctgaggtaggatagaaaaaatgaagacaaaacagttagcaagaagtaagaataaaaaccaaaaccgaatttagtcaaatttctgtaatatcaatttttaaacaatttcccggtaacagtgctaaaaacttgttacaaaaaatatgaatagctacgcaagtgcacataatcaagtagtactgacacaagtgaggtcgatcctatagggaattgaactgaataccactatatcagacatatttctaattggtaactgaaaatttgtgattgaaataaaataaagattaacaagaaaataaaattatgcaataaaagtatttaataaaggatgagaaattagggaaaagaatcttgttgatttaattacccaatggttaatgctaattactattctctttcttaatgtgaataactgattataaaaagtaacacaactcttttcagatcttttaggccctaaatcatatgtcatttaatcatctctgaattagactaacatataatcatcattaagcaataatctcaatggcattaaggctatgcaaatactttcatttcacatcaaaatccagtttatccaattttagcattctcaaaactcactgttcatattttgaattgagatcataaagcatgcaaaaggtgatcaatcttaaacatgtaattcagcataaatatggttaaatacataatcaagaaaggagaaatagcaattatcattaaccgaaaaaataatatcatcaacattcatcatctccccaaataggagtttagttcanaatctccatagtcaaatccataattaaaattgaaacagaaaataacataaaaaaaaattaagtgcgaagaaaaaaactggttgaaggaattgatttgggtcaccacaagccgctcttgaagtcctctcctttgtttctaaaaaaatcacctactcccctttaaatgagccaagttttctctttaaaattagtgaaattacgaaactacccatatattaattaggaaggcttcatcggggcgaagcttattccccgttgtgatggctagagcattctcaacttagaaaactttctgccaagtcccatcacaataaaggatactgcccgtcgcgttgggctttagcagaaaattactttgtacattttcttttcaactctgtcatctttttgttaggtttgtgccctaaataaaatccattacaatctgattagttatcaatctaagaaatttaaagtgatttatgtttgcat

SEQ ID NO: 90959 - DNA, 1672 bp, Cannabis sativa
tgttacatgaggcttcagggactgggatttggatttggttcgtggtctcttccttcctaatgaagcgggggctatcttatctattccttggccctcctcagaacaagatgacaaactcatttaaaattttaaaaagtctggttgatactctgtcaagagtggttaccagttggctctttgtactaagggcttgggtcgtgcttctccctctagggggtactcgggttggtggaaaaaatttgaaccctgaatatccctccaaagatgatattgtttgtttgggaagcattctctaattggatttctacgaaaattaatttggctactcatggtctcttatctgatggcctttgtcctctttacgagctccatgaagagattacttataatgctttgtagcggtgtccaactttaatggcttgcatgaaactttgtgattttgatctaggtaatcatttttccactcatacaaattttcttagcttttatccacaatgttattgatcatttgccgtaggataaaattgaattagttattgtcattttgtggcatatctggttcaagagaataaattggtgcataataacattaataattacctcttgacttggtggtgaatcgggctcataaatgtctttggaacttccaacatagtcgggctcgggctgggcttccgctctctttgggacaagcggcttctttgccttcagatgaggttgtttcaaaatagtttcctctgctggctgagtctatcaaggttaacagtgatgctgctattgataaaattggtgcttgtcgtggccttggtatggtggtgcgtgatcatttgggtattgttcttgcttctgctgtttagcgcttggaaggttgtcttaatcctcaagtggcaaaggctttggcgctttgaaatgtcataatccattgtcattgctttgagtatgataatatcatctttgaaatagattgcttgaatatcgtgtaaaaagtggtgtaaaaaatttctctaattttctttttgagtcttattttggatgaaattggtaatctttataatagttttaaagatatttatttttacattatcttagagattttaatattgttactttaaagtcactcttaccgtgtttagcactatttagtggtcgaatttttcaatttatatttaaaatttattactaattgaagctcctcattaatgtattctcactttttttaagtttcattattggaaaaaaagtattcgtttttcttgaaaaaaaatatacattaaatttgtactgtgttcatgacgttacaaattaatcatccaagaggagtgatttaatcaagtacgagtttgtggttgagcacaaaaagacaaatgtgaaattaaaagagtgctggaccagcataggaccacgtcttagctctaataatggtccagctcgtactcgattatttattacatttatttgttttcagcgtcgtcggtggttaatagttattagtcattactaatgacaccacataacataatcactccctcaattaccgggtctttatctccaatagtaaatattttggtgttagatcaacacaaaaataataaaatttttatactaatttttttttttttaattacaatactaaaattatagtattttattatattataaataaacacaaata

SEQ ID NO: 90960 - DNA, 926 bp, Cannabis sativa
caaccactatttgaggaatgcaacccctcgagaagctgaagatgatgcctcccgatgtaataactttggtgcttgtggatggtcctccttggaaatatataaaccattgatcttttcatatttcatcactatcaaagaaccttttggatccttaagttctcgtgcatggacttgtatccgtatcacccatggatatgaggttttttcgagctccatgatgtgcttaacgttcattagcactttgattccaccatcatacttttttatggcaacctttgttgttctaatgatcctgcatgaatgatcatttcccattcgaatcttacctccatcaactaatttataattaaaaaatgactctcgaatcggacaaatgtgataagtgcatgcagagtcaagaatccactccctgtttattgaggactctaagatatagaacaattctccatccatggagcagccatcactatcctctgtaattgcagtagaatccttcccgtggtgatgatgcccgttgtccttcctatctccattaggagatttgttgaagccttgctactccttatactttttgcaaaatttttgcaagtgtcctgacctttcacagaaataacactttcgagtttccttctttttggactttaatcttgattgagaatgatggtgtcactctttgaacttactttctttggtgatcttcctctttctaaatatacttcttctttctaagattccttttccatttgcaatttaaaatctttcaacttaagtgcggtaagaatattctccaatgcaatcacgtctttgtcatacttgataacaacctttaattcttgatatgcgattgggagcgatctcagcaaaatgatggtctggctttcttcatcaaccttgtgatttatattagccaatcctaataatctcat

SEQ ID NO: 90961 - DNA, 850 bp, Cannabis sativa
aataagaacttttctttcaaaactatgttcaattccaaaatgaagtgttgtatatcaaattagaggactcctaatatgtaattggttatgtgcaagaagttactagggtgcatgtaactcctatgaagttttttttaaaagaatccatcatataaataacattgttatattatatacaatcattatacaccacccacttgttttaatcgccaccctattgaattatgatttagcagtagaagaaatgaaagtgtatttttcaagttcaaaaacaatgactaaggaagatcataatgagctactctgtacaaacgcatatagtaataatataattaaagacaccaaatagaaatgtatatcataatgagctactctgtataaacgcatcaagattcgtatatcaatataaattaagaccttcaatccagtcaaatacataaaccctaatcttccactttgagtattatttacattcatccactatatctttaagaaaaagaaaacataaaaagggtaaatcaacccttgattagaaaaagaagaaatttcactacacaaatccaaaaaaaaagaaacataacataaatcaataaaagaaagaaacatgaatttgaggggaaacaacgtacaaacatatgtgggggcgggggaatggtattaaaaattagaataagttgcgttaactaaagaaaagaaaatgtgtgactgtcttcctcattaattaatacaatagaaaaataaaagcgcaggaaaaccttaatagatggttcgtacatgagtcgaagaagaagaagcagcgaataagggaagagggagggtgagagcaaggaaaatacctcttaaaacagcg

SEQ ID NO: 90962 - DNA, 514 bp, Cannabis sativa
ttttagttgtcatttataataaaaattttattactctaattttctagattttagtatgtcatttaatttttattgtaattatctctaggcggaattttttgtgcttttgtcatattgataagcatttatttgatggattttaaatatttattataattattatattttctttatcttttattgatatttatatttttcaatgtgttttaataatattttattaggttttatttttttttaaattattctaattttatatattttattagctgttttaaaaatctattcaattcttaattaactttcatttagtttttaattatattattaaatactagaaaacaacactacaagaaaactcacttttgccggcgcatttttgcgccagcaaaagtacactaattgcgccggtaaagctttttttgccggcgcagttgtgtgtcggtaaagctttgccggcgcagttgtgcgccggcaaagtttatctgggaagcttggtcggtaaaagactttt

SEQ ID NO: 90963 - DNA, 551 bp, Cannabis sativa
gtcaaaagttatggctaaaacaaaattcagcttttccccgatatagtccaacaggaatttcggttggaacagtcctgaaccaaccagaattccggttgtctgggcagaaacaacacaaagaatctcaatttttaagctcccataatttactcaaatcttccccaatcaccaccaaactttccagagcatcaacatattacataataaacatattttacaggtcaaacacaatagttgcaccaagaatcaaaaagtgccattaaagcttgctctacacaacaccatccactaaaaactgagttaaaactcacaaataaaactcatcaccaacctcttttcatcactaaaagcatactaaacaatcaagatgcaaataacattcaaactaataccaaattcttacatacatgcatgcttgaacaaaaatcacaatttaacatattttctttaacaaaattcaccgacaactcaattaaaaaggcagagaaaactatctcaaatccaagccttcaaagtgcaacaagagatacttcaaaaccaccaccaaatcc

SEQ ID NO: 90964 - DNA, 533 bp, Cannabis sativa
ttaaaattttttaaaaattgattggagactcactatcactatgatataaacactatcatgaaaaaaaaattcgaagtatatttttgagaaactgatgtatcggtacatgttaagaatcatgaggtttcatttaaaaccaatggtaatgtaatgagtataaatcgtggatcttatatattttcttatcttttaacacattagcaatgtgagactctctaacatcccccttaagatggtagttatttttttgcttaacatcttgaacagctcgatcacaagcaactcttttttttggctcactatcttcgaatcacaagtgactcttttgactctactttttggattagtttttttggatttttggtgactctttttggctcactattccgaatcacaagtgactctttttgactttggttatgctttttttggatcgatttttttttagatttggtggctcttattgaagggggatgttagagatatttgtttttactctgacaccatgataagaatcatgggattattctatc

SEQ ID NO: 90965 - DNA, 560 bp, Cannabis sativa
gaaattaaaagagtagtagaggtgtgggaagccttaatcaaatcacgagaaaagtttctagttctaagggctgctttgtcacacgtccccaaacttctctactatatcaatgacgactggcaccgggtctcggatcttggtgatgcaatccgatacgcatcattcatatgtgaactaacccttgacttccacaactttattttcgaaaagaattatattgtagaaacaaacgacatggaagaagaacgcgtcaagaacatacgatataagctaagtgacgacagtatggaggacataactaaatttgtgaacgcaacaaatgaacgagatttggaagaatcagaaatgccagactattttgaagtgatcagaaatgttggaacttgaactaaaaagcccaccttaaatagaaacagaggagatagtataagtaatagagatttcttcagacgatgaatccaaagatgaggaaatgccagaagggtccaatgagccaaattactctccagtactgaagatcgaggacatcaataaaactccatttcaatgtaatctatttt

SEQ ID NO: 90966 - DNA, 653 bp, Cannabis sativa
attttaataaaaaaatctaacatgtatagtagtgcagggaccatgatttagcacatgtcaaagttagatataatttggtagatattaaagtctggagagaatgatttagtatataaacaattactgaaataataaaattgaatataactagataaaagtccttaaattaatcaacaatgtaaatagttcagggacattttcaacgaccttaaaagttcaagggacatgatttcgtacatatcaaagttcagagacaaaactctccatcttttttttgtttttaattaactttacttttgattataaatttgagatatgagttaaatttaacaattaaatgtcaattgagattatcattttttttttaacaacagttgagattatcattgtgtacacatgtatacacctaatagtaaaactttaaagttaattaaaacatggtatgtgtacacagggataagttagctggcatttaataacaaaatttaacagaaaatttataaattgaagtgaaattaagagagtattagtataaaaataatatcagaaaattaagtgtaaaatttaaccgtaaccgctttcgccgctaattaccttaatatatataacattataaatatagtccatgagacatgtgtacaatatgaacagca

SEQ ID NO: 90967 - DNA, 713 bp, Cannabis sativa
ttatgtatgttgaaatatttggacacgcatattaattgttaggtttttaagtcaaggttcatagagatcatattatataagatctggctatattcctcagaatttggcatatagtcttcatatataatatatgtatatatttatatacaaattctttgggaatcatatggtttgaattttttttcttactttttctctttttggcttttacttgttaatgatatatatagctgtttgaaaaagctaccatatatttatatatataagcaaggtatccatagtacatgcacaagttggccttaattaactatgtctatatatatttatatataaaatatatgatcattatgccctaattagaggaatgttgcattctttggatacccttttttcagtggttaattatcaatagaagatatatacgtatgtaattatttaaaaaacaattaacataaattgatagatttttatttttattttttactatttgatttttattttaaaaaaatatagactaattttcttttttttttttgaacaaaaaggatttattcaaaacaggcagcagcaccaacaatacaaaaaataaagcctcaacagccacaaaaagaaccagcaaatacagcaacagccccaaaccgaaactaccagcccctaattacatcaaaaatatacttatcctgctttttagaggtatcacaagtcaaactcaa

SEQ ID NO: 90968 - DNA, 595 bp, Cannabis sativa
ttttttaaaaaaaaagttattatatggtgtaaatatcattgtattagctaatcacaatttttttaattaaaaatataaatgggtaatgatccttgtatatgcccattttagaattttttattatctctctttctctctcttgtcacataatacaatatgatctaggggcgaaccgacatgtaagcgagacggggtaattgcccctgaaaaaaaattaggacaaaaatatatatgcaatttaattagttacgacatatacttgtaataaaaaatgatatttatgaacataaattagctttagtgtaatcgttaaactagattacatatagagtagaggacaatgcttcaattctcataaaaaatattaatttttttttttaagtttacttttctctttactttacaaataaaaaaataaaaaaattacgccccctcactttaaattctgactccgctactaatatgacccacaattttttggacaactatatgggcaacactcattaaagttggcctatgatatgatagtattaatatttgcaaatataaattactcatgatcttaatatatatttatgtcacaagtcatttttaa

SEQ ID NO: 90969 - DNA, 2086 bp, Cannabis sativa
caagcccacggcaattccaactaacgatactcataatccttggtgggcctggacccaaggatccaccaatgacccaatttttgagagcccaatagagtcagggctcatatcctcttcaccatcactcaaaacttcatcaccttccttatttgtccttctccttttcgtatctgtgacacaattaaggtaggtatattcaaatttttctctcttcctgctattagcatctgactattttggttgtaaccaattcttctactattaatgccattgttttctccatcatgaatggtgcaaaattgccaccattcataccctaatttttgccaataaagtctcttatttcacaggatatctaatttccactattgacaccatgatctgattcacctgaggactcgaactcatctaaaaaatgcttatcagtctctgttccggtacacaaccattttgcaccaatttatttctttcttcgacgtggctcagccatcatccataaaccatatagcttctcaatttgctttagtggtacctcaaataatttgtggcaaaacttttctgaatggtcaattatcccacatataaaacaaaatattggaacaaactcatattttaattggcaccacagccactccccattagtcctcttcagtttaattcttctcttcaggagttgctctctattcacagtaactctgttgcgtaagtaatccctccagatgcccataaaattcttcggatcggacttaacaaaagaactaatataattaccaacgttcctagcattggtttcagtcattaatcccattctaagattatgcagctgaacccacatgtccaaacaaacactcctcggatcttcatcctgccttcagacgttcaaaaattaattggaacctattgaaggtccaaggactccctttaataactctctggatatctgtctcatgatagaattggaaaacataaagattaggttccaactcttttacaaacatacatttgccaggttccaacgtattctgcatggagtcaaaatctatgactcttttggttaagaactttccaactagacaccacctatcatcaataggttggcctacatcctcaacgacatcacagagtaaccttccctcttcttcttcctccaactatatattttcgtattgatcattcagttgaccaacttgttgactactacaagccatcagaagaaacgaaacagaaacaaacgcacaacaaatcactaaaccctcacagccccacactcatgtcaaaagacaagacataaacttcctctttttattttaatttcatgtaaatgtaaatgtttttggaatttaataatgaaggctgaattttattttatgtcattttgaaaaaaaaaaaatgaagttttaataaacaaaaaatagtaaaaaataaaattaagaaaaatatgtgtaaaatttcgaataaatttcccttgcccaagttacggatccaatatgaaataaggcccattatgttacactatgaaatagtgtagagcttattagtaatttctaaagagtgtgaatcataaatatataattgtgaggctattgtaggatatggaatgagaaaatagaagtttggttcaattggagtttagcactgactcgaagagtgcattttaggagatttgtcctattttgaagaggactattatctaacaattggtgctctcattgagagaatttacagtgagagattcactgtaacaactctcagccatggaagatgaagagattgttcaactcttcaaagctatggagttgcgtatgaagcagagttttgatgcgcaaacgaaggcaatgaaactgtatttcagagagcttctcgatgctcaactggagaaactagatgccaagtttaagagttatctcacagcaacggaggcaccttcggatctgacatctcaggtgtcacctacttcgccgaaggtcgaggactacatagatggccctgttgaatcagtgatcaatacgaagtcattgaagaagccacttgatctcgtctgcggtaacatttctaatggatccgatccaggaagatcgcaatcaat

SEQ ID NO: 90970 - DNA, 540 bp, Cannabis sativa
cataataataacaatcgctatctagatcataattgagccacaaatgataataatcatttcttaccaacatgcttattggtgcatataacttttcttaccttagtccaataataaggtgtgcgcactgacctgaatggaaataatgctcgacgatctcgggtcctatgtcacgataatgaaatccaataaatatcttgactaaattctgtcgcaaaccttaatatcaaaaccagacaaaccctaacttccattagccccaaaataggctaaacaactcctaaataccataaactaggttccagaaatcatcccgagccaaaaatcagctttgaagaaaaccaagattttcccctgcagaccaaccggtcgatcagttctgccataccagaaggaaccagtctgccagttctagcaggcaagaaaatcttgggttttcttccccaaaattgatccaaaactcctccaaacctactcaattgctccaaaaaaagtttataccataaaagaaatgtaattaaatcaccaattcacaaataattc

SEQ ID NO: 90971 - DNA, 838 bp, Cannabis sativa
caggagtaacagtgtgttcaatctaagcaatgtcattttttggaaacacaacagagaacaaaatttcaaggagatattatgtccatcctttgcaagaaactgcaaatgcattctaatacagagtaaacagaattttttccttggaacaaatcaaatcgattttacagtttctttaataatccaattaggaagaagagccacttgcactatgaacaccaccatcagtgtatataaataggcattggttgcttaaatcgcaaacttcccttagaaacaatgtcccctcagttttctcgcaagcaggtgaattagtcataccgttgtgaatcagtcatatcatacccaaataaatcatagtaagaaccagaagatatagaaggaaaacaaattgttggctgatatcatttacactagaaagatccaatctgatagataattctgcacatgtgcaatcaggtcaccatatttcgtgccaattttccttcaaaatacaatatccaattaattttacccactttttagtgttgtagagaaatattttgaattttttcagtcagttatattcttagcgaggcaacataacttactaaaaagataatgtttttcagcccaaaaaagcattccatattatacattttattactccatcaaatataaacatcatcgagcacatacttaagatatcaagcaactttttccacccctgtgctgttatattactaattagaaaaacatatatagctttaataaaatggaaacacagtaaagattaaatcacagataaacttgccaaaaaaaaaaaaaagaaatgcatcaatataaacataatacatagata

SEQ ID NO: 90972 - DNA, 552 bp, Cannabis sativa
tttggaagcctctgatgagtggaaccaatcattaatggaggaaagaagggcaatcaaaaaagaatggcagcaattggtcttcgaagaggaaagaggtatatggttgaaatcaaagtgtaaatgggctaagcaaggcgatgcaaattcaagattctttcataatccgttgaatgaaaggaaattcaagaacacaatatcaagaattgaaggagaagatggatcaattattaaggagaaggaataaatagtcaatgagataatttcttttttctcatgcctgtacacttccgaaagaagaggtgggtaggagtattgaaggaattcaacagattctttcataatctgttgaatgaaaggaaattcaggaacgcaatatcaagaattgaaggagaagatggatcaattattaaggagaaggaagaaatagtcaaggagataatttcttttttctcatgcctgtacactttcgaaagaagagtgggtaggagtattgaaggaattgactggcatgcaataccagatgactccgctaggcacttagaaagaccgttt

SEQ ID NO: 90973 - DNA, 1182 bp, Cannabis sativa
tagcttttagagagtatcgctagccaatcgcaacgcgacatgtcgagaaagtgctatgcatggtgcctaatagcaatgctcattgtgtttatataagtttaattattttttcttagaaatatatctattctatataaaatgtacctatataacagaattctaaaaattattgggtgacttttttattatgtaattctagaaattattaggtgatttttttattttattttaataaaaaaataattttattttaagatattttattataataataaaaatgtattttcaaattttaatatttgcaatcagtttagactttagagttatatgttatttgttggtctttgggtctcataatttatatattttaatctaactacctatgtatgatgcaaaaggaatacgcaggttcatacattccacttttctttattttattgaaaaaaataaacaaagaacaagaaaatcaaggttgtgtttggaagaaatgagataatgaaagttctgaatatcttataatccttaagatataatttttttttgctttatttttctatatctcttttttaaaattgaataatgatttctgaatataatatattaaacataaacacctacttgtctttttacctttcaaagctcttcaaagaacgatgagtattcctgtatttaataatactgactgttctaatttcatcagtttatagttctaaattattcgagcactaaattattccaaaacaagttgattgttcaaataataattcaaaattagttaccaaattctaaaatgaaaaattcactgaaacttaaataaaactaatatttacatgactcgacactagcatattcaatttatcaacaaaaaatggacaactcaattatatgcggactcgatttgaataaaaagtgtaaaatataaaaattacactattgtctctgtcaaaacaaaagaagattaaaatttacccatgagtatcataactcattttaataattgaatataactcatctcattttttccccacaaaaaaaaaatgttctctaacttacacaaagtaactaccaagtcataactcattttagtaattgaataattggcatgtgattaaatttataagaaaaataatgctctctaattttctgtatcgttcaaagttttcaaatttttgagattgttgg

SEQ ID NO: 90974 - DNA, 1096 bp, Cannabis sativa
gcacgggtgacacgagtacggcacgatacgaaagaatatgggcttgggcctagtacgacacgaataaatatgacaagcatgacatgaataatgtaaacataagcatgacacgacatgaaaagcatgaaagcaagacacgaaaacataaatttcttagcacgaaagcacgacaaataagcacgacataaaacacaaattcaaatccataaaataattttttatttagtaatttatctactctttcatatcaagatatgacacgaacataatttttcttatcgagattatattgacaatgtacaatacaactttatgtagaaatttagtaatggaccacaattatagtgatattaatttgattattaaacataaaattgtagtttctttattgtgatttgaagctaattttaattgaaacaatctatttttattttaaaatacagaaattaatttgaaaagtacaaaaaaaatagcaatttttcatagccctatttgataaatatgggtcggccattttataaaaaatgagttggctggtttaggcccactacgggtccaacccaacacaaataatttgtacttatggaccgaattaggcttactttgaaaatacgagccatgcccaacccagtccgttttataaaacgggtcgggccaggctcacgtaaaaaagtgggcttttataaaaacgggttgggccaggctgggccacccgaatgtacagctttagtgcgttgtggatacatttagtttattttttgacacactttttaaaatataatgataatttatttttttttatatttcttgttttaaattgacacaatatgcattaatagatattaaaatattaaaattggattgttgtctagttttttttccttaattatctattacccattactcattttgatattataatatattattatttgtattattaatgtactcatttattttgttcccaaaatacaagttataatgtcagctatcactaattttagaaatgaaaaaaaaaacgtaaaagtatgaagttgtaataaataatattaaaaaaaataacatagtaaggaaaaaagaatcaaattgacaaaac

SEQ ID NO: 90975 - DNA, 1295 bp, Cannabis sativa
  modified_base (474)..(475): a, c, t, g, unknown or other
ttcttgcttgctttggccttctgagtcgtgttccttatataggaatgaaaggtgtgcctccaattggaaaaaaatctgaattaggtcaacaatcttgattttcgtacctggtcgcgaccaacttaagggctggtcgcgaccacaggcaatactcgaaaattggagtttctgccaaatcaccctagttacgaccatggtcgcgaccagataaaagggtcgtgactaggctttcttctagtcacgactattgactcctttttagcaggtttggccgaattttcaccagtttgtcccgtcttttcgtcaattgactgaatctaaactttaatgccccgggaacctgaaataagaaaaatcaagcgtaaaaccgctccaaaagataccaataaccgagaaaaggcttaactattagacgcgaaacatagactaaatataacctaacaaaatttccccaaactagactcttactcgccnncgagtaagataaagaaaataaaaactactaactacgctatcagataatcacaatactgctgcctcacgttctgttttcttccttgcacaaactagaatttcaattccaccaactctaacaattaatttagatgctcaatttataacacaatgaataaacacaagatgtattcacaatcgaaacaatgttataaaatttttactctttccaactgttccacaacctgatagctcataagcttgcatgcttacatcgctccagtaatgttgacaacatcctttcggaatcaatagggctttttgaggtttagaacatatggcttagatatttggaaatttaaaaaaaaattagttttggctaaagatatcataagcacacaaacagaacccacacgcttcttgtaatttcaaataacctcaaagtgttcccacattaaccatgatttagaaaagatatatatatatattttatttcccaacgtcactaaaatttttttctttgaataatttttttttttccacacattttactttcttgtgtgtttttttttcttttcttttcaatgacattgagttacacacttttctttattctttttctcaatcttgcaagttcttctcccttctatcatttttctcacactaagtatttttgctctcccaaactaattgcatagcttatgatatcgtggataaaatggtgaagacaaaattaatagtgtggatacaattttcggttcaatagctgaaaaacaaaacaggtttaggctcaagagggtcaactacggataataatttcatggtaggcttgaaaggctcaa

SEQ ID NO: 90976 - DNA, 574 bp, Cannabis sativa
  modified_base (207)..(209): a, c, t, g, unknown or other
taatgatttactttcatgaaataagaattaaaacgatgtttgtgttgatttcgatggtttcatgatggtttatgttattatatgatgagtgtatgtgttttacgatatttttccatgaaaataattttattttctttctgaaaatatttatttggattccttgtgaaaaattaaggaattttcgtttttacggaactcgattccgannnaaattgagaaagttatgaatttttgaaaattgaggttcaatggggtcgagaatgggtgcttacgcacgccagcatctcggacaagaccccagtacactcgcgcaattcagacacatcccttgtctgaaggcgtgtcatgcctgtgtcttcagacatgagatcctgcgtgcacgccgagggaaaccctgcatccgcctacgtttgccgctcaagggaggctgcagcttctcccgtccacacgggccttgggccagttgcagcctctcaaggctgcatgtgcagccctcctggtcagccacaccccaaaacccaaattttgtgggatttttccccaaattttgattttttttaattttcaaacccta

SEQ ID NO: 90977 - DNA, 760 bp, Cannabis sativa
gaataaattgagaatagagaatatgagaaagaatttagcgtcttataaaagaggccggttggaattgaaaaaacagatagaaattaataacattaatttatcaggataaacatcttaacttttaaagcaattacaagagtatttccatgactccaatagtcaaaatactcaagaagtgatctagacataaacacatgattgaatgctttatatgggctaatctttttaatactaatagaaagttacttttgatattttttttttgcttatgacaaagttacaaacatggaactacaaatttaaagcttctaataagaaacaacatgtagtcgattgaattgctttatcttcttcacatagttgattttgttgaattggtgaactagttgattacttgattgctgtcttaatggtttttttaatagaaaaatcatttataaaccattaatctcagttacaaaataggtaatattattctaaattgaaacaatgaacaaattgaaaccctaacaaaattattagctattatatattagcatatcttttaataaagaaaaccaaaacatttcttaactcaccaagcagagtttcacaattttgaataacatatctatataaagaaatcatagctaggaatagaactccttaaagcttgcaccacaaactaaaacaattcgtctccacagttacctattgccatcgatgttctttgatccaacttatggcctccctaactctcattgcctcggcaagctcaggt

SEQ ID NO: 90978 - DNA, 726 bp, Cannabis sativa
  modified_base (55)..(55): a, c, t, g, unknown or other
ttttttaaaaaaattatatatattattaagtttataatattatgttattaattanttaaaaaataaaaatttaaattgaaaaaaaaactattataaatctattataatcaatataaatatctattataatatttttctaaatattataactattataatattattaagtttataatattttttttattattataaatatctattataatcaatatattctaaaatcattcttaactatttttctctctctccttaatactctcaattttaatattttattaaagaataaatctataaattgatattttaataaatctcaattgttagaattttttttactaaaattacacaaaagtccttaaatttaacaatctcattagtacttcgggggaatttctatcggccaaaaaagttcaggggacacaatttagtacatatcaaagttcgggaggaaaaattactatttatgaaagaatattaattaattttaaacaaaagactactttacgtcttttttttgaaatgataattttaatatcaagtattctataaactttctactaatatttttcaatcaatgaaatgaacagataaactttaatggctcattagtaatgttttcccccgaactttgacatgtactaaattgtgccccctgaacttttttgaccgttagaaattccccccgaactattgagattaactttaaggacttttgtctaattt

SEQ ID NO: 90979 - DNA, 731 bp, Cannabis sativa
agttccatatttgatcattcctagccttccaaacatggtacactaggcttttttttttttttttgagaaatggtacactaggcttgacaaagcagccgagagcacttgtttcctgaacttgctgcctttgcttctttctatccaccggatgagccttgtgaaatccaaagaggatgcattccaccctaaccattctttgattctttgaagtccctggcttgaaaaagagcaagaaaagaagagatgctcacaagtttcagcatgatttttacttagtacacacatggggtcatcaataattccaaacctgtgaagtctctcttttgttctcaatcttccttgaattgcaatccacatgatgaaactagttttgggagtgttaagcctcccccaaacttcattactccaatggactttatgctttggaggaacaagtagcttgtacccgagggagatgtagtacttggattgggtaaactgttgaacatcaaccaagtctttaacctggttcttggcctccactaccttattccagtaccaactcccctgagatggggccttgaagccccaccaatcttcctcccgaatgtacacactatgaacccatttcatccacatattatcttctttatttgcaattgcccaattatacttgaacattgcagctctattcatattctgctacccttttgaacccaataccaccttctgattttgtttgacaaacagat

SEQ ID NO: 90980 - DNA, 759 bp, Cannabis sativa
cttttttgagagaatgaatgaacacataataagtgaacataaacactttaagcaatgtgacttttaaaaaataatctatttttctttttctatttttttttcttcactttatgtgtgcataggccggtttagatagaacataattgaataataaaaactattatttaggtttaattttccctaaaaataactgtagaacaaatttttctttttagtcgaaaagtgtagtaatattatgtttgatattgatctaaagttctaaattacaagtctaggatcctacaagaggaagttcttcaagcttggtacatcgatgacaatgatgaagaccaatgactgttaaatagttatttaaggttattttagtcttttatgctagttttttatataaggctttcttattagttgtattcttttatttttgacttttggcaattgaatgaaactctaattttttttggcatttttttattctttatttgttattcttctctttacaaataattatcatggtatcagagcaaggtttatgagagtgaatttcttaagcgcaatcacagctttcatggatccaactctgcggtgagttggctagggttcgcaaggggcagcgcgccccctgcccggggttcggggcaaagtcccgaaagttttttgtaggtgttcgtacaatttttatatgcacaacatccgtacagttcgacattccagtttttagtattgatttcttcaagttttttattgattcgcatagcagtt

SEQ ID NO: 90981 - DNA, 831 bp, Cannabis sativa
attattttactttaccgtgttaaataaaaacaagagataataataattttcagagtagtgtctatcctcaaataacaaatattgaagctttcactataattttttttacttttagtcacaagaaaacttgtgactaaaagtaataaaattatggctaattataaattattatttttatgttgtgattaaaatgttcgtgactaaaggtattagtgacaaaaattataatttattgtgattaaatatacttttagtcacaatactaaaagtaaataagtgataacttgtatttaaaaattatgttttagtcacaagtaattttttgttctgactaaaagtcacattatttagtcattgaaaaaatttattgtaactaaaaatttatcactaattttttgtaatgcttggaaactgtagttacaaaccccacaccacgttcacgtacgtaggcagtgcaatattaattaattaattaagcaggagttcaagcaattaaatggcctaaaaaatttaacaaagcatacaacaaaacatatataataaggtatattattattaagcatcttcttagagttgtcttttgggtcatgcaatcgatcttgcatgtaatatatatatatatatatatcatataatcacgtgtaatatataagtcgttagatcttaattaattaaatgttatatatatatatatataacacaatcgcataataaattattataattttgtaattgtattacatattcaatgggtttctcaaaaaatatccatttttagtttagttttgagtgagtgggggacctagctcccattatttcataccgcgcgtg

SEQ ID NO: 90982 - DNA, 528 bp, Cannabis sativa
aaataaattttcattttttttttcgtatattggaacaataattcattttatttcatatagcctaccattatatatctcaataaacctactaatttttgtttgttgtaacaatattttatttgcttcaatacaaagtaaactataatcaaacataatgatatataccaataaacctattagtctatttttcgtatattggaacaacaattttttttttcaggcagagacatcaaatctggttgtatataaagtatataactgtaacatgtcttacaaacttacatagtaaacatcgataacaatatatgtacctgtcaaagatttaaatatgatgagttgtcttgctcacataaataccttgctcataagtttatttggcatatatggttgtactatgcatatactcatacatgcaaaataatctgagtagtttattttggcataatgacacaaattttcatactttgtttacatggtagcctttttgtatagtctatactatcttatatgctaataaatatattagtt

SEQ ID NO: 90983 - DNA, 551 bp, Cannabis sativa
ggttcgggtttggttcttcgtctgggttctagtcctagtttgagtcccagatctagacaccgactactggtctgttctaggccttgttacctaatcctagtctcggttcgagttttgttccaggaccgggtgtagctttgggtcttattctaggtgtgggtgtttgagttcaggtccgagtctgtctccaggtttgagtttatgtctgcaccccaatctggtctaggttcgggtccaggtccaagttggggttctgagtgcgggtccaagtttgggtctgggtcaggatctctatctaaatccatgtccagcattacaatcccagtctaggtcttcgtacgagtccaggtgcgtattcggatccctatctaggtccaagtctatgtttgggatcgggtcccaaatttaggtctaggtctgggtctttgttccgttcagggtacacgaccgtgtccaggccagagttccagggtcagtttgggtgtgaggctaggtctgtgttcggttctaggtctgggtccaggtcttggtcatggtcctagtcttgttct

SEQ ID NO: 90984 - DNA, 718 bp, Cannabis sativa
  modified_base (296)..(316): a, c, t, g, unknown or other
tactttgtaattaccaactgttttgcaaacatgacaatggaaatttacaaataattaccacttgatatccatgcaaccttgtatttaaaatacaatataattgcaatgtaattactaccctaataattacactgtatagtaattgcacagttgcttccaaacgcacccttagttgtaaaattagttttttttttgggtgaatgtgttggaatttattttaccaggacctagatttactaacaagtatatttttaacattctaaatatgaacttctaaaatgatataaaataaacannnnnnnnnnnnnnnnnnnnntacattggttgtagcggaattaaacgactcattctgctcggatctctaacccttgtatcctttttgtagcagagtataatcaagatctgagtctgatactccttcagttgtttcgattcttcacagtcttacacactatgattgaggactaacttgatatgggtgggcatgcactcaatcactaaggctcgaattttgatggcgaataacactaagaatttcaaaataatagagagaaaagaagaagaagaagtctcaaaacactagttgtctgacagaatgaaaactaggtttagaagcattagcagcattagtttggataatgagttaagggtgagcataaaatccaaaaaactgaaaaaactgtttaaactgacctaccaaataccgttggaaccgaaa

SEQ ID NO: 90985 - DNA, 1105 bp, Cannabis sativa
tgctatgcaaactactaaactctcatctcgtatggtcaaccggattgatggtttggtcagagacttttggtggggtttcgagaaaggaaaccatgggatccatctaaaggcttgggacaagatttttctccctaaatcgttaggtggattgggtttctgaaagactaaagaaatgaaccaggccttcttggctaaatggggatggaatattctgactggtagccaatctttatgctctcaagttttgatcgcaaagtacctccggggaaaagatttcctctcttgcaggtacaaaaactctgattcttggttttggaaaagtgttgtcaaggctaactctatcctaaaaaaggggcttgtaagttaattgctaatggagaatcaacggaaatctggtcggcccctggattcctcatgctaaaggcttttgcccgaagcgtagaaggggtgcccctaccaatcttaatcgtgtagcggaggtggttcttaacaatggtcgttgggacttacaaaagttgaagctcctgtttgagcaggacacaattgcggccatcttgaaagggggtcacccctctggtgtaggtcgagatagatgggtttggacgctggaaagcaacgggcagttctcgtgtaagtctgcttatctatcccaatccctggaaagagctcctcattgtgatgtcgctcctaagctttggaacaaactgtggaatagcaaaaccttggagcgacacaaagtcatgtggtggagcatcttatctaatgctctcccggtaagagatgttataggaaaacgtttccatatagaggacatgagctgccccctatgtggtgtgggtcaagaatctgttgaacatctatttctttcttgcgaagtggctcttcatctttggcgttcttctccgtggggtatctatccggtttgtgatacgggcattcgtgtctgggattggatcaagtttatctgggatcttaatcacaaaggggcctgtgttgatgatatttttttgtatgcttctattgttgtggatactatatggagggtgcgtaatgataaggtccataataactgtcctgttgattttaacaaatgctttgatattat

SEQ ID NO: 90986 - DNA, 583 bp, Cannabis sativa
ccactcattgccaattggttttgagatggaaccccacgattctcaacacacctgaaacttaaatcggttacagggaaatttggcttagcatgcataaatacaaaatatagtgttttaatataccacataattagaaataaaatatctatatacttttatatattgttctcccaaaaatatctttacatttcaaaataaaagtctctctttctctctaactctctcactctagcttgctaagtcttagtgttttcaccgagaagccccgaaattcacgagctcaaccaccctcaaactcccgaaatcccaacccatcactagagtcctcaacccatcgctcgttttctacattttttttgttttcacgatgtcgttaaatatcgctaaattacaatatcgctaaaacatattgttaaatgtagctaaatcacattcaaatttttacgatgattagcgatgtttagcaacatactttgtctcatatcgcaaatacatcgctaaacatcactaaatacgtaaaacatcattaaacttcatcactaacctcatgtttggtctatcattgcaaatatatcgctaaata

SEQ ID NO: 90987 - DNA, 869 bp, Cannabis sativa
tggtgagatcggaggatgtactcttggccatccatccatctcatgaatttacgtctctactgagcgaatacatcgcaatcagagcacgtggttcttcagtttggtcggcttgatagacggcctctctaagtctggttaattcaaaatcttctcctaagtctacatagggcttggcaattccttgtcctgtatctctagcatagtacgaagacgaggtccggttgttggtcttgggggctgtttcccaaaggtccttcctttagtgggaggcgccagaggagggtcctcccttggaggtaagggctgattattcggatccatcaggatttttgtgtcaccctggccaattgtagtggccagattcgttgtgcctgccgagatggcaggattgaccacatctgtagtgttcatggaaattccagtcgtggttggaacatgaacataaagatttgcaatcaaaggatctcgagggagacctgatgatgtagaggggtagccaaagttcttctcatattaaccatgacatttgatcagatatgataccaacttgctctcaatgaaagcaccaaactgttgacctcagattcggccaaccgataacaaagtcgtagtaatgctgatgcttgtcatgtgttagacaataagaacaagaaagtaaatgaacaccaaattttatggaggttcggctcccttagttagcgggtaatgacctactttccttttagttgtattgataacgaaagataataatattcagatcactataggtagaatctgattaactctcttaagattacaatgtaagaatcaaagatagcaaatctcaagtgtagagagaaacaatgggcatgtgtgtgtgtgtgtgtgtg

SEQ ID NO: 90988 - DNA, 734 bp, Cannabis sativa
caatcatgaagacaagaagtggtgccaatcattgtaaataaatttaacttgaatgtaaaaagatgtaagtagccgctaatatgtttttgggcctcgaattgaggtgcctttaggttgtacaaaatttgtcatgagcaatacaatttcctgatttataaaaaaaaaggaggtataacagactgtgcatcagatttttgtttaatgaatttgacccaagtaaaccttgagcaatcatccacaatggtgatgaagtatttgtagccttcagcgatcatggtattgtatgacccacatatgtcaatatgcaataaatcaaagcaattgacaacaatattgtgattggatataaaaggcaattttttttgtttagcatagtgacgcacagaaaaatgaaaattaggactaggatagtgtcaaaattgtaagcttttattaagaggatgttgttttatacatgaaggatgacctaaacgacaatgccatacagtattatcaacaatttcaaaatcactaatggcaaaaaacatagcaggaggaatggaattatgagacaaattcagatagtacaaatctccatttcgatcacccatcccaatcgttcgagtcttcatattatcctgagtagtacaatgattaagagagaaattgaaatgacaaccaatagcttttattagtgcagaaacaaataataaggtgtacttcaggagcaagaagaacatttttaagaataatat

SEQ ID NO: 90989 - DNA, 1001 bp, Cannabis sativa
atctagatcctggtaaaataatatccaacaccaagttagagggtggtgcagcagattggtgggagaccttgttcaggacaatggaaactgatgggatgatgtggcgagattttgagaaagttttcagggagtaatatttcattccatctcacaggagggctctgattagagtatttgatggtttaagacaaggggatatgactgtgaatgagttttacacgaagtttgtagacttatccttttatgcatatccttgtgttgttgaccaacccttggcgattgaataatttatgcatcctttgaggcctacaatacgtggtcgaatagcccctttgacctttaacaaccagactgagtgtgtgacaacagcctagcaaactgaggctcatgtagaagggaataagaagaagaacacaagcagaggaaaaggaaatgaccgaaagatgactaagaagaatcaagggcagtggttccaagcacaacaatttagtgggggttgcactagtagtggttcatttggaaagactcgtcatggaccatatggatgtttcactggtggtcaacaaggtcataaggagaaagattgcccacaatgacaacaaatatttcaagcatctcttgaaggacccatagggacctatgtagagtctattccttttcatggacaggccaggaccaacttgtctcactcttcatcctacagtttcacacccccaatcaggctagcaatctcagtatcaccatcagtttaggccacaaggttcaggcttcaacatggggttctcacaaggtttccaaactcctactcctagttggagtcaaagagggtaaaatcaaggtggagggtctggtgcaagtacaagccatcctagtcaaggaaaggaaaagcaaaagaaaagtcatacgcttaagcctacgctcttagggttgatgatgtacaggacggtgcaaaccaaggagttgttgatggtatggttcttatctcacactcttgggctcat

SEQ ID NO: 90990 - DNA, 1210 bp, Cannabis sativa
  modified_base (27)..(32): a, c, t, g, unknown or other
gttaaaccaagaaatgccgttagatannnnnntttaatatataaagatatactaggcgtatactacgtgccagaggcacacataacctccattaaaattacttatggattataatcatatattttactttcatcaataatatttaaataaatattaaaaaaaaatatatttaaacaagcacataatttaatataaattcatttattgaagttaaaatcatcaatcgtcttctttaaatataagctcaaataatttgttctgttatcatatattaataagtaaagttatataagaaaaataaaataataattaataaaaatttatatatatatataaaaataataacacaagaaaaattaatatcatatgtatgctcctcttacagtcttctacactattatatatatgctaatatataaatatgaaaaaatattaaaaagaagaaacaaaaaaaattgaaagaaaaaaaaaagagaaaaaagatggtaaaaaatggtagaaaagacttaaaaaatattttaaaagagaaaatagagtaaaaaatatgacagacatcttttgaggaaaatgataaaaagatgatgtttaaaaaaatgacaaaaatattaataattggtacaaataaaataaaataataactccaaacatgacaaaaaaaattacaaattactaagaatattatttagtttgagaaaatacaaaagaacaaactataagaaaatctcacctaagcagtgcgtaacaataaaaaaaaaaaaatttacaaagttatgtatatttaaaaaaaaattgaaaatgataattaaagtgaatattaagaacatctttaatgtagagttaaaagtgtaatgtatatgaatattttagtccaaattcataaaagtgaattccaatgttgagtataaaaatttagtacatactaaaaattgtgtcaaattgggcacaaaatatagcatgggccaaattttacacacaataaatattatatttttatttactcgtttgccacttattaatataattaattattttttacattttatttatatttttaatgaaattttatatacttttaataaaaaattaatacttttattgatttttttacacttatctttcaaaaaaatgattaattctaccctaaaatgattaatataaatgttttgaaacactattataaaattagaaatgatataaaaaaaaaaaaaaa

SEQ ID NO: 90991 - DNA, 715 bp, Cannabis sativa
tttgctggcgacaataccaattctaacgacttttttgactccggcaatttttccgacactggcgacttttcccgcactgacatcaaactccagaatagttgtgggactcggcattgtcaccggtaaaattagcggaaaaatcaccaagaaatcggtttccaagaaaaatcggtttcttcatcaagaaactagtttcttggtgacttttccagcgacaatgctaattctgacgactttttccgcgccagcagcaactccgacaacttttgcaccgacggctactccgacgactttttcgttgccgtcaataaactccggtgaccttttcggcacgagtgacaacttcgacgatcactatagttttatttgttttattttttaaaaaaataaatatgaagagaattttaatattttttatggtaatttgattaagtttttattttttttatgaattttaaattcagatttctttttaatgtttgttttttttctaaaaaaaaacatatttttagtttcattggttagataatgtcatatttagtggcatttactttttatgccatatttatcataaccttaataatttttcccatatttttgaaaatagcccttgatactattatgaatgagttctattcaggatcgacccaagtgatttggggccttagacaaaaaattaaaattagacatttattttggaaaacttataaaaata

SEQ ID NO: 90992 - DNA, 529 bp, Cannabis sativa
ttttttttttttttttttaattgtctacgttatagttattagatgaggtgtttaaaaatctaatacaatctaatatccaattgaattaattagtattttcattaggtttagataaataattatgttttatattgttatatacttaaaaatatatataaaaattaaaattaaaatttttatttttttttctaataaatacttgatggatttgatctgatccaaaaagtaagataaatttaaaatattagataaattcaaaccaataaatacacatgagatgtttctattggatatagaattgatccaaattaatatttcatcgaattggatcagttcggatgattaaaattaattggatcgaataggttaaaaaaaataccatctaatatataattaaatcaaatttaaatacacttaaaaatattggatgggtaaaaataataaattccacacacttcttactaaaaattaaggaataaaaaaaaaaggctagatatagatatagtcactcaaaattgggtacttatca

SEQ ID NO: 90993 - DNA, 644 bp, Cannabis sativa
  modified_base (598)..(606): a, c, t, g, unknown or other
ggggaactggaggctatctctttaggcttggctgtgatccagagattgaggctctgtgatgtggatttgatctctgactgtgaagctcttgttttggctattaagaagcaccaatctccggcttggaatgtctccttttccttttctcatgtcttaaatttgcttttggatttgggtgttaattttgtttggttatctcagtcttgtaaccattcggcccatgttttggctaaatagaacctatctcagttgcgtcatggttttttggatttgtgggaggtgagtccctttgtactcactaatatctttttttttttttgattaaggaaagtgccataggcacaaaacaaaggcaccaacgccccagcacaaaaaacaacaggaacagaaaacaaacagaaaaaaacaaaacaaagctaacaaagaaacaaacaacgaaactagctagaaacattccctgagccaaaggtgtccctccctacaccaggatcccactccctgagatcatcaaggatagaatcctcaacttcgacatggttcatgtgtaatgaccgctctagtaatatggattagaaaaaggcaattagcactaattttnnnnnnnnnattattatttgtgaattaaattttaatgtggaccccaa

SEQ ID NO: 90994 - DNA, 554 bp, Cannabis sativa
attgggcgaatttaggagcaacacgctggtaaaatgaaatttacttctcatgtgttagcgaaaggggttgacaaatcaacgttggtattagaacttttgctggcacaaaataaaaagcgctaccaaaaataacttttcctagtgcgtaaatacgctgaaaaaagttagattgtagccactacaaatatgcgttggtaaaactttgacctttttgcgagcatattttgcaaaatgcgctactacttttaccagcacagtagcaaattgtgctggaaacagtgacatttcttatagtataagtacaccctaatattttataaaaaataaacttaaaataatttttaaaaatcactcttaatatttttatgaattatttggtgttaattgtagtacttatttaaaaaaaaaaaacagtcataattatttttcaaatttatataattttttttatatttttataatagaattttatattattttttattttaattttttattataatatttaaattgtttttgatagatttattttttaacaatttgaattgaaggaa

SEQ ID NO: 90995 - DNA, 519 bp, Cannabis sativa
tgaagctttctacctggcttgggtggctaacctcgtactagtgcccaagacaaacaaaaaatggagagtatatgtattgatttcacctacctcaataaggtgtgtcccaaggagtgttttccacttccaagaattgatcagctcatggatgcaatagcaagatatgaaatcctaagctttatggacgcctattcggggtataattaaatcaaaatgcatctaccagaccaagaacatacaagtttttgaacagatatgagtctgtactattacaaagtaatgttgttcgatttgaagaatgttgaagttacttaccaaagactagtaaacaaaatgtttaaagaccagattcgacgaaatatggaggtatatatgaatgatatgctcgtcaaatccaggaaggttggggggcacatagaggacttggatgaacacttcaaaattctcagaaaatacaacatgaaacttaatcccttaaagtgttcctttggggttagctcgggtaagtttcttgggttt

SEQ ID NO: 90996 - DNA, 526 bp, Cannabis sativa
atggatgatgccacatagatctggctgaatcttgaggaacgagtcaaccaaaagaatgctcctcaagtctttgaagctattctaacaaaacagtctcttgcacaaggatctaccaatgttaccagctacttcactagactcaaatctctttgggatcttatccaagagtatcgaccataacctatatgtacctgtggagctataaagacagttcagggatatctagaagaagacaaagtccttgaattcttagttagcttaaatgaatcctacagtggcactcgatctcagatcttaatgcaagatcctttgcataacatcaataaagactatgcctctgtcattcaagaacaaagtcaaaggtgcctttcgatagttccagctgaaaagtgataaaagtggatctggatctgaatttggagcaggttcgaatctaggataatttgctagaaatgtcgagcctcgtcgtcctaaaatggtatgtactcactgtggaattacaggccacaccatggcaaagtgcttt

SEQ ID NO: 90997 - DNA, 977 bp, Cannabis sativa
ttgaagatgtagcaacaagagttttcttttgagaacgccatgatattgcagtgcctccatatgtgaacacgtatccagtttgagatctagctttatgtggatctgataaataatctgcatctgccaactcaactaattcttgttttgagcattttgggaaaaatagacctaaatcagtagttccccgtaaataacgaaatatatgttttattccattccaatgtatcttagtaggtgatgaactaaaccttgataacaaattcactgcgaaagcaatatcaggtcgagtacaattagcaagatacataagagctccaattgcattaagatatggtacttcagtagtaagtatctcatcattattttgacaaggacgaaatgggtctttttgacatttagtgatctaacaaccattgggttacttaaagggtccatattaaagcgttttaggacattttcaatgtagtttgattgatgcaacattatcccattgtgggtatgttcgatttgcgagccaagacaatatttagttttccccaaatctctcatttcaaattctttcttcaattacaatattgcctcatgtaactctttatcagtcccaatgatatttaaatcatcaacatagacagcaataattacatatcctgattttgtttttttaatgaaaacacatggactaattggattattattgtatccattctttaataaatattcacttaaacagttgtacacatacgtccagattgttttaagccacaaagggatctctgtaactttatcgcacatatctctttgggtttaaaggttagtggttcaggcatcttaaaaccttcaggaattttcatataaatatcattatcaagagatctgtataagtaagctgtcactacatccataagatgcatttttaagttttcagaaactgttagactaatcaaatattgaaatgtgattgcatccattacaggaga

SEQ ID NO: 90998 - DNA, 552 bp, Cannabis sativa
tggtgtgcgggttatctgcaagaggtgagggagccgagacaaggagagaacagtcgggctgtgcgactgggtgcacgatggcagcctcctccgccggatgaactgaaaattaatgtcgacgcaagtgtgaagaagggggagggatattcaagcttcagttgtgccattcgagacgcagaggggctgtgtacctttgcttcagctgctgcattgccgagggagtacacgcctttatatgcggagctgctggcgataagaaacggtttgcaagttgggatacaacggggattacatcgatttcgtgttgaaacggattgtcaagctgctgtccatttgatccatgctaaggaggacggctgtcgtgacagtgatggcattgtaagttgtattcgtgagttaatgttgcatgtttctgttgttggtatctcttttgtatttcgtgaggccaatgtggttgcacatgagttagccaattacgctttgattaacaaagtgagagctatgtggattggggttgtacccccttgtgcgagacttgcggttttgcaagac

SEQ ID NO: 90999 - DNA, 513 bp, Cannabis sativa
ctatggatgaatatttatgatattcaaactcatctaacatgcatattatttcacccatcaattcggccgcagtacaatatattgcagaacttacttaactacggatgtatatttaagatattcaaactctactaagcattcataattaattaataataaaagttagtaaatgtataccttgagctagctagaaactgatcgacattaaataagtcggatccttgtaaattgacctcacaacctgcaacataaagaaatactacaaaattataaatttctttctttagctacttactaattatataatttatgagtaactagttactatctagttaatttattactaactaaactagttagtaataaaaatataagaatatgaataaaaattagtaacttgctaagtagttgtaactaactatttactagctactaaaaaaatacaaaatacatgaacaaaattgaaaatagaaaaacattgataaaaaatagagttaatttctaaacttttgt

SEQ ID NO: 91000 - DNA, 1179 bp, Cannabis sativa
gaaagttatgtggttttcttattaattttggccacattgtgctaattttaatatgtgtatatgtttctttctttttaggttttttctcataaatttatattttactttcatggttgctctctattttcttgtaaatttattatttgactgttaatttttaaatttattttattatttaattattattagctattaatatatttaatttcgagctatttttgttaattaattttattaactctttatgttaatgcctctcatattagattacttttataattattagtattgttagcttgtgccttattttatatttgtgccattttttttggctagtttgtacctttatttggcttttgtgccttattagttggctattttaccgtatgttgttggcttatttgatagtgaatacaacctcaatgagtgctactacaaattttcacagataagtttaaattttacttttaattatatttaataatgtgaggaatttatttcttttattttatatcattatttcattattttgcttgctaattgaatttgttatttatttttttgagaaaatagttaactttatattattatctttttcattatattgtgtggtaatagagttttatttttgttattttctaggttattttgtggagggcggctacaatcacagagaattactgataattctaattttaaacataatttgtttcatattatttttcattatttttatattagggtgctagtacgttgttactagccaaagggtaatacctttggctagttattcttagaaattttgttgtttttttagttttttagtattgctgagagctagagttatgaagtgtgtgttaatttctaaatttgtatattattttattttggagattgtcattctaatataagtgtattttttgcttttggtgttgcaattttttttttttttttcagtttcgctttgctctgaagacaactagttaataatgggaaggtattttttcaatgtgatgtggtgctatttgaagacgttatagctttattgtctaaatttctgggggcagttttgtcccacgtggctcgagatgagaaatctgcagcgcatggtttggcaaagcatgcccttcggttagacgatgagctatcctggttcgaggaggtgccgtcgccgattgt

SEQ ID NO: 91001 - DNA, 917 bp, Cannabis sativa
agctacatccgttatagttgtaaacacacacctagctagtagctacatgtgctggaaatacatataatatattaatttctatgtaaaagaaattattggatatatgtataattggaaaacaaagcaagtacggttgcattgcatgtatctaaaattgaatatgtttaattatatgggagagaaaaggattaggatttttgagagcatcttcaaaaatcttttgagacatttcttcgctactaaggaaatatatatatatatatgatcaattaaatttaacgaagattcgaatattggaatacgtgtttcgatcgagtaaattaccttagaattgtaaaatacctctagaaaactgtgtgtgtgatagcgatggggatagggatgcatgtacatatattatcaaataaaagagaaaatatatatatatatatttgtgtaacacacatgtgtaatatatattatgagtgaaagtatggaatacgattcttataatataattgacctcttgtattgaattattgaaatgatttcacttggttgatctttaaatatccctatctgatgaagagtgggtaatcattggatcatagttattaataaagcaccttttaatatactctttaaccgtgcatgcaaagagtgctttatcactatatacctctctagaaggggttgattgtagtgatttaaatttaattagcttagatttgattgaaattaataagcactttagacagtgtcctatcctatgtatgtgcacacacataatgttaatgcgcccctcatgatgtatttcttttaacatatattagagatataggacaaaagctgccaaatgtctttaagtccttagcacatacaaatctttgatctttcgaaaaaataaaaataacagaattcctcactcctaggaggct

SEQ ID NO: 91002 - DNA, 1468 bp, Cannabis sativa
ctgctttgcacttctacatgtctcttcagttgaatactgcatggcaagtgaaggagtggtcccacaaaaactatttaagtttttttggagaaaactcttcttcacttttctacttttcattctctcactagaaagtaaattttgaagaagcttatccttctctttagagcccaaacccacattacctcattctcttgagatttttgcactgcttcgacgatccaagttttccatctttttcatcaacggtgtgggtaagctttctatttatgtaaatcaacccccttgaaacctgaaaaatcaaaccccttccaaatactgattcatttatgtaacttttatttaattattaaaagtttaaatttatctaaaagtttaaattaatgatgtttttcaataaatttttttattataaaagtgtaaacagtaattaaaaaaaatgttgtagtgcacctaaattaggagggtgttacagctctactactaccaatgcatcaccatgcattgcctctcctttatagcatcatatcatgttgtactcaaatcaacatttttcgtgtgtagtcgtcctcatacctaaggttgttcacaaagtatctgatccaattcaatctgcacgatctaatccaatctaatttacaaaatgcggatatttgtacttgcgcagattgaattggattaaaaaatctaaaatttgcacttgtatggattggattttgtttgacctcaaaaagtaacggattcaatccaatccgcacttaattatatatattttaaaaaattatactaaataatacatattaaatttctagtagtattcaaaaaaaaaaaaaaaaaaaaaaaaaaaaaaaaaagacacaaacatctcatttctaaacatgctaaatttttttctagtaatatattaggttggtgtattttatctgttttataatgaaagacacgaaaaaaaaaatcattcatattcacataaagacatacacataaatttttatatcttacctaatatataaaatgtctatctaaccttttttgttatgtacttaacagaatatactaaaaaatttaacagatataccaaaaaaaaaaagttaactttaacagacacctattcaattcataaataaaccaattacacatattcaattcataaataaaccaattttagttacaaaaaattataacctttcgtgatttgtattagcatcaattcattcacacaactcataaataaaacaaattgtaactctttaaaaagttacaagaaaatacattaactaataatataaataacatttcataatcagaacaattgaagtcgttttttaaacaatacgatttggaaattgatcaggccctcgcaatgatgttttttcttggacgatgctatcgtatgcccccctcgcaatgatcaagatgttttctcttggacgatgctatcgtctgccgcctaaacccagtgtcacac

SEQ ID NO: 91003 - DNA, 938 bp, Cannabis sativa
tgttaatttgaagatgaatcaacctctttagcttaatcttgagttccctctcaaagaaccaaaaggatgcataagttgagataattgatgccttaagagcagtatgccatgcacatagatttctcgttattttaacttggaatccttgtcgcaacaaatgaacttctaattaagttgcaagggtaagtgctagagatggaaaaacaagttcatctgagaaatgtactctgtgtatttagaaagcaacatgttgtgttaatggtagattgatgcaatgttttgcacgtgcatgtgtacaacaccatcttaaagtatggtcatgtttagccaaaaaatcacttcaatggaagctacattcactatcaaattagattatgcattcatcatcttagattatacattcactatcaaattagtggagctttgtacaaatagactcaattcaaattgtaataagatgacgaggaagcctagtatcattgttccaactagttatactaaagactcgtaatttacaatagaagctaggtcaaaacaagctagctagtggagctttttttcataaatatttcccttgcttcttatcatgtagtggaaggcataacatagagtcacaacaagtgtagttcaaaatttgagatttttgaattaccatgtctctcaaaattcaggctcttaaggtgtggcaaatgagatagatacataagaggagaagataaagagattcttgaacaacttttgttaaacaacctttttggtactatgcaaagaatttgcaagagtacatttgagaataatttaagatgtagaagatgaaaatgtctctaatgatactttttaggagggttattccaaactttatgactttcacaagagaaagttcaaacatggtacaattaaatgttgacttgaagttagctcatgaacttctcttaaag

SEQ ID NO: 91004 - DNA, 2533 bp, Cannabis sativa
actctcaaaggatttacgtgtggtggccttcttcctcttttttatgtttttctttatgtggcagtgatgaatgcacaacggtgatcggccttgctgggctaggacaaagtggacgagtggctggtgtgagcagatgtggttgacaatgacacagaccaattcatgaaactggttgttcgtttttaccactcttttaaaaatgttaaagagacgagtgtttgggctattggaagaccagggcttgtgcatgattgcccatttctggctgatgaattatttggaagagttttggatgaatacccagatatcaaaacactcaagaaactccatgccaagatattttttgaccagtatcttcatcagaacccatcactaggtattaagcttatgagggcttatgcagccaatggggaaataaggattacccgccttatatttgatggaattcctgtgaagaatgttgtcttctttaatgtcatgattagaagctatgtaaacaattatcggtatgatgatggtcttcttgtttttaaaacaatgtccagttatggattcataacggataattacacgtacccttgtgtcttaaaggcatgttcagcatcccaaaatttgtgggttgggttgcaaattcatgctgctgttgtgaaaattggacttgatttaaatttgtttgttgggaacggcctagtttctatgtatgggaaatgtgataagttattggaggcacgacaagttcttgatgagatgccgagaagagatgttgtttcttggaactcaatggttgcagggtatgctcagaatgcaaggtttgatgatgcattggaaatttgtcgggaaatggaattgctgaggcaaagacctgatgttggaacaatggctagtctattgccagccataactaacacatcatcctacaatgtctcatacattaaaaggatgtttgataatttggttaagaaaagtttggtttcgtggaatgtgatgataacagtttttgtaagtaactcaatgcctggtgaagcagttgatctatttctacatatggaggattgtgaaatagagcctgatgcagtcacaattgctagtattcttcctgcttgcggggatctttcagctctgttgctcggtaggcgtcttcatcgatatgttgatatgaagaaatttcggccaaatttactattggagaatgctatattagacatgtatgctaagtgtggctgtttagaagaagcaagtgaagtatttaacagtatgaagtttcaggatgttgtatcatggacttcactgatttcagcatatggtaggaatggacaaggtagtgaagctgtggctctctttgctaaaatgcaggacttgggtatgagtccagattccgttgctttcgtgtctgttctatcagcttgcagccatggtggattgctagatgaggggaagtactactttaagttgatgactgacaagtatcaaatagttccaaggctagaacactattcgtgcatggtcgatttattaggacgagctgggagagttcacgacgcttataattttgtcaaagagatgccgatagagcctaacgaaagagtttggggggctttgctgagtgcttgcagagtgtactccaacatggaaattggacttgttgctgctgataaactctttcaaatggctccacagcaagcgggttactacgttttgttatccaacatttacgcgaaagctgaaaggtggcaagaagtgactagagttagatcaattatgaaaagcagaggaatcaagaaaactcctggggtcagtaatgttgagctcaatcataaaatttatacttttctagctggtgatagatcacatccaaagtccaaggagttatatgaagagttagatgtattggtggggaaaatgaaagagttgggttatgttcccgaaaccgattctgctcttcatgatgtagaggaggaagataaggagtgtcatctagcagttcatagtgaaaagttagctattgtgtttgcaattctgaattcagaacctggaacaacgatcagaattacgaagaatcttcgtgtttgtggggattgtcatactgcagcgaaactgatatcgaaaatatctgaacgtgaaattgttgttagagatactcatcgtttccaccatttcacaaatggtatttgttcttgtggagattactggtaaacttcatcatatagagtagtatattctgttggattacattacttgattgaaaacttgaacttgttttactaaactctaatcagttgttatgtaaattatttatttatttattgaaaaattagatcttttcatctgttaaattgaggaacatctattttccacgtcttagtatatagattgttttaattgaaacttaatgtcctaattagctagttaagtccttatccaatttggcacattatatgataagagtaatgttaagtacatattcaaaatgtatgtttgaactttttaattgagactcactacataaatgtgtggtttaagatggataatatat

SEQ ID NO: 91005 - DNA, 863 bp, Cannabis sativa
cataaatttgtttattattgtgttttaatgtatatttgtaaatgttgttataaaatttaatatgtcatttaatgtttgtgtaataatttttaaaaaatataaaatgataataatacaaaagtaaatataaaatttaataataaaataatagtattattatttgacaccaggttttataattggttagtaatattctttaaaagttattgttttaagttatatgatacttaatatttaattacactaatattgtgttagacaccaatggtaccttttaatatttttcaaaaataacaataataatgtaagtcatttaatgcaaaatgagcaagttaactaaaatttaataataaaatattaaaaatgacataatcgtacgtgaaaagcataacatttattgtgatgcatattttgcatcatgttatattgtgatttaaatttgaattactttttgttatgtgacaaatttgtatcacaatttggcacgccattaaaatagactttttacaaaataagctatattttgtatttgctttttcattggagatgctcttatggagcatcaaggtgcctagcactactatgatatgtcatcctataattttttttttttttgacaaatatgtcatcctataattgattagtgatttattataatttttatcaaattgctcacaagggtgttaggtactatgtgtgccttttaacatttttcatgttaattaaggcaccatggggtgcttagcattctccaatgcgtaatattattattggtgcaattatatattaaatctcatataatttaatataataatttttatgaaatattactaaccagataccacttaattaaataaacttta

SEQ ID NO: 91006 - DNA, 1271 bp, Cannabis sativa
gtaagttcccaagttcaatttttttcttattgtatttagctttattttaattgccacttgctatttctgttgaggagtattacattatgaggccttctcaatgtattattggaatttggaaccattagtctttactttttcttttccttttcttacaaaagtgtatataattttcaacgtaatgtgttctgtatttttcgtactttcactctaaacatgattaaataaatatgagccatattttgtttcttatatgcaaatgctgaaaccatccaagcataatgtgggctcatcaatcatcaccattacattttatcgcctttttctgaaactagatagttatgaaaagttaaattcaatggataaaactggaaaagtcctcaatatgttgctgctgtttttgtattggttgattaagcagtctgtgttaagttggtattgcatttgtttaagatggccattgtctttcctactgattctaacaagttgtttcgacatttttgttgcctcagtgaagaaggatttcgaattggcacgtcgacttggagggaaagggaggccttggtaaaaaagcaacaattatttaactaaatgcattccgatttcgataactaccatttttaattcagttgacatttgttgtctaacacaagctaccaatgttcatgcaggtgagattcaccatatacttgtagtcttgtaccaagtattgtatcatgaaaaatagggctcaccaattaaacttattagattctgctattcgatttaatatacccccgtatgtaattttgtgtaagagggtatgatgcaagattatttcagatttcatattgctttgctgtccttccttatggatgaacctacatgcacaagtgaagattgcatttacatttgctcatttctggtagggtaatgtttacatatggagtattttatttatttatttattttgataaaaagcacaaattggtagttgtcatttgcttgacattataggtactgaaaccgttaattgtgtaagacttaatttcatgcttttactacaagcaattaaaaagagaaacaagcccatttacgcatgctccatggggacaaagctatgattttggttgattgacattgtagttatcgttagggggaaatactattataataaattatctcttaaataaaccaattatatgtagtaactgctgataaagcacaatgataagaatggagtaggggtgttcacaaagtatccgatctaatccaatccgcacgatccaatc

SEQ ID NO: 91007 - DNA, 1551 bp, Cannabis sativa
catctcagccttgcacttattcaacctttcctgaaaattgccagaatagtttttccccaaataagcaaagcctcactacagaattttattttatccaacacatgactacccgaattgctactccaaacatcctcaataatcttaaaacaaagaggctctttaagccaagaattctcaaatcgaaaaactctaactttgacagccccaactgaatgagaaagaaccaaattaagaggacaatggtcagaagttgtagcctcaagattccacagtttccctgaaggaaataaatcaagccacgtttggctcacaagagctctatcaattcgcacttctacccactccgaactacccctcccacgttcccaagtaaagggataaccaaataaatccatgtcaactaactcacactcaattaaagtgtcacaaaagccatcaattaaccagtttggataaggattacctccacgtttgtcggattgcgaagtgacattgttaaggtcaccaactatacaccacggcagattagacttggccttcaacattcgaataagatcccatgtgggcttacgaagatttctattaggttcaccatagagccccgtcaatctccaccttctactgaagtcatcagtaatcgcaacatcaacataattatgcccataacccaatagctgaacctcttcctcattcctccaaagtaaagcaactcccccactttttccttgtacatcaaccgaaaaagcaccatcaaaaccaacaacaactcttaacttctcaacaacaactttccttgataatgtttcacataagaaaacaaacttgggcttcgtttggatcacaagatcctttgtgaattgaaaagcccatgggttcccaagcccatgacaattccaagctattatactcataatgattggtgggcttggaaaccaaggcccacctttaacacattttttgaccccactggaaactcctcaaccgatgccacctcagcatcctccacatcacacgtaacattcccctctgctatctccattcgtcgtttgttactgtcaatcacacacacggcatcatgttgtagttaacttaccatatttgtttcacccataatcatatccccacttccagctattacttccttatacacaatcccagcatttaaattctgaatattctttcctgaagatccgattgaaccaatcacgccttgctttgctcgatcaacctccacaattttggcatattcaatgcaccaccgttagccttggcaaagcttggaccaccgccgtccatggcattctcttcttctcttccagtacaaagccattgagccccaattagataattctttttcttcataacagccctcaacccgattccatatggcttgacaatttcatcaatcggcttgtcaaaccgtttcaggcaagcacactcggaatgaccaatgataccacagataaaacaaaaggttgggaggtgttcatatttgaaattcgcccaaatccactcactactacaaaattggcttttcccaacagttaataa

SEQ ID NO: 91008 - DNA, 705 bp, Cannabis sativa
gaaatcatttccaaaggctagtcatcttttgctagtcttgaattgcaatctcatagattgaattctgttagattcttagcatagataagctccttcagggccttacgtccaacagtattggacgtggctctaccacaaaaataaaataaaacaaaaaattataatgagaaattttcaacttataacgtccactataatttttctagtccagcattattggacataatgtaattttttccaagtccaacaatattggactatgaaactccccataagatttttcatgtcgaacactatttttgtgggacataaaaaggttattttgtagtagtgtttgccatataggatagtatctacaagatgttcataggattttggcagtgagctaagtagcaagatattcatcttctattttcactcctatgttgctgagatccaagatgattcgattgaactcatcaaggtgttttctgagttctctcatatcttccatcttgagtgtatagcttctttttcaagtacagtttgtttgcaagggatttttttagatagaatgagggcaatttcccccataaacccaatgttgtttcttcacttgatacttctatcagcacctcatctgccaaactcagtaggatagcactgtgtgcttttgtctcaatttctttgatcttcttcttatcatctcccaattcctttaattct

SEQ ID NO: 91009 - DNA, 1286 bp, Cannabis sativa
aaagtctcccaaatctattaaggtatttttctattgatcttgtgttgttttaggattttttgcatgttgatcatatttttcatttctctgtatttttttctcttctttttgcatgttcctttttgtcggttctcctattttatggttttctgtttgtttgaatgtgtgtcttcttgttgttttggttttgttttgttaaactttagggaaagggtaaatccccagtgaagattgttcaatcaacttatctatttgaggacataattaagaaaaaggttgtagaggtgtgtgatttcattattttagttctaatgttttttatgcttgtttttgttattttttttattttatttttatttttttagtgttgttttagttttgttttcttttatttttttataggattgggaatccaagtacacccgattggaatactaccattccagagttataacctctggttattactctgttattgaagatattaaaaaaattcttactaaaacccaattaaaaatgttttcaaaaactgtgtttggtcattttcttcgaatgtcagactatagtatccattaccaattgattcatggtttgttgttaagggaggttcaacaaccaaatgagttagaatttgggtttgtttgcaaggaaaatatcttaagtttagtgctgaggagttttctttaattactaggttggattgtcatattgattctgatatttttcagttcaagcaagatgataatatacatgtaaaacactgtttaaagggctacaaaaaaattaccaagagtgttatccaaactgtttttattgctgacaatcttaagagtaatgatgatcttgcagtcaagttggatgtgttatattctgttcagtattatttgttgggtggttcctctgggaaagttgtttcaattgaggaaataaatgttgttgatagtggtcgttacaatgaatacggtttgggtaaggagtgttttgatatgaattcaatctttgaagggtaagattgattctggtcttaggaaggttatgcagaaagaagaagagtgtgggtactataggttattaggttttccattggcgttgcaattatggttttttgagtgttatccatatgttattgggaaattgtcattgtattcaaatattggcattccaaggcttttgaattggcctaatgttaggatatttttagtatttaatttaggttaattttagcacatttttcggtttaatttaaattatggttggagcatttttacgcttttatcttttagttt

SEQ ID NO: 91010 - DNA, 680 bp, Cannabis sativa
cataaattattaaaatttattttaatatccaaaagaaatagttaaactttttattatttctaaatgtaattttatcacttgaatgcactactcaggatacatgcttagagcactaacatcaacatctttgtttacttttcaaaatagctcatcaaaacttaattttattgattttaactcacatttttgtattacaccatacagtacactagtttttgttttgtaatcgctttgcgaattctataattcataatcttgtcaaacttactctttctcttgatgagacaagagtttagtggtcggggttacctgagtttatttaaatctttggacttattttgactttggcctaataataattttttttataaaaaaaatgtaaaataacaaaaataaatatatattttttttaaggaaatttgcggcaaaagtctctaaaaagttcagtttgatacagataaattccaaacctccaaaaatagcggcaattcctcaaggtcatgttttttatttgttcgttggtctccaagttaacaaatccgttaaacccaattcaaatgccccgtgtcgaaatattattagagggtgttattattttaattttttttaaaaataaaaataaataaaaaaattttaaaaaaatctttttttctttttctttttctttttttttttattct

SEQ ID NO: 91011 - DNA, 695 bp, Cannabis sativa
tgttttctgattatatttggctttatctgaaaataacatgtttaaaatttataatgcccaactccaatggacaaatcagaaatcattggaactactggtacaacatttacggctactagatagataggttaacttatatacatttatgataatgtttatcgtaattataatgaataataaattatagcagattttttaaaaatttaataaaatttaatgtgttgaaaatagttggtttcttgccgtagcaatatgactttattaagtttattatattattgtatttcatttttaacttaatgagctatgtagatggttcatgaatcatgtgtatgaaatgaaaccatgaaagtgtcatgcgcggtacccaacattctattgtaagtactgttaacttgttagttagaagttggtataatatctgattttatatcttgaaatttaaattaaattatgtaaaatatgatatttaattgtataaattataatatatattatgctataaagtaatgagtaatgaccaacttaaggaatcttaaacagaagtgcaattgaaaattttacaacaaaattgcaaaattagatatgcattcgaacataaaaattcagaattatcttttggccacacggaaagtgggaagaagtgatgagacaattattctgaggtttgagtttgggtttgggatataaaacca

SEQ ID NO: 91012 - DNA, 861 bp, Cannabis sativa
tatataaatataaattaaacacaatttaatccaatgcaatacaataagacataccaaacgaaccgtaaaccctaactctaaacaaaagtgcatcaacaacaaagaaattcgaactcaccggaacaataaatgcaagagttttcccagaaccggttttcgccgcgccgagaatgtccctaccgcagagagcatgaggcaaagccgctctttgaatatcagtcatcttaatgtattttgactccttcaaaccatcctttgtcttctgagaaatcggcaactggtcgaacatggttactcccgagtagcgggagaataatgagccatcgattcggccaacgggttcgccagagcggagaggaggaagagctaatgggttggaaccggaatcaggcttctgcgattcaatccatgagttgagaagttggatttcgttaacctctgagagtctgttttggttgcgtaaggacttggatttgggctttctcatggttttatgtgaaagagatgaacacacacagtggtggagtgaggagagtgagatcgacggcgactggtactattaccgtggcggtggccggagattgaggagaataagaagaagaagaaacgaaggtatagagggaatttagggtttagggtttttctgtgtattttctcatttttatgtgtaaaaataaaattcataaatatattggataaattgcaccaaaacctctaatatttttatttttcttacatttaattctcaaaacttaaattttgcagtaaaacttcaaaattagaaaactgttaataatttacagtttttatcgactttaggtatttagtgttatgttgaattgttcatatttacatctaagt

SEQ ID NO: 91013 - DNA, 824 bp, Cannabis sativa
  modified_base (26)..(33): a, c, t, g, unknown or other
acaatctcaatagttcagggggaatnnnnnnnngccaaaaaagttcagggagcataatttggtacatgtcaaaatttggggggaaaattactaattagtctttacaattttacagtcacatagaatttttttacaaaaatactatttctttataaaacaatcgaaaacaacaaattagaacaattaaaacaacaatggaacaattaaataataattgtggaataatagtgaaaacttaacacagtacacagtataaaacttacacagtatttaaaaaacagtgttttaaaaaaattgccccacaataaaaaagtaaaaaagttaaaaatttcagtatgtagagtaaaaacccttttataaactcatatttttagtttaattagtaaaaaataccatatttagtggccttaactttctatgccatatttatttaaactccaattatttctctcatattattattatggtaaatgtgccttgttaatttgttgagttagtttccgtccttgttaatttgtttttgaaatataattgtaaaatacaaccaaatatcgcataaattcatttctagggaaaaattataatgaacttcttacttaaaaggaaatgagaataaatagtatggtattgattctcatataatttattaaattttaaaaagagataaagtagtggaacccacacaaattaaaaagaaaataaaggaaaaatgcgtttccctttcctagtttaatttattttatttttaattagggaactaagccgcgcgcgcttcgcgcggtgttatccaacttttataatttttatgtatatatattatatta

SEQ ID NO: 91014 - DNA, 608 bp, Cannabis sativa
atatttaaatttaactttcaattgtaaataaatacttaaatttaatttttagccgcaataatacttaagttataattctgaaacttctatcagtacctgactgataaatggtaagtaaattgccacgtgacaatccttgattagtccaagttattaaattttttatttcttttttatattggagcacaattaaaatagtgaagtaaacacaaatttaatttttgtggcaaacttaacacaaattttacattttgtattaaaaatgatctaatagctacaaagctaaaaatatatctaagagctaaaaaaagtatcaaagtagtacatacaataaatgaactattttcactaaaaaatttaactaatgaatattgtgtagctacaaaaaacttctaggttttagtactataatattttattatttttatagggtacttttgagtttttaattaaatatttaggatataatatatattaacattttattgtctatgtattatccacgtatcattttttgagagaaatatagaaaatatgatgtatagagaaatataaatgaataaagtaaaataaaaaactctcgggaattgccatgtttacttttcatt

SEQ ID NO: 91015 - DNA, 745 bp, Cannabis sativa
gataattactatagttaaaaaaaatatacgataaactattaactatataacatttttttaaagaacaaaaaagtgtgatatgaaatataccatttataattgtaaaactgaagatcttccataatgaagttccaaatcaataaacttcaacccccaattaaacttcaaatcttccataagcaataaaatttgcaattgactaaaacagaaaaaaaaatgaaagcaaaccaaataatcaaaagaagatattgaaatatcttaattgtttcaggtcttagtcactgagagaatggattgaagtcattgaacatttagcctgcaaccatggaaagaaaaaaataattagagagatgggatcatcaaaaagcagtgtagttcatccaaaaaataaataaataaggagaaataacttcatttgagttatcattaccaattcaaggaataaaatcaattcaaggagacaaagattaattactatttttcacccaaattcaaagacaccatttataagatttttcttgctccaagataatggaaaatcaacaaacaccaagagaataaacacaaaacaaacttaaaagagcacactgcacaccaacaacacacgatggacacacatgtgatttacctctaacaagcctacatccacattcacttcaaactataattgagattacaacacttttggaccgaaattttctgctttgataaaacaagaagcttttcaaaaaaaaaattattttga

SEQ ID NO: 91016 - DNA, 896 bp, Cannabis sativa
caaggttacaaggtctctctctctatactccctatatacatattattgatttaattatcattttaacatcagaattgctaaaagatataattggtgtcaagcactttttttagtgtcatactgttattgatgtaattaagtatcaggtttcatataacttaagaaaataaattttaggtaatatcgttaaccaatcacgagatgttatttatagaaggtgttaggcatcactaatacccaataacaatactcttttaacatagataagtaattaataatttggaataaaacaagttaattcatacctcttaattaagaatttagcattttctagataaaaagaactaatatagtcacagataaattaatttgtattctgtaatttgtgaaaaggtaaaattaggcctagatttccgaatatcaatttgtcaactacttgaatttttcttatgattcaacgtttatatttaaatttgcaattcatataattacaattgtagatagttttttatcaaaattttaaattgagtaatactaaaagattagcattcttatatagtgtaatatcgttattagtataatttaatgttgagttgcacttgtacttcaataaaataatagaaaattactcacaagacactaccttatactggtttcatcaagacactttgatatctcataatacttttttagaatatataaaaatagagtaatgatatcatgtgtatacacaaattttgacatggttaacattgcaagtcatttttaataagtttcgttattattggtgtggtgcaattaaatattatataaaaataaactaataatttttatagaacattattaactaatcgctagaattaatgtaaacatttccatgcatccacacacaaatt

SEQ ID NO: 91017 - DNA, 1228 bp, Cannabis sativa
tgaccaatacaaaattttgcccctttttaataaaaaaattaattttaaaaattataatattcttttttttaagcaattataatattctattaattcaggaaaaaaataatattttttttaaatcagataaaaaaattaaattaattaaaaaatattaaacttaaaaaaatattttcaaactttttttatttatcaagaggtatcttaaaaaatcaaaccaaaattattgagaatctaataaataatttaaataaactaagatttcttgaagaaaacatcatacttatttatttttataaactcatatcttaacaaataaagaaaaataattaaaaattctataaaaatataaaattattttttaaaaaaatataaattaaactaaaaaatattatatttacttaaacaaatctgcattttctgataaaaataaaaatatactcaagtttgttcctgtaaaatttagtttttacaaattaattttttaatatctaaatgaattttctaataaaaaataaatacttttatatcgcttaattagttttaaaattttaattcatttttttaattgttttaatcattcaaaataatttttcttaagatctaaattaatttttttaagattatactaaaaaaatattgaatctttcttatttttattttgagggggtatgatttgatagttgtcaaattttaggggttaagttactaattgaaaaagacatgtcatcattaattaaatggaataagggaccgaacctaacaaaatgattaaatttctgtaaatgtaaaagttcaagaaaatttttaacaagccctaaattttagcgaccaaaatcagtattgtcgaaagttttggagtcaaaattgctaattattcttaatttttaattattttacttgaaaaaaataaagtactattggagatgcttttaccacactactagtgtctagtgctgtctaaattttcttaatatttagttttagcacaacaaaataaacttctctagcaagctaagccagttaaaattcggatcacaaaaacagcatataatatcaaacttaaataaagtaataatgtgagattaatcttataataacctaaactaatttaattaccgtgttatatgaatatctctgtaagcagctaacttgaacgtacgtaactttttttagggaatgtaatgttaaatattgatatgttctcataatgatttccagatattaa

SEQ ID NO: 91018 - DNA, 769 bp, Cannabis sativa
aaaaaaaataaaataaattaattataatcaaataaataattatattttattttcttattaacaaacagcatcaacttagaatttttttttatatactttgagtttctaatttttttttttacatttgataaagcataataaatactataaattatttttatcaaatgtatataaatttatatttaaagaattacaaatatatattatataaaataagtttttacatgtttgtgattataataaactagattataacattatcattatcattataatagatcttaacaattcacagtactttgaaatttataatttaccaaacactcagctcagtttttttccacagttttgctacagctgctttttctcacaggacagctacagttactttttcccacagcacagttgtgccaaactggccctatatatatatatatatatatatatcataagtgtacatttttatatcttattttttttaacacttttgcactgtctcacaaattttattttattatttaaaaaaaaaataataaaacacaaacacttattctttttcttttctcttttttattttcttactattctcactctaactatttcaaactatttttctttaattaatcacattttattagaaaaaaatcttaattaatttattttaacctttactaaacagtgtcgcattgggcagcttgggccattgcacaaggcctccatttttttaaggcccaattttattttatttttaagaaaaggcctatttttt

SEQ ID NO: 91019 - DNA, 531 bp, Cannabis sativa
agcatggcaagattaaagtcatggaggtgcctaaaacccattccaccttcttcttttggagttgctaaacgatcccacgacatccaaataatacctcgccctttgttggagtttgtcttccaccagaaactagccattaatttttcaatctcattacaagttccaatcgggagaagaaagacactcatagcatatgtgggcaaggatcatatgaccgttttgagtaaaatttccttccctgcacgagacaggaacttgccatcccaactgttgatgcgagcaatgactttgtttttaagaaagccaagcacaacattcttattgcggccaataatattcagaaggcctagataaaggctgccttcaagagcttcagacatatggagtgtagagcaaatctgtacacgggtagtagcatcagtgttgggactgaagaaaatcgaagactttgagtaattaactttctggcctgatgcattttcaaagagatgcaagagattggagatgctatctgttggaaattattttacc

SEQ ID NO: 91020 - DNA, 854 bp, Cannabis sativa
taatcaatctaaaataatcgatttaatctatacttttgtgaatttgattggattggatttgagctattgtgtggattggattggatctaaaataaaagatctgtacacttacatggtgtttggtgggaggtaatgaaatgaaattgaatggaaatgaaataatttttattttattcatttatttggttgcattttaaaatattagaatgtcattctaatggaatgctctttctactattttggtggaatgactattctattttaaaaagaaaggaaagaccattctaacgtaacaagaaaaaaaattgaatgattttttttatcaatttttttatacattttaaattttatttccattctattcctgttcctattcctgttcctattgctgtttctattcctattcctattccaattcctaatccaatattttcacttctcttaaccgaaggctatcttagtgcagatcgaattgattatgagtaaaataatacagattgaattaaatgaacacccctacccctagtaatactattaccttacacaaaaaaataattatacaacggttgaaatgtcttatttttcactttaacatctcccaggctttagaaagcgatggccaatggcacatgaccagatgaccttctcaattttctataaactattattttctaggggcctttttcatcaatagtgttataattaattttttattcattttaaaaagtagaaacagcataatcgaaacaacataacattaaaataaaaataatttttataaagtaaaaacaatataacctcgaaataaaaacaacataacctcaaaataaaaataatttgtataaaaataaaaa

SEQ ID NO: 91021 - DNA, 1026 bp, Cannabis sativa
ttataatctagactgaaaaacaatgaagcttccatcatataaacacaaagtcctggaattgagcagaaagtttaatgttatataaaaaaaaatacactgaaaactgactaacctttcctgagattactttataaactctgtttgctcacaaaaaaaaagtcgtacaatatttttgttttttcagaaatcaattatgattaatcaaaatagagatgttgtttaaccaaaacagcttaaatgactgtcttttttatatatattatttagatattgaatagaagtcctgatttcttattcagatttttctttcctaacttaacaaactgaaatgtcaaattgaattgaaatttgattccgtcacactagtacgaaaagaaaaattaaaatcaaaattctcacaaactcgatcagtgctcagaaacccataccatagaattgactttctcagcatacattgcgtcgaatattatacagcacagccgcttcaatattttcctactaaactttaattacacaacctgcaaaccaaaattgtgcctcaattatctctttcaatgaccatacgaccacatttaagttgccaaaaagcttaaacaaagtcaagcagtgaaaattgagaaacaccattaaaatgcaaaaaaccatcatgtgtaagcaataacttttgaaaatgtgaatctgaaataaaaatctggatttaatatttgaaaattcgagtatattatcattattatttcaatgttagaattgaaaatggtcgtattatcatttcaagaccaagagaacaaaatccaaagaccccatataatcttctactgattctcaatgatcccatctaccaaaatccataaagatggagaagaaaagaggcaccaagacagactctcataagagagatagagagatagagagaggaagagctatgacattaatgaaggtgagagagatgtgccgaagtgagtatgagagagagatgggtttaccgatggtggcgtcgccgtgggtgtgggtttggagtgcggtggc

SEQ ID NO: 91022 - DNA, 663 bp, Cannabis sativa
tttatctcttaaaaggaataagacttggtttttgattaagaaactactaggacaaagagtaatcgggtgcaaatgggtatacaaacacaaagataacaagtacaaggctaggtaagtggcaaaggggtatacatagagagaaggggttgattacactgaaatattctctcctgtggtgaagcatacctcaataagattgatcttggccatgacagcaatgtttgacttagagcttgaacagatggatgttaagactgcctttttacatggagaattggaggaacaaattctgatgcaacaactagagggatatgttgaaaagggaatggaggatagagtgtgtttgctcaagaggtccttatatggcctcaagcaatcacctagacagtggtacaaacgttttgatgatttcatacacaaaactagattcaaaaggagtgtgtatgatagctgtgtttatgtaaagtcatcaaaaaccaaagcaattgtctatctacttctatatgtagatgacatgctaatagctagcaaagatatccaggagatcactcagatatgttaaccatataagaatatttttattttaagaaatatatttctattcaaggaaataaatttctatttaaagaaataaaataaataattgattttgtgataaatgaa

SEQ ID NO: 91023 - DNA, 662 bp, Cannabis sativa
tctccattgcaagaattccaagacacatctaacctatcaagatggtaaagttgagcaatgttatcatcacttgaagtaccattgaagttgttatgtgctccattgaaaacattcaagttgaacattgaggaaagatcaggcaatagaccggtgaagttgttgttgtttaagtacaacccatcaagatttggaaattgactcaagcgattgggaaaaggaccttcgaacaaattatagccaagatctaaatactttaaagatgggaaagttttctcaggatcatcaagaattaaacctttaagtttgttggaacttaaacacaaaacctccaaggaattcttagttgaagatagggtttcaaaaagatcatgtatggttccaccaatattgttcatagaaatatccaaaataattaagttagaaagatttctcaaggatttcaataatcctctactacttccaacttcattatttaacatatggacattcctaagataatctttatggccaaaggaatttggaaatgaaccattgatgatgttttccatgaaggtaagatcaataaggttcatggaagaatttaaaaacaaagtaatcgcgtcaggatggatagaattttgtgtgaggaaaagagttttgagaaaattcgaagaattcgaaaa

SEQ ID NO: 91024 - DNA, 576 bp, Cannabis sativa
ttaactagttaaataatttttcttctttatttttagtttttatgattgttgcagtttatctcataaattagttagtttatttttttaattatttaaaaaatagtcaattaaaaaattattatatattctatttaatcaaaatttgatccatgtattaaaactttgtcccaataaatatgcgtgaaaagtagaaaggagagataattaacaagaataaaaaaaatgcatgcttagataaaaaatcgtataaataaaatgtacaataattattaacgtaaaactagaaaaatgaatatatatatataaataaactaacataacaaatcacgtaaaaacaaaaaataaaataaaaaatactgtgtatagggtgattcccctaatttttttttggtttcaatatgcacctagaaacagcataaattgagagagagcacttagtttttttttccaaataatattatttggttttaaaaggtttttgatacaagggtcttagatgttagttttaaaaagtttttttttatatatatatatattatttggtatatcatgtccattttaattttgagttatatt

SEQ ID NO: 91025 - DNA, 862 bp, Cannabis sativa
  modified_base (458)..(462): a, c, t, g, unknown or other
tagtggatttttttttagtggatgaaaaacgggaatgttgcgattcaaaaatcgtgtttgtgtgcctatggatgagagtatcaaaacagagatcattgatgagtctcatacgacttcttattcagttcatccatggtcaacgaagaggtatcatgatttaaaggccacgttctggtggttaggcatgaagaatgacattgctgagtatgttgctaagtggctaacctgtcagcaagtacaggctgaacatcagaggcctgtagggttgctgcagccattgcacatacgagagtggaaatgggaagatattgctattgacttcgtggtaggtttgcttagaaccacgggacaatttgactctgtgtgggtcatagtggacaggtatacaaagtcagcgcacttctaacttgttcagacgaatttctccattgaccagtatgctgagttatatgtcagannnnntgttcgtcttcatggtgtcccaaattccattgtttcagatagagatccgaagttcacatcaagattctggaagagtctacattgagctattggtactcagttaaagttcagcacagcatttcatcctcagacggatgggcaatccgataggactatacagatttttgaagacatgctacgggcatgtgtgcttgaatttgaaggatcatgggtaaagtaccttcctttgatcgagttctcttataacaacagctatcaagaaataatcgggaaggccccttacgagcttttatatggaaggaattgaagataacctattcactgggatgaactgggtgaaagaaagttcttgagtctcgaggttgttcaaagaactagtgatgcagttgacaagattaga

SEQ ID NO: 91026 - DNA, 873 bp, Cannabis sativa
tacaatagctacactctaacctcactaatatttctaaaatagttcactcatttttgtcacataaaataagtaaaactaaaagagaaataaaaaaataatagagagtataattttactactctagaaatctgatgactttctcaatacatttggctcctatttatagcgagaaatatgctttttaggtgtataagtgagctattagatagtggaggaagtggctccaaaaactgagaagaaattggtcacgtagcaagcacacaacaactatacattgacacaagaaataaaatggaacgtggtgcactaccattctcttttttcggcttgaatacgacttggttgaaggaattatcaattgatcatatcagaacttgggcctatgtgaagagttgcttactgggccgtacatccaaggaaacatgttcaattaacatgattacatgatgaatgaaagatggtggcacgtttttgacttctatgtcattcctttttagtcttccatggtgtgctttttctcttttgtgattcactttgggccactagatttggatcttttctttttctttttctttttctttgcaagaataccacttttcaagaatgccaatatttcgtttacatcattttgcttaaatttaaaaaataacacaaaaattaaaataaattaaatatttccaattaaaataaatttattattaaaactatggaatacttaatttatattaactatatatgtataaataaagaattaaaatgtaggaatttgagccttaatcacacacgaagccattaaaggaaagaaagaagggttaatttcacaaatgcacaaaaacaacaaaaaaaaccacaaaaatacggtttcacggaatt

SEQ ID NO: 91027 - DNA, 856 bp, Cannabis sativa
tatgtagttaaagaacatgactctataactataaaatagaaaactaacaaagaataaaaatgtaaaaaaaattaaaatgcacaaagtttttgtatgtagtataaccaatccttatagattgttattaatccacggagtcatgcccagagataataagatgcattagtaagatctcaaaaatataaattttttttacgtatgcataaattaactctctcttattacatgtcgcacgcttgatgtattccacttccacgaatggaacttgttgaaacttcaagtattcaaactcttttgatttgcttgaacagtgcttgcttcctcccgaggcaaaacttgaaacactttctcccaaaatcttaaagaatcttctcccaaaggcttgcaattttgtttattctttgttgacttaattacagactcaaaacaataacaaagacatgacacaaaatgtggtagagttgaacacactttcctctacaaaacaaagatactctttcttacaaaatatagaatgaaatataaagagaaaaaattgataagaaaccctagctactaacataactatttatagataatatactcatattagacagtacatacatgggctatgctcatccacaactcatataggaaactttcctaaaaaaatctttaatcagcctagaatttcttgttctgcaccggttgaatcgcgagcagtaaatgcaagtttccttttatagaaaaggaaactatcattttaattttctccaatcaatatctaatcaaatcaactaaaatatcaatataagatcataataacatataaatctcagctagaaagagatgtctctaaaatgatttaatttcatca

SEQ ID NO: 91028 - DNA, 1027 bp, Cannabis sativa
atgcatgatcttgctgttcaagtagctggagaagaatgtactacttttgcaatttcaaatggtcaaggaaatatcaagaaaactactcttcatgtgtctttggtagacgatgcttacttaggaagtgaactttcagtttcgttggctcatgcaaaatatattcgaacatttcttagtatttccaagggtaaggaggagtcattttgcgatgtcataacatcaaactgtaaggttatgcgctgtttgactttgaaacgttcaagtgtgaagataaaattaaattctattggcaagttgaaacacttgagatatatagacctttcacagaattattatctccagtcacttcccaattcaattgttaatttggtgaatttgcaaacgttgaagctcaattattgctcaaatctcaaagaattacctagagattttgagaaactcatcaacttaaggcatcttgaactctcttcttgcaaaaaattgaattatttgccaagtggactaggtcagttgacacaattgagatacttggatctttctgagaatgagagtctattatcacttccagatgcaatgaatgatttattgaatttccaaacactgaaactcaatcaatgctcaaaactcaaagagcttcctagagatattgggaaactcatcaaccttaggcatcttaaaatctcttattgtcataaattggagtatatgccaagtggactgggcaagctaactaatctccaaatattatcaaattatgtgttgatgaagagcgaaaagtgtatcccaggtcatggtggtgagctaaaggaattgatgagattgaacaacttgagaggcggattggaacttacaaatttgagttgtgagaaaaatgcggcagtggagtatgagaaagcaaaattaaaggataaacaatatcttctatcattaacaatggagtgggattctgaagctaaaatggatgaaaccgaggctattgttggttatgagatgtcattagaaggtctccagccacaccaaaatattc

SEQ ID NO: 91029 - DNA, 884 bp, Cannabis sativa
tccatgtgaggaaggagtggatggacacgatctttccggaacaaggcacgatccccatccaacggctagggagaccaaagatctacgagtatctccacatttaatgctttccaaaatcaaggtgcgatgtaaagatgaaaatcttcttttttgattttcatgccagtcagtgaacagacgtcgaaatatagtcgatcctggaagacgactcctcaataactgcatcctaactcacgctcctcgactgccgcgtggacataccatcattaaaagtggaagtcaacttccatggtcgagtaatttggaaaggttcattattttcttcctctaaaatccacgcatccagatcaagaggtcagagcaagcttccatcatgagcagcatcctaaaatcttgggggtaaatgttatccacgtttttggaatgggacacgtggattctatgtcagcattctagaccctcatcaatggtaaagagggccaggcccatcagatatcagatatgtcctctcgagagttatcttgattttgtgctcaggataccttccgccttctacggatcgagcttggaagatagttctagagttgttagcccggaggggaagaatgcatcattcccataagactcttccagtttccctatttgtttcctcctatagataaggaaacaacaggtgtcagattgggcaataatatcatatcacggttaaagacaaaacagactcatggactaaggctcgttaatactccaaccacgtaaaggttgtttgcttcttattatactttctctgttgattgttatttcttcaattcttattattattatcctgtttctactcgggaaacaaattataatactcaaagtcaagctcaatcacaaggccc

SEQ ID NO: 91030 - DNA, 969 bp, Cannabis sativa
tactaatatctaataacaatgtttgatacaaaatttgcgagacaacaacgtcaatttttttttttttttttaaaaaaatgaagaatctaattggttaaaataaaattaaaggtgaatgttgtaagttcgtgcatgtcatgctggccactcgtatttatctgtgattttccaaaaaaaaggtcgtatcgtgtcgtgtcacagaaaaatataggtcgtgccgtgttgtgttaatatttttaaaaggtaggcctggtattgcccgtaagcacagtattttcgtgctgtgctcgaattcgtgccgttctttgctcgtgtcggcccgtatttcttaaacaggtcaactcattttcatatccggacttatattcgtgctttactttttcatattttttttttataattactaaattatgtaaatatttcaaaatttaagttatatttatataatttttgaacaaatatattttaagaaattatataaaaaaattattaattttattagaatttaaatatttacttataaatactcaaatttttatctataaataaattatatataactattattttttaatagttttaattataaaattataatattcagtattgtatttaagttttattatcatttaacttatttataattaatatatttatcttaccattattataattcttaaaaaattataaagtcttttaatatatatatgtcgtgtctttttggagttgttgtgtgttgtaatttttaggctagtttattcgtatgtctttcgtgcttcttctaccatgtcgtgcttgaagacatatttttcatgtcgtgttgtaaactcgtattttttttgtatctagtggtactcatgcattctgagctcgtgtcgatttcgtatcaaaaagttgggctgcctgtatttacagcactaggtccactcaagtttcttgacgtatagacattgtagatggccaagtctc

SEQ ID NO: 91031 - DNA, 501 bp, Cannabis sativa
attatataaattttatatttttttataagactttatatccttaattgagtaaaaagtacacattttaagacctaaactagtaaagatgaaatatatttttttttatataataatatttgatgtatgtcgtttactgtatcaaatttattaattttttttcagcactttgaattatttcagtataaaaataagtacttgaattatttcagtataaaaataagtacgggtcaaactcacaagaactatgattattcaattattcaacaattaatgataagagttaataaaaagagttttaagattaagattaaaatatcagaaataaaaataaaacaaacaaattaatattgagattatgatatgagaaactagttaaaggttattcgtcagtctcaacaatcattcctagttcttattaaagaatgtaattttcagtttccaatcaaactattaatcccgcagataacgctgaagcagtcaattatcccaatctccctattg

SEQ ID NO: 91032 - DNA, 620 bp, Cannabis sativa
ggtcacgcaacctacgagtgcaggaagctgaagatagaggtcaaccgtctggtgaaagaaggattcttccgggactgcctcgtttcggacgctgcacttcacatccaacggggaagtaacaaaagccgggatcagtcccctccaccatacattaagaaaaccgtaaatgtaatctcgggagggtcagacctgagcgggaattcagtgcgagcttcgatggcatacgcccgatgggtccaatcggtaagggctatgacggtaattgacagcgacggccctgacgtgctcttatcatttaaccaaggggaagcctctgaattagaacacccccacgatgacgctcttgtcatcactctggacgtagcccatattttaatgaaacgcatgctcgtcgatactgggagctcacccaacattctatttgccggagttctgaaagaaatggaaatcaaagactgaaaagcccaggacacccaggtcacactagtaggattctcgggagaaagcgctgtcgctcgaagtttcgtccaactacccgtctacgcgaatggggtcgacaagtcagtaaagtttttaattgtggattgcccgtcggcctacaacgccatccttggcaggcc

SEQ ID NO: 91033 - DNA, 1141 bp, Cannabis sativa
ataatattttattttattttatttctcttctatattatttttggcactcttacttctaaaattacttcaatatatagcactcttaaaaatactataattatgatcttatacattattatttaatatataatttaatttttagctataataaatttttagattcacttttttattaaaaaaaaataaatagcatcaatgacacaacataacattcatgcaaatttctagaatgatctttttctctccaataatatagtatcttaatattttgtcacataatatgtccacctcaccaatcattttctaaaattttaccattaaagatgctcttaaaacactcacatttgacgcttaatttttttaaaaaaaatatttaaagaactaaattaaaaacatgctacatcatgttttatactcttctattttaaagttttcttttaaaaattcactattcaaactatacattataaaatactattcatttctttaaatatattttattaattgtttggaactttaatttacttttatatgggaatatgaataaatattaatattatatgtttgaaatgaataaaatatattaaaatttttgaaaaagtaaaattttagtgatttattttaaagaaaataatgtatagtataatgtaaaagtttgaagtaaaatagaaaaaataaatttttagtgatatattttgaaagatagagtaaaaaagttgatgagagcgctttaagttaattattcaattctattttttttcttgaaaatgtaaaagatgagttttaatgagtacaataaatatcaccatatgaaaaaaagagaaatactaagaggtattttaataaggtgttaagtaccacaatagataatatattattattggtgcattttagtattgggtttaaaaaaaatacaaaaaattgctaattaattaattataagacgccacatcggtatgatgttgggcatcttaatgtgtcaaataataatgctccaaaaaataatttattgggaaaatcgggtatagtttttctacataaaataatactattgaaatttctaaaaaaaataggaattattttataaatacacaaaaataacaaaaaaaaaattataaaaatatagttgtataaaatttta

SEQ ID NO: 91034 - DNA, 767 bp, Cannabis sativa
ttgggatccaattatatacaagtttccacacaaaatgtttaatttttggtgggattttaagacgccatagagctttccaccagtccacacacatttgatcatcggattggtactgttcagaagccaatgaggtcgccatcttatatccgcttttgactgtgtattcgccattcttgctatagtgccacattatcttatcttctatatcccaacccgtgctaggcatagaaagaatgagctccgcatcttccatattaaacaccgagcggacaaagttttcatcccagctaccatccccattcttcaaatcggctacatacaaattctccagaagaggaggcttatcataaatcttaaaagaaaccggtcgcggaagccaaggatcttcaagtacccgcacattctccccattcccaactctccatctataaccattattaatcactttcttaccccacatcaaactcctccacacaaaggacacatgtgctccactcttcgcttccaagatatttcgcatgggaaaatacgaagccttaagtacttgactacacagattatttggataccgaatacatctccacacttgtttggctagaaatgcttgattaaacaaccccagatcacggaagcccaacccacccttctctttcggtttgcacagatgtgtccatttacaccaatggatcttgttctccttatccgaagagccccaccaaaatcgtgcggccattctatgaatgcttgagatagtcttcttagataag

SEQ ID NO: 91035 - DNA, 900 bp, Cannabis sativa
aaaataatatctcgttgcaaaaaaatcggattttacaaaaaaataaataaataaaaggacatatggtcatttattggtcaagaaaagtattttgcgcgatgcttttaaatatgcatcatcaatggctattcaaagcatttagcaatcaaatttcagcgatcgcgcaaaaatactttagacttatttttgtagtgttcatgtagtcagtttcatgcgtgttgttttattttatacgagtgtaagtgactatattttttaattttatatatttttgatgtctttagttgtttaaaattttttgaaaacataccatatagctattataaaaaattaaaatataatttctctaaattgatcaaaacgctcctatatttttaaaaaaaaaatatagctatatataaccatcatgtacacataaccaagatataaactaaaaaaatatataactaaatataagtgaaatacatgatattaacctaatatttatttatatattatatcatcgagatcaaaatatagagtaaaaaattaaatcagtacccatataataaataaatggttgtgttgaaaaaaaaaaggaaagaaataaaggaataaattatagcatcatatattgaaaaaaatttctacagtgagacactattttttatttcgatatagagacgtgtttatttttagtacttatacataaatttaacgtctaatttaaatttaaattaagatttatataaaaaaaaataattatctatttttccaataatttaaattaggacgtgttagttttaaccgttaactttaacgaaaaaaccgttaaaccaataatttttattagatagccacagatttaatagaagagatttaataaaaaaaaaatcagaccttatattgggttgaaagaga

SEQ ID NO: 91036 - DNA, 569 bp, Cannabis sativa
aaaaaaaaaaaaaaagaaacaagcagagaagaagatgaagatcgtgaggatatttaggtttcctattttatgttttttatttattttctaattaaatcctttttgttaggtaggggtattaataaactttcaactaccatcaaattactatgtcacctcaaattttcttatgtcacatcagcaaataaacgggggtctgttaaaaaacccaacagaaggggtacaataatatactggttatatattagggagattttttaacagcccttatattttaagggccacaacttggtaatgacataagttcagggagcaaatttgctaattattctataaactaacttatttataagaatagttttagtatctcattagagtaaatatagtgtgaaactacactatttttagtattttgaggtccagttggagatagcctaacttcatcatcttaagcattccaaacactcacttcagcagcttttttattttattttttaaaatatattattaaaatttattttatttatgggattatttcacaaatatacaaaaacaacaaaaaaattaca

SEQ ID NO: 91037 - DNA, 592 bp, Cannabis sativa
gacataaaaaatgctttaccatagaaaacagatcctccttaactgtctcacagtgttaagtatagaagcctactagcattcctgccaggggatttatcgctccccataaagcggaggctcgcctcaatctcatcattaagagggaccaggtttaggaaatccatctccttggtggaaaggcaaagatctcccaaaatctcctttgcgggggtttgagcaaatttttttactgaagatgttattaaatttgtcgatgaaaagcttggatattccagaggggttgtcaacccactccccattctcattttttactatctggatgaagtttatctgtctcaaaaacaccatggaggccataaaaaatttggtggaatgatctccctcgttaagccatgccactctagacttttggcgccaaaagatttcctccttgagcatggcttcattaagtttagctttcgcctataagagactttcctcaccagaagggttgaatttttccaaattaagtagagtagttttagcctcctcaacttgacatttgactttccttaaatgcaccctattccaattagaagttgcagcttagttt

SEQ ID NO: 91038 - DNA, 616 bp, Cannabis sativa
  modified_base (560)..(570): a, c, t, g, unknown or other
cactactacatctttctactacctttagcttaatcgggtgaaaacaactagagtcagccctagacataggcggactaagtttacgcctaggacctacttattttagggacccaaataaaaaaatactgtactttttaaaaaatatatatatattttaataaatttaataaataccatttatatttatagtaagagcccaaaaaaaattatccatctatgacttatttcaactcaggccaaccttgacaacaacgtgtgtagtagtcatgctcatgtgtatgtctcctccttcatgtacacaaaattgaatctattttaaattatgtttggcaagaaagaagaaatattttaatggtgataaaaaggccatagatgacgatggatagagtgaattatcactttccataatattgtttggtgtggaaagagagggaagggataatgattgatttcaaatttaaatgtaaaaaaaataaattatctaatatcatatatactgtgcatatatattatttttatttaatcatatgatgtaattactttttataaaaaaaaaaaannnnnnnnnnnaaaaaaaaaaaattttttttttctaaaatttttttttttttttttt

SEQ ID NO: 91039 - DNA, 548 bp, Cannabis sativa
taatgtatcattaagaattaataaattgggaaattatttaattacttttaatgattaatatgatatattaatttaatattatattattttgaattataaattttaatataggttattaatggtttaaatataataaaattaattattaattaataataaattaaaataaaattttaaaattataaactaaaataaaaaatgagataaaaaatatataattatttttaatttaaataattagtgctattagaaattttaaaaataagtaatttttaatttaaataataaataaaataaattaaaaattaatatcaacatcaatatgtaatatgtaatttaaatggttgaaaatagcatagatattataaatgagcgtaaaatattgtaaaatagcataaaacgaaaatttgatcttacattgatctttttagctctaaaccaaatataggatagaacaattatatttgtattatcacatagtgataattttttttatgtttacgcatgcacgaaataccaaagacccgtttggtgaggctgagtcagta

SEQ ID NO: 91040 - DNA, 2471 bp, Cannabis sativa
atacattaaacatcattgttcataatcattaaatccaatatcaatactttatttagagcatcataaatgtaaaaacacatacctcccatattagcttttttcattgttgctaagacaccaaagtcttcaatgtgaatgtgtctccaagatggtagaagaggagcttatgaaagcaaaccctttttctttttcaccacacacccacactcttctcatactaaacacatattaacccttttatatctctaactaatcttgtatctttttcattatttagattttgaaaagagaaatagatctatttcagcttcagtggtatggttattgcatgttcagggcccttgcgtgcttgcataagcaggtaagatgttaccaagatcatcaactcatactcatatttctagaaaaaataaatgaagaaaccttaaatttcacgttcttaatgtaccattgcagggagtggttcacagagatattaaacctggcaattttcttttctctcggaagctaaataaggggtaccttattgatttcaacctttccatggttaggatgcttatctggtttgctagtgctttagtcctttaaatatatttttttaagcttcagtttacataacaatattttgatgaaaaacattcttctgtctatgatttttcattttacataacaggatttacagcaaaggctgagtgttggaagtaagtgtcaacctttatgatgcattcgtttgatctacctatggctagtattttaaattaaacttattgatttgcaaaccaatacgtgtatataggtaaaccaaaaccaagcagttatgcatcttttgttcatgctcctctctcttccccggtagctgctcagtcgaccaaagataataaggctgtgagagttgatcgttttgctgttaatcaaggaggcacagtagatttaaagccaagtcacgaacataagaatagcgtaaagaggaaggctcttactgatttgagtaattttaataaacttaaaagccaaggtgcagatggctcaggtataacctctgcaaaagatgcagcgggcgctaggactccttcagcagaaaggacgagggagcctcttccatccttaggaagaaaggagttacttagccttgtgcagaatgtgatgagaagtccaaataatgatgatgatctaaagacctccgtttctcaaaggaagagaattgctgctccttcatgcaagatggaaagaaagaatttctacacgagcccaatgcctttgtattctaatggtgtacctgttgttgatgctgcattactcaaaggcaaaggtgtgtgtagctaagacagtcatagcattttctatcattcttttgccttctgatgatttattatgttgttttgtaggagaagggaagcgaaaaaaggaaggttcatgtgttggaaccaaaggatttcgtgctccagaggtgagattaattttctcttgacactcaatgcagctagtcctatgacttatatttaatttcttttttattacaggtcttactaaggtcactgcatcaaggttcaaagattgatgtttggtcagctggagttaccctactttacctaatgatgggaagatcaccttttaccggagaccctgaacagttaaaaatccctggtctagttcaaatgtggttgattctcagttgtctcaatattgtatatttcctttcactaactctcgatcacaatcatggcaggaacatgaaagacattgcaaagttaaaaggcagtgaagatttgtgggaagttgctaagcttcatgaccgtgaatcatcatttccatcggtattattttactaaaattccactctcattatgattacatttgatcaaaaacaaaattgttatagccaatctttttcaattaacttaatttgccttatgtctcaggagttattagaggtccaattcttggactctatggaaatccgtagttggtgcagggcctacacaaggagacctgattttttcgagactataccaacatcactatttgatcttgttgataaatgcttgactgtaaatccaaggctgaggatcactgcagaagaagctcttaggcatgagttcttcgcctcgtgccatgagagcttgagaaaggtgaggttgcagagtagtatgtcagtgtgtccagctctaaatatttaagtaacaaaggaaaaataaatgaagaccttttttgaagatttcagtagctattattgttgtaacaccctgcaaatagataggttgccctcaattcaaaattctgttgtatattttgttgaatagaatccaaagccaaaatagtgtagatttgatgcaaaggaattggctgaattgactctctcagattacatagtttgcaaaaggaaaatttcatttttaatgcttaaaaaaataccttctaacaaaaatttagactcataattaatttatacaatttaatgctattgttttcaa

SEQ ID NO: 91041 - DNA, 2237 bp, Cannabis sativa
ttgtgtgtcactaaaaactacttttaattttttagtgacccacacttttatgtgtgtcactatatagtgtcactaaaagcttaattaatttgtagtagtgtgagatggttgtgctttcgttcagccacaccattctgttcatgagtggtggggcatgaaagtctatgatggattccatgttcaatcagatatgaggtgaaggcttaaaattctcctccccaatctgattgaaggttttaaattggtagattaagttccttttcaacttgtgttttgaaattaatgaatgtttgaattgcatcacgcttgtttttgagtaagtaaacccatgtgaatctagaataggcatcagtatagtgaacatagtaatagtatccataggaaaagaccatgggagagggtccccacaagtctgtgtgaattaattagagtggttgagtgtagactctgtctaaattagggaaaggggacttatgaattttgcctatgcagaatagaaatttaaaaaggttttattgatatgaggaatattacaattgttcagtacatgtttgacagtcttggaagcagggtgaccaagcctagaattccataaatggaacaaggaatcattgtttgaaagtggtaaagagtgaacattattacaagaagcatcaagaggaacacttagactgtaggattgatttcttgctaatatggatggtagttgtaatgagtgaaacacatacatgctagcttcaagagtaccctggaacagcaccttcagagtcttctgatccttaacaaagcaataatcaaggtgaaactcaaaataaataccattgtcagtagaaaattgatatacactaatcaaattcttggtgatttgtggaacatgtaataagttattcagggtaaggacagtacacttatctatggacaagaattaattgtgtcttacctatgttctatatagacagtccagcaccattccccatgtacacttgctcattggcttgaaagtcatttttctgagcaagattctcttcatttgaagtgtaatggtgagtggctcctgagtcggggtaccaagaatcatcacaaacagtttctgcagtagccatcatagcagaggggtgacattgagaaccagaaccagaaccaaacccaaggaaggaaggattgaaatgtagcacttagaagcataatgtccaacacatagacatatttgacatactattttactattgtttgaatcggttccatgacctgaattgttaggattagaggtagatccaaaataattgaatgtgttacctcttcctccaggaactggtggtcgatatggggaagcactagatgaaccattccctgatcgattatttgcatagggattctagtaattattttcacattggcttgaattacttcgagatctgaatttagagtttgcaagatctatagaagcagagctaagaactttgttcttgcgctcaatacgattactgaacaatgacattaaacgaattataaatgagaatcaagctgtgctctgataccatgttaagaaagattgaattgacataaatagatctcattgattaaccaagtgaaagatacaacttatataagtacaatgatagagctaaaaatgtaatgaccaaactaccctcctaattgattctaactacgaacagaattaactaacaaacatcatatactcttaacaggtgtcaatctataccaaacaccaattatagacttgtcgacaccaatattaaattgcaggagagggaaagagcttctctcttctagaactctactaataacaagcttaggatatacatttgagagataaaacagtttcaaaggtgaacaagtgagaatacgtagacagccatcctaactaagaagcttaattatccaagcaaatcttgtagatggaacaactccacaaatcaacccacaaaaaaacattatcctaacaagaaaaagacatccaacaaagcacatgtgtcaaaatatgaaaagaaaaattattaaggagacctcatatagattataaaggacacgtgtcaaaatataaataaataaaaataagttttcaaaaaaaaaaaaagataaattgattgaaattaatttaccaaaaaaaaaatggtgaaaacagtaaactttaaccatcaacaaaattaatataggttacatttatggcacgtttactatacagtaatcagaatcggaataaattaatagagaaa

SEQ ID NO: 91042 - DNA, 1107 bp, Cannabis sativa
atgattccatacaacaacctgtaagggtactagaatacagacagacattttgttatcaaatatagcaatgattaatttcattgtttcatcttggctaaagccataagtaatctaagttacaaatcacagcatatacacatacaatagcacaaatattacatgttaaaaagtaacaaacaatacacaaacatactgaattacaaaacaaaacagcaagaaaaacacagaagaaccatacattttcacttcatgtgacttaaaagaaaatggaaagaatatagtacctgatgctttgtaagccttctgcgaatagcccttgtcttcttggtacggagatcgagtggcaagaacctcttgttcttgtaaacttctcttagagcagccttctgcttctgggatatgaccgtcaatacctgagcgatagaaagcctcaccaccttactgccaacacaaaaccacaaatcagttcaaagtatcaaaaagaaaacaaaaacataagcagagaagtgagaagaaatacatcttggaaagcttgttgggggcaccgccggtgaccttggctactcgaaggagagcgagctcggccttgagatccttaagctgggtcaaaaggtctgccttgttcttctgcctcagctcgtgaaccttgattctcgctgtcccatttccaaaaccagaaaagttaaattagggaataacaagaaaatgattaacgaaacttgtgacacttagtaaaagagtgaagctttaaggaaggagggattagaggagtacccattgctgtgttttccgagctcccaaacggcgcgtctctgtttctccttcagaaaatgaaaccctagcgatgagaggggttacgcttgggttatattggtctgtaagaggggtatataagggtccgcataatgcattgggctgggctctcgagttagttagaccttttatggcccatttacagttgcttaacctcttcgtttactactaatttggcacaataagaaaagggaaacttacaaaaatactgaattttgatttactctttacaaaaatattgccacacggcaaaaataacttttatactgacttgagactttttttttcttttat

SEQ ID NO: 91043 - DNA, 742 bp, Cannabis sativa
aatgggcaattttctgtctttatagtaaaaccccttttggtgttcactttattctgtctacagtctaattgcttatcctgtccttatgccaaggccagagccagattcttcctctcattaactcatataataaataaaagagcagtcgagttataaggcgttttgagattgattagcgatattttataagtgttaggcagctgtggtcatttttataatgataagagtttaatttgtaaatgaagcagtctttcagtctctaagcaaaataaagatcatcaatttaaaaaattttcttgatctatgaataaataatatggaagaagaaagtgcttcaaacttgaaagcttatcatatatttaatggaccccaccttccctcaatttgtttattggcatattttctaagaatattcttaggtactttagtaactatatgtatgccacaacttgacatgtttaatagttattttatttatttttaaccagctgatgaggaggaaaactactaaatatagatcgatgatttcttttcatttaccacgtacatatcacatgtgttaatatttttgtcctcaaaatctttgttattgctattattaaatttttctttaaaaattaaataaaattctctccattcaacttgatagaaaatttcctttgaattactaaaatcatgaattatttcacaaaaacatgaaaaaaaaaatacaacaatacaatttcacgaaattttaaatatt

SEQ ID NO: 91044 - DNA, 702 bp, Cannabis sativa
caattaattttgttaaacggtctgggaaccaggcagttaactttttgactcgttcttctagttctattcttggctgtgtttctcacgagggttttgtcccttctggtttggaagctatcttggtagctgatttgatttaataaaatttaattttttggctaaaaaaagtttttttgggtagattttatgtctgtttccacatttacaaaaaaaatttaatctaattttttttttatgatcgcttatgctgtaattatttaaaatcactttgtaaattttagaaaattatgaattgttacgatattcaaaataaagtttaattagttatttactatgcgtatatgaaaaaatagtcgcacgtacaaccaaatatgtaaattttatttttgatattgtaaactactagcacttataaatgctaaataccattttggacattttggaccatgtgttttgcaaaaattataaattagactcatgtttagttaaatgacaaaataaaccctgtattttttaaaattgtacaaataagaccctggactaattttttgttaaaataaaacttaataataattagatctagagattttatgataaaactaattacagtttgtatctgttcgtattagtaattgtcttaaagttggttatattaaaaaataaaataataaaaaattgaacttagggtcctatttgtacaat

SEQ ID NO: 91045 - DNA, 836 bp, Cannabis sativa
ttttaaaaagtgaagtcattgcttgaatttttatggaactttcaattttcctcgcaaaagccaaagtctgctacataaaaattcaatatgaatctcacgtgtaagtagtttttttgtgtgtgaaagatcactgggggtatgatacgtcttcaaccctgcttctctgaagagacgaacaacttgaagtctttcacacgcccaatgatgtttcaccctttagtcttcaaagggaagacattgcttgaatttatgtgcaactttagcctttcctcgcggaagccgaagtttgccacaataaaattcaacatgactctcgcatgcgcatggttttttttgtgtgtgaaagatcactggggatatgatacatcttcaaccctccttcctacaataaaaggactgcttgaagtctgtcactcaccaagtaatgtttcaccctttggtgtttaaaagaaaagtcatctcttgattttttatgaaactttagccttttctcgcggaagccaaagtctgccacataaaaattcaacatgactctttcatgcacgtagtttttccgttcatgaaagatcactggggatatgatacgtcttaaatcctccatcccgtaagagaaggacttcttggagtctgtcacgtgcctattgatgtttcaccctttgttcttttaaagaaagtcatcgcttgaaatattatgaaactttagaatttcctgacttaaggcgaagtttactacatgaaaattcaacctgactctcgcatgcacgttatgttttcgtgcgtgaaagatcactgtggataatatacgtcttcaaccctccttcctagaagagaaggac

SEQ ID NO: 91046 - DNA, 6031 bp, Cannabis sativa
  modified_base (5547)..(5551): a, c, t, g, unknown or other
agagagagagagagagaagtagaggaagtgtatgttgctggtttgagtggctactgttggtgtgagatgaatgtcagacttatatagttgcatttgtacacagaagttttttaaagaccattgtttgcatgccttggtttataacttctaacttgaattgattagtgcaagaatatgaatccattattgggggttcagaagagaggaatatgctttccaactattgttggaggaaaagcaaacctctataattcggttgtgttatttctttgattggttcaaattgtgtgttgttttgttcttgtgtttgtgttgcactttttggtttattttgtttgagtgtgtaagaatttgaggttggtgttggattgaatctccaaaagtggtatcagagttgggttcaaactaagaatcaatctcaaggtgttactacttcaagaattggattcgaacaaaagaaaaaagaacaagtttcgaagaggaattgattcaaggatcaagaagattactttaatcaaagtcaattttaagaattttagtagcaagaacaatttatgcctgtggagagagaagatgagggcacatctaggaaatctaaggctagatgatgcaaagaaactagaaggaattgagtagaagtattatgagaatatcctcaataaggctcgaaacacaatcatcttgtgtttagaagatgaagttttaagaaatggggtcaacaaagattatgcatggtatgtggtcgaagattgaacaaatgaaaagccttcccatccaagtatacttgaaacaaaagttctatagtttcaagattgatgagagtaagcctttagatgaaaatttaaatgaattttataaatttctttctgatctcagcagcttagaggtgaagatcgaggagaaagacaaatctatttacttgttgaattcattaccgtttcaatatgaacaattcaaagacactattatctactcgaaggacactttgatttttgatgagataattggtttgatctactcaaaaggagctattgttaaagaaaatagggagattgcagaagagaaattcataggcttattactcaatagaaagagatcaaacttgagggaatcactcttacaagaggcccaaagaccaatagaaaatgttaccactatggtaagatttgtcatatcaagaatattgttacacgttacgaagaaggcctaaaggaggaagaaccaatgattatcaagagaactctaaaaattatggtgaagaatgtgaaggttctgaagtgttcatagaggattcatcaccagaagtgctagttgcgactgggtcatcttagaagaatgagtggataatcaactaggttgcacacatgaaaaacaataagaattggattaaagatttgaggaaccatgaaatgacaaggttttcttttgtaatggtcatacatgtcccatagaagtagttgggaatgtgaggttcaagatgcatgatggaacctttcaagaaatcaacgatgtgaggtatgttcctaaactagctaggaatttgatttctctaagcataattgatgatgcaggatatgagttcaaagaaaacttagggaccttgaagatatgcaatggttcatcagtcattctcaaaggtgaaaataaaggtggattgcactacctaaagtagaagccttaactggagacgcattagtttaatttggacagagagagtagaaggttgatttatggtattgtaggcttggccatatcagtgataaaagtttgtaaattcttcataaacagaatttatttggtaaggataaaattagtgctatgttattttgtgagcattacatcatgggaagcaacataggttagattcaaaacgggtattcataaatttaaacaaattttagaatagtttcatgttgatttgtggggactagaaaaggtgtttaccttttgggggtttgcatattttccttccagtattgataatttttctaagaaagtatgggttcatttgttgaaatataaatacgatgcattaaaggcttttaagaattgggagaatttgactgaaaatgcaaccaataagaggataaaatatctgagaacaaataatagtttagaattttgtaatgatgagttcgatgcattttgtctagaccttggtataaataggcacatgactctgagacacacaccacacttgaatggtgtggccaagaggatgaataggactctctcagagaaagcgaggtgcatgcttctaagctcaaacatgccaaaatgattttggggaaaagccatgatgacaatagcatacttggtgaatagatgcccttcaagttccataaatcttaaaactccaaaggatgtttggtgaggtaaagctccagatctatatcatttaagagtttttggatgtgttatatttgcacatcaaagcataagaaaattggagccaagatcaaagaaatgtgttttccttggatctctgcaagggttgaaaagatatagattatgggatagaacaaaagaagggattgaaatcataataagtagagatgtgatatttaatgagcatgattttccttgtggtactaaccaaagtgtaggatataatgaaagaaatgaaccatcagatgacatgggaaaatagaaaggaaatcatgatattgtttaggtggaacaaagctcaaagtatacttcgaaagctgatagaagagagtgtttagtttaggtggaaccaatagatgaacaagttgtggaaggagcagctaaactcaagtaggagttgagacgaacctagtgggctaccaattggcacgagacagacagagaagagagtcgagaccagtcaacaagattagtctgaacatatgggatgacatcatcgtttatgttttctattcagccacaaagttgatgaagaaacaacttgagacttttgaggaggctatgcaaaatttatgtaatgactgcatacttagaatagggattagtagggtaattagcattacttatttatattttataatcatatgtgattataaatattgtgacccttattttcaagatatacgcattaggattataatttcttaattttagagattttattaaactctaagtgtattgtttatgctatttgtgaaaatttatattttttttatgatttttggctcggtaacaatgaaaatatgatagtttggccattagaatcaaataaattggtttagaacctttgttttattgggaaaattataaatagtatttgaaatatcgagattaggcattgttacactattggatcattttaccctaagccttgtgttggctaaaactttaagtaaggggtaattttagaactttgcctaagagagtttactcggatttagtggattatggaataatgtatagaattataattttattaatgtagtaaaagcattagataatcattatccaaataagttcaaagtaaacgaaaaataaaaaaaaatctcttcatcctcctcttctccttgcttcggccctaagaattaggagattcaaccaattttcttcataaaattctatgataatttagtagaaatcaaagaagtaaatcaaggtaaatcctaaacctcttttatttgagtttttggaagtttttagtttgagttaatcattaaattttttgaatcagattctgtccaagctaggttttgtattggttatttttttgagttgtatttaagttatttgaagctagtttgagattgatttgctggttgtgtgtggagttgagcaagtgtgagtttaagaactcaaacttgactcaacaatggtgaattttgagattatgagttttgtatgattttattgattggaatttgtttattagaccttgtttaagtattcttgagagttttaccaagtttgggattgatttgagctcaaaataagaatttgttattcggaataattcaagttggagtctgatatgaggactcaatattcggagttatttaggttagattttggggacgaaatccttttaacggtggaataattatagcgactgcttagctttattctgcgaattagtagataattaggatttatttttaaaagtagacttttaattattatttttaggattatgaagatatatttaaattctagctgtattaattatgatatatatgagttttatgttttttcatattttttatgtccaacaatagtagaatgtgactgttggcctatagagtcacctggaaaagtatagtattttgattttagcgggacaatttagttagacatttggaatatcgagtatttttggggttttcacttaagaccattctactcttatgcatgttgaacactttttagtgtaagtaatttggcaaagtaccttggtttatcttttagtgggattatttgaagttatctttagataacttaagctgatttatttgagaattatgattaatcacattaattttctttttcataatagaacaaataataaaaaaaaaaactaagttttactctttctctcttgctcccctttttgttcagccacactaagagactaaggaaaaaccaataatttctctccaattcagaccatttctagatgatcatagcagttgtaactctagtgagttgtaaggtaaggtcttttcttctttttcctctagtttgaagatgaaaaattgggttttcaatttttcatgcatgaatgatggtttcggttgatgtaagtttagtaggagtttaactttgttttctgaagtttttcttatgtttgttttgagtgatattttaagttggatttgttgcttgttgtggagcttaggcaaagtttgagcttttgagatcaaattttgctctttaatggtagatttttgagtttataactgtcgtcattgcttataatatatttaaggatgttgaattaggtgttctagatagtttgggaagatttggaattgttttgagtgagttttatggaatggggtcatttttgctgtaaaaatgacaccatttctgggaaaacagtctatcgtttttccaggcaaaaaatccagaaaaaatggcctgccatttttacagtggggtgtattatttttttggcactttttcttgaagcctcattttttagtgttttcttaatatataggttttagtcacgctatttatcgatagggaaacttttaattttgagttcaagtccccaaaagtgatttagcgtatcacttatcagttttgcgtacgttgtgatttaggagcctgtaaactgtcgagcagcagttccactcagggtgactgaaatacctaaattcagaatcgaggtaagattagtataatcggatcatatgtgattacatatttagcgtgcatgtttatgaatacctgttagttaacatatcagtaatggcggtattagtgtacgtagacttacactaaataccgacagatatatgtttggcataagtactaattgacgctatcacattagtacaactagagtaccgagtgtaggctgatattatggtcaatagnnnnntcgtataaacgttctagactcagtacacgagggatgtgggatagggttatgactgggtgtatgggcgcctagttattatccagtttaagtttatgttatgattatgttattcttacttagtctgtcgactcacaattgtataggtaagggtaaagctaaggctgggcagcagtgggtgcgagcagaagaagattgtacgtatcggggcagttagacttggagcattcaatcttcaggtagcatgctttattttgatagtcgataggtgacaacttttatagttatatatgttataaaatagttgtaacttttaaatgatgggatcctgaattatgtaaatatttaaagtttaaagttaattataaaaagttttaattaagcacgatttttgatgaactcattagttagcaacgaattgtacaattagtattaaattacgataacacgcctaatctagtggggtgttactagggatgcaca

SEQ ID NO: 91047 - DNA, 538 bp, Cannabis sativa
tttttttttttttgagaaaaagctttcatatcataaatgaaattaaacgtttagacctctcggtcattacataatatattgttaggtaaggaggacaccgggatagtcccaaacacctgatgagcgaacgcccatctagccacattatgagcggcaaaattacaagttctacgaatataagagaaattacaactaataaaagaaggagaagaattagtacaaaatgagacatagttttcaagagcccaatgagattccatcccattgagcgcattgataaccaccctcgagtcatatcgaacattatcccacatacgctacacataaaaattcttgaattgtgccagagtagcttcaaattagagttttatcaaaaaattatctacaaaaatgagtgaaatgtaactaaatggacaagtgtcaaaatttgagatgagagaactaatgtttgtcgttttttttccttctgaatttagtatgactaaaatttattaattggatttggcaaatgagctattttatcatctaaatcatacga

SEQ ID NO: 91048 - DNA, 535 bp, Cannabis sativa
  modified_base (47)..(54): a, c, t, g, unknown or other
ctttacacaacatattaatacaagtcaataccaaatatagtattgtnnnnnnnnatactaatacaatacaatacaatccaacataacataataaaatataatataaatacgatgtaccaaacgagccctttaaatcataacttatcaacatgtatataaaatacataaaagataacacttaaaagtatttttctctctcgagtttcttacagctcttgagctggaaccatggtgaaaacaagagctagagtgtaggggaagctaaattcggttaagaacaaagaaaaaaggccctaattcaatttttgatgttcaaaaaacaaaatttatggatcatgtccttggaataaatccaattgttttttcttgtgtagaagaggacgaatctctgctacggcaaaacaacttcttgaacttcgtgacatgtccccttatccactttctcccagatcgtcccttcgatccatcaaaaagcaggaggatataagggaggactttactaatttcctagaggctactaatagtgatatttctc

SEQ ID NO: 91049 - DNA, 1177 bp, Cannabis sativa
ggcttgagtatttgaagggcaagactcacaaattaatatcccaatgcaaggatgtgtgtgagtaacgagacaacgcctaacaggagattactcgcctcaagtaggaagctgagaaagcgaaagaggaaacagagacaacaaagaaggaagccgagaaggcaaaagaggaggccaagaaggccctcaaagtccaagctgatgagtttgaggagaagcttgctaagaaacttgccaagaaagaaatcgagaccgtagaacgatgcgataaagttgatttttgcgttgtatactgcgcctggctttggacccctaacatggataccgacttcttagagtagaaggaagaggagactttagctctctgcgagaaaaccaagatcgaagaagacgacgacgaagttaaggaaggagaagaaattctgtccaaatctcccagcatgtagacttggtttatttatctcctttttttcttttaggaaatgaccctttggccgagacaatagtttttcccctagtggcttttttttgtaaagacatatttgaaaggttagacgaccaactttgcttttttaatgcctcgcacttttaagtatgaactttattatgcggatgtttacttgcattttattcacaatataaaatgtcacaagcataaattttataaggggtttccattgattgtcctttctttcgacgttaagtagttaatttcctactttatgtgcgagcagatatgctcattccttaatcaacgaatagccatcaattccatcttgcgatcatcggaaatgatcccattttaagcacattcaaatatatttttaataaacttgtcattttattatattattgcttacatgagtagttaaaatttctacccacgtgttgggttaaagtatttttttcgagacatttggatgtctcgtttaatacttccccctagcgcgaactgttagtattcatttttatgcgctagtcgtaacttttgatttttctttctcatcatataggttataaatcaaaaattacaatggtttgatccctttcttgtcaaaaaggtttgatcaaggtgtcataacgattcgacccattttccgtcgaaaaggtttggtcagggagttataacagttcgacccctcttccgtcaaaaagttttggtcgaggcccttttataaag

SEQ ID NO: 91050 - DNA, 1676 bp, Cannabis sativa
ttcactctgaagatcatcactctcgtcaatcatcatttgcatgtcactgtccccctccaccatggaatcaattagaggcaaagcagcaggatcaagttcgaaagatccatttggaaatcctcttccattaccttccattttatacgatggaatcatatgggaaaacctcaatagctcacctggtggaatgtgaaatgtcttcctccctaccttgtccatctgaaagaaaacactcacaaatccatttactttgctcaatagagcaacatctactccaacatctgcatcataatcgtacaaaatttcaacataatcatattcactctgacgatgtgcagctggattactactccatttaatattccagtttttaaaaagagcccaggtctcccccattctcggatatatcaggaaagtacctccactacctttcccccaagaaacttcatgagagaacatgaaacgatttactgttctctcagaatatccatatttgaactcgccacaagaaaatggcaagtctgccgaaagccattttaattcattcatatttgatggcttcggctctagccaggttatgtgcacattgaacccgggagaagaaaccctttttatcaaagcatagaatctaggcatgacattatgataatcataagcagcccatatctgccctgcattaaatcgctctgcattcctgtccttgtcaaagtcattgaattcaggatctggatatagtaagaattccaagtctggtgtctcctccaaggtcaagtcaatattagcataaccttcagaacacttcttcaatcgatcacttttgagtgcccctctaaggcctttgctcttcctggttttgtctgactcttcctcaccttcttttgctttaacccctttctcatcttcatcttctttcattttagtagcaacatcagagatcacactaggtgctttttctcttttcctttttgaacaattcacattcacgtagtcattattatcaccaccacttaagttttctttgtaagcagttttgagttcagtatgaagaacaccattctcatcaatcatcatcatatcttattctgaatcaatattacttccagagactgaaacatttatgaccaacgccacaaagcacttcgtgcaacttatttattgtactaaaattaagcttatttatggtactgaagataccttactgtacaaaagaacttaatcagtgattagcttgtttccatggctactgctttaaagacctaaaaagtggcttccattgtagtccccaagagagcccagtacctcagacatctacagaaccgaataattcaactttaaaacaagatttttcaataatgatcaaaattacaccaaatttttttaaattataataaacgtaatgttaaaaaagccttatctacatcaatggaggagagaagggaccaggttagggttttgttaaattgaagcttagtcctactgctaggccaaatgcccgattgaagagtcaggatttggagggagaatctataatgtttaagaatttgtttaacaaaattaccagatattatcacgaaagagaataatcaaattccaattcaattaacttaaacaaaccagcagtgtccatatgaatgtataaataaagcaattaaaaaagccagtacgagagaggtagt

SEQ ID NO: 91051 - DNA, 1247 bp, Cannabis sativa
tattattattatttaaaaaaataacttcaaaaaacttaaaagaaaacaacttaatagatacacattctctaacaataaataatttcaatcaatatttaccaaaatattttttactcttacccattcgtattttttatatatcatattttaatgtattttggtatatgtggctcaagatatactttcggttggagtcttagttttggacagactcaaagtttttgatgactttccaatcaagtaaaagcataattatataacttggaagaattgtcactattattcttggatatggccggattacttattatatatataactctcttcttctaactcttgcttgaacacccagtgcaacattaagttaatgattcaaggaatcctatgaggaatgtaaggatatcccctaaaaatatatagcagatggattatatatacatatatttgtgaaattgatgacaataaatgaaagatagtttgtgtgaataggtgcttattgtgaatagttgtatctatatgtgggaggatgcaactcttagtaatttgtatttctgttaaaattaactttttattggagaatattctgttaaaaaacataacaatctgttaaatgcacaacaaaaatggttagatagacattatataataggtaagaggtaagatatatttgagtgagccatttaatatttataaattggtagctttgtaggtttttagtaatattgtctttaggctcatattgatgatgttttaagtttattagttgttgttgatagttcttgatatgctattctacactttgccaatattaacccatgcattaactatttttgttacttctgtaagagatttttttaaactgataatcctctctgttgttttgttctcgtataacaattgatctttaactttactttaaaaaaaattaaacaaaacaacacaacagttttcatctcatttaatatttatttaaaaaaaatcttaaacaaataaaagttataaccaacattttcttaattccttccaattaatatttataattctattaattggtagaagaaatcatttcatggcatatcttttttgaataaatatatttgacacttgagtatcaatgaaataattagaatccttatccatgacaaatatatatgcttataattttttaggaattacttcatatactttttcttttaatttttttttttaaaatttacgatttgagtttctaaagtggttgcagcgtt

SEQ ID NO: 91052 - DNA, 696 bp, Cannabis sativa
ctaactcaaccaacctcaattttttagtgaaaaatgagtttatattgtgcgggaatgaaaactagccgtttatagctgttaacacggttttctaggcctttttttttctacaaatcgaaagtctagttgtgacctgaaattccagatcagccacaacttaaagttcggttcccaattagaatttcggttgagggggtagtgaacattttacaattttttcgacttaaaacgtgcataactccttactcgtttatccgatttcaaaagttctagttgtgttcttttagttaaataatatgtgatcttaaaaattaatttagaaaatttagatattatttttgtgaaataacttgtcacacaagttagtgagccaaactgtaaacttataaaccctaatgtactatgcaaatcactttaaaaaaactaaagtaaatgtataacatttgattgtgtgtagtcttgatgtagatgagcttccaagcttgatttccatgtttagatccaaaagttgacttttcccaagagttgactttgactttgacttttaggtttgttatcccaaattttatccacctgacgtggaatatcgacataagccaaagctagagtataggtggagcacaaccctactagtagcagaacagagtctccatgcaagatataacaaatccgtcaagcaacaactgaataaagtga

SEQ ID NO: 91053 - DNA, 997 bp, Cannabis sativa
ctgagtttctttgctgataatgactgcctaatctggcaccactcaacaaatggcatttataatgtcaaatctggtttccatttagctacatctttggaagaacaacataactcctcaacatctaatcagcatagtgaatggtggaaatacttttggaacttaaaattgccccctaagattagaatctttgcttggaaagtgtttcaaaacattttaccaacaaaggctgcattgtttaaaaggaaggttttagattccggggaatgtgctctttgtaagtcgaattgggagtcaattggtcatgctctctttgattacaaccatgctaaagatatttggaaacatacaaagtttcaaattgattatcgacaagctaatagcatgttcaatggtgattatttgcaccatttatcttccacataccagcagaaagatttcgaaactatcttatgtgtgttgtgggggatttggacagataggaacaaagttgttcacggtgggaatcctcgactgtcatcagcaattgtccagtatgctactcgattctatgaagactttactcggcatcaggctcctgttagaacagtaactactgctaacaatcacaatgcagcaaggccagaatcaacgacagagaagcatgtccaaaagtggttgccacgaggttcatggcttcaaactcaacgtggatgttgctactgatttggagcgaaaaagaatgggtattggggcgattctaagggatcataatggtttggtggtggctgctctttccaaacatgtacaaggaagctttatattggatgaaatggaggcgaaagcgctttttcatgccattaattgggtgatgcaatcacaattacctctcactcatatagaaactgatgcttctcgagtttcatctgctttaaatgtcttaaccacagatttatcatgtttttcggatcttattatggatgtacgttgtcttttatcctttttccctcaagttttagta

SEQ ID NO: 91054 - DNA, 595 bp, Cannabis sativa
tgctatgattatggagtgtatcacttcggtctcgtttcaagttctgttaaatggaggcttgactaagatgtttagacccgagaggggtttgaggcagggcgaccctctttccccttatttattcattatgtgctctgaagttctttcccgaatggtgtgtgaaaaggaaagacttgggttaattacgggttataagtgctcttcgaatggcccgagtgtttcgcatcttatgtatgcggatgacactattttctttgtgaaagcatcgactgaggaggcaacaattctaaaggaggtgctggatacttactgcctttggtcggggcaacagatcaatgtggggaagtctaaggtcttcttttccaagaattgtaatgtgaacgctggaatatgtatctcggaatggctcgggtatgacttaatgaatggggacgaaaccttcctaggcaatccgctgtttgtctctgggaacaaatccaaggactttgagtatgttgtggataaagtgagatctcggttagatggttggaaagcaaaactcctctctcaggcggctagaacggtcctaatcaaaaatgtggcctcagctatacca

SEQ ID NO: 91055 - DNA, 1248 bp, Cannabis sativa
  modified_base (855)..(858): a, c, t, g, unknown or other
aagaaacaagtttcttggtgatttttcagtgattttttcggcgacaatgccaattccgacgaagtttttggcgccgacagcaacttcgacgattttcccggcactgatagctacttcgacgacttttccgataacttttccagcactagtgacgagatccagcgatcactataatttcatttattttatttttttgaaaaaaaaaatatgaagagaattttaattttttatgataattcaaagtagcatatctcatatatgttaagtttttattttaaataccatatttttttctattaaattttcttacgatatttatgtaaactaactttgtttatacatatttatgtataaaaacccttataattatttatttatatatttacgaggctgagaaaagagaaatattcaagcctttgaatccaaatcaaagtaagtccaatctaaaaatattaaaataatataaaaataataaaaaatcaacaataaaattacaaaaaaaatataattttaaaaacatcaaaatattttatattttataaataaataaaccataaaaaaatatttaaaatttcgtacaattgtattttgtgatttttttttattttgtgtgtatttataaaatagtaaatgccattttaaaccctgtgttttgcgaaagttataaattagatttctgttttgttaaatgataaaaatttaccctatattttccaaaatagtaaaaatagaaccctgaactcaattgtcaacaattttattttttaatataacaaacttagagacaatttctaacacgagaaaaggtaaccaattttgtcataacatctctagatcatattattattaagtttnnnnttgacaaaaaatcagttcaggattctatttgtaaaattttagaaaatacaaagtttattttgttatttaactaaacagatacaaaacacaaaattcaaaatagtatttactcattataaaataatcccttttattttttaaggggaatagcctctttaatagctttctacttgagctttgagtgtggcttatgttttgcactattgcatttgcatccattctctagtctttctcatgcgcttgggaaaataataattggatttttttgaagaaaaatcatatatataaatatatttttgattttaatctgaatacttatataatatattattttttgtaattttttttcatatttttaccaacaccaaaataacaagaaaactacataaa

SEQ ID NO: 91056 - DNA, 1060 bp, Cannabis sativa
tgtttcccatattggcaccattaaagatctcaagttctgtactgcttgtcaattaggcaaaagccacaccttaccatttcctaaatctgacaccagagccaaccaaccccttgccttgattcatactgatttatggggcccctctcatgttgattctaaacaaggatacaagtattatgttcattttttggatgactatagcagatacacatggatttttccactcactctcaagtctcaagcctttgaggtattcatcaaatggaagagcttagtggaaaaacaattcaatctccctgtcaaatctgtccaagcagattggggtggagaatataggtctttcaagaaattcttggaggatcaaggaattcactttcaacatccttgtccaagaacacatgaacaaaatagaagagccgagaggaatgcctttagttctgctgtctttacaataaacagactacctactcgagtcttaaactacttatcaccatatgagacgctttttcacagcaagcctaattacaatatcttaaaatccttcggttgtgcccgtttccctcacctacgaccatacaataatcataagatggaacttagatcacaaccatgcctatttctggggtactcatcacatcacaaagtttatctttgtgaaaattctgagggccgactgtacatagcaaggaatgtggtgtttaatgaagaccattatcctgcaaaaggttctgcatctcaaactcaggtagtatctgatcaaccattaccttttccttcaacttcttttaatacagattccaatatctcacctactaatactattgtggttgatcctattgatgttccattcccctccactactgtctcacccgtgatcagcaatgagtcatcatccactcatgaaacacagccacctgtctctccacttgtccccaactcaccaccctatattccaccacctgttcccatctcacataatacaataccatcaccccagtgttaggctaaaattagtctaagtttcgggtcgtattttcagttagttttcactctttgtttc

SEQ ID NO: 91057 - DNA, 532 bp, Cannabis sativa
cttaattataaatattatattatataaataatataatataagtatatatgaattagtatatacataatttcaaatatatatatatatatatacttaagagtatctatcacatgttagtatcttaaacttgatgtatacttaatacctaatagtatttattatttgttagtatgtatatagaaattaaagtattgcatgaccatttaaatttaaatgattgatgtttctcatttttttttactcataaaatcagcattgtagattgtttggattgttgatttacatgtatggttggttttggcttattatttttttacagtacaagttcattattttaactatatatgtgttgtacctaatttatgtttgatagaaatgaaaagttaccaaaaaaaaaataatctatacttcttcttcatgatgatacttttctatcaacttttacaataatcattttaaatgtgggataagataggtactagtaggtaaagcttattactatataagttttcatcaacaagttcatcaataa

SEQ ID NO: 91058 - DNA, 667 bp, Cannabis sativa
aaggagaaaatacagttccccatccgaaaaaatgaacctcatttgaggagatatgtatgtcttgacaataacaaacccccacggcaacaacaacaggcggctagggacgattaacaactgttacctcccccgtcgtgggtcgcttagatgcgaaatctggaggaccttatttagctgagaactccaaaaaatcttgagaaaaatacgctcagtcccataggcatgagctgaatgacgaagtgttggaagtctaggagcgagctcccacacaacctcggtatgaatatgaatcaatcacattctctaaggatgacaccaaccacgtttgatacccacacaatgaccccttggtggtggaagtacatattgccaatatgattgtagcaagaaaaatgattgataatgggtcgtcaaccaatatcctcttcaagtcctcattggaaaggataggtttgggagcaaaggatttagaaccatgtgaacatctcatatacagattcacaaaaaatggtatggcaccgagtgggctcattaggctaccattgattgtgggaacaacccccaagaaactaaaatctaattgtagggctaaattcttcatgggctttagacttagatttttgccactttatttcaactaatgaaactaaaatatatttttgaattt

SEQ ID NO: 91059 - DNA, 1465 bp, Cannabis sativa
ttcagcacatgagttgtgttcacagcattctcacatttaaaatagggttaattgggacaaaccccgaatactttcattttacttgcacttaatctccaaaatttaaattttggcagtaaaatcctccaatactcatattctattagtaattaatatttccatctattttaagtgttaagtaccatgttggactttccacgtgtatatctacgtggacacaatgtccacatgacacaattttaattggtccatgtaaaaaattatttaaaaaattaaaatttttctttttagttactaaaaaagaaaaaaagaaaattattaattaaataaatcataaaaaaattcttctttttctctctaatctttatttttctattgggtgcattttttcttttttttcttcatcttcattcctcataaaaaatatcaggagtgtgcataaatcaatcgaattcaatgaccaccgaccgattcaattataaccgattgccaaacattggatatccaattatgatcggatcggatcagatgttatttttgaatatccaattggatcagatcagatgttggatggggtgtctaaaaatccaatacatccaacatccaatcgaagtaattagtattttcatttagtttgaatgagtatttagattttatattgttatacataaaataggtacgtatatataaaaattaacattaaaattttactctttttttttttcttggattggatgaatccattccaatccaatatatactggacctaaaatattagatggatccgatctgatacaaaagatagtaggtctaatatattgaataaactcaaattaaattaataaatatatatgaaatatatccaatggataaaaccgatccaatccaataaatgtttgatcgattgaatgactaaaattaattggatcgaattagatggtaaaatctaacatccaatatataattggattagatctggatatgcctaaaaacattggatcatgtggtccaatgaacacccctaaccaccaccacgacaccaccacagatgcccaccacaaccaccaccttaacctcttttttaaatccaaaataaccacagctactgctaattccaccctaactcaaacacaacaacacaatcaaacaaacctaaacctgccaagatcaaaatcaaacctgccaaatcccatatcaacaaacaaaaaatcaaatccatccccaatatttgtgacaagcacgcgggaactagaacaggagaagaaggccagaaatcccacagtggggaatctcctataggggtgagcataaaatccagagaaccgaaaaaactgttcaaaccgacctaccaaataccgttagaactgaaatcgatgaaactgaaaatcgaaaaaactgctaacggttaaaaccgccattgaacggtcagtttttttttggtaataaaccgaccgaaaaaccgaaa

SEQ ID NO: 91060 - DNA, 547 bp, Cannabis sativa
ttttttttttttttcaatttatttacattcctacgtttcactttttgttttttcaatttatttacattttttttatatataaagaagtttgaatagttacatttttattatatattattatttttaatatattatctatataatacaaataaattaattagattttagggattttttttatttttaatatattatatatgtaataaaaattaaaaaaaataaataaataaaaaatgactgggttggcaggcgggttcgggtccaacccaaaacccgataactataaaaaatcaatctgtgaatctgctcgaaagtgtaccgggttggaccaaacctgcccgaacagaatgggatttttttagttttacaggttgaccgggtcgggtctgggcgggttggccagatctaggtcaaacccagtcaaaatattcagtcctactttaaagagcttaatgagatttcaagtaatttctaagaacatatataattttagctttctatacatatgtaatgaaattacaaaagaaaactaatcactgttacgaaa

SEQ ID NO: 91061 - DNA, 794 bp, Cannabis sativa
acattctttttctatttataagcaacgaaagaagatattacggggtgattgatacatctttcctttacctctaggctctgtgtggcctttttttaagtataggaaatgatgtttataatgtgtgcattaggtgggctatgaagtaagaatttggtgagacaagacctgacttttttgcaaatgatgggacactgtgaagagtagccgccaattagcatttattaagggtgtacgttggttggtttggtcagtttatgctacattttattcagctcaatgtaaagatcgagttacaaaaatctaagtgcaacccgtccaattaagaaaaaagaatatagtaatccatccaataaaattggtcggtttgttcgggttaacctgtttaaatcgaccagtaatatatattttttatttttttatttttcaattcaattgttatattttagtaaatttgtaatatccaatttaaaaaaaaataattatcatttttattgctacagataaggagtagagatgagtattagtgatgatttatgttaagataagcaaagttgtgttaataattaaatattatagtatttttacgagttaaggtggaatataataataataagaaaaaaaaaaagaaaattgttgcattctagacatttatatttaatcaaggaatgcgaaggttactttctcattattttatttacattacagtaagtttttttatcattaattatttactttctcatttcttttatttacattacagtaagtttttttatcattaatttattaattatttt

SEQ ID NO: 91062 - DNA, 772 bp, Cannabis sativa
aaaatgaatgaaaagtttgatagtgaggatgagaagcagagcaagtcttccaagccttctaaagggaaaaagtatggtcattttatgggaaactttgttgtgcttggttgattttcatattttaacggattatactttttactattttttatatttttccaattttatgctcgtctttaatttctgcatgacttattgttatcatttcatttcagaaaatatttggtcttttaatgtttttaggtactttatacgtttgatgttatgtaactggttatcaacttataggatatttgaaattaaccattatattatgtttattcttttttatgttttaacagcaactgtgttataattttataattaatattttttgtatatttttaggcgtacaactttaaaaaaaattattatgcaactgtgtaaaaactaatttagtagcaaaaatatttgtcaatttatttcaaacatcttaactcaatagattaccaactgttatgcaacttttttgtactttttattatacaacttataaaaaactcatatccgacttttgaaaaccatttcttttgaaattaataaattcttcataagtaccataactgtccagaaactattttgcaactatgaaaaaactatttcaactttgctaagtaatagcaatctactaaaactaacatttcatgttgtcaaaattctcatagaaatttaaacaattcaaataattctactgtatctatttaattgcttgatcgttgcatgtctttcagtt

SEQ ID NO: 91063 - DNA, 1042 bp, Cannabis sativa
ggttttgaccggatttaataaaattgtcaattcatatgttataatcttcaagcattttcctattaccaatttttttagtttatttttgggctcctctgaaaatggcatgccgtgttcaggtgcatctatccctctaaaaaaaataataattttataattaagattaatgttctagaaataatgacatagaataaagatagaactataataaaattattacttactttaaacgaattttaagactttgagctctgatagtgatattaagtttgtgagaaatataagttctatacttggttttgttgtaatagtttggtatgttaattgattttttcgaatcaatgtatatcaacagcgtatcaccatccaaaatgtcttcttctttcacaggaagtgaatttataataaaattttcattttgctttgtcatgatgaagataatcaaataattgaagagttatctaatgttaaattaataaaaaaaaaaagttattctaagaatatttaccatataaaaataaaaatacatataagtgaccattttatatgattatatgattagtgcaaatatatattgtatatttcatatttatttatgtaaaaaaatagtgcaaagttagaattggatacaaatttacaatattccaaaataaatatagaaccacaattcacttgcaaatctaatatgaaaaaagtcataatagggtttttggataatgaaataaatattatatttggtgtgattttattaaaaaaaaatataaaagaagttttaaagaaaaaaaaaagaataattaatatataaacattcatcatcaaatcacaaaaataaatggagtgaataacaacattattttgttttttttttttctaaaaaaaaaagtggtattcatagtatcttcatgatctaatttttttattgatttatttatgtgcttttctgtatcataattcaatgaaataaaacttgaaaaaattaacctaacgtagcagttaagtcataaacaaaaatagttatacttacaatattcaatttacacat

SEQ ID NO: 91064 - DNA, 1034 bp, Cannabis sativa
tttatatagaatagatatgtattgattccacgtgaaccgaaagattatattgagtgcattgagaatttataaatgcaaaatagtaatacagtcggattatagtggagccaaacttattattaagtatgtgaaaacttgatagaaaacatcgagatccattatcagggcaaatattaaggtatcataataatagagtaacaaataagaagtcatacttaatcagattttaataatcctagaagcactatatgaagtttaagttagaaattatttttatatgtatatatgacctgatagtggataaatacaattaaagtatgaatatcaacctgcacatcattagtcataatgtataaataaatatttcagggattaaaaccaacactttattaaattagcagattatcaaattattagatttcttcctatagatatctcacataattaattagattccttttaagtaaaagaattacatatcataaagtctaagtaaacatcaattgtaattacctcgaataagattattttgaaatctagtattagcatgacgatgaaaatactttgtgttttggtcaccagtctttaaccattggactcttgatctttgttgccaaaagatctcttctttctctaggagattggataaactagattcaagttgagcaacttcctcccgattgcacaggttataatccatattttgggctaaggataatttctgtttggtacttctgatctctttaggtagtgcaccatattttcctaggggccaagaatctaagcttttagaacatgaaccgatattggtgatagcagtatctaatgcagaaaattcagatgtaggtaaccatgagttagctattatatgttgacattccgaatcatctttccatagagcttcatagtgaaaccttttacgtttcttatatgaatttgaagaagaaactgaggattatccaaactcaagactaagcactctatgatccgaaccaaagaagtctaggtgagttaaccttgcctcaggaaaatta

SEQ ID NO: 91065 - DNA, 828 bp, Cannabis sativa
  modified_base (297)..(299): a, c, t, g, unknown or other
  modified_base (489)..(489): a, c, t, g, unknown or other
caacatataattgataatttagtttttttttttaaaaaaaaaagtaattaatcaccgtatattttgtatatgatcaatctcaacataataaactaagggggagaagtactttctagtaatttaatatgtggaagcccaaaaaacgattgtcacttttatagtagttatagactagtgggaggcacacgtgctccgcacatgtattcaacacgattttttcttttaaggggactcatttattataaaagtatgaaaaatttcatttgcaccccacaaattaactacaagaaatgtcannnttgccagcatatttttgtgctggcaaaagtttggtaagcgctggtaaaatgaaatttacttctcatgtgttggcgaaaggggttgacaaatcaacgttggtattagaacttttgctacacaaaatgaaaagcgctggcaaaaataatttttctcagtgcgtaaatgcgctggaaaaagttagattttagncactacaaatatgcgttggtaaaattttgacctttttgcgagcatagtttgcaaaatgcgctactacttttaccagcgcagtagggaattgtactggtaatagtgacatttcttatagtataagtacaccctaatattttataaaaaataaacttaaaataatttttaaaaatcactcttaatatttttttgaatttttttgtgttaattttagtaattatttaaaaaaaaaacagtcataattatttttcaaatttatgtaatttattttttatttttttataatagaatttcatattactttttattaaaatatttaaattgtttttgataaattta

SEQ ID NO: 91066 - DNA, 603 bp, Cannabis sativa
agcataaaaaccctaaaagctatccaaactatatagttactctcgtcctatatcaaaatttgtccctatttcactatagcataatcaacacttacttctcaaatttcgtatcgacattataaacatttaattgattgacagacaattaaaagaattaagaacgaataaaatagaacacagaaaattgaggaaagaatcaaatcataataaaactataaaaagatgtcaaataatctccatcaacatcctaataattgtttagctactcatgttcattgtaaacaatcgacacacattaaataagagcataagaataaaatagagaagagaagaaattgtagaaaatctttgttgaaaagccttctaggtcacttattttctccgattttcgtactccctaattgcttgataaaaaatataaaggtccgcccctttttatatccaaaaaaggataaaaaagataaaaataaaatatccacttttcgaattcaaggggacgggcctcgacactagcttctagtgttgagccattagaccccaaattttaggcagcaagctcactgataatatttcagtcgtaactctttcaatattgctcagaat

SEQ ID NO: 91067 - DNA, 581 bp, Cannabis sativa
gcacgtgtttaaaattaaaaacaagtatatacacatagtatgatgttttatttattattatttatttacatttttgcttaatgcacaatttttttgcattcttaataattcaaaataatctgaaaaattttgtgtgaggtccaaaaaatactatgtggatcaacattatgaaaagaaaatacaacaatttgcaatatatatccatgtatatacacacatatataggccaataacatttcatatatactcaccaaatcttatatatatttattttttttaatcagttataataggtcttcctatccaaacaacaataatggcgttgctgtggaaatgcagctgaaacattcagaaaattctcatgaaatgaacctgaaaatttcaaagaaggcttctgatgatgacaataataaaagtagtttagggtcaccaacctatgatggtaattaccttcatgaactattaagaaaagttcttatggaaaaacgtctgagcaatacactcacaaaaatggtcattcttacatatgatatctacaaactcttgcctgtggtcttctcctcttttgaggttagattctt

SEQ ID NO: 91068 - DNA, 2031 bp, Cannabis sativa
agtatagtgtcataagtacaaggggtaaaaaagataattattctaaaaatatattcatttgagttgctatggtttaattaatatatatatatatatatatgtaattattttctagctactatgaatttttgttacatatttattatgttattatatatttcatgctcataagtttgtaacaatcaatttctaacatcttcttttccaaagtcattttctcaacaataacaaacaacattacagttgaggctgaatcatcatcatcagtagtagtaatggaggattccaaatcaaacaaggaagaagatagaatcagtagatcaaccatcaaagatgatcacaactcgaaaacagtgtcgtttcgcaaactattctctttcgccgattcaactgactattttctaatgtttgttggcacaattagtgctgttggaaatggaatctctattccacttatgactgttatctttggaactctagttgattcatttggagaatctgttaacaaccaacaagttctttccaaagtttctaaggtatttatatctatatatattaccatatataactatatcttctctttgcttaatatggattataagaaattgttataatttcatgttcctgaaaaaagctaaaatttgaagtaaaatgaattatagtactaaaaatgaagtagtatggattatatttgacttgattaatcatatctaattattaggtgtctctcaagtttgtatacttggctgtggggtctggtatggctgcatttctacgtaagtacataaaaagcttactctttggttagaaatttttttgttatgaatgagaaaaacaaagaaaacaaaaccatttttgaactatggcagaggtggtttgttggatggttactggagaaagacaagctgcaaggataagaagtttgtatttgaaaacaatattgagacaagaaatcgggtttttcgatatggaaactagtgctggagaagttattgagagaatgtcaggtgaaactgtgcttattcaagatgcaatgggagagaaggtagtaaaatgcccacttttgtttcaatcatttcatgttaagtcgaaaaagttaagatggttgtgaattcttttagttttgccccaaaattgtatgatttttttgttttgtattcatctttagatttctaaaattgaagcagatcaatagatcaaccaaatcatacaattatgacgagacaacgtgtatttataaagttagagaggagacttctcatcaaagaattcgtttaactagaaaaatttataattctgcttcaactagacttcatacagatgttaaacccgttaactatagattcctaactgtatgagctaaaacgacaaaaaaaagtccaaaataaaagtcttacattgttttcttgttttattataggttgggaagttcattcagttagtagcaacattctttggaggctttgttataggattcatcaaagggtggtttctaacccttgtcatgctatcttcaataccggctcttgtgatctccggtgcagtcatgagcatcactatagctaaagtggcgcgccgtggacaaacagcttattctctagctgcaactgtggtcgagcaaacaatcggttcgattagaactgtatgtgtacttggcattgccaaaaatttccttaacattccctccagacttgatagctactaagtgtaatataaacctgatgacaagtatgttctctcaggtttcgtctttcactggggagaagttagcaatagagaggtacaacaagtccttaacaaaggcttataaatctggggttcatgaaggcttggcaaatggaatgggaatgggagttgttctattgattgtgtttagtagttatggtttggctgtttggttaggtggaaagatgattattgagagaggttatactggtggagatgtcattaatatcatctttgctgttcttactggttcactgtaagtaccacgtacaaatgtcttgtgtcaagtgatttaattttctgcaa

SEQ ID NO: 91069 - DNA, 933 bp, Cannabis sativa
gtcaagctaggcctaaggaagagaattggccctggtacttcagttcaaattaccatcgatccttggctccctagtttggatcactctgtccctactcctattgttcaaggacttgagaattttactgttaacagcctgttccaagtccacaacagatgttgggatagtgatgttgtgaaggattttttctcaccctctgttgcggccaccatccttggaattcctattgaccaaactggtgcaaccgactcctggtattgggctgctgagaagaacggattctattccgttcgtagcgcatataatcttcttcaagatcaaaaacaccattcggccaacaatgagagtaataagttctggaaaatcttgtggactctcaaagtacctcccaaagccaaagatctcgtttggagagcggcctcaaactgtcttgcaacaaaaagaaacttgtgtatcaagaaggttttggtggaaagcaactgtcctatgtgtgatgttttcgctgaaaccgagtggcacgtactggtggcatgcgagttcgcctggtcttgcttcaatgttgctggtttggctgctgtagcaagggactccttctcctctttgctgccgtggctagaagctacagccaattctgtttccagcgaaatgatggggcgtgtaataatgctatgttgggctttatgggcagcgagaaacgatctggtgtggaagaagcgggttagaagggtgagtgacgtggtggcgtttgctaatttgagtcttgaccattggataaaagctcaaggaaagggtaatctacccttgttgtctcctctcaaagagggagacggtgcggagcagtggttaaaaccgtcttcgggtatcaagctcaacgtagatgcggccatctttgcctcctccctcaagtatggcttcggatgtgtggtaaggaat

SEQ ID NO: 91070 - DNA, 871 bp, Cannabis sativa
aaagtagaataattaaaataattgtcgtatagagtcatgttaaaaacagataatttggtgtgtccaaatgatttagcggtatttatatgcctttacaatttagtcttattgttcaagatgttcgaaatttgattttggttttatcttttggtgatttatgttttgtaaaacgatctgcaaataagttggttcattgcttggcaagagactcttgtgttctctacaggcagggccggccctaaaatttagtaggtcatagaaaaaaaaattattttgggcccttatttaaaaaaaatatagtatttttcaaaatcagtaaaaaaaattatataattttaaaagggaaatattttttttttggccactgggctaggtgggctctaggcacaggcctagcccgcctatgcccaggaccgggcctgtctgtaagtcgtgtgctttgaggactgttcatcttaagtgcgtaaacacatttattaatcaataaattttatgatttttattaaaaaaaaaagaataagtagaataattaaaataattgcttattacagaaaatatataccgacatcgaatattgagcaacaaaatcagtttttattattttgtaggagtaatgtaatttttttttataacttgttataataagttattattggtaaatattttatttttaaattcaaattaatgagaaatttacataaatatatattaaatttaaaataattataaaaatatatattaaaaatactatgctacattagcatatatatatatactagcaaaaagcgacgtgcgaggcatgtatacaaaattttatgctagtttttttctatgttatttgaaagtgatataattaaaaattaaaaaatat

SEQ ID NO: 91071 - DNA, 1525 bp, Cannabis sativa
aattactgtgagaaaagataacggggattactttgtttacttcaaaatctccgatgatgagattgcttatcctgtttcgagattgagggttcatcttgattgggtttggcggcgtcgaatctcgcaagaccacatgtagccttctctgaccgtccaacgaaggaccaaatcaaaatttcaattcgacaatgaggttcacataaacaatgagagttcataaaggcgacaacaacgattaggatcgatcagtgttcactggccggagtcgatcgatattttttttgggtttgagttgttaatattagttgtgattaatggttttcaatatcattaattttttatgatatatttttatttatatatttttttttatattgtcttaaatttgtattttctatgttttaagtttagaagatcttcttcttcagcatctctgccaacatagtgaattggtgaagtcgtttcagtagccgacgatgtagttgtgctagcaatgaatagtaattagagtgatgatccgcatttcatgccaatttttcatggttttccattaattttttttattattacttaatggttttatttgtcaacttttcaccttctctatttcattttataagggctattaggtttcctccaaggaaaaaaaaaggagtttttttaaatgtatacatgatttgaaaattatttataaaaataacaatagaaattttaattatcaaaatgcgtgtattttagagcttctaaaataacgaaaggagggggtctattatttttaagccacacactctctcagggccacttccagctattttttttctttttttatattcactgccacttttggctgcctttttctttctttcttttttgttttcttttattacttttttttttttctgaatttgttttcttttattttgtttgtttgtgtcaacaacaatttaattttttttaatatttacttttattattcttttagaaatgaattgcagttacattattaattatttggacttaaaaatagtacataaaatattctaaatcaaaaaaaatcttttagtttattttatattttgttaacaaaaatttaatatttaaaatttagtagaggttatatataatacttagatactagttggttcaaataataaaaaagatactagttggttttattttgatcagctctattttgacaattgcttaacttttaaaattatagtttcattttcaagttatataatattgttaatcaagatacattaaaagctgcctttctttttaatgggaacttttatgttaccttcaaatataatgagctacaataaaatacaaaaaattaccaaatagcttatttttttttctataatataatcattgtacgatatttaagataacatttggtttctataaattgttttagaaatttattggaaataactctaaataagcttttataaaaggcacaccataaggtaacttttaaatgtgaattaaaaatatactttttagtaatttataaaat

SEQ ID NO: 91072 - DNA, 786 bp, Cannabis sativa
tcggcagtttctttcaaaattaattaaaaaaaggacaaatcaatcttttttctttttttagaaaaaatcatattatttccatcaagaatgaagataatgcagaacaaatcacactgcgttatatcatcgattgaagaaagcttagcctaaatcaaagtaaaagtcaatagtaataagaaatatgaattgatttgagatttcatatgcgtagaaaaacaaaagagcagtgagtgagtggtaccttgacggagagagaatgaagagcatgagtcaaagcatcgccgtgagcttcagagaagccaccgaggaaagggaatgaagaatcaagagacacaatattgtgtgcgtgaccatctaccacctccactgcttccactgccttcttcaactctgacaaatccatatctatttttctcttctctctttctctctcccgagaaaattgttttacaaaatggcgccctagcctctttctctttctacatccacagctacagatttatagagtaatgataaaaggtagccgtagtgtatcacaatatatcaatatctcctttgcaatatcatattggataacgatacaattaattattggttacaagtagccgtgatggctgtacgtgatcctatactttgcaatgataactattgaccaccagaaatagaaaaagtaaagtatttccataaataacaaataggtagataaatgacattggatattccgtacaaacagaaaaggacaaaaagcagcacctgtgttcgttgcttgtaagtatcctttagtca

SEQ ID NO: 91073 - DNA, 8841 bp, Cannabis sativa
tttagtttatttttagttttggtttaatggtttttttgattatgttttggaactattgatttttgttttttttttatttttgaaactttgagtattatgaattaatgtttggattcaggctataaatttatgtttcaatttttggatgatgtttgtttgttctgttgctttgaatagtttgtttaatttaccatgttattgtttttggaattgaattaacattgcattgttagaaaattgttctggtaagtaattaaacagtggtttagttgaatttaatcatgtcatctgatcagctttgtgtcaagagtttcaattttgctttggggactgggaaaaagtttacttggaatgttttaagtgttacaaataccaattttcagttgttattgaatagattgtttctatactccattttaatctattgtgagatcaaaattgaagcatttgttcatctgttttatttggggacacaatttgctatgtgaggtctataaagggccaagtagtttatgtgtgaaattatcaagtagtttacctagtttatggcattttgcttctttaacttttggtcgagtagatttgaatatttggttatttttgttttatgaagatattaagccattatgatatcaaaatctgaatgtatccttgttttgttgagtaagtgttggtgcctttaaagtttgcagtttaacaaaatctttataggaatctaaattaatttttcatattatattcaatcaatccaattccaatctcaattgagtaaagtcactttgtgggtattagacaagcataataatatctatgttataagctaaattggtcaatgcgtttagttgggaatgaacattctgctatgccctaatcacattcacaatcccaaattatcagattttggtttggccaaattttacgcaccaaaataacacatacgaaaaaattatgagctgagtcaaaattagatcggatttcgttagcgtattttttggattctgttagcattaactccgtaaaaaaatgaaattgattcaaattaatagattcactaatccgtttacttttttaatttaaagtttaaatattatttatttttcataaaagaataaatctaaataaaaagaaaatttactaaaaacataatagggtagcttattcattattttaaaattaaacttttttacttctacttagatattttgaatttaagagaaaattaaaaaaataatagaaataggaagcaagtagattaatgtgtgaatttacgttattgattttaattgtatcaattggtctaacataacccaatccctattttattcaagtaatttatgattttctcaattatataaatttcaattacatacaaattttatattttcgtgataaattaaacatgtaaaagacattaaacacaaaaatcctttaagctattaaatcatataggtactctcatcatatatcgaaatttgttcatatttcattatagcatagttgacattcatttcttaaatctcgtattaaaatcataaatatttattggcatcatatattactaattttttgaaagaatatatataatcaagtgtacgtgggactatgatagataacttttagaattctctactattgcaataatttttgtgagaaaatgtgtatgaatgagagaaataataataataaaaaaataatattttagaatgatttgtatattttgactactatgaatgttgcccctattacttagagtggaggttgcccatggagttgtttttactacataagcaatgtaatcatcatttttaatgtaattttatcaaaaccgttatctatattcgacaacaatcatgtgacattactttatttttatctttttttttcaaaaagattaatgtatggtattattttatagtatttaataaaatttaatcatttaaataatggaatgtgagatcatagcgggtaacttttaaagttgtcaatcattagagtgatttttatacgaaaaattgtcaaattttacgtgaatgaaaaaaaaaaatttaaaataatatgtccacttttgacaactataaatgttgtcttcgttaaaaaatgctctaaaaaatactatgacataactcgaccaaactgatcaatatacaccctaggctcttagtactttattagagatctctagactaatcttatatttaggtaattttagtgtttctaattctatttctttttttttttttttgaaaatgcgtttctaattctatttcaaagatgaaaaaaacataaaaagaattctatttgagagatggcacacttgtaatttcctcacaatttaggaccttttcttgcaaggacaacaatttagcggtatgatcatcatcactttccctctatttgaaaggtcatttcaatgtaacttcatgcagagctactctactcacatattcccattacttctcttttaagaaaatacccctctctctctctaagctctgtttcagccattgtagtgcagtagccatgaatatgaaagctgagcccaacaatcaaaaaagaattaatgatacagaattaactgctaagttccatatagaagaaattaggtccaaaaagttctccattggtaaaaaagactccaaccctttaacacaagaccttcatcatgctgttacaagtttatcagctgaactttacactaaagatgttcactttctaatggagcttattcaggttgatgtttcactatttttcaaatgttcttcttttctgagtttgtttgaaatggagactgataaatgtttgtgtgcacgtgttttttatttttttggtagaatgctgaagataatgagtatgaacagagtgtggaaccaactctagagtttattttgacaaaagaagacataacagagactggtgcacccaccacccttttgattttcaataatgaagttggtttttcaaggaagaacatggagtctctttgtagtattggtcgttctacaaagaagggaagaagacaacaagggtttattggagaaaaaggtgatttgatttgaggacaatatttaactttttttatttttttattttttatttttttatgttgggtttctgtttttctactgaaaagcttaaacttttctgtaaaaatgaaaacttttttattaaaattgtttcttcatggtgtgtgtttcatgaaagttggattcttttgttagattcatgactaaagtttgtatctttaaccaaaaatgcagggattggattcaaaagcgtcttccttgtgagtccacagccgcatgtatttagtaatggctaccaagttagattcagggaagagccaaacccagattgtgatattgggtacatagttcctgaatgggtcagcaaaaaaccttatctttctgatattgctgatctatatggttcagacaaagagttgcccaagaccatatttatacttccattgaggccagagaaggtggaagctgtcaaaacacagctctcagagctacacccagagattctgttgttcttatctaaggttaagaggctctatgttcgtgaggatgaccgtgattcagcaaaaaatgacaatgtctcaattgtttctatagctagtgagactagttatgtggagttgagtagtgaaggagttgattctcgtgttgttcaactttctgtcaaagagaaaacttgtgttgatgaggagacttgcagctatttcatgtggagacaggtgtttccagtcaagcctgagaatagagtcaattcaaggttagatgtggagaagtggattataactcttgctttcccatttgggaatagattgagatcaagaggtatttcttctgttggtgtctttgcattcttgcctacagctatggttacaaattttccttttgttattcaagctgattttatacttgcttcatcaagggaatccatacttttggacaatttatggaacttggggattttagaatgtgtcccatcagcatttgtgaaagcttttcagacttgtgtgaggaaggattgtctgttttcaatggctcaagtgtatgagtttttacctgcttgtgcttcatcatatcctgagcttaacagaataagggatgccattaaaaaccagatagcgaatttagcaattgtgccatatgagttgtttgatggtgaagaacatttcgctaagcctaaagaggttgttagaattctgtccacattttgccaactcttgtctaaatgcaagaaggaaggagcttccttgcatggtttacgtagattgaacaaggttttgcacccgtccttagacctcgcgaaattcacactagttcttaattttcttggagtggcatatgttgatcgaagtgttgattggtatgtgaaatgcatacaatcttgtaatctagttactcaacactccatagaggtttacatggagctactgtgttttattgctgagaatgaaaaaactgtgtctagaacttactttcggtgtttgccactttttaaattcattaaccgagaagggaatgtggaattgtgttccatttcccaaaccatgaaagaagaagttacaattaggtatgttctagacttgaatatacattcttggttaagtaagtgcagcatagagtttggttgttttaacaatgtgtatttcttgcttgacgacattcagaagtctcttgtaacacaatgtaaatcttcaaaaatctggtattggctatcgaacagtgcaaaagtaagatcattcttggcctatgattatgcttacatgcttatcaatggtgtacccgaaaatagaaaagatctcacaagacttgttgctcatttcctttatcaagctcataagaaacatttcattggtgagagtaggatttatgatctctgtactaatgttcccatcatcgacggttgtgatcgtgtacatgttaggaaggagaagagtgtaactcttgcacctgtgtccggaagcaaatgggccaagttatttggtccttctaatccatttctaaaccagaaatatattgatgttggaaatgaatatgtttggaggagttcatttttgggagaaactacttctgagaaagtcattctagactttatttgcaagtacaccaaatctatggatttacccgagctttctcctccaaacttggagttgaaagtagctttttctccactgtcaatgaaacaagcgtttatgcttcttgattggataaggtttcttcagactaggggggcatgtctacctgaaagattccaggcaagcattctagatggaaaatggttgaggacttacacgggttataaatctccaaggcagtccattcttcctgatgaaacaggcaaatcaatgtttgatatggtgaagcatgttctcaaggatatatcagttatagaacaagagttctaccataacaaaattagaaagtatcaagatgagttgacatttcttggtgtgggattcgggtcaagtgacgtgcagagattaattgctgggcgatttgtctctcttgttttgtctgctggaatcagaaaagaggtggtcttttctttgttgaagttcattggtttcttgaacacaaggaaaatgattgatgaggagtggttgcaagccatgaagagggctaagtggctgaagactcatcagggttatagtgctcccgagggagctattctcctgttgtctaagatagaaacatcttcatgtttgattaccccaaatctttttattgttgatgaagcttattatggaagcgatttaggctctttctttgttgaactaaagatgcttggagttataaccgatcatgttgaatctttgaaattgattgcagaaaatgcaagtctttgtccaaatctgacttctgtaacagctgattgcggtttgcttatgcttgaatgcatcaaagtttgtggtacttctgccactagcttgattgaaaggattaaagagcagccttggttaaagacaaactcggggttcgagacccctttcgaaactacttatcctaatccaatatggggctctttggctaatgctttgcagattcctactgttgacgaactctactatggagatgagcttttgaattatcatagtgaactgagtgcaattggagtggctgttgatactgcttgtgtaattgaaaagattgatgctaagtttaagcttcttttacattcatcaaaactgggacctgatatggtactatcaatgttgaagagtttgaaagaaatgagacaaatttcatcttcaggatgtgttgaactgcagtgtttgtttactgagaagtggttaaaaactcgttgtggttacaaggctccaagccaatcaattgtttttagtatgaattggggagcggtatcgccttttgttgaccttcctctaatcgatgatgggttttatagcattatgatttacaggtacaagaatgaactccaaatgttaggtgccattaccgactttgagggtggcgctggatttgttcttgaaggtctaaagagtcccattgaacctgaatttacaacagcttctggtacaatagcattgttgaagtgcctaaaatctgttatgtccaagtcttctgatcagtcattgcctgaaaactttcttgagaacatctccaaaagcaagtttttaaagacaacaaagggttactcagttcccaaagaatgtgttcttttcgattcagcttgggaaggtactttgaaccagactgatgtgccgagtattgatgtgatgtgctacgaatcagacttatcggtgtacaaggagcagttgaatgccattggtgtaagaacagattctatggaggtttgctctcttgtatctcggctactctattcgcagacaaacacattgttgataacaaggctatatacattcctttgcttgttcaactggaagccagagaactcagatgagttcatctctcttgtttggataccaagccatgatggtgtcaagggaaaatggattaagtccacacaatgtatacgtaatgacgacaatgatctctttgttactcgcttgcattgtctttctcgtttttacaagccagaattgctacctttatttgtgtcagcttttggtgttagagaatttccttctctggatgactatttccagttatggaatgattggacttcaagcaatgacggccgtgtttctaaagctaaatgccgatctttttgggaaggcatatcaaaacattggaagcccgaaaccatagaggctttcaagcaacacttcaccaaactttctgccaccacaggtttggatgatgagattcatttggtagacaaggaaaatgttttcatacccgatgatttgcgcttgaagagtatttttgaaagtgtttcactacctttgtttgtttggttcccgaatgttggtaccttatcgtcttcctcgtggttactcaagacgatctattgctctctaggagtaaaaaacttgactgattctgtcaaattggggagcatctttgcaggagatacaccaaagaaactcataccgaagaatggtttgatcgaaaaaggtctcatcaaaatgatattggcttttcttgctggtccactgcttaatatgcaagtaaagaagagacaacaaaccgccactgcccttcttaacctcaccctataccagaccgagcagcccatcaaaatcacctacatcctgaccccatacccgaacgaaacagtgaaagctgaagcaaagaaaatggtgttttgggacaaaaaatcaaagcagctgatcattgacaaatcagggtacgaaaacagaaaaagtagcgcagagtttgcgtcctgttttgctcaagaaatttcggaaggaatgctgccagaagcaagagcaactgtagtagatagtctcagcagaattatacacatgggatttatgtatgagttcaaagaagactctgttgactacttgttagtaagagagaatctggtgatgttgagtgaagatattaagtttgttggttctgtatttggtcaagtcaatttagaggaaatggctcctttcacaccattgcctcctccatccaagaagctgtgcaagagaggtaatagtagtgccttgacttgatgcttgttctggtacgacaatgttatgtaatgtcgttttcgaatgcgccttttgttatgtgtatattttacttttgaaggtaaaaaacttatcagtgttctctctttggctaatggcttgtaaagaaaatactcttaaggctaagcttctttttcttttgactcttgttatgaattatgtaatctgagccaaagcaaaaaaatccacttgactttcttttgactctttgggtaatttaatgaaccaaagttttcttctcttctctctctctctcttcccattaatacagaatttagtggttggaatgaaaaaactaagcatgtgaaagtggatattgatgcccatatatatagtagtttcataattctcacttatatatgatggttgtactattgtgcaaattaccaatatgttaaattttgttgatacttatttcacaaactatattagacaattggtagttaaatgatgacatgacaaatttatatataaacaaaatattaaatatatgatgccattttgtatttaattgcaacaaaatattaatttttttgtattaatactaaaataaattagctactagattattttctataagaaatataaaagttgagctatattttgtacaaaatgtacttttgtgatatttttatatcaattttgtgctccaatatataattgtaattcaatatataattgtaaatcttgatacaaaatttagggattttttcatttttaca

SEQ ID NO: 91074 - DNA, 694 bp, Cannabis sativa
  modified_base (127)..(133): a, c, t, g, unknown or other
gtggtaataatacctaaattataattctaaaacttttgtagatgactgattcttaagcgtcaagtaaattatcacgtggtaatggtttaagttattaaattttattttttttatttaaaaattaatnnnnnnntaccaataaaaaaataacacatgaataataacttgacatttaacggctatgtacctacagaaattctaaaaatataacttaggtattattaaatttaaatacttatcaactgaaggttaaacttagatatttgcattcttaatattgtacaaaaactcaacacagttgttttctatgctcttgatcctaaaatctgaactcaaatgaaacagaagaatttaatcaaagacaaaagcaatttaagacaaaggggattatgatttcttgctccccatccaattttggaatcactattaagttaagcatcgaattatattaagttaaagtaactcatcatagaataacaattaacaaaaaatgaaaataatgccattcttaaattattccaagaccatttcttaggttgctcatggggtttgaaatgtccatttagaaaattagaagacaactcttattattaacacaaaagaaacaagtaaactatgattttgttatttctcaaatcatggaagatacaaaaaatcgttttgcctagagtcaaagagaaataccgcccgactc

SEQ ID NO: 91075 - DNA, 503 bp, Cannabis sativa
tttttcaatgaacattcttcaatgttatcaactaagtttgttctagtaagagtgattcatgcatttagaaaatgcaggttataatcacctcattgacaatttatgagttacttcctatccattctttctacttaaaaaaaaaaaccaacataaactatatattcaatcctttattttgtatatgttcaatcatgaatttaattgttaaaaaggagtgatccttaacccttttcctttaagcattcagttatgactattagtgaacctagtcctgtctagctgtttagttattcaagcctatagctatatatatataagcaatcttgtaaaggcttagaacttaactcttgtaataactttagacgcacagtcaatacaagaaacacttttgttttgttttattttgtttatactgtttattctcgaattggttagaatctcattctttgaatgctcaaacaaattttagggttcaaacaactgtataaataaaagaggttttt

SEQ ID NO: 91076 - DNA, 1193 bp, Cannabis sativa
caaccattttcactctaagctgatatactgggcatctctcataacaaggcttagtgatgatttaggaacttcaaaggtattaattagtattaattactcaatattttatcaacctttttttattgttactatttttaagaaaataaaatacacgtgttgaattatatataggatgagcttaaaagaggagatgtgaagaaatcagtggagtgctacatggcagagaaaggaatatgggaagaagaagaagcaataaatcacataaaagaattgagaagaaattcatggaaaatggtgaacaaggagataattattgggaataattgcctgccaaaaataatggtgaagatgtgcttgaacatggcaagaactgctcaattcatattccaacatggtgatggaattggcacatcgactggggccaccaaacatcgtttagcctcattgattgtcaaacctgtacccatcgatccatgttccaaaccaattaatggacttggagactcacatacaaccataaaaactaaaataaaaaaataaaagcaattatattgaagtccttcgtgcatctctaatctaagggtaccaccactttctaacaatttttatatgatgcaaaaatataatattttagtttatttctgttcatatcattttttagtatttttcttttaaagtataataatagtaagcatttctcaaattttctaccatattctacacattattatttaatatatttttttgatttaaggcatcaatattaattgaagaaattacattatatattcattttattttatttgttttaatttttatttctatttttatattctttaagatatacttatttttacgaatgatgtttccattaaatcctttaaattaatgtaaattatatacttaatttaagtatggagtgaaagtatatcgagctatccactcaaaaaaaaaatatatattttaataaaatataatataaaaatatttttaattaataatagaaaagatataatgttaaactcacccatattaatttttggtttggcgtactacaaacctctccaatgctaagagcatctccaaggagtacatcaaatttgatgttacactatcaccaaatttagtattaaaaattatcttctctccaccataacaccaaaaattacactaaaaaatattttttattatta

SEQ ID NO: 91077 - DNA, 679 bp, Cannabis sativa
acatttttatatgtgatgaatactgacaattctaaataataccatttaatttaattaattaattaatttaatagtaaaaagtaggttgaattcattaataatgaaatttaagaagtagagtatatacattatatccttaagtatagtcctacattattggccttgagccctatgcaagctatgatttgtgattatataaaaaaagaaagactaaaaggcaccaatagtgtccaatactattttacgtattgatattgttattgatttaactaaggatctgactcatataatttaatataataagaaaaaaactaaaaaataccaatagtatcaagtaccatcttacgtgttgatattgttattggcttcactaagtatcgagtctcatataatttaatgtaatagattttagaaaatatcattagtcaattacaaagcgacacgtgtagaatgtgctaggcaccacaggtgtccaatagcaatgctcatataaaaaagataaaaatactaaagacaccattagtgcctaacactctcttcggtgtcatactactattagtataattaagtattagatctcatataacttaaaaaataattcttaaaaaatatccttaactaatcataagacgccgcttataaaagatattgggcacactgatatctaataacaatgctc

SEQ ID NO: 91078 - DNA, 740 bp, Cannabis sativa
aaaaaatatttttattttttataatatataataaataattaaataaatttttagtaaaagtaatttattatagaatcttttattcaaaacagttttttctaaaagtaaggttgtaccagctttagcttttagctgtagcttttccataaatttttcaataagctgttttttaactgcttaccaaacaccttttgtcacagtttttttaaaaagtaacttttagcttttccaaaagctgtgccgagcaagtcttaaaaaattcgaactattttattaaaattattattgattctaatacaacttaaaaaaaaaagtaccctacctagaaaatatatatatcaaacattttttagggtattatcttactaaataattttaactataaatattaattttaaatatattaaattagcagattttgatttgatgggaaataataaaaaaaaaattagaatttctatgcttaatttagttaattatttaaaaatatatcaaaaagtatttttttcacactatattaaaattatgtttatataaaaaatattttaaggaacaaccccacaactttggcatatttaatgtaaaaatgagatattttttttaatcaaataaaaaattaagtataaaaaattcaaaatttcctaatattaccttctcatatttaatacccattaaaagcatatatatatatatattaatatttttataagaattatttcacaaaaacataaaaacaacaa

SEQ ID NO: 91079 - DNA, 638 bp, Cannabis sativa
tgtatattttgacctatgtttttgttcggggtttcgcgttaagtattgaattgtcgggtttttgtaatgaccaaattgcccttgggtgttagtaactagtttttttagctaagggggcaattaataggtcttttggcaagtcctattttgtcttatttgatctatatttaggctgtatataatgttttattttttaaaaaaataataaagaaaggaaagctcttgcttaagttagaagaaattaaggaaagtgtggaaaaagggttcaccttcttcttttcctctctctttctctttcgatcctcttgggcagcagctggagttgggatttttgagtttgtagcaaggggttttagtgattcttggaagctttgttcaaggtatttcttatttctatctttctcttgaagttttggtagtttaggttaggttttagtatgaatttggggaagttgatggctgtttgctttaaaaattttttaagttagtttctggtgttatatagagattattttcttcattgtaagctaggataggtaggtattttaatgtttgaattgaatttgagtttgtgagctcaagttggagctctaatggtggattggggttttgtttgaattgttgagttctgttggttg

SEQ ID NO: 91080 - DNA, 709 bp, Cannabis sativa
aatctatcagtggtaggtacttgctccaagagcattcaaaatccatcagataggctcgcaaacacattttcaagtatctgcattgtcctctcaaactgcccatcagtctgaggatggaaagttgtactaaacttgagcttgatacccatggctcgctagagactttgccaaaattttgaggtaaacttcggatccctatctaatatataatggactttggaaccctatgtaacctcactatttccttaacatttaggtctgcatattgatccactgtgaaggttgttttcaccgatagaaaatgtccagacttagtaaattgatccaccacaacttaaatagaatcgtacatccccgtggttctaggtaacccaaccacaaaatccatggtgaaatcctaccatttccactcaagaagagttagaggctataacaaccctgcaggtctctcgtgttcagccttaatttgttaacaagtcaagcaccgggctacaaattctaccacatctttcttcatcacgcaccaccagtagaagggttttaaattttgatacattttggtagtgctaggatgcaacgaataagcagtggtatgagtttcctcgagaatctcatttataagctctacactatttggtacacacactctagttttgaacaacagtatcccattacctgacactgtaaaatctttagcttaaccagctaa

SEQ ID NO: 91081 - DNA, 529 bp, Cannabis sativa
ataatcactgtcataaaattattcaaataagcacatatatatatagagagagagagagaaattctatagtattggatataaattttacctcatgctacaggaaaggcattgggccaatcaaaaattaaaaacaattgattgtacaattatttgagcatctataggggattatttcattttttttttatttaatgatgattttttttttttgaaaaaactgatgaattattttttttttattttattcctttttgtagtggttgattagggtcggcctaaggaataggcaggctaagtccgcgcctagggcctacttattttagggacccaaataaaaaaaaatatcttttaaaaaatacacatatatttttttataatttttaaaaataccatttatatttatagtaaggacctaaaaaaaaatttttgtctgtggcccatttcaattcagggccaaccctgtggccgcccaagccaatctattagtagttcttaacaattttaattaggaaaattctaaaatgtaccc

SEQ ID NO: 91082 - DNA, 862 bp, Cannabis sativa
aggagaggagcgggccctttccaaatctttctcaatcttagagatgtgctttttgaaattgaaatctttcttatgattccagttgctaaggcttgtagcacatctgtcgagagaagcaaccagattggggatcgcatcattatgggccgagcagccagtccaggatttatcgaaagcaaagctccagttcgggtcctttaaccaagcattttcgaagaaaaagcgttttcttttttccttttgcaaggagcccggagcgggagaggtatcgaattctaaagctcgatggtcagaaccaaagaaacccaaatgagaaagagcggcctcagggaagatgtcagtccaaacactattgatgattccccagtctaatcgctcttggatgtttctaggggcagccacattgttattccaagtgagtaggggccctattggctcgagcggggaaaggttaaaagagtccaaaaggtttctgaagtcagccgagggacccctatcgggattaccgccttgtttgtcatgcgagaaaaggaaagcattaaaatcccccatgatgagccaagggaaatttgggttatcccgaccaatcctttttaaaagttgccaggtgtgaggtctttgagaggccgtatgagcaccatagaaacaagtgaggtgaaaagagacattagtaatagcacacgacacatagcaatcaaaatgactaatagattgggaacgtaaagtaacagttacatcattagtccataacaaaagcaagcccccacttctgcctaccctaggtatttctaaacccgaatcaaaatggagcttgatcttaatatgattgatagcattcttaacaagccgagattccattaca

SEQ ID NO: 91083 - DNA, 603 bp, Cannabis sativa
gttgtttcttcttatcttaccaagaccaaaaagagccttgctatcaatggctttcgaaattccttgttgcactaacaaagtctttattttgatcttccaaaggctatattttctcaattgaacttattcacctcaaaacttgtagaaactatgcttgattcattaaattctcttaaaactccaccttggttcttgaaaagtcaacccccacctaagctttgatactatttgttgtaatttaagataaatcacactaatcaagaacatcaaattaaatagagaatgaatcaaaagtataaaccaaatcaagattcaaaactaatacttatgctaaaatgaacaaaagcacaaacattattgctagatgaaattgtgaattacacaaattgtattgaataatgaaaaatgcatattatgtggttcgaactcaattgcgtctactctaggagggaacaagcactatgcctttttctttattactttcaagaatagagttacaaataaccaagattacacaaatagttcttaaaaactcagctcataacagtacatcaaaaccctctcaactcccttggagggaacccaaaactcacatggagaaac

SEQ ID NO: 91084 - DNA, 1750 bp, Cannabis sativa
atgttagagccaatcctcgtctcatggatcaaccgataacttttaccaaggaagatgcccggacggtgcattttttgcaccatgaccctcttgtcattgaaactcctattgccaacaagatagtagctcgaatttggtggataacgagagttcagttaacatcctgttcaaagaagctttccttgccattggcctcacgcaccaagacttgtccccaagtggtttcaacttattgggttcaatagaaactccctcatccccatgggaaaaattaggctcctaatgaccttgtgccctgacactcctcaaagtacatttaattactgcacctttatcatggtagattgtccaacatcatacaacgccataatgggacacctaacattggtggatttcagagctgtaacctcgatcaggcacttgtgccttaagttccctatctattatactggagtgggaactatttgaggaaaccaggggaaagctaggaaatgctatagtatagccaccaggcaagctgtcctcatggtccgacacacgaaagaagggaacctagtagagatacatgatgaattagatccttgaatgggaattaaccaaatggtagatgctacatcaggctacgagttgctagcatttatggacgcttatttaggctacaaccaaatttagatgcacgtgactgaccaagaatgcattcctcattgaaattggacagtttacaaaaatttatgtacaaccctaccaattacctcattaaaataatcaattcttttattattttctcatactttttttatttttctccataaatatatttttataaaaaaaaaatatatatatataaagccatatttttactataaaaactcataaaatttggagaattacgtcatatattattttttaactttttttaaaaaaatttacggtttgagttgctccggtgattgctatgtgagttgctatgtagattttgattgcgatttaactgtctctattggttggttgccatgtaaatttctatgtaaatttttgtaaaaaaaaaaaagaaaaaattgctttaaattataaaaataaaaaaatccctaaaatttgtaatttctatttaaataataaccaaataaataaatactacaactaataatgaagtttaaaaaatacaaatctcattccttctcttttttggtctattaaaaaagaaaaaaaaaacttacatcccaagagtcattattttttatatagatcaatttcaattactagaagatcatataaactagaaatagaattacttaattaggtttctttacaatagactgagttttaatatctaattctaaaaacacgtgtgagacattcgttaattaattaattgcaacaaatacatactttagacaagcaatattaacgtctcgaccaaacttgagcaattattatacatattatattgaccacttaaatacagttttttgttatctttcttaacttttatatataaaatgatattattattgtaatacttattactggtgtattttcacaattttgaataaaccaccatttatcttgggggacacatcatcgatcgatcaaattaattattgtcctttggaaatttaaaattccatccttacaagactttaaattttttttcctaaatgcatacttaataatattggtcatatataaccacattcttaaccatttgaaaaaatcaaaaactcgaaacttctctctctttctctctctc

SEQ ID NO: 91085 - DNA, 881 bp, Cannabis sativa
tctatctaaattaccattaacatgtgaacaatatgagtttactacttgattacgtgcacttgcatattgttcataattttcgtaacagtcatactacaccatcatcatgtacctgtctaatggacttaaaagaaagctaatctaagaaaataccttaaaagaattatggaacaaactagagcagctattatggaacaaactagagcagctgtacatggcaccatcaatatcgagcaagattaatcttcttgaaagattatacgggtttagaatgaattcttctctttctttagatgataatattgattaatttaataaaataattattggtttagctaacattgatcataaggtagacaaaaaaagtcaagcaatcatattgctcagatcattaccaatggcatgtcaagaagttaaagcagcaatcaagtatggaagggatgtgatctcgttggagggtgttcatgcgacattaaaatcaaaagactttgaattgtaactcgagaaggagactacgaaagacgaagcctatcttacaagtggaagaagtccaaagagaggatcatcaaggaacaactagtcaccattaagatcgaagtcaaagattaaagacaatcgacaatgttatcaatgtggaaagattgaccacattataatattttgtagtcaattgaagacgtaatctggttttagatcaaaccatgatgacaaaagatgcaacagaaactaaaaccattactcaaaatctattgatcatggaaatcaaagaaaagactctacagctgtgactgaaagcagtggagatggaagttcagatggggcattattttttattttagaaaataataaaaataaagagtggatccttgattcaggatgca

SEQ ID NO: 91086 - DNA, 909 bp, Cannabis sativa
taggctgtccttcattcgattggcgaggcactttgcaattattttatagctgacattgcaaagacttataggccgaaagtcagcaattttatttgggcatttgacttttggaattaggcacagtaatgtcttgttaatgtatctacagtcggtgtgattgttgagtatattcaggcaaagccttgtaacgtccttccccacaacatcccagtggtgttcataaaagaggcttggcattgcatctattccaggtgctttcattgcattgatttgggacaatgcatttagaatatccgcttccttaaactctgggagaaggaattcattttgaatcctactcactttacagggaacaaatctttggagatgagccaccatatctccctcatagtctttggccgagaatatctcttgaaagtggtcacaaatgttctgttcaatctcttccttagagctgatccacttcaaattgttgtcaaataatccccgaattttgttttttttacgtcttgaggaagctttttggtggaaatacttggtgtttctatcgccatggtgtagccaaattgctctgcttctttgtttccaaaaaagttcttccttagccaaatgaccattgagatttctttcaacctccttaaggcaagagaagccatgatttgtttggtcatgggagaacttctctatttcttttttcaatgcttttattttggcttgattgtcccttctctgattttgattccattgatctaataaattgccacaaagctgaattttttccccaaattctgtagccgatcctccagaacagccttcttttgcactcatctacatccgcccaggccttttcgtaatggaaccgtgagctccatttctgcttggtctcttcccctttcggtattgtattga

SEQ ID NO: 91087 - DNA, 816 bp, Cannabis sativa
ttcatacgttcacagagaatgaatcaaattggaagcgcattggaaagaatgctccactaaaacactttatgtcgttcatgtgttttactattccaaaatttgttacacaaggaaggagcaacatggtagtgctgatctctctcaagagcctacaaaaggtatacacatttagttaaaaatttaccattcgattcctttatccacactcagtgatctctccattgccttgatgacttttcacctttcaaaatggctcaaactatttcatgatcatataacagtttatgaagatctcattaccatttttcagtaaaagatatgccacagtcatgatgcttagagtgggaactccattcggagttggccacaagactttaccatgagccacccacaaatctttctagatatttatgtctttcccattagttaccatataacacatacccttacttagaatatctttagccttaatcacattcttccaaaactgcaaatcaactttcttataaatgcactggagagaaagggatgttcttaagtatttggcagttagcactttacaagacaagaattgatctttattaatgagttgccacccctatttttctagaaagaaacaattcatctccacagttttttgaaaccctaactcctccaagatttggggagacaaattttatcccacgctttgaggcataacccatggttccccttttcacccctatttttcctattttttatatcacctgctagggtttctcgttcctaaattcttagccgttgaaggttgtgttttttctctggctaggcccgccg

SEQ ID NO: 91088 - DNA, 522 bp, Cannabis sativa
atttctctaagaatatctatattagactttattaatgtgtgtttggattataagatctattttttttttttgttttgattataatacaatttaaatattttattttgtaattgatccatacactaaaaataaagaagatttcatataattaaaggcacgccctaaagttgatttgttttcgtttgtgatatatgaattaacaagtaattatttttttcttttattttcttctaaatatgaaatattttatttttaatatccggtagggtatatagagataacaaattacaaaagatgactcatttcatcaatgaaagaagaatcacaataaggtaaaatgatgtctaaataaacaagaaagactatttaattttttttagttacacgtaattacttcttatattattaaatatatatatgaaagagataattatcattgaataaaagagataatttatttcatgtataatttaaaaagttttaaatatcatcgcatgcagaggcggaggtacttacaagctg

SEQ ID NO: 91089 - DNA, 826 bp, Cannabis sativa
atatgattcttatggtaatatcccactatttttgtgggtttgtaaccgtctttgagcttcttgcgagatttaaatttttgagctagccactgaagatagttaacccccttcaaggatagaagctaatacttaggggtgacacccctaagacccaacttaaggagggtgttagtggtcgtctcggggtgacacccctgagaccccttcaatgttgtgggtagccttggtgtcatgaggatgtactcatcaatcactaagaatgtcgctacatttgtggtgggagaagtggcatctaccccctaggctaatttaagtcgtaggtgtggtggtgattgtttattctacctacaagggtgtcagtccactattttttccttggaggcaaccaccttgctcaagctaggggtaaaggtgatcatcagacttattatcttccaacggtcatgacaactggtcatgactttacacattcttcatcaattcagtctttgtatcctcgtgtcgcgtgtcatcatttttgccacctcactattgtcaaaattttggtaaatatttcccctaagtttttagcgatatgactatatggtagaaatttttcggtgtagtctgcacttcagtttagttgttgatgacttagtggtacggtaccgagaatgccatgcttatactagaattatatttcaaacccaaaaaataattatctcactttttcatatttttacaacatattcaaatgaaaatttttccctttgtaagcaaaaataaattataaggaaaataaattatttacaaaaaaaaaaaataatgggtaaatagtggcataagt

SEQ ID NO: 91090 - DNA, 664 bp, Cannabis sativa
caggtttttaattaacgatgcacaatgaataacataataatataagtatttgggttatgaaataatatgtatatgaatgtttaaattattaaattaattattgtcattgtttgattgtattttttttgttattacattgcaatgattcgataaacacgtcattgagataatgtagataaaaaataccctcatgaaacgtacaagaagttttctcttcctacagcccaagaaaattcaagttatgtttatgtagagaattctaatgtcaaatatattcataaaaaatcaaatcaattagactaataacttctttctttatagtttgtcattcttttagttactagacgacaactacgtgcaaggcacgctgtatcttctttttaattttatttttttatttgagtattcttattatcttgatcaacataaatttatagcatcaaacaatttgttaataatttattagaaatactttcaatatatttagtattttcttgagaaataaatcataaaagttggtagtgttgtcatttatttgaacatatattcatgcactaaatggttgcatgttaattgtgaatatattttttctatttaaaatatatgatataataatgtaaatattatatataagttttactatatatatttacataaaatatta

SEQ ID NO: 91091 - DNA, 760 bp, Cannabis sativa
cttagtctgaaacaaaaagattgtaggtttcagccatcagtacttagaatgtactgtattgccacactaatctatttaacaatacttggagtgtgtgtttatctgttttagacattgctgactgattcaccttttaaatattcagattgatgctgtggcaaaggatcttctcaaatatcactcacagacacacggattggttattggtggtaccactagaagaccagaagcagaacgtttagtaaaaggggttaatttattggtggcaacacctggtcgtctgcttgatcatcttcaaaatacaaagggttttgtatttaaaaacttgaaggtaacaataacatatgctatttatacagaattttatttctaaagcttgttatcaaatttagaaaatgcttttatattgtgtttttctttgagattctgctatgctatgttgtggtcagtttgttaaaatgtaatattttcataaattagggctgtcctttacatcaagttttaacctactatttttttgctggaaaaatctgcaagttcaggattgctcaagtttaagatctcaccatttctccaaaaaaaaaagtgcaatgattgagttgctaaaacggtgaatggcttgacactaacctaccttaacaaccacttgtgcaagccgctagtggaaactctggatttttttttttaataatattagggtggatgtgtgtctttaacaagcacttttgacaatatcacttgtttttggttaagattcttg

SEQ ID NO: 91092 - DNA, 2012 bp, Cannabis sativa
caaagacacgaaaatgagtgtactgaagttgtttatgataaagaacatagtaagggctatgaagatcaagaactttggtaggtaagcgattgataagatatgcatccagtgaatggataaggtctgttgagaatcatggggttccatctcaaaaccaattagcaatgagtggagtagcctatgttattatatatggttcaatacttttacatttaatccatatgagacaatgttctccaataaggtcaataggcaaagggaacctaggcatgggctaatagagtgagccccatctcaataacatgacggttcttacgtttgactcgcccattttgttgaggggtatgaggacacgataactcatgatgaacaccaaaggcagcaaaagcagagtgcatagagggaaattcacctctccaatcagtctcaacatgcttaatggaacactcaaattgggtggtgactattgttttgaaagtgtaaaataggaaaaaacatcaataaacaatataaactagcgaacaccaaaaatagaagacacaagaaaaggaccctataaatcatcatgtattaattcaaaaggctttgtagcctgagatacagaggtaggaaatagtattcatgaattaaatttggctacaatataaatatcacattttttatttacttatttttttgtcactcatttgtcaataaaatattgagtaatttgtagcgtaaatacttaagtttataactctcgattgcatgtaaaaaaattaagcttaattttttacagtaataaataattaagttacatttttagaacttccataagtacttgacggatatcaagttattattcacgttttattttttattagtatatttgaattaatttttaaataaaaatttgatgacctaaaccaatcagagacggtcatgtggttattggcttgacacttaatggttaattccctatggaagtttcagaaatataacttaagtatttttatcgtaaaaaattaaacttaaatatttatttattacaactaaaaattaaacttaaatatttatgtcacaaattattttaaaatatttgtcataagttcttctcttaatttataatatacgttcatcgataaaactcaaaaatttaacttttaaaataaatattaaatgttttcttttcttgaatatttccaataaaaatcaatgactcctaatttttttagtttgtctacttgcatcacaatatagaaactgaaccaactataatataatttttttttaatgcatgtaagattttattttgtaataataataactaatcctaattctttcaagaaaatatagtattgttattattattgttgatttttttattaaaataaggcattaaaaggttttttttaaaacctaaatatatgctggagagagaaaatataaagaattcttaaaaaaattaataaataaataaataaaacaaaaacagttaatgaattaataccaaatttatgtgtatataagacaaaaagactgcattcattatggtgtgtgagtttcaaatgcaattatttagtagtgtttaaggtcttggccgcctcaaattgacctaattttataacaagttttaattaaataaatatatttagaataataagaaagaaagaaaaaacacacactagacacttgtaagatgtttaaattattattattatttattttattttttttgaaatggaagtgttagataaatttccacttaaactattgatctgagctaaagacaatcacaaggaaaaggccttgggtccatttatcatctaacacaactattacatattaaaatttcagttacaataaactgaaaaaaaggagaataatagaaattgttctaacagcttctaactaccacaacaagaaaagaaagactttcatatgcacatgtacatgttttcttcaaactcttagaataagttacagattactgcatggaagctccaagacatagtgagagaaaatagagagag

SEQ ID NO: 91093 - DNA, 662 bp, Cannabis sativa
ctccgtccctcgtcgtaatataaacaaatattcaattcacacaaagtttatataatcacaccaaatatagttttttatctaattagtaattaccatgtttggacgtgttcttacttctatcatataatacaacaatactttaaagataaaaatataagaaaatgtgattagactaaaaatgtccaagataattaatggttcgcaccttttattgtataacacagcaatcaattttcttaacaaattgaaacggtttatgataaaacaattctaagattaaaatgagatcaataatgatatgtgtataaattatatataaatataaaatatatttatgtattaagttacttttaataagtaacattcctttcaaattagtatgattacttgcaaatacttgctatagaaatatatatcaaatttgtgtttttacatatttttactccaatgaaatgtataaatgataactccaccctaatatttaaaaatggtaagctttaaataaattttaaaaattactttttatatatttttttaaaaaaaaattcacattaatttgtgttaattttaatataatttttataaatttttgaatcatgtataatttttatctttttaaaatatatttatataattttttattttaattttttataatattt

SEQ ID NO: 91094 - DNA, 1005 bp, Cannabis sativa
atgatttctatgctgaatactcatagttatttgctacattaacagtctagctaggtggagaattgtaggtgttacactgttaatatagttaattgtgggttgaggctatccaagttatgatccgttatgtaatgtcattttatgactgttagttaaagttcctagtctataaataatgctaatagtcctatgttagcagtgacttgtatttattattacacaatcaataaaggaatcatattctctctaagttgtgttcttgtatgtatgtgacttaagatagcttttggttgaaagtaatgaaatggaatggagcgaaatgaaattgaaacaatttttattttatttcctttgtttaaatatcattcctttgtttgaaacaatttttaaaatattaaaatatcattatcagaaaaattttaataattttttttattaattgtgttatgtactttaaatttaattttattctatttttattgatgttctcatttatattgttatgtttcattcctttcaactaaacacaaattaaacatgttgttttgccattgatatacctggttcagaagattagtgtgtcacccaaccccataattactacatgggttatgatctagcaacttccactattgccacttttaacgaataaaataatatgccttttttttctgacagaaaagaaaagatatacattttaacaactaagaaatgcaatattatacttatctaatgctatacccataccactacaatacatagtaattatgatataattatatgctagtgctaactatatcaatgtaattaaaactttaaataggatttgtaagagaggacagatcattggagtagccacatggtagtgtctcagtaaatttttatatttatttttaatgaaatacttaattaatactttaattaattaattatgaggaataatgtgtaagaaatatgaagcctaatcaaaaaaagataatacacgtaatgacatacaaaattgaa

SEQ ID NO: 91095 - DNA, 1315 bp, Cannabis sativa
ggatgctcgaacccaattcttaaacacaaaacacacacatacacgagattagatctagattgatcttatctttatcacacaaatatagaaaaacagagttagaaaaggtttaaaaaaaattaatttttcttgaggttcacccaaaatggctatgtccccattgagctattccccaaattcggtagctcgatttcactatcaatcaactgttatgagttacaaggatgagattcaaagtcacatgtatgatattgactggtaatctctagatcaaataacatttattatgtttaatctcactctctctatatataaatatatatttactaactcaagtttgtttttgtgcatgtatgagtctctctccttattgtccaaagatctcagctcttggatcttgaagaatctcctcaaccttaactcgataaggctatgtagtaggtatatatagctatataggtctctctctttttagtttgttagttacagaaattagttaggtgtggattgatggcctgtcataatccattctaactaacttttgttaggaattaagttctagaaggccgaaggccactgtagtaattttgtatatgtatttttctttgtatatatagaaggtcgaaggccaatgtatatgtatttttcgttgtatatgagtccctctccttcttttacaaagatctcagctcgtggatcttgaagaatctcctcaaccttaacttgatgaggctgtgtagcaagtatatatagctttaggtctctcttttgttagtttgttagttatagaaattagttatgtaaggattgatgacttttcataattcattctaactactatttgttagggattaagttgtagaaggtcgaaggtcaatgtagtagttttgtatatgcattttttttttttttgtaaagacttaatgaaatgatatcagtgtaagtcgaaatttattcaacactagcataaataaaatatttaaagcaggaacaatgacactataagatcacttcaaatatctatatagtgcaactccttatgttttctctcttatttttatcaatttgttttatgatttttttattatcgagaaggtcatgccattaattgtgtaatcttatctcataatattaattaattctatttacattctcattctcattgtgtcctctctcattctcattttttaatattctccatattcattgttcatcatccttttttttttttcatctctcatgtttattttttctatagtcattttttctaggttgagaaaggtcgtttaaatttttttttacgatatatcacaca

SEQ ID NO: 91096 - DNA, 602 bp, Cannabis sativa
taattacactacataataattatattgtattttaaaatataaggtgtgcttagatatcaaatggtaattacatgtgaatttttattgtcatgcttgacatgacagttggtaattacacagtaaattaatattgtataatatttaatataataattattatcattttgtaataaatatttaaaataaataaaaatgtcttcataaaataaactcaaatttcataataattttgtaacaaatattaaaaataatttttatctattaagactatcttattgttattgtgttccatatgtcttgagctattacaattgtggtatagtttttcaactatagaagtttgagtatttgtgcattcttatattgattaaaaattaataataaataaatttaagcattttatcaatcaaaatttatgctaaatcatacataactatattagatatctaattcaaaaaataatgttaaaaaaatcttgtatcatatattaatatattagtttctttttattattatttaatataatacaaaaaaaactacagtaaaaatattataaaatagcatcatagacatggcatatatataaattatgtatataggaa

SEQ ID NO: 91097 - DNA, 1278 bp, Cannabis sativa
gcaaattttatagaaagattttatgacaatacaagccactttagagtaggaaagattttatggaaacaaagatcgagcaaattttgtgtgagattttaaaagttttttttccttaattattattttttagggatttctgaatctttaaattaattttaagatataaagatataagattgtttcatgtaattgtataattaattatactaatccatatgataatagttaacttttaaggaatattttagtaccttgttgtttgtcctagttaaggatgtgcactcgcccttaattaagggcgcacggtgtttcacttaatttttatttatttattgatcatattataaatatttctttatgtatatttattttttttttaagaatttttaattttataaggacaatatgttgtactttaaattattaatatagtgtatgatattttattttttatgtaatcgatgtcatgcttgctttcgatattttgaaaaaataaatattaaacttatatttttatagatacaatttgcagattgtaaaatatgagttcgatatatatttttatatttaacgaatgatttgatatttaattacctcaatttgatgtcataagctaatgtgaaatcaattttaaaagaaagattaagcctactttatttcgttctttaattttataaaagtcaaataaaattaggcttattttgcttagccctaatgcatttatatatacacttgtagaaatttaatttttagtgtattttttctctcatgattagctaaatatctaaatgaggttcacacacgacaagaaaaaaaaaaggaagatttacatcataaccaaccaactatagctcacaaatcaaaattttcaatcataagaaaatgaatgaacattatcatggatataagagaaatgataaaattgtattagtatatattatatcactgttggtataattaattatgagatctgatacaatttaatttaataattattataaaaatatttttaaccatatttaataaataatgctcattataaaagtaatatcttcatatctcatcaacaaataatgtagaagtgagccttctttttgtgacaattagaaaatgtgaaagttgcacgaaaatatacataattatgtggtcagaaaaaagagactaatttttatatttttttttttgaaatatgatcattttttttctttttaaattgaatgattttttcttggttaatatggattgatgatgtaaatgcttctttaattttatgtgaga

SEQ ID NO: 91098 - DNA, 585 bp, Cannabis sativa
aaggacccaagagggtagccaaaatgccacttattcgagtcttctacatatacaccaaatggaatcaccccataataataataataataataataataacgcagtagcgggtgatcatgatattatcaacaatgatgatgatgatgaatatcatgacattgtaaatagtagcattcttgactctggaaattgtaatattcttcatgtgaggcctcttcttaacattatggatatcatctttaataatggcgtaactgatgatctttctcctcaaatatttatcatggtaagcaccaatatatacttgatttatattaaataaatgatttatttcaatgaagtcttaatttttattcaaaaaaataaataaataaacagggtaacaatatggctgcaaccgaattgcctgatcattatcaaagcatgcacaaagaacttccaagaaggatgattagagcaatctgtgaggtaattaattaacataatattataaaacttctttaaccctatatatatggtataaaccaaaacgatggcttgtattataataattagtataactgcagatactgaacaagtgctggg

SEQ ID NO: 91099 - DNA, 1139 bp, Cannabis sativa
taaatattacttgtttttttaaaaaaataagagagatgcaatactaaattaccatatatggaacatgattatcgaattgaagtgcaaatattatgtgaaaattgttaatgagaacgcattttttttaaacaagcaacatttagtttctgatgttaagaatattaagttttaaaataaaataagaataaatgtcatgcatcagaacccttcacgtgtccatatttatgagttaacggaagtactggtagtaacggtgtaagagaattgtaacattaggtatttttgccacaaaaaataaatattaggtatttaagtgtataaaatcggaaacattaggtatttatgccgcaatttaccctaaaaaaaattatgaaagaggcacgtgtcaattattattgcctctttcgttttgtattttccaacatattgtttattttttgtgtgcatttagttattggaatgtattttaccacgatttagatttattaacaagtatgttgattaatatcttaaatatgaattctctgaaacattaaaattaaacacataaaagtttaaaaaaccttacattaatggtagtagaataatattactctttccgcttagatctctaactcttattcctttttgtcgcagagtaacaacaagatctgagcctagatctcattttctccttcgggttggttatcaccttctttcgtactataattgagtacttgacttactatgtgtgggcatggtactctatcactatgactcgaattggtgaagaataatgaataaggtgcgaaatcacttagaaaggagtctctcatctaatagttgtctgacagagttaaaaaaactagatttgatatgttgaaagtgttggatgggaatgagagcatcatgttccttttatagtatttcaattagggtataggatttaattatatggattaaaaaagaataaaaaaataggcaaaaatcacactacgtgaccgaccacaatgtgggcctcactagttacaattttgccactttatttttaccatttatcattttaataatacaataatttttttttaatttcaatcttataaatgtcaaaaatatttatttaataattataattaattatgaaataaaattgctattta

SEQ ID NO: 91100 - DNA, 723 bp, Cannabis sativa
ctgaaaaagtttcaacctccaaccaacggcgtatgtattatcaatttctatacctacagtttttatcaaaaaactgcacctaaatgtcaattttgaactaagcgggtattatcacgccctttagcttccctttttataaattgggttgaaaaaataacctttagtagtagtgtaatttgttggtgtaacttataaagtaattaaaattaattttgtagcttaaattatgatggaagagagtagtggttcaattgatgtaaagaagaataatgattcttctgaggtgaagaagagaaaatatcgatgtggcactgaatgtgtagtaagaaaaaataaagataacggcgaattgttttatggttgtctgttgtggaaagtaattttttgttgaattttgaaaattcaagcacatatattatatgataaactttattgattatttgctatatgcaaaataaaattgaccaaggctacggattcaaggacttgttgaagatgaaaggtcgactacttttaaattatttgataccaaagaaatagatcggttgttgatggcgatattcaatgtgcagttgttgttggagatgaacattgcttttgataaaatagctgatttgttgtcgaagataaacattatatatatgctaaactattacaatggataattatttattttgctatttatttattactaaaatgtttgtatatgtgaatattaaataa

SEQ ID NO: 91101 - DNA, 664 bp, Cannabis sativa
gcctcaaccgtgatcagagatctaaattccttctctgcttggcgattattatagattctctttggtgcaaacggaatgctatttagcacaatgatacggatcaggagattaactcaaaagccttgatggatcttgttcttaaaaggttttgggagtttagtcaggccaaggaggaagctgatactgccgaggctgtaatggttgagtcatctcctctcccgaagcctatcccgatggaaaactgtgtcatatttgttgatggttctttcaaagataatagaatcggtgctggttttttggcttggaaccgtgagacctcggactggttttatggagccaaggcctcggctgggactaacgaagtggttgctgaagtttatgcttggttttgtgcgctccagtgggcaaagcagaatggctgggataattttgctctggtttccgattccactgtggtgatcaaggccttctcttcagggatttccccaaattggaaatgtgtttcttggtttgctgccgcccttaagcttttaaacagtttttctgatgtttctacttttcattttaaccgcacttacttagcttttgtggactccttagctaaaagtgctcgttgttctgagtgcgacactccttgttgtaaaggggagggatttccccctgt

SEQ ID NO: 91102 - DNA, 933 bp, Cannabis sativa
gcctttgatttctccaacgacgattcattccccgggtacgccgacgacgacgcctccttcagattggtcgacggcaagcctcccccgcgccccaaattcggacccaagtggaggtaccagcagcaacgccaactccctcagcgacgcgacgaggaggtcgaggcacggaagcgagaggccgagaaggagcgcgcccgccgcgaccgtcattacaacaataacaggtccaatgtcaaccagttcaggcgtgaggcggccgtgttcaaatcatctgtggatattcagccggagtggaatatgctcgagcagattcccttctcaactttctccaagctctccttcactgttcccgagccggaggaccttcttctctgtggaggcctagagttctatgaccggtcgttcgatcggactgctccgaagaatgagcgccgtcttgagcggttcaagaataggaatttcttcaaagtcacaaccactgatgacccaattatccgaaggcttgctaacgaggataaagccaccgtctttgcgactgacactattctgtcctctcttatgtgcgcgcccaggtcggtttattcctgggatattgtgatccagcgagttgggaacaagttattctttgataaaagggatgggtcgcagcttgatttgctttctgttcacgagacctctcaggagcctttgcccgaggccaaggatgatatcaattctgcctactctttgagtgttgaggctgcttatatcaaccagaatttctcgcagcaagtcttggttagggacggcaataaggtcacctttgatgagcctaatccttttgctaatgaaggggaggaggtagcttcggtggcttacagatacagaagatggaagcttgatgagaacatgcatcttattgctagatgtgaggttcagagtgttgttgaggtc

SEQ ID NO: 91103 - DNA, 596 bp, Cannabis sativa
cttaaactaattacgagttaattaagaaaatatgggtaaatgaataaataaaatatattttattaattacagagattttatcggactatgggggtatcatagataccatttccaaaataaaatatttttgggtgttgcggctgtggaaactcgatggagtggtcaaggatgtcatgacaatataagatggattatttgaaattggaattatacttgattagtttagaattttaagttttggaatcgacggattagttagttatgactaaaatgcacataggaatttattttaggccaaagtgtttataagggtaaaatagtctttttgggtgaaagaaatagttttgtcttattttttttattggcaagataagttgaaattaattaacatttatttaattatttaagaataaagttagtaaaaatagttatcagaagatagggtagtagtcatcacctctatttctccttttcttcttacctgacccgtaagaggagctgcaaccagggaattttctagtttgattctacaagtttgtgctacattgacaagggatagaagtgggttaaacattaaggtaagttcttgatacttt

SEQ ID NO: 91104 - DNA, 629 bp, Cannabis sativa
tttgtatgtgccccttccttgttggtttaagaaggacattggtgatgcctcgttggtgaccttcgtgtcccaggttaagtcccaggatttctctcatttctacgagggatttcctgttccctggtttctagtcaccttctattcccatatttgtgagaaggctctggctaatcatttggttgttcatttttaaggggaccctcagtttccccaggttattcttcctgagcgttctaagggttctcctgagctgtcttctgcctcttggttcgtgagtcgtgaggtttgccttgtggtcttctcactccaggattagattgattttgtgtattattctcatgtgctgccctggccacggctgcctcacgttccaactcagcattccgtcgatttgcctcctccagggagcgtctgagttggtggttttccaactcgatgagtggtacttaccttgtaggatcctaggcaccatcctcaccagtctgcctaggttgggcacaaccaacgttaatttcaggttcttcataccctgttcctggattctgggtcctccttgaacgtgtggtccgtgtactttggccacccttaggttgggtcgtcctggaacgagtggtccgtgtagatcgtga

SEQ ID NO: 91105 - DNA, 884 bp, Cannabis sativa
attcattggggcaaatcccttctcaaattgggcctttgcaaaagaattggcaacggggctaacaccagtatctttgatccttggattcccaaccatcgagtatttccttctcaaatcccatcttctttgactcatgtatccaccctccttctccccaacggggattggaatatcccccttcttcgagctcacttccagcaggacaccattaatgacattttgtccctccctccccctgatcccacccaaccagacacctacttctggcagcactccacttcaggacactattcggttaggaaaggctaccatgttgctaaacaagccattaacttggctcaaccttcttcctcaaacacggaaaccctcacccgttggtggaaatccctctggagtctcccaatcccccccaaaattagacattttgtttataggttagctcaaaactccatccccactgctgaccatctttatcataggcattgtattagttcccctatttgtcctagatgttctctctgttttgagtcggtgcagcatgctttgtttgagtgcaaggaaatgaagaaggcttggtcatatacgatttttaaatctgtttttaaagaaaccaaacacatgaacattttcgatattcttttattaatacagctcaatttttccaaagatgagtttaacctatttctttgtatgctttggaagtgttggaatgcaagaaatgcaactgttttcaggaaccaagattcaagaccggaggccattgagcaagaagctcatgattacttggaattttatcaagctgcccaagacaagcgtgggaaacagacccagctgacctcagacagaatcctccaggagtgggagcctccaccagtgggatctct

SEQ ID NO: 91106 - DNA, 1018 bp, Cannabis sativa
tttgtttcagggccggccctgcctgagacccatctaatgtaccacgaaatacattccgtgaaagtacatacaaaatcatatccctatatataatatatgtatatagggtactaacccaatgaatgtacaaaaatttgttaaaacataagacaaataaatatgttcaaatatatattcggtatatctactcctaacttatattattatcaaaatataaaataatttctaaaatagtgtgacatatatatatataataataataataagtgatagagatatgtatgtcaaatttattctctttaattatacgatgctcttgtcacaatctcctcatataagaatcttaagcaatccacaatattcccattccgacctggtcataccattatcatatgtaatataataattaattttttatagaataatattaattttttagagtatattaataaatgcaatacatgagagtaagttgtgtttacacagtgacagaaacgtatgcataaacctaaattaaaaatgtatgaaaataatatatatttcatatgaaaattaaattgcagtatagtataatagttaatttataatttcattttcaatatgttattatataatttaggaaaacaaaatattaaaaataaagtagaatttttattaatttttttgtttctcctaaattattggatgatttttttattatttattttaaactttgacttcttgaagtgaagggaataattttgaatagctcataatttagaattaatcattataataggacttttgaattgtattaatttttcatatcttcaacaacaacataagatggtttaaaaatatatatatatcattacaaatgttctttttttttctctaatgatttgtatagaatagaagtacccaatttataaatataataatagaatcaaacaaacaattaaaagcacacatcaaatatgggacaaacttgttgtgtgcaaataaaataaataaagagtaataaaaaaaatccatttgt

SEQ ID NO: 91107 - DNA, 576 bp, Cannabis sativa
gagctcaaagtggatgctaatcctctggtacgtattttaaagtctttacacttttactttaatatttgtattccgtctattggtagtgcgggaggaattattctggcttggaagtcggggtttagttttgagtgtatctcttcttcgagaaatcatatctcgggtctagtgtattcggaccccccctctaccccttggctcctttcgtgtgtgtatggtcctccttacttgaatgccaagaagaaattctggactgagtttctgaaattaggagatagatttggtgggccctggctaatcttaggagataccaattttgtccttagtgcttcagaaagagaaggctcttcaggccgggacccatttattccgatcatttcctctctgatcgcgggtagaggtcttatcaacctgcccatccaaggggactatctgacttgggataaccataggtcgggaaggcaccatgtgaagtctgctctggataaaggtctggcgaatggggcttggatcaagctgtttccgaaggctactctattcacttcccaaacgagtaattcggatcatagacccctt

SEQ ID NO: 91108 - DNA, 611 bp, Cannabis sativa
gaattatactgcatgttagctaattagtttataagtgtttaacatacataatttagttctaataatacaaaaattgctatttatgcatattattttctttctcaacatttgaattgcattagattagcatactatttcaacaaattgtttcaaaaaaaataatgaaatgtttacatttaaaagggaagattttgcaatagttgttatagttcgggttaaaaaaaataataaataaaataaaataatattaagaggaaaaaatttctatagtttggaaaaaaaaaaaactattttccttttaaaaaagatcaatttctgtccttttcgtcattgttgtccatttatgccgtttttccctttagtgtcatttttgtcgattattgtcgttttactccattggtgtcgtttagtttcgttattcaaaatagtcatttatcaagtcctgttattttttaatttcagtgtcgtttgaggacatttttaagcttgttgtcgtttttatcctatagtttcgtttcatttgtgtcgtttttctttataattttcatatggtaattgttattcaaattttgtaatttttgttttggttaggcaccctctaataataaata

SEQ ID NO: 91109 - DNA, 617 bp, Cannabis sativa
atttgggtgtttatctagttaattcccaagtacgacagtgtttattcatattctctatgaaccatgaatttattcatgtatatactattttaggtctgatctatttgggtgattgaaattatgaaaaacttccataaatttttttgggagtaatacatttgcaacccatttttgttccataaaccttttctttcttcaatttctggtttgtatttttggttaatttgttttgtaattctaggaagtgcaaatcccattttcataatcacaaaataatatttcattcttgttttcttgtatggtgttgtgattggagcattgggtaataatggattcattaatcaagttgaacttgttcactcatacttgaaaagtgaaactgaatcactgctctgttgaaaatattggttagtttaagattcacgcgattgagatttttagaattgcaaatttaaattaacttcttgttttaactatttagtctcctctcacatgtgcttttgatgacaagtttgtaatttaggtcctctgaacaaaatgacattttgacatattgaaaagggttactttctctgctcctttctctctatgcgtaaatttatgtatgcatatatctc

SEQ ID NO: 91110 - DNA, 1178 bp, Cannabis sativa
ctgaactatgtaaaaatatcttctcttaaacacgctttattatcgatattctatattaagctagttgccaaaaatttcagtcaacagtagttaatcttctgtgtaggagtagaatgatttttttttaagattaaatttattttaggacctttgtaattggtttatttccaattgtatgttgtaatttttaaagtatttttgttatctaacttgatatcaattttttatttttgtttgtacagggggatttctattttatagtttaaagcgttagtttttctagttggccttaattgggttcacttttgtgggatccatattcaaacagtgtgttcagactctttatcattggtgatggctattaataaggagaaaaagtatttcaatgagttggatttctatttgctgatattatagttttattgcctaaattttaagaggcaactttgtcacatgtggctcgcaataataactctgcagctcatggattggctcagtattctcttaggctaaacaataagctatcctgatttaaagaggtacctgcaatgattgttgaggtctacactgtgaattcttaatgtgattcttatcaaatatgcaaaatacatatatatgtgtgtgtgttatacttgtctcaattagattataccttccgttaattattttttgtgtggataccatagttgttcacatatatttatgtaaaaaataaaaataaaataacaaatacaatttttacacctaacttcttctcaatcttaaaattcccctaaactattatggttgctgaaacatagtgtttatgttagctttagtcttatgtagataatagaatagtgatgtaacatttttgacactgatgttaaacattattaattttgtcttctagattttgactactataaatcaagtaaaattttattaagaaaataattacaaacacatattttaccgggtggggattgggctttggattaggctgaggtttgggcttcgatcatgcgaggtttggggctaggaatgggattggatttgagtcgtgtttaggtttgagttcgactcgagtctagggtttggggttaggtcccagtcagagcccctacctggtttgagtttgtgttaggtcaagatttaagctccaggttaggctaaggtttggggattagagttgcact

SEQ ID NO: 91111 - DNA, 1010 bp, Cannabis sativa
agcatattgatctacccagtctccatcttgatgactactcgaagccatagcaaaaactcgaaacaacaacgtcaaggacaaagaaactctcaaaacatgtcaaaagacaaaactgttcaataaactcctactaattattctttggtaaaaggtgtttgtagtaaaagacgtttatctaagctaatattaataataataataataataaaaaaccatttggaaaaacatatctaataactttcctagaaaattactaaaacccttgtaaacaagacttctctacaaaatttaatttaattttaacaactttttttaaaaaaaaaatttaaaaattaaacatacttttccaaagaaaaaaggacattttagtctccacaatatctaccacattactattaggaaaacaaaaccttttcatgaccttagcagccaaagagttagagaagtcatacaatcgtgccgcctacttaaccaacaaagattgattaaataagaacatatcctgaaagcccacactaccattagacttatgccagcaaatacgagaccaagtacaccaatacatcttttatttctccaggtcaatcccaccaaaatctggcacacatacggtgcatctcattaataattacctacagaaatccaaaacaaccacattgcataagtaggaatgacttgaattactgaattcaaaaggacctcccaccaaaggagaaatgtttcgatttccacccatagagcttcttccagatcttatccttaatggactgaaagagtccactcttacttttcccagcagtacaaggcccaaatacttatcatggcacgacacaagaggaacacccaaatcataacccaacgtaatacacaagtccccatgcatacgaggagagaagcaaatcgtcgatttattaaggttaactgactgacctgatgcctcttcataacccgatgcccaataatttattaaggttaactaactcacatgatgcctcttcatacaactctct

SEQ ID NO: 91112 - DNA, 1018 bp, Cannabis sativa
agaaggtctatcctggtgtgtttcatctcagttgaagccggacttgattttcacagactgtctaaaccttgtctccaaagctactgggacatggcaggatcaatcggctctttcaagcctcgtttcgttgatcaggctttccatctccaacttccctggtgtctccttgcaacatttgcctcgacaactcaatgtccaagcacactctcttgtcaaggatgctatcaggctgcgagtggatggctaagaggagctcctcttgttcctctggtggctgctgctttttcatgttatttcttgaagctctttttcaaaaaaaaaaaaaataaagttaatatttcttatcctaaacagagtataattagtttaaattcaaacaatggacattatttatttatttaacaaaacaattgtttttttttctctatatttttattttttggtctggagaaaataactatttttttttaaggagaaaacaattatgggctttttaaatatcattcaaatataaatattaggtttaaatagtgttccacatatatatatattcacataatttgttattaaattacttttataagtatatatacatgagtgactcaagtttcatgagtgttttattagccattctacaacaccatttattcatataagatacacaatgtcaaacattgatctccattaagtcacttatgttgcataatatattgtattccaatttttgttcacttgacatggcaccttcacgtagtagaaagcaaaaaatacataggagacaggttaacactaactggccaggttagtgttgtacaaccttccatcttttaagattctatggttgcacggtagacactaacaagaatagcatggagacttattctgaagcaagttcatcctgatatcagaaccatcaggcaaagacagagatatacaagcacttgcaagatcctaataagacctttagctggttgtccaaggaagacagccccatgcacttgttgggttttatgcccta

SEQ ID NO: 91113 - DNA, 871 bp, Cannabis sativa
aagaacgtgaggtatcctcacgtcgacccactggtgattaccatctagctcaccaacaaaaggataaaaagggtgctggtggacaatgaaagttcagtcaatatttttttaaaaggatacactgaagaaaatgggtctggaaaaagcaaagttaagaccttgtatggtaaatctatgtggatttacaggccaaaatgtcgccaatcaaggaataatcgagctcccattaactgtgggtgaaacacttttatccactactataatgcaagactttctaattgtcgacctgccatcagcctacaatatactgctgggtcgaccagcgttaattggactaggggcaattactttaattaagcacatatccctaaagtttcaaacaccgacaggtgtaggagtggtgcgaggtgaccaactactggctcatgaatgctaccgcatagagatgcaaaatagaaaagctggtcatcagctaatggcagtcatgactgaagaaggcgagagacgggatgaggatcttgatcctcggattcaagatgaacggaattaattgaaaccaattgaggaattagaagaagttatttaaattcaaaaaatcccacaaagtgtgtattcattgggaaaaacttggatgaaaaacaaaaatagcaactaataagttttttgatggcaaaccaagatcaattcgcttggagccactcagatatgataaagattgacactaaaattatatgtcaccacttgaatgtcgactcaaattacccagccaagtgataaaagagacgacccttagattctgagagacaaggggcactcaagcaggaagtggataagttgttagttagcaaatttatacgcgaggcgttttatc

SEQ ID NO: 91114 - DNA, 524 bp, Cannabis sativa
aatagataggctattgagttagaatatccgagggatcaacaaattgaataaacaattagaggttaaacacttaatcttaaaaattaaaataggtttggttggtcttctcgagacgagagtaaagactcctaaagtgggggtcttgtacttgaacttgtttcaaggatagtattttacgtcaaataatgtctggcatctgggagggaggatagtagtaagttggaatcagttaatgtttaatgttgacattaagttttgttcaagtaagttaattcacttaaaggttaaggttggaaatcaaaaaatttcatgttcagtggtctatggaatgaatgaagaagactttatgaataaacttcccaaacttcgggtctttggccaagtgaagagaaatctattgtttattatacaagtatgagtgctactgaagttcaaagaatgctagatgatccatcatcaattattactctagccaccatcatattggctatatgcacctcaacaatgagggggtgattttgagg

SEQ ID NO: 91115 - DNA, 688 bp, Cannabis sativa
cgatttgaatatgtgtatccaatatatcttgcttcattaaacaataaaacttctagtactactgaaggtactagtaattttattgaaccagaattcagtgacagaagctttccaatactattctttttacaagagtgagagttgtaataagtaaaaggcttggtatgagtctcatcgatcacgtccttgtgcacatacatcatttggtgcacatccctatgacgaagaggaagaataatcatacaactcttactatcaaaatagtcatgttaattatagttggaagcctgagtacgactataatccattatataagtggaattgagggaagaaaagatatatcattacgaatagactacatggtagttagaattttttagatttcattctcatattaacttaacccaaattttaatattaacttaactttttcctcattctcataatatactttccaatctctattatatttttatctctctatataattatttttagtacttttttttttcccaaaaagatacacataacacacatattttttttattattttaaatccttattgtatatggtttagatcacgtggtaaatacattttattcgatattttctttggtgatctcaagctccttgaagactatgacaacatcgaacatacttttggtaagagttttttttttttttttt

SEQ ID NO: 91116 - DNA, 1265 bp, Cannabis sativa
ccattaatcaataacttacaggagtatcctagaaataaaagagcccagcattttgaatgcaaaagaccacacccaatgactatattcgatcgagagaaatatggtttttgagaagtagttttgtatttcccggatcggttttatctttccattttttttgaaagtgtcttttccaaatcttaaccaaccgtacttatatatctcttcgtttcttttaaacaaatgtattttttttaacaagaacagtatgtattctaatttaaattatataataattttttttttggagtatattcatactaattaataaaaataaataattttttttaacattattattattttatttaataaggaaaaaattcataacaacaataaacaatcaacaaccctatttgcatgatgtacaacaaaaaataaagaaaccaaatgaaggaagagtcattaacaaactcttacaaaactcaactacccccaaaaaataggaacgcagtggctcaccaccaacagacaagcgttgatatggagagcttgaaccagcaacaagcaccatcgatcttcttgcatggctgctgtttgatccaacgtctcatgcttctttaacactattagttgaattacgccttgtctacatgctgaacggcgtgaaagccaaactaaatcttccagtatcagcaaaaatcgcaccatgcatgttcaccttcagagcttcatcaaccggtttttatatcatgagttatataggggttggtatgaatttttcaatattaatttttatgaagttttcaatcatgtatacttactaaaagaaaattttgtatcaattttttttatcattaccatagtaatacatatttaatttaaattaacaattaatacaaaatatctaaaattagctcatttattaattttttatcataaaaaagtcatttaaaaatgttgtaaatcaacaacacttcaattcaacatgaacaacactaattagaatcaataaacaacataagaacatgatactaaatgcagaaaattaaggacataatttttatccaggttcggccaaaatcaatgcctacttcctgctatcctctttggtattcatcttattcatatcaagatcaaagttacaatcataacatatatgatacacagcctcaaagtttcacaggagaaaaccccggttctctcacttagacactccaagaaactcgacttggatagtgcctcactctagaattttcactctgtttcttcactctccaaacagc

SEQ ID NO: 91117 - DNA, 631 bp, Cannabis sativa
tcctccatgggtgtgtttacagagcgagagaaaataattttaacttaataaatgtgtaattaataaaaaatttctctttatatttcattcgcaatattttataaaaattgttatgttaaattatataaaattcaatcaaagttgatatgcaaagatgggaaatggtattatatgcaacgacattgaaaattaaagttcatatggggagagacgacttagtctaaatcttatctttttcaatttttcaattttttctttttcttcaaggcaagcttcatattcacaaaaaataaattaaaaaaagaaatagaaaaattgtggaaatgacttggaaagtggaactagtttattacggattaagttacaaagagatccaatccaagcaagttagatagattatattgtataaattacatactttatttattaaggctctttggatttgatgtgctcatgtacactaaaaagtgtttggttaactagtttttaaatacttaattaatatatgattatatatgtggttaagaatctacacatacatgaggggacatttgccccttcaaattaattttgttattttattttttttagttatttagagtgataatactcaattttttaggtaaatttt

SEQ ID NO: 91118 - DNA, 757 bp, Cannabis sativa
cacttaaattgcctccatcatattcaaaaaaaatacgatttgaaattctttgtagtgcgctcccaatttaaattttttataaaccgtgcagtatagctgtataatgagtatttttcctccttctgagaaactccattctcaatcttcttattcattttattcttaaactctataaagtctttgttacaagtttccatcaacttattgaagaaaatcttttcctatagatactcgtagaagaattcaaggtttcaaccattattactacaaaaagaagaatgatagttttctcctccttaccagtaagtatgcccataacaaataaggtattccctacacatcatcagcttctgtgcaactctcgaaaactttgcgcagttggctaaagttgatagatggatcaccgttgaagtactcgacaatcagtcggttcgaacttcctttttcttcaatttcttgttccgtaggcctaggtgacaagttcaacctatcaccaacgcaaacttgacccgaatgaatttgtatctcttcttcgtgaaataaaagtgtacctcatctgacttctcagatttgatcttatacatgaataactgatgaattaatgcccccaaaaagtttaatggttttctctcgaagaattgtttgaatgaggattccttcaccttattccataattggaattcctcagattttaccttaattctcggatagtaataacttccgccacgccaactgacacgacttgagactggaatta

SEQ ID NO: 91119 - DNA, 734 bp, Cannabis sativa
gggtaatacacattaagagtgcacacatatatatatatatatatatatatatattatgatataatactttgatggattaaataaatattacaagtgtgtcatatattttaatttagtggggtttttctttacattatttaataatataatatgtagattaaaatgtgacaatatatattagggatttaatcaaaaatatatataaaatataaaataattacaaaaataacttacaaatttcaattacaataatgtcttgtcacgtcattaaaaaataccttaattctaacataatatgcctggaatgaaactaatcctcacattcttttctttttaatttttttgcatttcaaaagtaacattttaattacttatgaagttgataataaaccaaaaagtaactttttcatcatatcacttttataatatataatttgatatatattttgtttacctttaaaacttatatgcatgcactttaataattaattaatatttagattatattaatatatttgagtaacttttaaatttatttttaaaaataataaatggtcatccagtaacctactattttagtaaattgtattttaaaaaaatatatatatcataaatgtttaagtcactcatatttttttaagcaaatggattttgaccttttggctgaaaactcaccattttccgcttacagtcaatactagccaaatacttggataggaaatccatcccaagta

SEQ ID NO: 91120 - DNA, 647 bp, Cannabis sativa
aaagaattatggaagggggtagattagtcttttggtaaattcaaattgtgcctttgacttttttaggctgcctattattaaaaaaatgaaaaggaaatgaaataaaaaccctatttaagggaatagcttccaaggcaagcaactaagcttcttcttcttctccccttcatgtgaatcaaaaccaaccagcaagaggatcaaaatttcaccatttctcttgaattgaaacaacttgtagaacctaagtccaacctagaagcaatcaaggtaagttctcaaccatttttggattaaaaattctagttttgagttagttttgaagtagggttttacttctttgttgctgtgggacttaaactaggtttggggtgtgtttggggtaggtttctgagcatgttgggaatggttttaagtggtctccatggctggttgaattggatatggtttgttgagaccaaaattgagtttttcttcattttgaagtgtgattttgagcaaattgatatattgcaatgaattgtttattgagttatgtcatgtttttagtattatactattttggaaggtttgagcaagtttggtggaggtttgattggtttttggggtgaaaaaccagaaatcaccatggctgccaggaaaaaacggca

SEQ ID NO: 91121 - DNA, 554 bp, Cannabis sativa
  modified_base (54)..(74): a, c, t, g, unknown or other
atgtaacaagaaaaaaaatttaatgatttttatatcaattttttttatgcattnnnnnnnnnnnnnnnnnnnnntcctattcctattcctattcccattcccattcccattcccaattctatattttaattcatcccaaccaaaagcctcttaattctttttaaagagttaaacaatataaataaaagagtaaatataaaaaagaaaatagagtaaatattaccatatctttatttactttgattataattattattattattttcaattaaatacagatacatctctgaaatagaaatgagacaaaagcaagctgaaatagtacactccacaaaacatgaaaagaaggaaaatagcacacttgaacaatattttatttgaaacacaccaacgtactaattaatatcttttcacacaaataagtaacaatcaaatatcacctttcaagatttgttgctaaatttatgatcacttcgcaagtatacgcaatcaagtagtacactcacacaggtgaggtcgaaccacagggaattggactaattactactaaatta

SEQ ID NO: 91122 - DNA, 869 bp, Cannabis sativa
cagccaatggcttttcagtatcaacatattctaactgcaatgttgggttgtcaacaagttccctaataaaatgatgtcttatatcaatgtgttttattcgagaatattgaacatgatttttggaaatatttatggcgctagtattaccataaaaaaattattaaaatacccaattccaacccgtaatcaatcaacattttttttaactataacaattgaggacaacaactagtagtagctatgtactcagccttagcaatagacaaggaaatagaatttagtttcttactattatgccaagaaaccaaattatttccaagaaagaaacaacctccactagtacttttacaatcatctggaatatctgcccaatctgcatcactaaagcaagccaagctagaattagtgtcttttgaataccatattccaaaatcaagagtactattaacatatctaataatccttttaatagtagaaatatgagattccataggattactttgataatgagcacaaactcccacactataactaatatcaggacaactagcagttaaataaaataaactaccaatcattctatgataaagagtagtgtctacgtacctttactccaagttcatcttttgtcaatttccaagtgatgctcattggagtacttacctgtttagccgattcaaggccaaactttttgacaagattcttagcatacttactttgagacacgaatgttcctccttccatctgtctgaattaaagccacaaaaagaatgtaagttcaccaaccatactcatcttaaattcattttcatttaattaacaacctgtacttcatagttagatgaagaaccagaaactatatcatcaac

SEQ ID NO: 91123 - DNA, 527 bp, Cannabis sativa
ttgtaacaaaatccaataaaagaaatggaaacttcttcggaaaaatggaataaattcagagtagttatttatttttggtttcaagatattcaaaatatatctagtttagttagcatttacaaaaaaaaaaaaatgttatatattggtacaaagtctcggtcttttgcacctccaaatatgttcaatctttattgaacatttagttaaaaagagagaaaaatgaacaaatgcttgttaatgattatattttttactcatttgctcattggtaatgatattagttctacaccaaaggtgaacagtttttacttccaatatgaagaactagagaagagacaaaacaaaatctatcccaaacccataaaatccaaaattaattcttgactgacttaaactaatgataagaaattcacaaacaagaaaccaatctcagcattcaatttcctatttaatgtcatatataagcattgcttcggtgcaacagatagatatatagacgccccaaatggaaactacaaagcatgaag

SEQ ID NO: 91124 - DNA, 517 bp, Cannabis sativa
acttactagttattaaaaaatgtaacaagttactagttactaaattctatagataatttttttaaaaaataacatatacatacataatcaattatatatcccactaacataattttaaaactttatttctaaactaattaaatccctactacctcattctcattcacaacaaatatatatacaatacaaatacacaaaatacacaaatagtatgtacacaatatatatacacacaatatatgtaaacacatattcaaaaataaaacacaaaatatgtacatatatattatatatcaagttaataaatatttaccttataaatgcaatccggcgacaaattacaataaaaatctagctcctatagcacacacacaacataatattaataaaatagaaaaatccaaaaaaaaataaattacaaaaacaaaaatatagcaatgtacattaataaaatgaatagaaattatatttatactttaatagacgttgagattcaatgttttctctgctaaaatcg

SEQ ID NO: 91125 - DNA, 855 bp, Cannabis sativa
  modified_base (27)..(40): a, c, t, g, unknown or other
  modified_base (543)..(550): a, c, t, g, unknown or other
  modified_base (609)..(615): a, c, t, g, unknown or other
tttcaatgttgaggaaatatgtttcannnnnnnnnnnnnnttgagttatgaagcccttgaactgaagtcagacttatcctatgaagagcaacctgctcaaattttggatagaaaggagaaagttcttcgcaataagaccattgctttagtgaaagttctctggagaaatagcaaggtggaggaagccacctagtagttggagtctgacatgaggactcaacatccagagctattcaagttagatttcgaggacgaaatccttttaacgagggaataattgtaatgactggtttagtaatttggattagtaaaggcaattaacactaatttctaatatttttataattaattatgaatttaattatttataggccccattgttagaaatgggcattagagtattaatttctcaattcaggagattttattaaactctaggggtgttttttttggattatataagaaatatgtgatttttgtaatttttactcggcgacaacaaaaaatgtcatggatgtctagtttgatcacatgggtaagttnnnnnnnntatttcttagtgggaaatattttggagaaaatataataccgggattaagcggggttatnnnnnnngaccattttacccctagttttggaaaatgcctaagttataacttggagggcatttaagtcatttcttttagtgatggtttggtggctgcctagggtgatgacatgtggcttcttattgtttcagcaaatgaattaatttcctaagctttattctattagggaaaaataaggaaattagagattaaccaaaaaaattgaagaaaagctctctcttcatttctctctctcttcgaaccagct

SEQ ID NO: 91126 - DNA, 561 bp, Cannabis sativa
ccttttttgcccttgtggctatatgattaaatttactctgcctctcgttcttgagcagagatattcaattcatcactattcttaaatttcacttggtatcagagcataaatccttggcgtgtgccatggcagatcctacctctgctcctcaacaagtcgaaggctcagggacacctacgtcagaggcatcccaccagtcaagatcgccaactcaagcagctgcttcggttcagactgctgcgatgagcccactaccagtgactactccgttcagtagcacactcagtcaaccattcactatgaagctcgacagacacaacttccctctatggaagaccatggtatttaccatcattcggggtcatcgtctagaaggattcatcaatggccaaagaactcgcccagaagagttcataatctcaggtatccccgaaacccccgaatataatgtgacgactaaccctgactttgagaactggcttgttcatgaccagttactaatgggatggctatacgggtcgatgacggaaggaatcgcatcggaagtcatgggttgtcaat

SEQ ID NO: 91127 - DNA, 777 bp, Cannabis sativa
agtaaccaaacgccacctaaattataaaagtgacgtcttatagttagcaatattttataaaaaattaatacattaaattatatagaacttaatactttagtatactaatagtgatataaaacattagagggtgttaagaaccgttttgtaacatttatctaaattatactatgttcggtgtcaggtcggctcaacaatgggacagcatgagcccatggccctcacctaagtccaaaaaatcctttaataaaaaggctcaagatgtattttcaaaaatactatatttttatttttgtattcttaacttatttttaaagatgctacattggatattttattaagaaaaaaggtttattatatttttaaaatactatattttatatttttatcactatatacaaaatatcatatttcttataaaaaaattccaatttgattttttagccaaaactcctaattagctttagacagacatgtttgttgcacaattgtataatactacattgtattgatattttttaaattttttttaaagaaaatatacattttattatatcatatataatactaaccttaaccccaccccttgacctcgactcttgatctttacccttcgaactctggcccttgacctcgactcttgatcattacccttcagactctggcccttgccctcgactcttgatctttacccttcagactttggccttgacccgaaacccaatatttggcccctagaccccaaactctggacctgaccttggcctcaacctcgac

SEQ ID NO: 91128 - DNA, 502 bp, Cannabis sativa
atataaaatattcatttatcaaaaaatcaattatttgttttatttccttaaatagaaatttatttcctaaaataaaaaatattcttatacttagtactttctcgatgtgtcgcgttgcgattgattagcgatactcttacaatgtattatattacgcaaaatacttaaaattatatatttttttaatatttttatacactattgttttataggaggaaaacagcattattctcatgttgctggagtattatactatatttttataacgtaaaaataacatctttttttttaaaaaaaaaatataacaatttgttgaaaagtaacataaaaataataaatttgtaagaatgttaattttttgttatttttgagtatttataaaataatctcactatatataaatttaaaacatattctttcttactcattataagtagggtaaatataatttcaagtaaaacaagaataaattaattatatatatatttatatattagaaaat

SEQ ID NO: 91129 - DNA, 1941 bp, Cannabis sativa
  modified_base (1880)..(1885): a, c, t, g, unknown or other
tataagtataaataagtgatttttcttcaaaacaaatcttagtttgtttaaattatttattagatttttaaaaattttggtttgattttttaagatgtgtgtttataaataaaataaagtttgaaggtatttttttaaggaataatttaagttttttttaagtaatcttaatattttttatgtaatttaatatttttatctgattttttaataacttttatgaattttttgaaattaatagaacattataaaatttaaaattatttttttaaaaaaatggggcgaaattttatattggtcaaagtgtaggaggtcaaaatgctaatttttagcagtaaaagaaaccaaacctaacaaaatgaatataataatgtagctgttatattttaggagaaatttttaacaaatcgtatattttaggaggtatgatcaagtagtgttgaaacttcaaagtaaaaatactaattattttataaaaaaaataagtggcaaaaaaagaaaaagaaaacttataaaaatattagaatttgagttaatttttacaaaaatatcgtcccatgaattttttttttttaaaagataatgtctttttataaaataatagtgaaacacaaaataaatagaataactaaaaataattgtggaataagtaaaaaataatagtggggcaaaaaaagaaagttaacatagtacacagtataaaaaataaataatatttttttaaaaaaaataaaaattaaaaaatttgagtacctggtgtaaaaactctaaaaagaaaaattaaaaaaagagagatgcatttaaattcgtacaagataaatagtgaaggcttagtaattgatgttgggctttggtcaattctcagccttaggacttcagatttgggccgacacgttgaaacaagagatgagtaattattgggcttttgtgagttgctttgatgtccaaacagagattcatttctagctgagtgactctctacaaaattataattatttctcacatctcaatatttcagtcataagacagaatatttgaaaaacaaaataaagaaaaagattttttttttctttttttttttcagaatggtgcatttttcaatattgctttccgttttcctagtaacacattaggagaaacatgttttaaatgtaggattcaacgtataaccaattgaaattaaatgtggagtaaaattttgttaatgcagaaaaaaaaaagtttatgatgtacttaatctggatctagaagatattttaaattttggtggcgtttggttgcaggcaatgaaatataatgtaatggaaagaaaataattattattttattcttttgtttggttaaattttaaaatattggaatatcattataataaaatattttttatattattttagtagaataacttttttatattgaaatggaacaaataaccattataatacaaaaaatttaataatatttttatcaattttttttaaacattttaaatttaatttaattccatttctatttccaaaagcaaacccacgtagaagcgaggaggatcgcccctaaaaaaaattgaggaaaaatatatatgcattttaattaattatgatatatttataataaaggataatatttataaaaataatattagagggagttacaagtgtgacttcataaaatgttggttttaattgaaacacacaatcccacaaaagatgagtgaaatgaacaaattcaactgggctttgatgctgatagagcaaagagtaaattgggctaagactcatagtcaaaactaatgggtcaatttctaaatgggttagaattttctctaacctttgtaaaagattaacaggggtgtataaatttttgggaaatttacatggtannnnnncttttgttatttttttacaaaaaatactgtcaggcggaattttttacttttttact

SEQ ID NO: 91130 - DNA, 635 bp, Cannabis sativa
ctatagtgtatccttatccgttaattttttttttttttttgttaataatcggaaaaccctcagccaaaataaaacccaaaagttttgtgcttttcattgaagattcatctattgtattgatgcaaacttgattcattcatcaggtttgttttttatttttacaattcaaaataatttttttttttacattgttacagaattttatatagaaactcatattacaactaacaaaataatttaaaatacaactaaaattcgtatagcaacccacatagaaactaccagaaaaatcacctaaaaaatccaaactgaaaatttaaaaaacaatatataaggtaattctcctttatttattcagttgttattatatatcataaaaactattatgttattagaaaaatattaataaatcttacattataatatttttatatattaagtataaaattataaattaattttatgtgtatgaatattaaaaatttattataattgattcaaataatattaataaatataaatattttatatattgtaagttttcgattaaccaattaatttattttttggtttgatttttcgaattaattatcaaaatattctgacaattaatgtggcgcagatactgatggagt

SEQ ID NO: 91131 - DNA, 747 bp, Cannabis sativa
  modified_base (709)..(711): a, c, t, g, unknown or other
atggtaacacaaaaaaattgaggaagacaaaggcccgatagtgggcccgatgcatgtgtaaaaaaatagaatttgatatggcccaaagggtccgatggccagatggtgggcccgatggaggccgattgcatgtgtaaaaaaatagaatttgatatggcccgatggtcgacagtgtagtgaaataaagagagaagaaaagagagggggggtaatgtaaacgggggtattttagggatattataaaatgtgtcatatcccacaaatatcaaatattatgagtttaggagaaaaaaatttaagaatatgtaagcataaaaaatcaaattttaccaccacattatataagtggtgtcccacttgttaccgcaagtggtctaaaagcaatgctcatctctaattggccagagcacgtcacccttgaaaaatcgtcacaagttgcttatattcaaaaacgatctctacggttgtaatggacacacgccatttttacggtacctacgtcttaaagaatcgtaaagtgaatatctcataacgttgccgcgcgtggcagttcgtttggtcatccctttgaccgttaaaaccataaaacacctctgaaaggcggcgtcgcgtataggctttgaatcggtgacgagaaatgcattaggtattggactttttttttcataaatgtacaacaaaaacaatataattacaaaaaatgtgcaannnaaaattattttaaaaacttatacattttgaaaactt

SEQ ID NO: 91132 - DNA, 1048 bp, Cannabis sativa
acaaataaaaatatgttattagctatttcttatttatagctatttgtttttataagtgttataattaggataaaaattcaatatctatatatacatataaatgaaggcacaaagcatgtgatgtgacatgctaaaaaagtttcaataaaaattatattttttcttattttttttttttacatttttaataattttttaaagttgtagtgatttcactctttagtgtgttatttaaaaaaaaaaatagaattatttaaaaatcaatgtgatgttgtacttaaagactatatatatttatataaaagaaaacacaaaatattaagtgacattctatatgttttttcttttacttatataaatttttgaggcattcacatttggagaataaataatgtatacaagtttgatataatataaggtgtttgttttgaaaagaatttcacatggtttatgaattattttggatgttatatttgtttgtataagtaaaatatttttttatttatatttatttgtcacaaaattagtatgtggttgagtgaaggttttgtgattaatttaatcttgcctaacatgagaagagacaaaaatttattaattaaaataatatattaatattaatttaacttattagattattaaaaaaaataattatccacatactattaatattataaataataatagcaatggaaagataactaataattactcaatgattttaaattaatacataatatttttatacaacaataaaaaaaataacagatcatgcttcattgattttcaattaataaataatattattaaaatatttgtctctcattcaataaaaaggtttaataatttacactatttaaaggtattgtttacactttaacacaatttttcttttttgcattattataaaaatagaggcataagtacctaaagttttgactttgtaagtgtcataaatctaatgattttttttagtggcataagtactcaatgtttataaaactgtaattttttttattttcgtcagtacaggctccgttttaaattt

SEQ ID NO: 91133 - DNA, 610 bp, Cannabis sativa
atttcattttcaaaaaaaaaatataagtggaccaattcttttctttttcttttttattattattattatttaaaaatgacttcgagtattatcgcttacagagcggacctttaaatatagcaaaatagaataattaaaaaataacagtctaacaattaaaaaataattgtgaaataatagtaaaaacttaacacaatacacagtatttttttaaaaaaattccaccacataataagaaagaaaaaaagtatacaatgaaaaaattcttatatcatattatattatataatttttagactttggggttattctgcaatattacttaaattaatatatatataggttttaattacatggataatgtgaatgcagggtacaccactgattgtcctccaagcatttctctttggatataccatattatttcctagtgttgaggtgtccatataacattaatgtttctcttattaacacttttcaacgcgtaaaattttcaaagaaattcaatcacatcactactacaaaaaggggtattttcgtcgttttataagtgacatataaagattttgcgtcggtctacagaaccgacgtgtaatccgtagacgtaaat

SEQ ID NO: 91134 - DNA, 535 bp, Cannabis sativa
  modified_base (387)..(398): a, c, t, g, unknown or other
atacagtacaaaatataaaaaatatacaatatttttgaaaaaattccgccccagagtataacaaaaaaaaataaaaaaaatcagtatgtggtgtaaaaattcttgggataaaaattcaaaacccatggataccctaaacgggtaatggcgcagggacaatgataattttccatcttcgaatgtcaaacagaacggagatagagataacacgaacgactccatttgatttatatctttatgttgtaatagattttttagttgttgtacaagtttctttatgatttttttatagcattttagttttttttttttaaatatttataaatatttactttattttagaatcatactttaaattattaacaaaatatattattattattattnnnnnnnnnnnnattattattattattatttgtaatctatcattttaacttattaattttttttgtagttttaaaataatagaattccatggtagttatcggcctcgactagaattctcctccctaaaataaaaatatattttaagcaa

SEQ ID NO: 91135 - DNA, 520 bp, Cannabis sativa
agaagatgcttcggatgaggttgagtacgacgaccgatggtgccttattgggaaacttctttctggaaaagtctcagattatcaagtattccaaaacatcattgctgatctgtggaaaccagggaaagggatgtatgttaaaatacttgaacagaatcggttcttattccaattctaccatgaaattgatatcgatagagttatcactggtagtccttggacttatgatcgcaagcaattgcttattgagcgtttaaggcctggcgataatccaagaaccaaaacgattaaccacctcgatctgtgggtccagattcataacttacaacctggattcaaaacagataatgtcgttcgtcaggctgcaaaatacatgggatctttccttgagactgatcccaacaatttcaaaggtgtatggcgagagtacttaagagtccgtgttcggatgaatactgatctatcgttaaaaagacgaatgaagttcaaaagagtaggaggagaaacattctatgccaat

SEQ ID NO: 91136 - DNA, 571 bp, Cannabis sativa
  modified_base (500)..(507): a, c, t, g, unknown or other
gacatatagtgcaaaaataaattgtatacctataagtgtcggttcagaactaataccaatatccaaaagtctcactttaaaattaatacaatgaatatactttatgtcttggtaagataggtatcgattccataaaataaatataagtgtcagcctaaaattggcactaaggctatgtttggtgggagggagggagagtaggatggatggagaggttagagaggatagagagtaagagggatggagaggattgttgggccagtttggcacaactgtgctgtgggaataagcagctgtagctatgctgtgagaaaaaacaactgtagcagaactgtagaaaaaagctaagctgagtgtttggtaaattataatttttaaagtactgtgacttgttaaaactctattataataatgataatattttaatctagttcattataatcacaaatacataaaaaaatataggttatataaaatttatatttttttttatatatttnnnnnnnntttttttctacagtataaatttatatgcatttgataaaaataatttttaaaaaataatttttaa

SEQ ID NO: 91137 - DNA, 882 bp, Cannabis sativa
gatgctgaaagggcttaaaaaccgcctctaaagggggtttttgtagtagtgaacaataataaagacaatgattattatgatctctaactatcatttattttacttttcctaatgcaattactaaatttctttccttcctattcaattgacaagttgaattaagtagtttgtaatctaattaaaatttacaaactcaatcttatgtgaaaactccttatatttttttggtaaaatttaatcacgaagaaaatattaaacaaagcaagtcataaaatcatataaataatttagatactttatcctaaattaatttgtatccataacaatcatagcatatttaaatctcacttttcagaattttgatttgaattcatagatagtaattatagatggccaataaataattgtaaaattaaatcagattgcatgaatttgaaataagcaaagaaggagaaattgaataattacattagtccataaaataaaattaagtggttcacttaatagcccttaaaataaattagtgttatatgaaatattattatttatggatgtccaaattacaaaattaattatcatcattaatgtttggttgtatttttctttattacattaatttagtttctcattcttttagtcatatttttgtataagcaggggttcactccattggaataaacagcagagaaatcctcactcagtttctttttctttcttcaccatcttcttcttttcttcttatatattttatattattttataacacattatcaacacgagtgtctgcccaaactttaagttaaatattttgttgaagttcttgagttgtttcaaggtcacgatacactaaatatatatttatatatgggtatgctcttaatg

SEQ ID NO: 91138 - DNA, 996 bp, Cannabis sativa
  modified_base (869)..(886): a, c, t, g, unknown or other
ctttttcttttcttttctttcttcctcttctatcctgatgcactcctcctcctcctcctccttcttcttcttctagcatcaccaccatcatactctacaaaaccacaactgtccaccaccaccatctcaacattttctttaatccaaacacaatcaaaaaaacctaaacactaaatacctgccacaatctaagatgcaaatttcaccaaacaaacaaacccaaatcaaatccacaataaaaaaatctgaaatccaaacacactgagctctcctccgaacaactgagctttctacaccagtattttcaaacttctaaagatcttcctcacaaagctcctcttgtccttttggagcttgaccacaactggttcgatttggaacgagacctcatttccctacaaaccatactcgcaaagtcttgcatttcctggatttctcactcttttgaagctaaaagtgatgcccgattttctcaaatccttgttctccgacgacttcctttgtcgttttcaccacgccctcctccaacttcacctctaagaaggcgccctcatctgctcttagactggtcgccggttcccggtcaccaaggaaatccctaatatgcttctccatgaagatgaggtttgattagttttaaaccacttttactttacactcactgggtttgaggactgtttatttttccatatacagaatatgactcattatttatatataaatttttggttaaatctgtatcaatttgtggctatgcgataatgaacagagggagagggtgtatctcttgatgtttttacttacagtgttttgattgttgacacattgtcttagcagagaaaaagataggaagaagaagaagaagaagnnnnnnnnnnnnnnnnnnaagaagaagaagaagaaggagggtggaagagagagagggaattagggaattagggttttttttaatttttatttttttaaaattgcttttttttaatttttaaagaaaaa

SEQ ID NO: 91139 - DNA, 567 bp, Cannabis sativa
cattcacaaagatgctaccattgaaattttttatgggtcatataactaatatgtgactaagggagatgtccaatttacttttaggacaagtgggagattattatgatttataccttgaaaaccctgtaaagacatttctatttatacataagagttgaatattttcatatttacttgattgttaaattattaatattttatattgaataatttataattaaatataaatataaaaaattctttattcatacatgagaccgcgacttgtattgtacggaaaattaagatcatatatccatgaataaaacagtcagtaacatattaaagtttatgaatcttcaattaatggttgatagtgggatttgttgatgctcgttattcagtataagtaatcttgattggaattactgatgtagcatgacatctaagtgaatgtgttgtatatagtagagattatatatgacaagtacaaatatgtaattaagctatttttatcaaacatgtcgttgactataaagatctgatttatatcataatgatgaccaatggaagagaagggtatttata

SEQ ID NO: 91140 - DNA, 803 bp, Cannabis sativa
agaaagggaagaaccaagctgatgagagtacgaaggtttctttctagtttctttatagttttgccctaacatttctctaacttttattattacttaccacaatcgagttttccctgtacgagtcgtgtattacaaattttgagccttgttttttttaaataataataataatattgtagtagcacaactattattcaactaatatacaacttaactggaactagaaatacaaaatttgaatgggcatcgttatgaaaatatttgtcagtatttcttttgtcactgatcaacaatcaattatactttaataatattatgtggagaaacaactgttagaactctgtaaattaactttataacaaccaaatgaatatattaataaaactgaccatgttataatcttttcttaaagagctttgtgttagattgtggatatgaaatacctgcaaatatcataaaaaaatattataccgttgacggtttataatcattgatatgtctagttttagagtgttagcaaaatgttaatacaactataatgcaactacgtagaaatttaaaaactagaacaatgtttctatgtacgtggctctagatgaattcaaattttatttgttattcgtgatttgatatgaataaatcaaccattaaaaatctagaaaataatattaatgcaattggagaaacattagctagtgtattaatacatttttcttcagtttatacatgacttagattgattagaactccagatctattttagacatatctacattttatgaatctaaaaattgatattagga

SEQ ID NO: 91141 - DNA, 578 bp, Cannabis sativa
atatgtaatttaaattaataaaattacttggcattaaatgagattgcacacgtggctccttcaagtctttccacaatctttttaatatcctttgaatagtaatcgtcccccttgttcctagtacgttcttattggaactcccatcaattatatctaaattgacataatcatcaaagctgagatttatccgaacgcgtggcaccctcagacttctccataggcggttaaatatagtagggagactcaccaccttcccctgctcacgatggcacaattcagaggcttcgtaaggatcgagacctaggatacaatcttctgattcggccgccgacccatctccacaagtcaaaaatgttttttttgggtgtagagccctaggctgtgctacgtccttcaccatcgcctgatttcccccatatcccgtcttctccggcaccgatagtgacctccctagagaactcgattctgtaggaagatcacccacagcctcgtcatcatctgcaacatctttctcaactccttcaatcgcaacaccatcatcaacctccttctcttgctcgacatctcgagaccagcaa

SEQ ID NO: 91142 - DNA, 693 bp, Cannabis sativa
  modified_base (342)..(351): a, c, t, g, unknown or other
ttaacaaaacagagggtccaatcagtaacttttgcaaaacacagggtcgaaaatggtatttacctattttttaatctcatatctttttacaatatttttttaagtcatgtaaaagtaaatttaattttttttttctggtgtttatgaaaaatccccttataacaattagtttttgggggtgatgcctcatgtgctagacaaaatcatttcttcggtttaattaattttgaggtttttttttttttttaataaaataacttctttcccatttaattaagagtaatttgtggcataaatagttaagtttaactctcagctacaaataaatacctaagtttaatnnnnnnnnnnaataatacctaagttatatttctataactatgtaactacctaaccgttaaatgttaagtcattatccacatgtcattttcttattggtatatttaaactattttttttaaaaaataaaaatttaatgacttaaaccgatcagggattaccacatgacaatttacttaacactacagctaagtacttacaaaaattccagaattataacttaagtattattaccgcaaaaaaattaaatgtaagtatttatttataactgaatgttaaatttaaatatttatgtcgcaaattactctttaattaataataataataataataataaaaagagtaatttgcggc

SEQ ID NO: 91143 - DNA, 2537 bp, Cannabis sativa
tgaagcttcctcattcaaaccaattctggttagtctgctcgatctttttctctctttctttctttctgtttttttttttcttttctttttttttttaaatgttacttatttattttttactataaaagcaaaccacttgccctacagttaggtacatgtatcggcatactaacgtaaatttagaaaaagaagaaaattattactagctaaacgacacataaacatgtgatgtttaattaatacactcacagtaaaagaagaaaattgtatatggaccacacacatacttagaaaaatattttatgattaagatgatttttcctttttaaattgtcaaataaatagcctggctaatacatatgctatatatatatgtatgcatatcattacgggctaacatttagattttttttttatatatatgtttgtgttgttttttattaagcaagaataaaattattttattaacaccaaataaatatataatatatttatatcattcccataattgaaataattgatcaaacttatctagatatagctagctcttgctaggctagctaacttggattaattgttagttgcgtgtggagatactagtattagataataaaaccatgtgacattattaataaaaggcctctcactaagcagtcaaaaagtggcaaatctttttaaaagaaattatatatttatttaaatgataataaattaggggtagcaagacactttggttaatattaggtctttataacaagtacaagtggtgacaaccagagtaggctttatcttgaaatatcttgaaatatatattgtagtggggtacgtatttttgattgaataaaatcatcatgaccaaatcgatcgactaataatatagccaaacaattaacgaaaagaatgaataattattgaccagtaggacagccaattttgttttggttacctcactcatgtgatgaacatcgctcgctattaattaggcttggtactagcgatacatatattttataaataaatattcatgtattaattaatcatatgtctcaatatatacatgtaatattcagtggagaaatgaaaacagagaaaaataagtctaaggaccacatatatttaaaacactaaaagaagaaaacaagagatcccgggccttaattgatttccatagagatatggggctagcttgattcaatctcgtatatatttttatatatatacatatattgctataacttgtgtatctatacatcctttttattcatatatctatatgtgtacagctagctatattcaataacgccaattggctgtcttgagatagacaacgccacgtgtgggtcttcaattatgacactaatgactaactcatcaattgtaacacagaacaacatgcatgaacatacatattgttatgtataatagttagtatcatataaaataatgaataaagaatgaggaaaaaaaacaaatcaagtcagtagaatcaagtaaatataactatatatatagtagttgtgttgaaagtcatttaagatttaagaagaaattggttagttgtagtaatatatagcttatatatatatatgtatatatatatagtcgtgcagaatccaaaagattcacgaggggaatcaattgtgggcaaataggccgaaccctcataaaattggtcctcacgctatttagattcttgtcttgaagctgattaattaagcaccatacataaatatataaatatatgtatgtatacatgtactatatgcacacaaacatatagatattaattatggtatatatacagtactatacttttcatccccagatagcagctaatatctccgagtcacggacgcattaggcgctgccttctctacactcatgttcctgttcccttctattccatcacattatttacaccctgttactatattattatatttacaaaaactactatacaataatattatttatttatttatttttaattttggaagggatatttaaatattatattcctatctgaaacctttctctcctcctgtccacttgtagtctttctcctcatttttattattttgaagaaacaaaacaaaaatcatgtgaccccatgtatatatagtataccctacgtactagtaatatatatcattattacttcattgccaaagtaatcggcctagaaactaacacatcacacatgcatgtctatatatattaatacatggttctcaatattcggacttttacattcacataagacaatcaaacatgtatataacagggaccaaacttacttaaaaaagtttggaatgttacgattattaatgtatttttttcacaaataatattgtatattaactaataataaaattcattttgtgtttgcagttgcttggacaaaggagcaatcataaggccagaacttgccccaaacaagataaacaagtggaatctagtaactctaaccgatgtggaagaagtgaaaatgttgattagaatgctgccaatttgggccacaactataatgttttggt

SEQ ID NO: 91144 - DNA, 1180 bp, Cannabis sativa
gacatcgctataatggaagtgcttctggatatggactatcattaaaggaagctcatctggtcgtagagctaagttaccttgttggaaggccttgtatgatttgggcttagcccaaattatcttctttggacccacaggtggacctttggtgctgacctagaatccacgtgtctcttgcctaaaacacggataagaaactcattcagttatctttttgtgcatttttggtgcttccgacaatatgtgggcttccaggtgggtatagatttcaaggtttaggagaaacaataggtcttgctactggagcattctataccctctaaggggtatgtatagctggagcttgtattctaggagcttgttggagacctactccctgaggaggatttatggcttcaggctgtccatatgctactgcttattcgggatagataactggtatcctcacccaattggataaatggttgttttgtgactaatccttcaattttatcccttaattagtcacattcattcgttatatgcccaatgactgtggtattcacaccttttgttttggttccttttttttgtttaccacctttgtacataggtggaggtcttttgtaatgaaccatataacaagtggccttgcaaacattctcacgagtatcaattaggctcgtatactcggaaacctagattctaaagtttttcctttatttgcagattcattttagcttggagctttggaacttttttttgctctgggaatgactcacatttgactctagaatttttgtttgctggtttatttgtctgagaactacattgtatcctatttgtgccgctctatagctggagaaacttgtcggtgtagctggctacacagaagtacttggtctataaattgtgggcattggaaacgtggtttctaaaggaaagatagtcagagcagtcatatgcaaagtttgagcagttgttgtattagttgtaggtgctggaagtactccataagcctgagcataagcatcttctaggtttatgaatccttgggatttggataataagtcagataaagaatttgccattttcctttgaagttattcccatagcaaggatccagttgttattcttgatgttaaagctataatttttatatctttattaacctttgtctttgcagttgtatccatcatgc

SEQ ID NO: 91145 - DNA, 974 bp, Cannabis sativa
aagttttgaactatcaaattctaagcatgtaaattttaaatgggaaaaatacaatagtacccttaaagacatttaaaaattgaggtctatgtacaaaaactgaagttgctatgattgaaactcttaactttcaagttatcattctaagcaaattacctctcactcctctcacctcaaggccagtcccaatcgaacatactacactacaaaaaatattatctttagtgataatattttaatatctttagtgataatattttaatgacaatatatattttttgtaattaaatattattacttatcactaaaatataatattttaatacaagttgttattaatttaattttaattacaataagtgttgtgactaaaaatatatttaataataatcaattataatttttgtgactaatacattaaaaataatttttttaattataatataaaaataataatttatgtttggtcacaaagtttgtaattataaataaaagtaattttttttttacaatgctgttaggattaatactattacctagctaacggacaaatttggtatgatcagttaggcaggtacgttagtctactctatctagggcatagctatcctagcataaggtctgattaggaaaatgatgaaacaattaatgaataatatgcaactttattatatggccatttgtatatctatatatagcgtggtccaaatggtaagtcgtaagcatatgtaggtgtactacgcatacttctatgatcacgttatcaacaattcacacctatttctataaaccgggctcataaggcccccctttccgggagctttttaaaaagttaaaattacttttgtaaaaagttatacgttaatatgtgtttggtaaaatttaaaagatagttttttaaaaaatttaagtgaaatttatagtttttaggaaaagttggcctaccctaattttgggattttagcttttaaggg

SEQ ID NO: 91146 - DNA, 652 bp, Cannabis sativa
ttttaatgacctgaaaagtttgagagacatgatttggtacatgtcaaagtttacggagcaaaaatcccaattagcctaaacaataataatacaaactactaaaaaaacaaaatatataattaaattttaaataagaaaaattattttaaagttataatttttatctaagaattttaaggaaacaactacgtataatcatttttattaactcagaattttgttaacaataagacctttttatgaatttaataaaataatttcaataaagcttttgaagaataatcaataatataataataaacacaagatacatatttacgtagttttgtagttaaatctacatagaccacgagtttttcttatttctaatatttttgtttacatagtatagaatgaaaagaaatacaaagaatcgaatataaatttattttaaagtgattacttgatcaaaaattggctctcctttgcacagtggttaatcctcctatttataggtttctctcatggcagttatttcttttggacttatcttaataactattcatgaaacgtgaataatcctcacgtttcatataatatttataaagtgtgataaaatacataactgccaagtaaccatctgtaatgccctaatgctaaggcacgctacagt

SEQ ID NO: 91147 - DNA, 557 bp, Cannabis sativa
agcaatgttcccattgctcttcagtttattgtattagcggatgtttctgtctaataaagattgcttttattcaaaataaaaaaaacaaaaaaaaaataattttttataataatactgatttatattaatgcattctgtttttttaaaaaaattataataatatttttttatttaagtagtcagacataaattttcaaactaatttattttgaaaagggacccacactaaattactttttttgcttttccatagcaaataaataaaatgtatataatagtaagtaaaataaatatttacaagtaaataagaaaaaagaattgtatgcaaagaatctattttgtttaatggaatctgaaattttatagtttatcatgggtgaaaaaattgccctcatagtataggaaagaaagtggccccttactttagaataaccctatatatttataatattatatataggaatttttacttccaatttatccctattattttatatatgtaatagtattatatatattgaattaaaattaataatttaaaataaaaaaattatttt

SEQ ID NO: 91148 - DNA, 615 bp, Cannabis sativa
ttaacgatcttaaaagttcatgggacataatttagtatatgtcaaagttcgaggggaaaaattctatattagccaaaaaattaacattgagttttttgttttttattattttttctgttaggtatattgttttagagtttgttgtttgtttaacaccaaaattaacgatttctcaatcatatatgctagagaagttgccatttatactctttttttttttaagaaacaattttacttttttgcagttaattttaataacttcattgtagtaatcccttctaggcttctatccctcataatagtcttataatagagtattagtagcaacagaattctctattttgtatgtatatatatacataaaaaatgaaaaaacttaattacaaattgttgttgaacctgttgtcgttttagttaaccatgacattccattaatgaaacaaaaatatggatatttccaggcgttaccatttaccaaggttcattcttttagttaaactagcactagcaattgtacactaaaaaaatgaagacaaaatttgtctcatcaaatttataatgggatgataatcaaacattgaaggggagttaattcaaaaatcatatttcgttctt

SEQ ID NO: 91149 - DNA, 613 bp, Cannabis sativa
ctactcttttgaatgttacaatggtgagaataatgtgttgtagatcaataactgatgagttcttgagaaggacttaagaagatatgacttagtgtaaaggtggcatgaatgaagtataatacttgagagagagagagagagaggatttcacatgtagctcaagcctttctattcaaatggattgacttagggaatgagagagacctaatgccctttatataatgtagatcttacaaaagatttgattcaagtaggtaaagatatccctttaaaataggaatatttacatctttttatctattatttaagttacaaaagaggataactaaatccttaaaaaataggactaatatctcaaggacaaacccctatttttgtgggttgttgggcttgtctcacaattttgctcagttggtcagagttgtgcacataggttggtcgaccaaccctatttttaagggtctggccggcctatgaccttctatggacggcaaggtattgctcgtgtaatctcactatttgcctgccagctttccacgtgctttccagcaactacaagaaaaattacttttgtcagtgagtttccttgtcaataaaagtatatatacgttgg

SEQ ID NO: 91150 - DNA, 778 bp, Cannabis sativa
atcagggtttcattaagcactctacaatcggcattattgtttaacacatcaaggcaggccgaggtgacttcttcacccactacatcccagtttttttggaaaaaaagccccggaaggccatctttgcccggtgctttaagaggattgatttggaatatagctctgacttcacttcatcactagtaaaaggctccagcaaataatcattttcagcattacttaggcaatgaggaacacatctttggagagtattcattagatacgaacctctattcgctttggtaaagagttgctgaaaatatttaatggcaatggactcaacctctttctcattagttcgccattagtgagtatcatcaaacagccccataatagtgtttttcttttgtctatgagaagcttcattgtttgcccaagcttgttcaaaatgaaatctagtaccccacctttatttgaaagtttccaccttcttccccggacttgcttgaagcaaaataggcctatgatccgaatttcaccaattcaagagagatactttattctttcgaaatctgtctttcccattggggttgcaaaatattctatcaagtttctcaaaaatcagatttgcggccctcccattgcaccaagtaaaaccatcgtcctccggcttgatttctctcaaccaataatccgagagtgcatttcgaaaattcctcatgagataatctggtttggggccccctccctttttgtcttttctattaacaatctcattaaagtctccgccacacaccca

SEQ ID NO: 91151 - DNA, 579 bp, Cannabis sativa
aatattacaaaatccgatttctcttaccacgattgacggctgcacttgattatttttgatttcccatatttgctttttagagggaaacgaggcatctgaggttcttttgaaatgattacctcttttcatgactcgcctataaataccaatgagcgttggcacataaactcattttcaacatcttgctttgctaagagagtttagagcgaaaagagaggttttttggtttcaagtttgctgaagtgccttcatcaaaactgctcgttgtttcgacgttgcttgaatccaaacatgtgactcttgagtaagttctcaatttcctttatgcttatttttttgaatgcaccttcgactttgccgtagaacattcataggaaaccctaggtttagaaactctgcgattcttctttgtcatggtttcatgcgattttacaatccataatgctggctttctgcactacataatgcctgcctttcatcttgcttattctaagcttcatgaaatttttgccctaactcgagaaaatttcaaacttcttgattttttacttttctttgaatattctcattctttaatct

SEQ ID NO: 91152 - DNA, 592 bp, Cannabis sativa
gaaaacacagatccccaagtcttatcttagttataataagttctttgtccatgtgtgaactaaatatattatttaatttttaacaacaaaaaaaataaaaaaaattatttacgaggagtgatactattaattttctattataatattttagttaatctcggtgtctaaaaatacataatagaatatttttttcaaaaaaaaaaattcatagtacactggcgaaaataagtttgaagtttattgaacacaggtagtggactgtaatatcaaaaactttgttttccgtactgtaagttattcataatttttttaaaatttgtagagatgatattgtaactataacgaatattactataaaaaaaattgatatgtgatttcgagcgtgaagattaactaaaaggttgtatttaacactgtaaaatttgtcaaattaacaatgtgaaatactattgtaaaataacctcacttaatttactctatgcgactatggtgaccagatagtgtaaatctatggtcattttatgaccatcatagttatggttgcacagtgtaattcatagtcatttccgtgactatacaagattattttgct

SEQ ID NO: 91153 - DNA, 659 bp, Cannabis sativa
aagtatcatccttgatggaagatctatttttatgcaaatatcttgatgaatgactcatccttaagcaaggattaagaggaaactctgggatcctatgctcaaggaggcacctccgggatccatgcttaaggattcacccttcaaaagcccatgctccaggatgtatcatcaaggacccttcttaaggaagcatcctttggtattttatgctctaggatgtgccatctgagaccttactccaggatgcaccctccgagatcctatgctgcaggatgcaccctctaggatcccatgctccagatgtaccctctgagaccttactcaaggaggcatcctccgatatcttatgctccaagatgtaatatctgagaccttgctccaagacgcaccctctgagatcctattgtctaggaggaacctccaggatcttatgctcaaggatataccttccaagatcatatgcttagggaggcactctctaggaggtcttgctcttccgtcaaggatgccttgcctcctccctcaaggagcctttactaccacattaaggtggcttttctcttccctcaagcatgtcttccctcctccttcaaggagcctttactcctgttgggttttatgccctaaataaaattcatttcatataatcatatttactt

SEQ ID NO: 91154 - DNA, 525 bp, Cannabis sativa
gggtgtttggggggctcaaaatgacttgctttggaacacgaaaaatgcttatgtggagagagtggtttctgctgcagttactttccttgaactctagaagtttgctcaggttaagaatggtcacttttcgataggtactgagctgcagtccaagctgtatgttggtgagttaaaggttaattgcgatgctattctttttacaagagagaagagtcatggttggggtggtttgctcgaaatcatgaaggtgtttttgttgcagcagctgctgtgaaaaggagtggtgagcttgatccacttgtggctgaagcaatgtcattgaaagaggcattgagttgggttaaaagtaactggggaggtgcggtttctcctgtaggggatatacttgttgttgtggtgatggagactgactgtctcatgctgattcaagccattaaaagcaacaagcagattatttcaccacttggtcttattatatcagattgtattagtcttttacagtctatttctttgtttcacatttca

SEQ ID NO: 91155 - DNA, 1101 bp, Cannabis sativa
aaataaagtaagatcttttacaaggctcaacagaccattataactcttagagtagtcggttctgtttcataggcttaaatcttataagctctctacaataacaactcaataagtaaataacaacatttcaagactccaacaaactttcagcaactcaagaaaaaacaataacaatttttctcagctaataacacaacatcacaatcaacaacaacaatatatataaggggttcaacctgcccttttaaaatggtgtggttttcggctcaaatagaggagatagcaacaaccctttttcatggagatataacctcagtcaagagagaaaaatagagagagagttagagatatatattgtaatacaaaccagaaaaataaaaggaagaaaatagaggaagaaccatagagattaccagctcactttgtagcttggaatctccaaattccttgtaacccgatattgattttgatagtgaagactcaagcaactttgagggccgcttgacggagacgtacctctgatttagaaggaactccgaaatcaatctttgtgttttattgctcttattcttctgttgggttttttggggtcattcttcaataaccaacaaagatcattttagatctctgttgttactgttcgggttgttgtttgtgttgcaggttcgaaggagcagcagttggttcagattttgaaagctctcacagagcttgaagaaggagctgcgtctagatcaaaggaagaagggtagaaggtgaagaagaatcgactgaagttgtttctttgaagaagaagaagaatagaagctgagagagaatggtttggctgctagggtttcatgcaagaagaggagaagaaaaatagtgggctttgactgctagggttagaggaaggagtgaagtgagctgctagggtttttgctgaaaaaagaaactttatactgccataaaaaggcaggattttgaggggaaaaatcactcttgatccgcacaaaagggaaggtccttttttaccttggttttttgtactttggggtgttggtgtaagggcatttcgagtaatgcacatttcctacggtttagattaatctaattctacta

SEQ ID NO: 91156 - DNA, 1064 bp, Cannabis sativa
aaaatttggcatggctcaaaataaattggtaccttaactatcataaaacaattgttagatgacacaccttaaaggtgtctaataacattgctcttaaaaaacaaaattcatagatacactcacacaaaacaacactctatcaagatgatactcctgttatggggttacatccacaactcatttacaagttagccaataaaatggctcaaaaaaaagacaagaaagaagtaaagagaaaaaaaaatgtgtgtattggtaacatagaaaaaactaaatctaatctgtgcttgcacaagttctctcaatcaccttagaatcagtcctataagaatgctttgatggtgagcttgaaccccttgaagaactatgtccaaagaagccaagtttaccaatctttctagagaaagaagtcataaactttctagagcttgatttctccatatcccttttcatacaaacatgttctctttccaaatcattaagcctcatccttagtcgggccagctccagcttcagctctcggttttccctcctcagcgaggcgtagttgtctcgtggagacatggctgcgctgagcgcgccactgcttatccgccatgactggtggatggtagttggcttgggaatgccaccgccaccaacaccgccgtcttcatcaccataagagctgcaaagagagtttcttagccttatttgctcaaagtagagaacttggactattgattggagagggagtctttcattttgtgctgcgtgagctcctgcttcttgggatagcttttgaaagtctatcaatttgcatagtttctttctgtctggttctggtaatccttgatgtgcctgtgtgtgtagatagacattgtcaatgaaaaatttaatagtgacccttttgaaaacaaagccattttatgaaaaatggattaatttacagttttttcttgtcaatgaaaaatttaatagtgaccctatgtttgctgcaacgtgaaaacaaagttatgcaaatttatagctaaaaaatcaaatttcatgaaaaattgaatcttacttttaagtatatgtcaatg

SEQ ID NO: 91157 - DNA, 781 bp, Cannabis sativa
  modified_base (59)..(76): a, c, t, g, unknown or other
aaatatgaaaaaatgccatagaagagtggcaaacctaaaaatgccatatttttctaacnnnnnnnnnnnnnnnnnnatttcatgtaattttcacatattttttttcttacattttccttctataatctacagtaaaatctttgtgaaaagatatagctttttttttaaaaaagaaatgttattttatgaaaaaattgaaatcatataagaataaccaattaccataaagaagtaactaaatatcttatgttagtttttttttctataatttttaacttttttactaaaaattttcagtaaaataactctttcgaaaaaaaaaactatattttacaaatttaaaccttaaaaataaaaattctcacttttttattgtccacacatttcttcccaacattttcctttaccttttacaatctacagtataatctattgattttaagtacattcctaaaaagaaaaatgtaatcatctacaatataaaaatctactactttttcctttcttcaagatatagaattttccactccaagttggggaatggcgccaaacttttaaaaagtagttgcaataatcacataatacacgtaataaaaattaaattaaattaaaataacacataaaaattcatattaatttagtaaaaaaattataaaagaattagtagtgcaacaaatttataagtccttgtaatttaatattatctcataaattttaatttaataactaaatatagtttaaattttaaaaattataactcgtatattttaatttaataatt

SEQ ID NO: 91158 - DNA, 600 bp, Cannabis sativa
ttatatttataaagataaatactagattataataatgatcttttgatacatgatgataaaataatgtattgataaaaagatatgattatgaataatggcactttgttgtaatgttctaaattaaaaatggatcatttaagtaacatattttttttagtggtaaatattattttagactttgtgttttgaaaaagttattgattgtactctttattttgttaaatgataaattggactctgtattctctaaaattgtacaaaatagtaccctgaactgattttttgtttatataaaagttaatataatagcctgatttacagttattatgacaaaatttgatactttttctgtatctatttgtgttaaatttttttcaagttggttatatatataattattaaaaattgagctcagtgtactattttgtaccattttgaaaaagacagagtctaatttatcattttacaaaacagattgtttcggtaattttcacaaaacacagaatccaaaatagtattaactcttttttaatacaaattataaatcttattttgtagtttccatacaaaacaatctataactcttacacatatgattct

SEQ ID NO: 91159 - DNA, 1058 bp, Cannabis sativa
caccaaagaaagttttcgggttaacaatttaattttttttatggtcgtgtacattataattatttaagacatcatacaagattttgagaaattttaaaaattttaacacaccgaaaataaagttcaaactgtcagttgcatgtgtaactcttttttattatattaaaaaaaataatataataataaagaatattttttattttaatttttagtattatgattagagtgaaaataatttttaacactaaattcaataataatataacaacaaatttaatatatgagttggaaatgctttaagctgtcttatgtttgtgtgcccatatatatatggagagagaggggaaagcgagtgcccatatatttttttatcccatttgaacaaattattattattgatatgtacactaatttatttttttttttcttcaccaattctttttataattaactacaaacacttaaatcattacattatacattagtgtttactatattatatatgctacaaattaaatcaaccccaatatatttggattgaatatataatataatataacatatataaatttgatgatcatatatatgatcatgttctaaagcgtgcaataatattgcaagcaacgagtgtatatacaatatctcatatatatatatagatgatgatgtcaattaaaacgttcactctctatagtcatgagtctagtctgacgtggcccttcatatgatatatatacatatatatatagagagagaataattttctgttagaaagagtgatatatcttctgtcctctgtgtgtgagtcgatcaccaaatcacctctctctctctctctgtacggaatcagagagaggcgcactctccacttcttccaataatactattacacgtgtctacctacctacaacaatatatacttaataattacacttattaatttataattaattcaaaaatgtagaacctctatttaagaatactctattcaagaataacttctaatttattataaaaaaatcaagtcccgatttaccagttataaataagaataactt

SEQ ID NO: 91160 - DNA, 703 bp, Cannabis sativa
  modified_base (422)..(429): a, c, t, g, unknown or other
tgttctaaatatcctaaaggtcaatatcaaagcaataaaacacagcttcatgcacaattacaaaaatcaccattgatgagtcaagcttgacttcaaaacctcaaagcttgctcatcccaaaaactagctatcaaaacctgctcaattcaccttatataaccataatataacatcagaaaataaacccaaacacaaacaacaactacagcagctaaatcaacatttcaccgttaaaaccaaagtgttaagttcaaactccaaacttacttaaaaccatctaacaaccacaaaaacctgcttaaatcttcatattaaaatataattaaactttagaaatcaacaacaaacataaacaacagccacatccacataatcaacaagcatgcaaaaacacacattttcttaaacttcaagaaaacaannnnnnnnttgttcaaagattacctcaacttgaattacactaagaattgctacaaacttgttgaattgaagaacaaaatcaaaccctagcagcccctagaattttcgagagagagaaagtgagcttgagagatgaaaaatgtgatttttcttaacttttctaatataatgaaataataattgattttccttattttgttttagccaaaccaagttagaaaaatcagattactaacataattaaaaatccataaaagacaattacaaatgggcaaaatgacct

SEQ ID NO: 91161 - DNA, 1065 bp, Cannabis sativa
  modified_base (477)..(480): a, c, t, g, unknown or other
  modified_base (580)..(582): a, c, t, g, unknown or other
  modified_base (647)..(652): a, c, t, g, unknown or other
  modified_base (780)..(787): a, c, t, g, unknown or other
aatttaaccttaaattgaacaactgttattaattgaataggcccaaatactaattgagcctaaataaaatctatcaagatgtgacaattttatttagcaaccaattccattttaattacaaaaattaaatgggctacatatatacatctaagcccaaagcaaacattataaaacacacacatgtaacacattagatagttggatataggatttatttaactttaaattaattaaatcattaattaatttcgaaaatatttaaaaaaataaaatattatttttcgaaaatttcaaattaaattaaataattaatttcaaaaattaaacctataaatttgaaaaattaacttttcaactaacctaaatatctatttcaaaaaaaaaaatgctaacaacttttcaaattttatgttattaaaaataaattaaatattcaataaaatataatgataaataaatatcatttttctaattttnnnntttaatttaaataaaataaaaaaatttaaaagttggcaaaaatatcaaatttcaatttaaaatttcatgattaaaataatcttattttaaatttcaaatnnngtcattttattaaaaaaaaaaattaaataatttaaaatattaaatatctaaccttaaatttaaannnnnnataaaataatcaaatttaaaaaataagataacaaactaagcaaaaagatagatttttacgtattttttaacttcaaatttcactaatatcttaaattaatttttaaaaaattaattaatttaattctnnnnnnnngatttgaaatatgaaaaataaaaagaaaaatacaaaattacgtgaaaaattcgaaattaattccatgaaaaaagcaagaaaaaatgaaaaaattagaaaaaaaaaaatgcatttgcataccatccaggcgcatgaacatggacagatgggctaatttcacgcacatgaatgctaccagcagcatttccgcgtgtgcacacaccttcttcagacaagatcacgcctacaggctgagaaatctcgaacataagcatgtctgaggtgcgtgcatccaagga

SEQ ID NO: 91162 - DNA, 960 bp, Cannabis sativa
ggaaagaatgaagggaatgggaattgtggtgagggaatgggtgtcccaagtggagattttgaggcacaaatcaataggtgggtttatgagtcattgtggatggaattcttctatggagagtataagtatgggggtgcctttagcaacttggccattgcattcagatcaacctattaatgctctgtttattacacaagtgttgaaagtgggtgtggctgttatggaatgggagcagagagatgaggttgtgagttcatccatgattagcagagctgttaggacattaatggcttcaaatgaaggtggtgagatgagaaagagggctgagaaattgggtggtgaagttagaaagtctactgaagaaggaggtgtcactcgtatggaatgggattctttcattgctcatatcactagatagattcaaagagagcacagggatcacttggcacttcttattttcttattaggcattctctcaattttaaggaaattatgaataatttaagatgccaaaaatatgattcagataagtttctgtaacacatcttgagttaaattaagctaaatgaaatgtatccagtaaaaaatgataattgaaattcttgtgattttttttaagcatgaatgattaatttgtaactcgggtgaagtttgatttgaggtaatgaaatggaataaaaataaacaatttgtattaaaattcttttatttagttgcaatttaaagtattgaaaaaaattattcgaaatcatcattctagtgaaataactattttatattaaaataataaaaaaaagactattatagagcatagtgaatgaaatgaaaaaatttaataatttttttatcatttttatatgcttttatatttaattttatcacattctcattcttattcctatcatacttttattcatacaagaaaataaaataaattatttatttattttgaaatagttt

SEQ ID NO: 91163 - DNA, 821 bp, Cannabis sativa
gattaatttaaaaatcaggatccacttaaaaacacaaactcctttagtcattaaaatttaatttagtttgacattttcattctcatcaggtctaaagctcataccaaacattcccaatatatagagtaggactatagttgcttcatttataaactttgaagttacatatatgaaaataattcaatcttgttgttcaaaacctctagcatttattgtttacacacatatatatatatgtaagctaaacatgaaagacttacccctaatgctgagttgaacttgaatttcttcaactttttccatgtcaatagatgaacaaaacttcacaaacaatggttggagaagagagattgagccatatgttcagattgagccatatgttctcaactgtattaagtaatgcaactgtattaagtaatgatatatttatatatatatatatatatatatggaagggattgaatgtgtgtttgtgtgagagggagagagctagttcttatttgtattagtcaatactagagatggcattaaatattgtccaaatgtatcatgtggaaatatatatttatatatatataatcaagcaagatcttttagcccaaaaataatgcttactcatatttatatctagttattttaatatgattgagtagccatttcaaaatggtagctggagaaatgtttattaaaatctataggatactgaaaacaatttttttcccatgtttttagaaaattttaaataattaagaatattgaatatttgcacttataatgatattgggagtttagatctatgttttgtcaccctaaatttttat

SEQ ID NO: 91164 - DNA, 743 bp, Cannabis sativa
tttggggttttgaaaaaaaaggaatagtttttttaggttttaaatttttggtttagggaaaaaaaaatttgattttctaagtatagaaaatcaaatttcccaaatagtatttaccctaacaattgttattttcaaatacaatagatttaataatactattttttaatgataatttttatttaaatttaaatttgggtgtattttgattttttttaaactagggtttatctttcgttttgaatacatatctaaattaaaatatctagaaagtaattatattttaataagaaatagatattttttcacaaaacgtatgattattatttacataaaaaaacatataataggccttacctacaggattgtcgatagaatatattggtatatacgtattacgtttttttttttttctgaaatataaatatttcattttttttaaaccaaaatatttgataatataatagatctttctaaaaaatattccaaattcaaataaagtttaattttttttaaatttctctatatatagccgtacataaacactcaaaatcatttagctgcatactttttttctttgccagtatatatattcgtatatacacattcctatataatcacaaatatatattcgtatatacatacacattcctatataatcacaaatatacattcgtatatacacattcctatataatcacataagtattcactatgaagaagagtttcttgtcaatttgcattat

SEQ ID NO: 91165 - DNA, 856 bp, Cannabis sativa
gataaagaagaatcgcagaggtttttgagcctagggtttcctaaacatttttctacagcaaagtagagggtgcatttgacatataaacatgcaaagataagcataaaggaaacctgagacttactcgagggtcagaagtctgggtgcgagcaacgtcaatccaacaagcagtttgtatgaaggcgcttcggcaactttgaagccaagaatctctcttttcgctctgaagcttattcattaaagaaaggtgatgaaaatgagcttatgtgccaatggtgtttggtatttataggcaagtcacaaaaggagataatcgtctcaaaggaacctcaaacgcctcaattttcctccttaaaagcgaatatgggaaataaaaaataatcaagtgtagccgtcagccatggagagacaaagaaagatttcaaaatataaagtgtcagagcatttattagtcgaaaccgaagggacacccagtaagcctcacatcgagtctcggacggtcgcactcaacacgtgtccccatccaaaagcaggagcggcttggatagagtctacacgcaacttcggaagcccgtacaaacttggggggcaaatgttattccaatttttgcactctaacgtggcatcacatgaatggtgacacatagagtctacttggaacaactgctcgagaagcacaatccgagcaggatgcctcactggcatgcctagagcaatgtattcactaattcgcacagaatggccaaaacacttaacgaattcaaatttggcatcatgagtcatcaacacaatccctataacttagggatcaatttacatggatatggcataaacacgatcctgctatcagtgtatt

SEQ ID NO: 91166 - DNA, 631 bp, Cannabis sativa
caaaaacgtgtctatgctatattatacgtacaattcaatcaaagaagaagaaaatacaaacttaaatattataaatcatatagtaaaaactgagtttaaattttgtaatgacaaacctttaaaaattttatatttgggccgcatccaaatatatatataaatatatatatatataaatttgcaattggcaatataaatgccatatgagaggcatgtatcttatatgagataagataagatatattgtagtgaaaagagaatgagcttcttataaatatattgagttagatagaggcttttgcaatgattgaaacggtagaaattaaattttattgtaattaattttgattattattatttttaaaactcatgataaccgttgctacatccattaaatcaattaaaatgaaaagacatagatgttattactttttttttaattctttgtcattaatattgattaattattactataaaataaaaaaaaatattaataaaaatctaaaaattaaaaaaaaggagagagcaagaaaaatataagaaagttcatagaggttgccacctcatcaggcctaacaatagcattatagatttaccgcgctttgcgcggtttaaatagttttgtaaaatt

SEQ ID NO: 91167 - DNA, 1122 bp, Cannabis sativa
ccccagacctttgacttgagccccagaccccgattcagacctgaacccacacccagatccgaacttgggctcagaccctagacctagacctgaaactcgaacctcgaactcaaacttgcaccccagacctcggacctagaccacagaccttgagttagacctcgggcccagactcaggccccggacctgaggttcatccaggtttgggtttggggtttgagtctgggtcatggtttggtttggggtctagggttcgggtctgggtccaaggtacagggcgtggtcgaggagggatgggctcatgtcgtggtatggtatatattgacttagaaatctaaactagacttctaagccacactcgcttagtagattgacgagaataaaaaagtagttaagtaattttaggagagacacaataagtttatagtagttcactccctatattgccacagtaatggagctatgtctacttcgagttcttatttctcatgagatggtagttatagaaaaagtctaagtatcaaaatctccaatttctaaagataaaaactagagagagaagctctaaccttatgggtagttttctgaacttgaaaaataaactaagggagttcttcttttataggtgaaagaggtccacaaaaatagggggaaatataaattatatgtttttaactgttgattatgatctaacggtgaaaactaactcttggtggtgatggccatttttcggagctcgacgggtcccactacaagtaacttggagcttatttttgtaactccattggggtgaaatttaacgatgaaagcttcagaataatgattgaaatgtgagatgtgacttgatagagaatttacgtagcttcaaaactcaatttgaatcgcgtcaatcagattaatattgagtgagttatggctgttttactgaaagcagttcatgacccatcgcccaggttggcatatgacttcaacctggacgtcgagtaagtgtaaaaatgtccaagagatgtactttaagatgcctaagtaatatttttacattacttagtctatttctgtgttttggcaaagctggtcaccagttctcagagatgttgttgttttgcaaaaatgagagactca

SEQ ID NO: 91168 - DNA, 865 bp, Cannabis sativa
gattaaatgattaatatttaaattgctaacaatattgtagtttttggagttttgccgctcaaatttaaattttggggttaattgctagcacagtaaaactattgagaattttgttgaaatttactcttatataaactaaataaaaatcgaaactaaattacattacattaaataataagtttttttgaacccacattaaataataattttttttaaacccaataactgagtataactattagagattgtacagctatttactcttacttatataaactgaaactaaattacctaacattaaataataaatttttttgaacccacattaaattataagtttaaaatagaaaacatcacatttgattacttatttaatttaattaaagcatattttaatatattattttattaaaaatgttacttattgttgatgcaagattaccttaacccaataaaaaagactagagcaaaattatggagtttaagtaataaacaaatcaagtaccatttaaaaaaataataataataaacaaacaatgcaagtaaaagaaagggtgacatactaatatctatagttattagactagttagtatttttgtctcttcaccttttacattattaagttgtgcttttaataatatacggtttgttaataatatcactcgatatataacttttacagtacaatcaatagcccttatattatattttattcaattttatcattaaatgagtgatgtggtggtagatggcagttaataaatgaatacaaattaatttttttttaccttttttacgttaatgaataataaaataaaagattttcattgtttataatagtttatatttatattgtgtagttgt

SEQ ID NO: 91169 - DNA, 623 bp, Cannabis sativa
agatttaaatctaattgtatcgttttgctagtcttattttattgattttacttttctatgatttcggatgtaagtgtattctccatgtcattttgtttgcttgagtttggtcttttaaatctacaacaattttttgtatttttttccttttaaatattttgtatgtatattaatatgtgttatgcaagaatatatgtaattattattttatttgattaaatatttggaattcttttataatttaatcactatattattcataataatatgttgcttttttaattgtagacaattaacctaacaaagaagtcaaggctacaacaaatgagaactcaagagatgattattgtgtggattctattattatagttttgttttaaagtttcattcaatacaatttttttttctggaatcggatgactgtatagtaattttaagttaatattttttttgtattaacattttggatactcaactaagatgtagattttttttgcattaaattttaatgtgatgattattatatatatgaataaataatggtaatataaaaattaaacttaggacagaattttaaaagggttataacccaacccaaaccaacccaacccaaaccaacccaa

SEQ ID NO: 91170 - DNA, 675 bp, Cannabis sativa
attccttcaaagaagcagtgtcaacttcaatgaactgacccaaaatgacccaaagtttgtgggctagcgccttagagcgatgaaaaaatagaatcccatagacttggatccaaaagagggtagagcttaacatgcctgcagattgcagtgacaatggaacctgcttcgagaggagtcatgacaataagtttgtagttaaagtgccacagttggccaatcaagacgcgcctttgatcaccaaaacaaccaaattaattaaatagtgtaaaagtttggagttttttccataatgttaatggaaaaacattcaagccacatttggtgaaggcgttgtttgaaagcatcgatattgaaatggaaattaatgagaagtttgatagcaagaaaggcataaggctcctcctgagattcctcagaggcttcctcaggctggtcagataaggaatgaatttgagtttccatttctgtaaggtttaatgcatcttgcaaggtattagagaggtcgttcatggaatgagaagaaggtaagacagtgacagatgagacaggaaagagaatgtaagaagagacaaagagaaaaaaaaacaatgtgatagtgaaaggtcaaagcaagaaaagaaaatgaatggatgaaacctgaatacatataagcttgttaaataggagtgaataagc

SEQ ID NO: 91171 - DNA, 916 bp, Cannabis sativa
aacaaaaatcataataattagtaaaagtttaaggagaagaaaacaactagaatgaagaacacttcgaagttgcgatctctctctctctctctctcttccttgctctctctacaagtttctctctcaaatttgtagctttaggatgataaaatttacagcctaaaagatcctatttatagtactagaaaatatctcactaaaaaagataattcatctttaaaaaaaatcgtagtgcagaaatttggcttctcgtcgtggccacgaaacggctcgccgcggtgacagggtcctcgcctcgacgagccatctcgtgaccgcggcgacggggcctgattcaagatttttattttttttcatatttttgctcgcttccaccttcgctgtatcgacaacccatgggtttttactcttcatggacttctaaaactctagaaaaatattgttttggcatgtcattccatccactaacttcacctagcataaaaaacaccaaatccattactttttacacataaaaatcaattttcttccaaaacccgagttattccaaaaatgacaaaaaatactaaaattattaagtaacaacatcctttaactgtgaagaaatcaaaaattttagagcctaaaatgctcttatcaaattcccccacacttaaatgttgctagtccctaagcaaacactaactaaactaacacaagtaaatgactcaataagaaaataacattaaacaatggctttgtcgacagtaaatttagtctcaaaaattattcaaatagataatgctataaagatttttaactccacattctttagaatttcaacatagaataataacttttcaagcttaattttttttttttttttttgtgtctgtgtgcgcttaattcaatcatttcattataatatccaaatcaa

SEQ ID NO: 91172 - DNA, 1606 bp, Cannabis sativa
tttcaagagttgattttgaaaacccattaattaaaaatcaagggctataaatcaatatccctattgataggtaaaataccaaatccctaccataatgggtgcactcttaatgggtattacccatgaatgggtaatattagaacattttgagtttttatgattaattttttaatttaattagaaaaatttctcattcttacattatatgagttgggattcgtccatcagctgaaaaatgaatgataaaaaaaaagtttttcagcaaaaaagtgtaaaaaaaagttgaatttgacttattttttcatataaacatatttttgatatagtgtaaaaagaggtattttttgattttttttttaattaagtagctaaattagacatagaaattcaaatttctcttttattatttgctatcggaccaaaatctaatggtttaatatttttaaaattaatatttattgttaaatttgtttattacccattaatgtgtcataccctttaagaagtattccatatatatatatatatatatatttgagtgtattattaatgtgtattaataattaataggtattattaagaaaatttgagtttttatgcttaattttgctatttagttaaaagaaattctttatttttgcattatatagctgaagttgttctattgggttaagagaaaaataaaaaaagtattaagtttgggttatagagagggataaaagtaatgctaaatataaacatattttttatcttgtaaaagaagagagagagattttttttatttacatagtaaaattaagcacttaaactttattttttcttttattatctgttattagattaaaatctcatttttaaaaattaatatttttaaaattaacatttaattataattatattttaaaagttcccatttataagttttacccattgacaaataattcatacatataattcaataaataataatctaagtattgtcatgcacaacaaagatagataaaaaattataaataattatatttgatgccttaatattctaattaataagaatattttgatgaataaatataatttttacccttgaattttcatacttatatgattcttttccatcgaatacatttttttttcaaaaaaaaaaaaatgttcctttgtaatttgttctttcggttatattttattcattttttgaatcagtttattggtgtggccacaaaactacccgtatacaagagtctatttaactaacttaagctagctagaaccaataataatgaccttaaatattcaaatattaactcaaaagttacaaatctatctcaaattttatcgccaccgtagtatccaatacagtatattaaccatggaccagtcttacatcagaaaattgcttgtaaaaatgagcacaatacaaccaaataaaaaaaatatataactatttctaaactttgagggacatttttatatataaaaaaataataattaagatcactaaattatattagtgtcaaagtttaaagagtaaaaaaaaatttatgagtaaatactattttagaccttttgttttacacaaattgcagattagaccatctgttttattaaa

SEQ ID NO: 91173 - DNA, 859 bp, Cannabis sativa
ccccttttaccaacacatcataggtaaattctattttaccagcgcaatactaacttttgccagcataaaaatgtactggcaaaagtgacattttttgtagtaatagataaatatttagatttttgtgattatttatcccgcaatggagatactttaagcattccattaattagatatcaatgttccaacaaaattacttgtatacattaaaaattccaagttgcgcgaggtaaatatattaaaaaggggcagattttaacagacaatgttgcaacagttggcggcgaactatttttgggaaaaaatgtattagtagcttatatgccactaatacatatactcatatatatatttaacaaaaaaatgtttgatatagataccatctgattccaaaattagagagaggatctaaggtgaattactatcagatcaaaaagatgtatgggtaaacaagattttttatatccatacactgttcaatattcaattattcagctataatgtgtgtgtatatatatatatatatatatatctgtatatagatatatagtgatagtgaatgggttattgcagggtggaacatctgaaggtcataaattttgtttgtccatattctctctcttggttgcttatggacacaaagcctttgtggggacttcttcctcatgctgtctttatattgaaacaacgttatcacatgtggcaattactactcactactcacggattactttatgtctaaaatgccttaaattcccaacaggcggtgaggttgggcatcaaaatggtgtccaataatattataatggctaactagtaattttttctcccgaactttgacaaataccaaatcatgtcc

SEQ ID NO: 91174 - DNA, 1079 bp, Cannabis sativa
ttgtgggaatgataatcggtgttactataataaactataaaactttttatgtatacatgcatagctcttaattattgcaaaaaaaaacttaattattgcaaaaaaaaaaaattttattgcaaaaaaaaaaaattaatatgcaaaaaaaaaaaattaataaataataataataataataaaaaacaggtggaaggtgccaatgccatattcacaaagtaacatactcaaagaaaattagaacaaatttcaaatttctaccttgccaccgaccccatatggatatccccattctcgatatcatcattctaaatcctcaaatctttaatcacataataaaactaaaatttttatttctaaaaaataactatgcgctctataagaacttttatttttcaattttaaaaacagaaaataaaagtatattttgtaaaaattatttttatttttattttttaatattatttaagtcggatctaactccgcaacggattcgagttcaggtcggaggccaggttcaacgagggccatgggagggtggacttgggtctggatctgggcaagagcttaaaatattgactaaaaaaaactgtgtaaaaaaaatttaaaagtaattattttttttttgttttcaaaattttgattatcaattaaaacattgaaaactgaaaataattttatagaagatgtttttgaaaaatattttcacttttcaatttcaaaaatagtatactgattaaaaaagagttactaaacaccatcttagttttagcctgtagaacttcgatttctccgcccggatgctggagagctaaagcaagtggatgtctccctttcgacaatggtttggtttctttcatggtagtttcattttctgtcaagtagggaagggaaatttgattttctatacttaatttttttttttttaaaccaatacattttaaaatacaaaaaatattttatttttttcaaaaccccaaaaatacccccctcataactcaaacactttctctctcctccctcaaactctctacatctatctctctcaccaccattcaaccgcccccacccccttcgaccac

SEQ ID NO: 91175 - DNA, 4210 bp, Cannabis sativa
aaaataatttccaacagatgatcctccaagacattctgaaaaattataaaaggaaaaatgtctcatcaagatgcactatcaaaattgacataagcaaagcttatgcactgtcagttgtgattttttggaggattttcttgctgcttataattttcctcagaagtttattcagtgaattatggtgtgtctatgagcaactttttactcgatagttatgaatggaagagtgcagattgttgcccttgtggtgctagcatcatctaaaaagtctgcggcttctgtgacatttgttgcgtcggcatcacttgtggcatttgagaccgtgagacttgagacgtttgaggtgactgtgtcatcatctgcgtcattagtggtgggctatttggcgatgatgactgtgatatcatttgcatgaatgtttgaaacatatgaaattgttgaaattgatgagccatttgttcagggagttgttgaggctgctgtaacggcagctataatggttgttgtaacaactgctgaaatgaaagtggagcccgctgcgactgttgatgctgaaaacccattggctgagtagatgaaccagatccatctccaggcatataaaagtgagacggttgtggacgcgttggttgcgttggagcaacgtcactcatcactgtctccacatgggcacattgttcaggtgtcaatacttgtgtcatcgcctgaatatgtctttgcagatgaaatatgatttggcttaagccatgttgttaagtagttgcagcaaattgtgagcgtcattttcctgattgtcctttcaatttgcgacccactcctcgctcgtggccacgcctctctccaagagtctcatgaagtatctcaatctcaacatcttgttcacactcagaatgagtagattgactgtcatatcttgtcttcatccgtacctattttaagaataagttagaaactaaacaaacttacaattatttaaatatattcaaaagtaattagtttacataatcttacatatttttctttggcatgcttgttaacaaactcatctgtacccttctttgtgtgacaagctttccaattctcaattcttaatgcttttagttttggatctgttttcgtccctcaacaaaacaagaatgactttatttaaataatgtttttttaagagtgtgactattgactttattaaaaaaaatccttcacaccctcttaaatgtttatattttcaatcacaaaaaaaaaaaaaaaacacacataaaaattcaatcaaagtcacatccaacatcttgctcatacttcatgatatattttcaatacatcaaatcacaaacatatattagaaatgaagcccttctcttggctcaataccggcccactcaaccttacttttactgtgtatatatatacactttattttgtaaataaaccctacaactcttgtttccaacagccacatattttcagctgatactaatgaaaataatgagagtcttttttctgtaaaaacatataatatacataacatatatatatatctaaacttactgaagtttgctgagagagaagaggccacaactaccaattcgatcagagacaacaccaagagaagagattttgatgaaaatggaagaagagattttgacctggagaaatattttgaataagattatggaagaagaggaagatgaaattggagaagatgatgattatgatttctaacaaatttgaaaaaaaaaattcgtacctcaaaaataagggatggctttggtcgccggcacaaccaccaccatcggcagtggtggacgcggcaaccagggataaggattttttttgagaaggtaatggtatttttggggaagaagaaggggttatgtgttaaaatgggtcctgggttttatatttcaatatctgaggagcttatccctggcgacatacattaacgacaaagtcgtcagtgttggactgcacactgacgacgtggcaatccatcactgatgactatgtcaccagtgaatgtttaagagggaaaaactccgcccaatttaacggttctttttttttaaaaaaagaaaaatattgacaaaaatttcgtcattattatatatctcaatgatgaaatttttgtcaatgatatattttgtcgccattgatgtatacttcagcaaaaaaaattatttttattactgagaacatttaaatgtcgttggtaataatgttacttttagtgaggattttttggcgtcagtaatagtgccattagtgatacctactattcttgtagtgtaagttggccaccacccattaggaagccctaaataccaacgaggaaagaaagagttgtggctgggtatccacaggtccatacaacttttgatcgatctcccgtctctaattttctattgaagcccagcggttaataaatctcgtccccataaaattttttcgccatgtcaaagaaggcgagtcccaacttttgagtctaggaaagaagtatttgagaagtaacaactttttaacaacttttgtttatcaagaagaaaagacttcattaatcgacaaaacacatagaaacactaatcaaattaactcagccaaacacggctccagctagcaataacagcctcaaacaaccaaagttattacaatgcaatctcaataagtaatctctctcttgtttagaaaattttctattgtttactatttgtaatctatattttttaatattctttacatcatttacaactctaaaaattgatctagaataaccattaaaaatatttatttctattgagccaaatattgtatgcagctgctaccaaaatagtgatattgagctgctgaaactgatccttccctgtcgcaacaacccagccagactagccagcaacaactatcgaccaccctctaacccctccaagcaaagatcaaatccaagactttctgagataagacacaattaaaaaatgtgctcatgagtctccacatcctcctcacacaccgggcacaatagagaatttagatctatatgaaactgagacaacttgtccctagtgagaagatgagaattcatcacttgcaataagataaacctatgtttaggcacacttaatgaactccaaatatccttgtgataattgacctagttttggaccaatctgttgttgtataaccggttggtcttaaatcggatagatgttccaactttaaggatcttattacataagaatttctccctcaggtgacacaatttacactaataccagctagaatctattttaagatcataagacttgaagcttacagtctttaagtagatattatctacccatttgacccaaagaaggtcttattttaatgaaattgcccatacatacttagcaagaatagattggttccacttaacaccatctttcaatctaaggcctccataagccttcgggaggcacactttttcccaagacgcaatgtgaatcttactcttatttccattcgtaccccaaaaaaagcctctacaaagcttctcaacctccttggtaatactatgaggaagaacaaagatgctcatccaataattttgaaggccaaagtaaaacagagtggatcaactgaaccttgctagtaaatgataggtgtctactcaaccaagtatgcaatctctactttatcttcttgataatgatgccacaatattcagctttccatttcgtcggccttagagggactcccaagtatttgagggggaatgtgccttcaaccaactgaaaatctctaagtacaacttacttttcctcagtattcgttcccccaaaataaatttgggatttattagcatttatgtgcaagattgtaacaaagctaaattcatcagtcacctatttgagagtcataatcgagagtcttgatcccttactaaacaaaattaaatcatctgcgaagaaaaggttgattattttaaggcccttacacattgatgatacttgtaagaattgacagctgccctttgaagtcttcttgtgagacactccataataagcacacagataagaggagagattgggtcaccttatctcaaccatttctctcttttaaatttgccatatggacaacatgcatcacatatgccgacaccacatgggcaacggactgctcagatgatgacaagttcgcagatgcctccgtactacccacagatgccggatgtttctcaacc

SEQ ID NO: 91176 - DNA, 634 bp, Cannabis sativa
gataaaggggtctccgccagaaaataactataacgtttttggtttagtgtatcatgactttgaagtaattcaagaacttgaataaaaaaaaaatatttactgtcggcagagactcatgtcgataacgtgttataaaataatattaaatatagataaaaaaaataaaagaagagagaaaacaaaaagaagaagaaagtgagagagtgaatgggatttttctttgtagtttattttaagaaataattgcacatagtacaaattatttatgaaattgtctttgactaatttattgctttaaataccgttatatccttaccgaaatcaaattaattatatgtttcgtcctttattccactaattgatatacaatcagtttttctttttctttttctttttatttttttttatgtgaataaacaacacgtgtaatcactctttcacttttttatttcttatttttttatttctaaaatttttttagccacacaaattattatttagacacaattattatacaattgtaatctattttttaaggttattattttgacatgttagaaacatatatttttttgctaaaaaaaactgactaaataaattaagagttagactaaagtttcttaaacaacaaaat

SEQ ID NO: 91177 - DNA, 659 bp, Cannabis sativa
  modified_base (608)..(628): a, c, t, g, unknown or other
aatttctaaaaactataaaactcgaaaatcccaattgtcgcactcaccgaaacactaccaaaacttatccaaatcaatccaaacttcaaaaagtgcatatataccataaatattaccatccttacgtaacagaaataaaaatcgacctcttaaatgaaaaacgccattaacgttcggactaagttttaaaaagttctaaatttgatttctaactcaaaatcacctcaaatttgataagaaaatatcgaaactagtcttatgactacccgagaacaattctataaggtcagaaccttcataactattctaattcacaaattcctatatgaaaccaattatttttaaacttaaaacgaaattaaatcaagctttccctcttcaaggatttgctatcctgctactaccggagcttagatcgctaagttttggattgaagatcgaaaaaaatggatatagggagagaatgttttatcgaagaagggagaacgagagtttcgttcgttctttcgttatactattccttatataacttatataatatatatataaactttcatcgtgaaagttcaaattttaataataataatataataatataatattaatannnnnnnnnnnnnnnnnnnnnatcttattattttttagccattaagaaactt

SEQ ID NO: 91178 - DNA, 760 bp, Cannabis sativa
gtacagttcgttactgtgttggtagaaataacttttatcaacgcatttcgtaaattgtgctggcaaaaaagtcaaagttttaccagcatacatttgcagtggctaaaatctaacttttactagcgtattaacgcgatggtaaaagttatttttgccagcactttttattttgtgctgaaaaaaattctaatgacaatattgatttgccaaccctttttaccaacacattaaaagtaaatttcattttactagcgcaatactaaatttttgccaacacaaaaatgtgttggcaaaagtgacatttgttttagtgattatattcatatttcattattgtattttttttatatatattaaagaaataatatttaaatgaatgtagaaagaaaataaagaaactgatgtataatgtataattgttacactttttatttggacttatagtaatttttattggttttaataaaaatatgtgttgattgaatagttatttgctattagctcatattattagtgatcaataaagtttatcatcggtatgtataaagtctagttgaagtagacgtgtgagttttttctatttaactgaagcttttggagtaggccaagtccaactagtgtaatatagctaagtctttttcctaactttataaatacatatttgtctcatgacaattatatgtacctttgataatcagataaataaaactatttctgatttagagatttagggatttgaatacttagttgatagtattgt

SEQ ID NO: 91179 - DNA, 593 bp, Cannabis sativa
tttgtggcttcaggttcccaaaggatgggacaagttggttgtgtctgttgtctctgtagaaacagatttatcttcctcttcaatttcagatttgcgatctcctaaacccaacttcagttcctctgtgaaatgcctctaccctctcaaatacccctcttttctaattctcttatggtaagcttcacttttcttttccaattcagatgtcgcgatttacatttctcagtttggagcttttaatattaaattttctttttctgtaatggttacgcttgaaaaatattagtgatctatgattggagatgaccccactgccattacttagcccaacctccgtaaacgcccaagcaaaaatgtatgttctttacatcattcttcaaactattatggaattgagctgatttttatcgtgacagtggcttttctttactgctaatttcaaactattatagaactttcattatttttatttttatttttatttataacttataacataaacatataaacataaaagaaaactcaataaataatggtaggttctcccattcgaaagcaaacaaattgcgtagtggtcattctttgttggtagc

SEQ ID NO: 91180 - DNA, 599 bp, Cannabis sativa
tatatttgaaataattttaaggcacaaaaacccaacacatccatgtatttatataatatacttgattttgattcataaaaactatatattatacttgatttatttagttgaattaatatactttttatttaaactatcaccccttagaggactctgtatatatgtggctcttcagattggttgttgtaattctcatgtggacgttgcatcattgattttccttttggatactactttatatataaaaaataaataaaaaattaaaccacgccacacaaataactatgcgattaattatctacaaaaagctcatcagtagcaacacttattcttatcaaatacaaattattattaacattgatttttaaaatttcttacaactaaccaaaccatttaaagttaaacaaaaagaaaaatataaaaaattattgcccaaaaccttcccaacaacaataataaatagccaaagaaaaattgaatcaaactcttttccagttaatgttaatatgagaaggacccatagttgctacaaaaatgaataaaacccaaagcacataacactttccttgtaaatacaaaatcatccaaccacgaccatc

SEQ ID NO: 91181 - DNA, 1076 bp, Cannabis sativa
tatcatataaataaaaaagtatagctcttattttcataacttaattgactctttgttagacaaaattagaaaataaatagagcatcttctatttttgaatcccttcatcttcttctcaataatttcgaagcctatagtgattgggaatatgcccacacatgtcaaagaagattgtgtagttcaaactgtcaattgaaggagaagatccaggttgagatcttgataatgttttactccagacaagaatcaagggctaaagatcttaatagaaagagtcattatatttcgctaccatcaatgtaaagttttctataactttatatatgtttaattcattgttttagggaatttatatttaagttagattatagatttataataaatatacatatgagtaaatatagatcctgataaaataagttctaacataactgataattaaagcttagaaacaaacataatacttctagagaaaaaagaattcaagcaaaattcaacataaacctattctttttatttaaagattccaaagagagcaaggattttaggattgccttagtcttttctactaattaacttggtccttcactgatttcttgaagaatcgctgaaggaaaaatccaagattttggtttggttcttcttggtctcttataaggtcgaatatggagaggaaaaaagagagttagtattgtgtttatgtttctaatcttatctctttaatttaatttaataaagtcaacttaagaataatttttatttcagaggtgttactagaattaactaaaaacaaaactcgctaaaacttaggtaaaaggccctgatacttcttttcttaattcctaagttaccacaaagctaggattaatttggtcataactaaattctccgaaacatcccgagtaacaacaacatcactaaacttttcgattaaaactaactctcgcattattaccgttgtgatatttttggtcaccaattgggtctcaatggttgtctgtcctggaaaaatattttatttcataaatggtatatacatacccacatattcgaataaaatctccgtaattaataaa

SEQ ID NO: 91182 - DNA, 5355 bp, Cannabis sativa
taaattatttaaaattttatgaaaccgaataaagtcatttctatagcattatttttactgaaaagtaacttttttttacatttttagagactaattttcttttacaaaaacataatatattataaatgtaacaacaatattaaaaacaatataattataaaaatagcacaaaaataactgtatatatttttgtaaaaaaaaaaaaatccgtaaaaatattaaaaaatactgtaaatttatatttatatatttttttttaaaactctttgttttttagggcaattaagaaaaaatctccacttttttcagttcatttgaaaaaaaatacaaaatatatatgatgcaattaatatatttatttatatgtacactcttctctagctaggtacttgtggatagggttggcacctacaacttgtgttataaataatattaaagttttgtttgtttttttaaatatataaatatatattatataggaactatttatttatgagaaagtgatttttttttctttgaaaaataaacaattttttttttatttcttcttttatggtaaattatccaaccataccctggctgtcattggtttgtgatattttttttttttactattttagaagaggtgaactgtaattgtttagtattaattggtaattaatgtaattaaagtaatttctttagtatgtaaatatcctcataaatattaaacaaggaaatcattctatatataatccttactactacacacactcaagtcatataatattattcatgttaattttttttccttattaaaaatttacaattagatgctatgttatttttattttgaacaataaattattataagggtagatttttttatttattttttaattaatagacaaactttatactaaatatctaaatgaaatgatttttttagattaatagatatatgattattaaaaaatttagttggaaattaaatgatacgaggtgttattatcatatatattcaaatgatttgtttgaataaaaatagaaaattaattattggaatattgaaaatgatctctatttttaaggaagaatatatactccttataatttccattttcaatttattatattttatattaatttactcaatcatttcctccacatcaatcctcatcacgtggttaattaatttattaaaaaagaaaaataaatatctaaaaatagaatcaaaatacctatttttaaaatcccaaatttccaatctaaaattttataaaaattctaaaaataagtagtaaatattataccaaccataagaatagcaattttttagaatctttccaacagaatctttcccacgtttgaaattgaaaatttagtcttatcttttcaatttcaagataccattttttattttcattattattattattattttaaattcattaataaaaaataatataaggtccccacaatatcccataatttatttgtttcttcattttcaaccacaataaagttacacaaaagaatccctataacaagtgtttcccttcttcacactcactcataaatgatacaataaatatattcacactaataatatattatttaaaataaaaacatatatatatatattaaaaaataattataataattatattctatttttatatatatataataatttagtgcaccttagctgtattccccctaaaacctgataaattccatgaaaacctcatcaccataacttaaattctcaaaaaccaattaattatatatatttgaaaaaaaaaatgtaacagtctatattcatatatataattaagaatctgtacagaaatacatataaaattcactaaaatccaaaaaaaaaaatatatatattaactttaactgaagggctaatatagtttcattgaccaatataattatacagaaaaaaaaaaataaaaatgaatttttattttgtttttattttcagtcattaaatacatgaatatgacactctgtaatttgtaactgttgcgtactaagaaaaaaaaaaaaaccattagagctgtcttccttcttcaattttctctctcatttatatatagccatatatatacaaacatgacacctgtatagatctatatatataaacatactacacaacattttgtttaaggagaggagaaaagggatcaatttctcagaatctgagaaaaagatgacaggttacgtcgatgaagaatcagcgacaaagtctcattctcacatcgacgtaactggtatgtatgcatatacatatagacacatatattatatgtgtctatgtatatgcagcacattttgtttttgtgtcaagcaaaaagtgtcacaaaaaggtgttgtaatttaacatgtcgggttttgcaggtgtagaagatgaaggaatagaagaaagcccaattgaacaagttaggcttacagtttcaactgatgatgatccttctttacctgctttgacattcagaacatggtttcttggcatattatcatgtgttcttcttgcttttgttaatcaatttttcgggtatcgtcagaatcagctctatgtttcatctgtttctgctcagattcttgttttgccaattggcaagttaatggctgcaactctaccgaaaaaggcggtgtctttaccgttcaccggttggacattttcgcttaatcccgggccatttaatcttaaggagcatgtgcttattactatctttgctaattctggtgctaatggtgtttatgctgttagtattattacaattgtcaaggctttttatagaaggagtcttcatcctcttgctgcttttcttctctcccaaacaactcaggtaatgaaaattttgacatttgaaggtctaatttgaaatggggttttgtcaaaatttgattttgataatttgggtttgtgtttttagatgcttggttatggttgggctggtttgtttagaagatatcttgttgattctccatacatgtggtggcctgcaaaccttgtccaagtctctctttttaggtacattattctcttttattttgtcaattttcaattttccaaatttagtttcaataggcgattaagacaaagaaattgctagagtttcgagtaatttgacccattttcgagatatgaaaaggagtcttcgagaaaactagtcttttctgaattacacaaagattattgatattgattgtacttttgtttgttttgaacaaaaagggcattgcatgaaaaggaaaagaggcctaaaggaggacacacaaggctacaattcttcttcttggttttcatatcaagttttgcatattacacaattccagcctatcttttcccttcaatagcttacatctcctttgtttgtttgatatggaagaattctgtaaccgcgcaacagattggttcggggatcaaagggctcggtgttggctcgttcggccttgattggtcgacggttgcagggtttcttggaagccctttagccacaccgggtttcgccatcattaacatcttagttggatttttcttgtttgtttatgttgttaatcccattgcttattggtctaattggtatgaagcaaagaggttcccaatcttttcatctcatacatttgactcaactggtcaacctttcaacatttcaagaattttgaatgagaagaatttcaccattgatcttgattcttacaacagttatagcaaactctatttgagtgtgttctttgcactaagttatggcttgagttttgctactttaatggctacaatctcacatgttgctctcttccatggaaagtaagtagtaacaagttacaagttagttactttcttttgttgtcaaaaatgtcatttttctaattttgtatttttctaaaacagaacaatttggacaatgtggagtaaaaccaaagctgagaaatctaaaaaagctactgatattcattcaagattgatgcagaactatgctgctgtaccagattggtggttctattcaattttgattagtacatttgctctttcaatttttgcttgtgaaggttttggtaaacaacttcaactaccttggtggggtcttttaatggcttgtggtattgcttttttcttcactttaccaattgggattattcaagccacaacaaacatggtaagtaaaaatccaaacaccccaattttctaaaccaaacatgggattttgactttttgactttgactttgaatttgtagcaaccagggcttaatgtcattacagagttaatcattggttacatttaccctggaaaacctttagccaatgtggcctttaaaacctatggctatataagtatgacacaagctcttatgttccttggtgatttcaaattagggcattacatgaaaatcccaccaaaatccatgttccttgttcaggtaaaagtataagataagtataagttttgacttatttttcgcgtttagttatgacacgaactaaaatttaaaatctttttcagctagttgggacggtgataggctcgagtgtctactttgccacggcatggtggttactctcaaccgtcgatcacatttgcgatacaaattttttacccgaagggagtccttggacatgtcccggtgatgatgttttctacagcgcctcaatcatttggggcgttgtaggacccttaagaatgttcaccaaacaaggggtttaccccgaaatgaattggttttttctcattgggttactagcgcccgtcccagtgtggctcttatcgagaaaatacccgaacaagaagtggattcttctcatcaacatgccaatcatactcggggcaacggggtctatgccaccggcccgagctgcaaactacataacatggggagctgttgggattttcttcaatttctatatctacaaaaggtataaaggttggtgggcaagacataactatatcttatcagctgcacttgatgctggggttgcttttatgggaatacttctttacttttcacttcaaacctatgatgtttttggcccaagttggtggggtttggagtctgatgatcattgtcctttggctaagtgtccaactgctcctggtgttgttgtagatggttgtcctgttttctgatctcaattactacttcaatcattaaattgtgtgtgtgttttttttattctttttaagtttgttcagttttttttttttttttaagttatttattgttattttatggttgttaatggtgtttaagatgattgtgtaatgaagatgtgcatttgtttagtgtttgtttttttgcacatagtattgaagcttaaacttaattaaatatcatatgaaaacaatagattattggttttaatt

SEQ ID NO: 91183 - DNA, 678 bp, Cannabis sativa
ttgttccctctccttcttgctctttttgtggttgttctctagaaactgtaactcatgcacttttaaattgttccagggtgagacaggtttggaaactttcttccctataccatttttatctcttacatagaaacactgatattaaagattttatgttatctgcttatactgaactgaaagctgatgatttttctttgttaatgtgtactctctggtctatttgggaatttagaaataaaaaacttttcaggaatgctaaccctgatgcagggaatttgattcaatggactactgcttacttatctcaatacagggaagcacaggtcaagaacattcgtgttgattcagctagccaagtgcgtgcctctgttttggctccccaagcaagggaaggatcttaccagttatacacagatgcagctattcaagataggaatggtaagattgggcttggtgcagtagttaaagactggaagggccaggttgtagctggagtctcggtgcctctttcagctaagattgctcctgttatggctgaagctatggccctaaggctgggtttaaaatggtgctgcaatgtaaggtttccactctctatcattctcacagattgccagcaactggtcaataaggtttatagtcataagagagagctttctgctctggcggatgtcattt

SEQ ID NO: 91184 - DNA, 796 bp, Cannabis sativa
cataaattgtgtaccccgccgactcagtgacttccttcttatttaacttagccttcattttaaccatgtctttctgaatagaatacataagccttcattttagccttcattttaaccctagcttgtaaacttccttggcaatctcacagttcgagaattgggcattaagatgttccatcttcacattccaagatttgttgaaataaaggttcaacaactggtcgtttcccaagtgagcattttctcctcaatggatggtccttgcgtgaaattcaacctggttatgagagctaactcaaccatgccaaatcttgcctcgtttcttccaatgtaaaaccatactgggttcccttcattatttcaattaatccttcacattttttaaacttttggacgattgaagtgaatttccactccctctatatctcacacgacctgaaaagtgggctgaagtgggaataataagctctggagccatctgtaaaagataaacaatacaataattaaaaaaaaaacgtaagagaaaacatgataataaatactaaatcctatcaagaacctgccgagaacccatcaataattagtaaatactgaccaaacatgacaactaaaagactaattaatactatcgagaacctatcaacagtatatcaataatcaagcatacataaattaaaataaattaacattagtttcctataacctttgaacaactgcaatcaatacttatagagaacctgtcgagaacccatcgataatcagtaaacgtagggccaaacatgacaactaaaagact

SEQ ID NO: 91185 - DNA, 1063 bp, Cannabis sativa
tatttgattctcaatttaatgagtgataattaagatttttttattttttatttcaaccttttagttaattttttaatagtatttgtcataattacagtattatttttacaagtttttaaatttttttaaataatttacaatattaaaaacaaagtatattccagtttactagtgagttcaaaaaacttcaaaagtatttttagctttataaactatttgaaattttttagaaatttatagggatgattttgtaaacataacaaataccgccatgaaaaaaaaaatatttcgacatgtgttttcgggcacagaggttgactaagaggttataataggatgttgacattagcactcctcaattctcaatcttgaaaatcggcagggaaaatataagttcgtcgtaagtccgtttatctctattctgttagggtaagtagcgagacaggtgtacgccatgatttaatctaagacttgttttttaattcattgtaaaatctaaaactaataactaaaataaatttaaaaactacaactactaaataaaaataaaattaattaaattgtttgagagttaaaacaagaaaaaatgtaaatttaaaggtgagaaaagattaactcgaaaactttttctctcaggcacccaaattcctaaaattgcatctacctaaatccttgaagacgaagatcgtttaggtaccaaaaataagtgtcgattttgtccatatcgtcccctttgtcctaattcttaagataaattcttaaagcttgaagagatagacggtagaagtgcccataaatcaatcgaacaatggaggaggacaacgatggagatacaatcccatttttttttccttgatttttcacagtttacttgtaatttgaatgaatgaaaatggtgtttactatctctttttctttcctctgaaaatagtatttactcttttttttcaaattggagcattgccacatggtgataattatggtttttaaattcttggtcttctctctatatgcgttatcacatgcctgatccaaaaatatctataatcatcagaaatcaaaa

SEQ ID NO: 91186 - DNA, 716 bp, Cannabis sativa
gtgccaattcttttgataaaaaccataaatgaaactgtccacccccaggcttttagacgtatccatttgaaaatgaactttgtcacaaaaaatttacgagtgaaacgttaaattcatttccaaaaaaatctttaaaggaataccgatgctaacacccttgcaaagggatcctcttagggatgatctgaagtaaataaagtagaaaaataatgcacaaccacctcaccaatattggtttgactcgaaaactctttacttgccccattcaaaattttagatacaatttgctcgtctaccaaaagtacagtacttgcaaaagtagatagaattttgatctccgaacttaagccaatcattcttagctcgagaagctctataaagcatatgaagttcttttttaatcttgcatagatcctcacaactaatatttttaataaatttttttatttatcatagaacatatgggattttatttttgaatataagtatggtagaaaaataaaataaaataaataattattttagtaattaagattttttctccttaagtataacaaaaattaaatttaataaaaatatcgttttgtttagctaaccataaataattaaaattagatagctcccaagatggaggttttggtgtaagaacatagttcaaacaagaaataaaagttattaagacaaaaagtggtgatgacataataattcatatatat

SEQ ID NO: 91187 - DNA, 562 bp, Cannabis sativa
atccaattgtgggatcaaattgaaaaaggcgaaaaaataaaaatcttgccaaggaatgatcatattttcactgcacacacttatgtctaacaagtgaatacaagtgtataagtctcctctgcttaaataaaaataaaaattatcctaattcatattatttgtaacttgtctattttctctcaacatttattaagtgtgattggtatttgagatactaattaattatcctattttgaaagcataacatgtgtatttgtctctttttatgaaatttgattagttgcttgctctagaataacttattttatttttgtttattcgaatttttacaaaaaaaaggggagggaggcgcttgtgacttgacttgtgggctaaggaaatttagtcagtgttttgtttggtaagtatcaatattttttctgatttgtttattatgatgagttttcttttaacgtttgatatcttattcaatgtattttgattatttattgatcttgaatgattttttttttttatcttaattggcctattttctgtaagaatctttgtttattcttatttc

SEQ ID NO: 91188 - DNA, 831 bp, Cannabis sativa
ttaaactcaagaaaataagaaaacaaaataaaacaaagccaacttggtaaaaaaaaaactcctgcatggtttgtaggcacccatgtttgcatagggttgtggcatccactgagtccacaggcaatggaaaaacgtggcttgcaggccacaaagatttgtttgggttaaaaaacaaatttaaactcaagaaaacaagaaaacaaaacaaaacaaagctaaacttggtcaaaaaaaatctgttgcatggtctgtaggtgcccatgtatacatagggtcgtggcatcgaccaagtccacaagaaacggtctattgtcgcttgcatggtcacataggatttgtatgcatgaaaaccaaaatttaagctcaagaaagcaagtaaaaaaataaagtaaagccaaatatggccagaaaaaatcttctgcatggtctataggcgcccatgtatgcatagcgttgtggcatccactgagtccacaagtaacggaaaatcgtggcttgcatggccacaaaggatttgtttggatgaaatccaaaattttaactcaagaaaacaagaaaagaaaacaaaacaaagccaaacttggtaaagaaatcttctgcatggtttgtaggcgcccatgtgtgcataaggtcatggcattgaccgagtccacaagcaacaaaaaattgtggcttgcatggccacataggatttttttgggtgaaaacaaaaagttaaactcaagaaaacaaaactaaacaaagcaaaacatggtcaaaaaatatcttttgcatggaccgttggcgcccatatgtgcatagggtcgaggcatccaccgagtccacaagcaa

SEQ ID NO: 91189 - DNA, 2771 bp, Cannabis sativa
acgtttgatttgtgattatttgtggtctctctattttatttatacatattgatactggtgatgagatattttatttttgcaaagctaaccacgcaggtttttttattaaaccaagggtcctttgacattagttgttttcctactgggctttataagctcaccccatattgtctctcattccaggaatttagtttgatgctagtggatgaggatggtaccgttgagaaagaaagtcgttatgagtttagtcttaatctactctctaatcttccaatgaaacaaatttcatatttaagctaaaatagatggtctgaatgacttaaattagctatgtactagttagaaatgataaatgatggatgctagatattattttggtattttattgacttattaatctatctattcggtgataactgtgggaatattattgtttatttatattgatgagtggtcctgattttgttactaataatttcttattaatataagagttaatcaattacttttaaattagtattttgtaatataaataataggatcatttataacctttatcttcctacaagggtcaaagtgtgacctttgaccacccaagttatggatattacatatctgccacggcctagagctcgggtcgtgacattagtagaatgaaatgagttgcatacattgaaagtttaaaagaaaatgtttaaaaatcattcaagaaggttgaagctacggtgcatgaattaatgatttagaaattgcttgattttagtttgtgcgctgaagagcaacatatttttaagaaacgttgcttttatatttttgtaaactttttctggttaattttacatgtatcttgcatgagatattgaacattataattttattttaatttatttataacttttagtacagtgagaaataacttttattatatttttagaaaaaaagacaatagttgttaataggttttttaactgttaataactatttagcaacaatataaaaacataaaaaaaataattgattaacaattaataattatagattcttcaatatttatcttcttcaagggtttatttttggtttttttttcttgttgttttacggttgattctgttttcaaagtgttagtatcaaccaaaataatatcttttaaaactgatcccctccttggagcagataaaagttgtttagttgttattgttgtgttgttgtcaagttgttgcacaattgagtgacatgagttatgttcacttccagctactatcatattattacatactattgcttaggtagctaccaaaaaagaatgttattctgttgttactgtgtagttgaatgtgtatcacacacaatgaatatcgtgtgaaatcagttttctttgttaataactttatgtaaaatagcaaattttttattatccttgatttagagtggttggtaaccttccttcatttgtatttcagttgttttgagttgtttcaggattgtagctagttcctgtaatattatttgcactaattctcttattattaattcttcacttgatttataattattatagtgcttgtcgtcatctcaatgactattgaaacaatattagtaccactatttatcattacagtaaacaaaatgtaaataaataagtgagaataaatctgtaatcacaaaataaataagaatatatctcattcttatgaatatagtcaaacatcattatcaataaataaaaaaaaaaaaaacaaagaacaaagattaataaagagtcttcacaatagccatataacaatataagtagcaatagaaaaaactaatggatcataacaagagaattcttagataacaagagaacaagaatcacagtaaaaacaaagacaacaagaaaattagaaatcgtaaattattagacacaaataatcattcacaaactaataaccatcattatcacatattatcattcatcaaattacatataataatcactaataacctactaagttatctaatcggcttgcgactaaaattgatggattggtgcgtgatttttggtggggctctgataagggaaaccatggtctgtacctaaaagcctgggataaactttgcctccccaagtctttaggaggtttaggattccggaaatctaaagaaatgaaccaggctttcctcgctaaatgggggtggaacctcctaacaggcaaccgatctttatgctgtcgtattcttgaagccaaatacctgaagggtaagtcttttctagattgtgatccgaaggcttcaaactcgtggttttggaaaaatgtgactaagtccagaactatcatttgtaagggtgcatgtaaacgtgtggctgatggtcaggagacgaacatatggtctgacccttggattgcgcacctaaagggatttactcccactccaaatgggcggattatgactagggagtccaaggttgctgagttacttcagactaatggcggatggaacatctaaaaacttaatagttacttcgatcaggaaactgtctctgctatcctgaaagggggtagcctaaccggcacaggcaaggatatctggttgtggactttggaaagtaacggccgttactcctgcaaatcagcctatagagccctggctgaggatagagtgagtccaggcaaggtggccccctctttgtggaataagctgtggaatagtaaaatccctgatagactcaagtttctttggtggtgtattctatccaaagctcttccaattcgctcggtaataggtaggag

SEQ ID NO: 91190 - DNA, 591 bp, Cannabis sativa
aaaatagattacattgaaatggagttttctttagggcataaaacccaacataaatatgtccatagctaaaatatatcaagctcctcatcaccttcatgcttcttagacgattctctcccacctagagttgttcgttattgggtttttatttcttttatagagtgattctaaaagtgttgtgatttctatctattctttttttttagtgtgtttcgagtgggattgttgttagatttttaagttattattatctgtcttttcaagtgtatgtcttcaacatgtgatgcaaaataataatacgcaccacatggtgaatataatatgcactacaaataaaaaaataagatttcttggttggaaaaaattcattcttgtttaatgatcaatatattgtttgactctgaaggttggttcagtatgggctatattgcccatgatagtgctggcattatctcataagctttaaataaaggcattatcggtcgggtccaaccgaaggttgcagagattgttggtatcaaggagactcttagttggattgatcgtcataagtgggctgatgtgatcttggaaatagatagtttagtttgt

SEQ ID NO: 91191 - DNA, 952 bp, Cannabis sativa
atgttagatgtgaattacaagtacatgaaatggttaatgtatcagcctgaagttataagtaatgataagtgtctaagtttatatttgtcaatgctttagccaggcaaatttgttcccctttttgtcattttggtgaaaaagaatgtctgtatcgatcctaatcctccaccaagtattactaaagatactcgtagtgaggttgggacttatgttccaaaaacaaatctattggtagccgatgtgttacctaaattaaatactatggtgccgacagtcaatattgtagcataaatgcctttttatgatgagtttggtgatggtctaaatcctgaaggttcttttgatggcaacgatgatgtaagaaacaaccaagagatcgatagaggtcatcgttaactcaatggtgaaagtataatgtagatccaatttaaatttgtgcacaacttttttgtaacaacctactagtttaggcgtgttaacgtaatttttaacttaactgtgcagctcgttgctaatcaacaaatttattgaaaattgtgaataattaaaactttatttaactatttataattatcaaaataacatacttatattaaattgagatctcgttttacaaaacatttacaaacatttcacagtgcatattacaaaagtttatcgcctagcgactatacaaaataagctcagctatcccaaagactgtacgctccagacctaaccgccccaacatgtacaatcttcatatgctcgctctcacgactgctcgaccttagccttgcccttacctacacatgcaaacaatatctttgagtcaacatactcaggaagaaaagtataaaaaataacatagcaataacccggattacaatcaggcacctatacacccaaccataaccctatccctgtgtctgacacggtactgagtctagaacgttcgtatgacagtactact

SEQ ID NO: 91192 - DNA, 608 bp, Cannabis sativa
aacgatataataatataattcctcaattattcataatcatctaattaaggttttgctaatccatttcttaaatccacggtattacgattaccccctccttatagaaattttgtcccaaaatttacctgaacaactccggatatttctgctgcatatccgtctcaagttcccaggttgcctctttcactttactatttctctacaatactttcaccagtgcaactgtcttactgcttaagactttttcctcttctatcaagtatctgcaccgattgttcctcatatgacaagtctggctgaagttccaatgcttcataacttagaatatgggacgagtctgagacatattttcgaagccttgctacatggaatatatcatgtacaactgtcaacgctgggggcatagccaacctgtacgctactttccctatcctctcaaggttttcaaaaggtccaatgaacctcgagctaagctttcctttcttaccaaagcgtttaatgcctttcatcggtgatattttcagaagaaccttgtccccgatttaaaaatcaatatcccgacgctttggatcagcataacttttctgtctactctgagccgcgagcat

SEQ ID NO: 91193 - DNA, 563 bp, Cannabis sativa
gaaattgtaatgaatgactttcttcattaataaagcatctctttcattcaaaaaaaaaaaaaaaaattgaaattgaaaaactttaataacttttattttaattataaacacatatttttaaacaaatgatacaatagatttacctgccatatcttccttagtttttacattttcattgcttttttaagtgttaactgacccattcattaaaaggctatgccttacgaatcacattaccagtctacatgccattgtctgaattattgggaaaaaaaaaactctctcagccgttttggcatcgaaagtctcgagaaaaatagggtattagaataacagaattgaagttttttttttcttggaagaaaacagcattgaagttatacctttgattttaaagcgaattacgaataagaatttttaacaaacaggatcaaaaatgattactatttcgatacaagaaagaagttacaatttattttgttgcttaccaggaccaccaccaccctacatgtcaaatatgatattacagactagaaatcaacctttttcactttactatttca

SEQ ID NO: 91194 - DNA, 593 bp, Cannabis sativa
tctaaaccctgatatcagaacacttctgctgcaaaataaaattgctgagctcttgctatagcaactaggtagcattcttccaccccaaacttaattcctttcacccatcttgaaatttcatcactccattgccttcttcacttgattttctgcaaaaagaaaggaaacactttcttaatttcaccatgacatttatttaaactaattatatactatatatgtatatttttatttcttgtttttttttactcttttttttttcttgcttttctttcttggggtgcctatattgaattattttgttttcttctcttttttttctttttcttttggcacccccaaattaaaaatctcaagcatccctcaagcagatagaggtattttcttgggtgacctctccacccccaaacttcactccttggcctttcactaagaattttcttcttgaaaatgcaacacgaagttccaccaccccatctgagtatactctcaccaccaagaaagatccatcacaccttgaatctagtcgtccatgagtagccttcgttaaagagtttgaaaaaatcacatgttgcccaactttgaacatttga

SEQ ID NO: 91195 - DNA, 1340 bp, Cannabis sativa
agtcacaccttctcctgcagtggttatcgaggatgcgctccatcacgttggtcgccaactgggaccttctcatggcagtgttcttcttgtcctacttgaggtccaggaatgcccgcgttcccttcaagtagttgaggtttgtgattgtagtatcccaaaaaatattatgatatttaattaggcatattttattaaatatgtaaattatttctgtaatgaggtaagataatgatcttactagggttgattggtgtgactttagtaaatgattaattatagcgtaatttattaattacagagatttttagaatgtgtgggtatcgtgaataccatttctagaataaaatattttcgggcccggcgaccgtggaaactggacaaagtgatcagaaatgtcacgataattaaagttgtattgtagtggaattattccggaatggtttagaattttaaattgttggtttggcggggttagctagaaaatgaccaaaatacccctaggattgatttaaggtttaagggttataaggagggtaaattagtcattttggtgtttaatattaactttgttttatttgaaattaatggctggatttgggattttaataattttaattttttttttcttttatcttattaagctttataaaactaaacctaataatggataacctaggatacagctaaaaaaaattctttctctttctttccttctgtcgagccctagaagaagctgaaaaccaaggaaaatctcatctcacttcatcaattcttgatcaaatctttaaacctaggagctagccaagtttaggttttggtaagggttttaaggatttcagggctagagtaaaaactgaagttagaattggttcttagggtcaaattgaagcttgtttaattttaatttggttagagataggggttgtttggtttgatttgagttagaagtggtaaattgaggttaacttttatttgagaatgcaattttgagtaattgatgagttgaggtgaattggtgatttggtgatttggatatattttatttgttatattgaactgttctatgagagtatagcaagtttggtggaggttggattggatttcagggtgaaaaactaggtttcccatggctgcccagaaaaccagtcgactggttttccaggtaactggcaaatcggtcaactggttttgctagtagggggaaatctcgagttttctcctcgagtctgattttggttttgggtatcttccgaagtgtaattcagagtattttagggatatttaagttagtttgatccaggggaaatagggttgtgcggttatgagaattagggtttatc

SEQ ID NO: 91196 - DNA, 579 bp, Cannabis sativa
tattgctgctaatattcatattaacaatcacagaaagagagagatcacttgttggctgaagttgagagtcttgctgccaattccgatggacaagcgcataataaagctcacgattctcatacacaaaaactaaaatctctagaagcccaggtaaccaatatcaactatgtttaaatgttattatgaatgaaaaaattgcagtgttgattgaaactcgagtaattgtgttgtatcagattttggatcttaagaagaagcaagaaagccaagtccaacttgttaaggaaaaacagaaaagtgacgatgcagcaaagcggctgcaatccgaaatacaatctattaaatctcagaaggttagttcgtgaaattgtaaaactgtttgatgagaatagtaatctgctttatcagaaaccaaacctgataggtcataatatatgaacagaagtaaaaaacgaaaagtaaagtcacacgttgtttttttacatttcaagtcatatacaatgaaaggttccgagtcttatacaacgaaatccgccttgacttgttggtcattgatttgtaggttcaattgcagcataa

SEQ ID NO: 91197 - DNA, 914 bp, Cannabis sativa
  modified_base (31)..(34): a, c, t, g, unknown or other
  modified_base (313)..(313): a, c, t, g, unknown or other
  modified_base (515)..(518): a, c, t, g, unknown or other
  modified_base (722)..(722): a, c, t, g, unknown or other
cctttttgttgatgacattttgattattggnnnnactatcaagaaaatgactaacatcaaggaatggcttgacactcaattcgaaatgaaggatttgggtcaagcttctgatgttcttggtattcaaattatcaaaaatcggaagaaagatcccttgctctctctctctctctctcaaacaacttacattgtaaggcgttagagagattctcaatgacaaatatcaaaggggcagtgatgccttctagacctggtatccgtctatctaaggagcagtctcctactaatccttaagagatagaggacatgagangggttccttatgcttcagcagttggaagtctaatgtatgcaatgttatgcactagacctagcatttgctatgcagtaggaattatgagtaggtatcagacaaatctaggagaggaacattggactacagttaagcatattctgaagtacttgaagagtacaaggcattatgtgttagtctacaagggtggtgcttaaaatcnnnnaggctataccgactcaaatttctaggcttatcttgatgacagaaagtctaaatctgcgatggtgtttactcttggggtggagcaattgtttggagaagtgctaaacaaaccgaaacttcagactctaccatggaagccgagtacatagctttcgccgaggctactaaggaacttgtctggcttagaaagttcttctcaggactnggtgttgttcctggaatggaaaaatcactggttttactttgtgataacactagagccatatccaacaatatagagcctcaaagccacaagagcagcaaacacacagagaggaaatgtcacatcatcagagaatatgtggcaagagcggatgtactggtggagaaagtggatactgaagacaacttaactgat

SEQ ID NO: 91198 - DNA, 1602 bp, Cannabis sativa
acaaaatagaaaaccatattaaagcataccagccgaaaatatacaatgaataataaaatatttttgtcaattaaatatgccaaaaatagaattaataatattcatccatagagaagtagaatctacgatatattgtactacggtcagatgtagaataatatgtatgttaaatgagtttgaatttcttaaatgttcatctgtagtgaagtaggttctgcgaatacatatacttcggtcaggtaagtagtaaatttttgtattgctaaatgttgttgctattattttatattttggattgtgttttgttattattaatagatttaaatttttggggaacattcaattataatggttatgctgctaaaattttagtaaaattaggactaaaaactagttagtatttagtatactatacttagttactatttattaatttcataatcctcaaggtgtttgacgcgtaagtttcacaaaatatattgaaataatattttaaaacacataaagataaataaaatatcacataaaattcaaaataccaaaaatttattattaaaatataattatgtttctagaactagattctattattctatgacacacttcacttataaaactcaaattaaaatattaataagaaatgcaatgattactagaaatcatctaagtcatcgttacttattttatcttgttttgaattattttttattgttaatagctttattttttgaaaatgttcaattataatcgttatgtttgtcaaattttaataaaataggataaaattattgatataagtttctcttaaacttagttaagatttttttgttaattttcgttataaataaatcatcgtgaggagcgccggttattatatagttagtaatttagagtaaaattagttactaattagttacaaattatatttagtatactatagttagttactgacaagtaatttagtaggttttgtgatacattgtaccgcggtcggatcgatcgatgagtggaataatatgcatattagatgagtttgaatatcttaaatatttatccgtagtgaagtaggttatgtgaatacatgtagttagttgggtggtaaatacaatcccataatacaattatatatttcaacatacaccctgtgtacagatgtccactcttcttacctcaaattatcgtttccatttgatcaccactcgaagagtataatcgtgttcctattacaaaatgtatgacaaaataataagtggctaaagtctacgcacataatacgttcttaatattctatgcatccaaataattcatgagacttatatcctttcaaatatatttttagattaatttctactataaaataatatcacataacgtgatcaaagcatgcaaaaatattttcaatatatacatatattatgcatgtgttatagtgtgcgaccccacctagttttcattctcccacttatagaattttatataaccaatctcaccattataagcttgggcgacacctctaacagtaaatacgaagcatgattccaagtttccaacaatatagtaaggagatctaaatctaacaacaaatcaacttcaataagaata

SEQ ID NO: 91199 - DNA, 1027 bp, Cannabis sativa
  modified_base (27)..(42): a, c, t, g, unknown or other
aggatgttaatgaaacatacatggtannnnnnnnnnnnnnnngtaaaatatttctaacaataatattaaagttccataagcacgtaaataaattaatttcactattttacccttcttagtctaaaattactaaaatacccctggctcaccaacggggtcttaacatagcataaatcatataaattctcgtatattaaattatataataatataattcctcaataatgcacatttaactagttagggtttgctaatccatttatttaaatctcagggtattacaatactgaaacataaattcacattgtggcaagctttacgctcacatcttctcactagagaccaccttgctagtaggaatatttctattgattcagacttctaccctgtttgtgaaacttccgaggaaaaccatgggcacttgttctttgattgtgttttctctacaagggtgattagctgagtagagcaatagctaagtttgaacttttgacaagagtcacagagagctcgctctatttcaacagagttgaagtatgtagccttagctggtgtggtttatagcatttgaattagaaagaacctttgtatttttgaacggaagtgtttgccaataaattgtatagataaaataattagagtgtcaaagttcatttatcatttgcaaatagagggaataattctaaaattgaaaaactgactaagatgtatataattcaactttagtttctttaggcccaaattttatatttttagcttgaaaaggaaaattaaacaaaagaaaaaaaaaaaagaaattcaattttttttttcaaaaatacggaccgaacagtccgcatcttcttcctccttaattccaagccacaccaaagcattctctcctccatttttcttctcaattgaagcgcgattttaactccaaaaaaaaacgtcaaagttgtgtaataacaaggtcacaaagtagatctcaacaacaaaatgattaacctagacaaatccaaaaataaaaaggtaaaccagaaaaaaa

SEQ ID NO: 91200 - DNA, 525 bp, Cannabis sativa
ggatagggttattaagaccagatccatggatgcagtgccagatccatggatgcagtgcttggagtaaaggaattagagatagcagaggaggatttacaggatgaacagattgagcaatcaatggaacagtgttctgaggcaatggaacagtgttctgctgggaagatttactcgcctgaagagacgaaagccctatttcagaggcggagtgaaatcagacacgatttctcagattggttacaggtagctaatagaacaactcaggatgtcaactcagggaagaagatttctcccccgattctgcgttctggtattgttcgaaatctcaacactagttttgctaactctgttcagcaacctgaggtaagacctgcaacttcaaaagttaaaatacattttgctgatatagaggatgaggtgaattactagcaaccgtctctggtttgttatgtaattggggctaatcccccaatttctattcttgagggctttgctaagtgactgtggaaggatatggtagtgaag

SEQ ID NO: 91201 - DNA, 755 bp, Cannabis sativa
cgagaatgccttccaagctttaaaacaaaaattattccagcctcctgtcctttcaaaacccctagacggtgaagggttaagcatatacttggcagtcacagaacatgcggttagtgcaatcttagtaagggaggaggatagagtacaacacccagtctactatgtaagcaaaaggctaaaaaatgtcgttatgttcctcgattgcataaatgtgggccccccttttttttccagggatttttgtttcttattgagggacttggcaagctttagacttcgttgcctagatggactacgtcttctgggacttcgacccctagaattctttgttttcgggctttgagaatgcaatcttggtactggagactcacattttccccttcctctttcgaactctgccaaagaattctcaattctcttatgcggttccgccatggcgaataattccacgaatgactcgagttgtcgcgcctgcaattctttccaaaagtcaattcttggtaggacacctgtgatcaatatacaaaccaacgaagactcaggggctttctcaacctttattatttcagcattaaaacgcttaaaataatcctgtatagactcaccgacttcctatttgatattggctaatgtcgtatacggcagtttgtacgtcatcgtggcctagaaatgcattaggagcaggtctacaaaggtctttcaagttgatattgatgcctcaggtaattggctaaactaatcatgagcattatcct

SEQ ID NO: 91202 - DNA, 779 bp, Cannabis sativa
  modified_base (272)..(272): a, c, t, g, unknown or other
aaagtagtattctgtttatgcattgtatttaactttctatataaatacaatcattctttagagttgagtaacagtttttactcaagctcactttccctcaaataagtttcttggtatcagacccatatcccttatatcccttgccggcaagtgattttctccgagtcgcacctatacagatagtgaccatgtccactctgatacggttcaagattgatgagcaaaaaataaccatcttcttgaggggtatattgtggacattgtcccacatngaataaatggtagagaattgagcataattgttaaccgtatttaattataatatgtaataaaatatagtccctaagaatatattttcaaccaaagagatatcctggtaaccaatttagtgtgaacaataaaacgtggttagatgattaattttcaccataaaaatgaagtcgtaatctttatgtacgtgtaacttaccagtggttacttgagaagtttgagcaaagaaagcagcgagctccctcttacgagttgagacgtctccagtagtagcaaagccaggaaaggattgagtggcagtgatgaaagcctcgtagctatagaagccctggctttgacaatcacttctatgtttaaacatttcgttgtagagtgatttggtgactattttggttacagaattatcacgagggagaccagtaccagtcgtcggtgctgctgcgaaccagcactggtatcggcagtttccgcctctgcagtaactagatccgctaccacaaaagttatgg

SEQ ID NO: 91203 - DNA, 535 bp, Cannabis sativa
ttgggtgaattctggagcaacacttagtattatgttatttttattttatttaatattagtattttttttattgttattttgtattttcaaatatgtgttagtgttttaaattaattttgtaatgaattttaatttgtggactaattaaaatggtaagattatttttaaaataaaataaaataagggttagaatgtaaaaaaaaaaaaaaaatacatcaaattggtatagatttaaaatccaacatttataatagtgtagaatttgatgtataatttggtgtgttattgaagtaaaatagtgtgaagattccacactaatttaataaaatagtacactattgaagatgcttaagtcatttggtggcatattcaatttatataactttcaattgaaggatgcatccccacaaaatggaaaaaaaaaaactagtttttgtctttttataattttttttatattttttttaatttgtttcataatttttttctcacaattttttttttacaacaatttatgtgagtttttttttttttt

SEQ ID NO: 91204 - DNA, 508 bp, Cannabis sativa
agtttctaagaatttcaactttgaagtggttacaagtcatgcttgcttatttgtaattttttccttctgattgtctccaacctggtttgatattggtaaattttatagtttggtagtaatagaggaaataagttccgatttgctgtaaagagaactataggtccattgggagatagaattatgaacaatgaagactttgctaatctcaggggttgtagtatatcatcaagtgatagtgaggtatctaattgttttgtctaatgttgctaacatcgaggtatctaattgttttgatcaatgtttttgtacttttttcatgttaaaataattgtcaattttatcttaccagtattcttccacagataactggtaaggacatagagctagccattcctcatatgaaaaggcaagctatggtagatcaattttaggaagcattgggttacactatattgaatgattggctttacacactgggcctaaaccaccaaggtaaatgatgtaacta

SEQ ID NO: 91205 - DNA, 688 bp, Cannabis sativa
tatttcatccttatttagatttttttgttttctcaccctttgacctctcctaggttcagtgggttgttctacaactttagtagtgttctcctcttgagatcctcttttagaagtagaaacttgagaactattttcatataaaatattcccacctagtggtgtggaactttgagagttgtcctcatacaacttattctcaaaaattcttcttctctaaatttaatcacaacattggattccacatccaatagcttatatgccttactattgttggcataaccaacaaatgcacattttatggcccttgaacccaacttggttctatttggttcggtcttcttacaataagcaagacacccccacactttgaagtaaccaatatttggttttcttcctctccataactcattcggagacatgtcattttctttcatatgtattctattaagaatatgacatgcggttaaaagtcctccccccataaattattgttcaacttggagtacactatcaaagaattgaccatttcaagaaatattctattctttctttcggctacatcattttattatggtggatgtggtgccgaactgtcatgaattataccattttcctcacaaaaatgagtaaattcattagagaagtattcacctcctctatcacttctcaacacttttattttcatgtt

SEQ ID NO: 91206 - DNA, 807 bp, Cannabis sativa
aaatccttcttttccgacgactcaaacggaggatgaaactagtcagccactgttgttgatcctccgagccccaagcacagatgaacaagaaggagagtgatctgacaatgcagtgcgcgtctctccaacaccttctctgaagctgacgagtttagcaaacgtgcaattgcgttctcttattgctatttccatcttttcaaattggtatgctaatgtttgagactcggagattttaaaaatcgttgatggtgttttaagtccgatatgatactacccaggtccgcctttatgctattcatatttgcttcctttctttccattctttctccattcctttagctttctcttccattctcattgatagcattttccaagaatcggtgcttggataccaattgctgagaacctgccttagattactaaggcaacaacaaacagtagaacagtagcaaaatagtaggaaagttaaattgaataaccaattacaaattatgggagccccttaggcccctttgatgcaaagagttttactcaattcattgcataccttttctattcctttactcacctataaatagtaatttctcactcaaagccactctcccaaacaaagactcaaatatcctttttatttagctagcacaccatactaatcctagtgcctaacagaaatatgttgtaatttaaacttgcttagtacagttaagagaggtttgttgctgagacaatatctgtttttatgcacttatggtgagtacaggtttattaacattagttctatggcagattggttgagatgcgttagta

SEQ ID NO: 91207 - DNA, 1122 bp, Cannabis sativa
cagcattgataaaatttttgagggcaaacctggacatttttgcatggtcacatgaggacatggtcggaatcgatccttctataatttcacgcgtcctgaatattgatcataatttctaacctattcaacaaaaaagaagattattggacaaggaacgagccctagcactaaaagaagacgtagaaaagttgtgcaacaacaatttcataattgaagctttctacccggcatgggtagctaatcccgtactagtacccaagccgaacaaaaagtggagagtatgtattgacttcaccgacctcaacaaagcgtgcccaaaggactgcttttccacttctaaaaatagatcaacttatggtagcaacagcaggatacgagatattaagctttatggatgcctactcggggtaatcaaatcaagatgcatccaccagacccagaacatacaagtttccgaacagatatgggtctgtactgttataaggtcatgccatttggtctcaagaatgccggagctacataccaacgattggtaaataaaatgttcaaagaccagattggatgaaatatggaagtgtacgtggatgacatgctcatcaagtccaggaaggctggggggcatatagatgacctagacgaatgcttcaaagtcctcaggaaataaaacatgaaactcaatcccataaagtgctttttcagagtcatctagggtaaatatctagactttatcgtcaacgcctgaggaattgaagccaatccagagaaaattcaagccctcctagatatgaaatcgccaacaaaaaccaaggaaagagaaagtttgaatggtcggattgccgcactcggcagatttgtttcaaagtcaacaaacaagtgtgtcccattcttcaacatcctgtgggggaaataagcaatttgaatggacgaaggaatgcaaaaaagcctttcaagaactaaaaatgcaacttgcaaaacctcctatactctcaaaacctttggacgtagaagagttaggaatatacctagctatcatagaacatgttgtaagtgacgtgctgataagagaagaaaacaatatccaacacccggtcaactacatcaggaaaaggctcattgaagctg

SEQ ID NO: 91208 - DNA, 901 bp, Cannabis sativa
tcatgccatgtgtcaaacattaatgtccatgttaccaggataagtttccgggttaatatgtttccccccaagtcaatttcacacttgcgtggagttgacttgatgaagtgaaccaagcccgttttgctcgaacctactagatgggcatcaattttaacattcttagggacttgtatttgtttttaagcattcccaactgaattaggactttgaacactcttgcttagtccttgggaatttcaaaaattcattaacaaagaaaaagagaaaaaaaaatcttatcttttttcacttatcttttttctctttctttgaaaatttagaattttcttattttttgttatggcattaggattaattgaattggaatcctaatcctagttggagatgccattcgaaattagagagaaaaaggaagaagagaaaagatttttggcattttgcttatcatttatctttttcctttaatttctcaaattttttcttaatcccaatagctttaggaattgttattaccttttaaatttgtattcctatttctagttgtataggaattcgaaattagctttaaaaaaggagaagatataattatatattttactttttatttaccttttctttaggaagctttaaatttaaaagactccaattagctttaggattaggaaattggactcaactataaataagtgagttgagaactaagttttcacacttctcacttcattccacacgcctatagcaccttgagaacacctttgggatttcattttcatcgaatctccaagccttcttcactttaagttagaaaaataatttttttcctttccccttgacgccatttttttttttttttgatttcttcttctctttcttggttgatcttagtccaagaactatt

SEQ ID NO: 91209 - DNA, 612 bp, Cannabis sativa
  modified_base (324)..(330): a, c, t, g, unknown or other
  modified_base (394)..(401): a, c, t, g, unknown or other
  modified_base (557)..(563): a, c, t, g, unknown or other
ttggattgggagctaacatgggtcacgaacagaagctttgacagtgtaaccatgttgtaataagaggttaaccagccatgaagctatgtagcctgaagctccagtcacacacaccacctttccttgtccactcattctttcaatattttcaaatctcagagataagagactcactatgttttaaccagttgacattttataaacatattcatgaagagagaagtagagaacaaaaattaaggtaaaataaagaggtaaaataaagggtaaatacgatttggacctgtattttgcaaaagttattgattggaccttctgttttgnnnnnnnataaaatggaccctgtattttccaaaatggtaaaaataggatcttgaactaattttttgtcaannnnnnnnttaataataattcgatctaaaagtgttatgacaaaactgtttacatatattctatatctgttcgtattttcaagttggttatattaaaaaaaacagttgtcacaaattaaattaagagctcgtttggaacatggtattaggtcgtattgtattgtnnnnnnntatattgaattggattatatatcatatttttatataatactatgttaaa

SEQ ID NO: 91210 - DNA, 647 bp, Cannabis sativa
ttttccttttctttattttctaaaataataagtcttctttctctaattaattcaaaaatagagtaatgctaaaaataagatttagagaccagctgtctcatcccagaacaaccacttaacccaaagatagaaaatgaccaaaatgcctttttatcccaaaagttaaccttagcaagcctaggggtaaaatggtcaaaagccataaccccgctcacactgggtattctaataatcttcaatattgatcccactaagaaaaaagttctagacttacccatgtgactcaaatggtcgttatcgccgaccaaaaatcataaaaattgcatatttcatatataatataaataatatctctagagttaataaaatctctagaattgaaaaattataactctagtgcacacttttaataatggggctcacaattaaataaatatatgcataattctaaaaaaaatcaataattaacgctaattgcctttactaatccatattctaaaatgtggtcattacagcttctttgctactttgtttttgagattacatctatgtagtcatcacaaaaaaaagtagtatttgtgaaaacaaacactttctattcttcatgacagtgtagtccaccttaagtcactttagaatagccaaca

SEQ ID NO: 91211 - DNA, 589 bp, Cannabis sativa
caatttgagaagcaatagatttaaaaaaaaaaacaagaaacaacaaaacatttatttttgacaacccatttttgtttttgagatacaaatttatttctaaaatatttataattaaacatgttttgtattttaatacatctaggtcgaatgtgaccttttattccacaaaaatggcatatatgaatgaacagattcctattccctttgggattgccaaacttaccaaactgcttattttctgtaacaacagtacattttgctatagaatcagaatcctgtaaagtaatgtcagaacattcagaaaccaaaattttagatttgagaaatttagtatttgatttagattgagccttaacaaaatccaaaccaccatgactcgtttgtcttgaattttgaaccactacaaaaatgttggaacctggatttaatattttagcatttcttttcaatttttcaagttccttagtttgagatacaaatttagaatttcttgaaatcaatttagattcacaccatttatttttctcttcaagttccaatatgttcatgtacttttgaaaatttgttgttaacaaagccatttcattat

SEQ ID NO: 91212 - DNA, 624 bp, Cannabis sativa
ttccagaagagagattacctttttagttttcttcttgagttacaagatgaaaaacccgattggcttctggcaatggatccattaaaagaatgctgctgcgtatctgagaaaactggtctgaaagtctcattaaaaacgacatgatgtactccatgtggtggtgttcttggagtctcttaacaccaccacaagtgcatccgttgcaggtgcaattgggtctatagttggacagttcttcccatatggatttcagtcgagtgtagtacatgcttatagtttgattctcttgacggagattcatcaaacccttcctcagattgaatatgtgcggtccattctgttgttgaaatctgatctttaaatcagtccaaatagcagctgcggattcatcgtaaagcaagctagaagaaatttctttagaaacagaattgagaatccaagatataacaatgttattatttctaatccaagcattgtaaagattatattcagagatatggggtttagaaatagaaccatccaaaaatcctaatttgttcttgacagatattgcgagttgcatcgcacggctccatgaaacatagttatcttgccctgtgagaggctgagaaacaagaacattac

SEQ ID NO: 91213 - DNA, 713 bp, Cannabis sativa
tccagccatattatctttacagattaacaaaaaaatttttttgtaaggagattaacaatatactttgattatcgattcaaatgctatttttcaaccaatgaaacgaaaaagacaaactaaaaattcccatacgacaaatctaactttcaatcccaataatcaatggaaacaacatcaaatttcaagttctcaaaatctataaaataaataaaaatagatctcataaacacaaactcaaacattagaaccttagtaaaacactaaaactcaaacattaaaacacacacaataaaattcgaatccagaacttaacacatacatcagaataaaaattaaatcataaatgtgaatttactattttttcaaatttcggtatttattagcaacaaatttaatattttaagtatttatctcacaaattttttaatattaaaattttaatataatttttttaagtaattattattaattaaaatacataatttatttttttatataatttaaaatattttatatacctgtcgcgaaacaggagatatttaaaatattttatatatctcccgcgaaacgcgggatatttactaattagaaatgtatcagatggtaatggctgaaaatagcagcaaggcctttgtattgattacccaagatggatttcgagaacctggttctgtcgtaaagcgattacaaaatactcaaatctccattggatc

SEQ ID NO: 91214 - DNA, 1631 bp, Cannabis sativa
gattttttgatggttgcttgttttcgtgtattcctagatcttgtaattttattgcccataatgtggctaagtgggccttcacccacaatcagtttggttgcttacctatttcttacattccgagaaacttattgtgtaatgaccacgaggtctagttctcttttattattaatagacgttcattctcaaaaaaaaatatatctttaaaaataataaaacaaatacatagcagttcacaaacaaaaaatatagctttagatttaaaagttgcataaatgtgacatgttaaatctcataaaaaaaagtatttgaaaatcaaattgctataaaaaatacacaaatttaaacatgtcatatttattaaataaagttttaaaatctcacaataattgtaaattctacattaattttggagattggtttggggttgttgtttgtctcttttaaggaagatgtgatgtcgtataatgtaaataatgtcgtgtgcttatgaagagcaaaatgtcatcagaagctcgtccccggaccggacaggacaggaatccaatttctgagaaagaagagaaaatttgttgaaagaggccctgactggctcatatcatactcattctcactcactcccttcatttcatactggaattttctatctacttttcaagtttccttttttttattctttattattaatttgtaagggtggggaattgatgaaaaccaagagccatggaggtaagagtcggccattgtcgatgccgtcttctcattctcccaggcttcccgttcttacgcctgctaggtttagggctctccctattctcctcaatcaggttggtatttcttcaatttctccttgccttttttgtgttgattacaatgttataggctcactttagtacaatccctcttcaaccaggaaaatggtgatgaaaaattagaaagcacacccgtaattttcttttgcgagggtgataatgacgatgataggggtgtgaattctgaatcgagtcctcaaacagttaagaatggtggtggtatgatgagtatgaccccgcaatttaccggtagttggagtgaagattccatggaattggatagcttggaggaaggggaaacttgttttagatgtaaaggtagagataaacgtgtgagggtttgtagtgaaataggctgcttgattgctgttcatgacgagtgtatggggtgtgaacctacttttgatgatttgggattgttctactgcccttattgtaagtaccggcgtgcaaaggcggtggctgttgagacgagaaaaagagttatggcagcaaagaaagcattgttgaattttcttgaagggagagtagttggtgaagataaagagaaggagaaggaaaatgagtgtagtgacacagttgataggaatgcatgtgatacattacctagtgctagcaatggtattcactgcaataatgagaatgttccatttccgaatgatcttgaaatccagagtcaggctgtggatgaaaaggaaatggatgatgcacaagtaggttgccatgatcagaataagttagtgattgaaaaagagattcagccaagcacatttgtagccaatggtgctgataatgtaggttgtggggaagggacagcag

SEQ ID NO: 91215 - DNA, 506 bp, Cannabis sativa
aatgtggcggatttcagaccaatcgcatattgtaacgtgctatacaagacagctaccaaggttctttgcaatagaccgaggaaggtagtgccagatcttattgcggaaaaccaagggggttttgttcatggacgatatattgctcataatgtccttgtttgtcaggatatggtgagattgtatgggaggaacaactgcaaaccaagctgtatgattaaaatagatttgaggaaggcatatgacaccattgaatggagtttccttgaggaaatgcttgatggttttgggtttccgattcagttcattgaccttataatgagctgcatcaggaccccaaaattctctcttctttttaatggctctatgtgtggattttttaatgcaaagagaggactacgacaaggagatcctatgtctccccttctctttgtattaggcatggaatatctatcacgaattcttcacaaaattggtgatttgcctggctttaaatatcatgaaagatg

SEQ ID NO: 91216 - DNA, 785 bp, Cannabis sativa
agatttttgtttatgataatgtattgtatttatataatcttagaaaattttaaatcatttttattttttaaagagaaaaataaagttcaaatattttattgtaaaagtaactgtttttttcttattctcgtgataactgtttgaatcttatttttaatattttaaattatttaaaattttattaaatttataaataatcttaaataattacaacgtacacgattatataaaaaaaattacaaaactctattagatgccaaaacatataatctaatgacacactaaaaatttatatatagtgtaattttttttttacaaaatgctccaatcgatccctaaaatctatgctatttttatgagagtctacagagtctcactaataacagtagatcgacgatattttttttattttttaaaaattaaatattttatatatgaagtaaatattttttttatattaataaaattatattataataaagtatataaattttagtataatgttaagtattttagttagaattacaaaaaaaaaaaaaaatagtactaaaatagtagtattttgttggcctaagagtacaccccaagccactttttttgaggttaatatagatattttcaagtgctgtatatttgtataatgaatataatataaccctaaattcctactacaaataataaaaaattaatttatatatattaaaaaaaagaagtacatttatttatacttcttctgtcagattactcccataactaacccattcttcccacctgcgttactcaga

SEQ ID NO: 91217 - DNA, 1107 bp, Cannabis sativa
atctacttgatcataacataattttttttaactaaatataatttttagtcacaataaaataataacttgagaatataatatttagattcacattatcactaatttagttttattagtaacaacaaatattctgactataaatatttttagtcacaatttttgtgactaatacatttaacacaaattttttagttacaaaatcaaaatgataataaattataattagtgacaattttaccacttttaatcacaatttttattgtgattaaaagtaagattttttgtaatatttaataactataccataaatatgatatgtttaaaaaattgttaactattcacatatatatataataaactaaaacacgcactaatatgaattttcatggttatatcaaatatgtaaccacattagttacatttattttagatgttggatcgtggttaaacggttgtgattaatttaaaaattaaataaaaatcattaataaatatataaaaaaaaataaaaaaaaataattataattattagttgtgaaaaatatcttattgaatattttaatttaaaaattaatttattttaagtatataattaattataattaatttaaatttttttttaagaaaaaagaatttttacttattattaacttgttatagcaagttattaaaaaaaatataaccatcctaagtacatttttaatgtaaccattaaatgagatcgtgatagaagaaaaaaaattgaaaaatcacttttgtatctaccctaattaaagagtattttataatttttggtatacataaaaaattataactttggttttttatatggaaatgtatattctaactatatctattctatataaaatgtggctatataacaaaacttttggtttatgaaaaattattgggtgactttttttaaaataaaaaaataataaattattagatgttgccacgtaaagggtcagcattcatgtaattagttaaacctaaatataattaatccacctaaagtgttgcaattaataataaacttgttcatattgtttatctttttattaaaaattattttcaaattttgatatttagaattagttaaatttt

SEQ ID NO: 91218 - DNA, 730 bp, Cannabis sativa
ggcataaaacccaacattacatacctcgattttaatgctcccaatgttctgtgcctagatctaagatgtatctactaacaacattcatggcatgtgccagatctggtcttgtgcataccatggagtacataagactcccaacacagctggcatatgagattttggtcatcttgattctctcagtttcattgtttggagactgagatgttgatagtttgaaatgttgagcaacgggagtagcaattggcttgtatttgtccataccaaacttgtctacggccttgtgcagatagctactttgtgatagagtgatacaagtttgagtaggtctatgtatgtctattcccaaaattcttttggcctttctaaggtctttcatgtcaaactcttcatttagttttatcttgagatcatttaactttgatctctcctttccaattattaggatatcatcaacatataataataagtaaatgtgatcattaaaatagacacaaggatcatacttacttttgatgaatgttatcttgatcatataggagtcaaatatgagattccactgtcttggagcttgcttgagcccatagggtgatttattgattaagcaaacttgatctgaatattctttgtcaaatccttctggaaccatcatgtagactttctcctcaagttttccatgtaagacagcagttcttacatccatttagtcaacttctaagctgaatttagc

SEQ ID NO: 91219 - DNA, 887 bp, Cannabis sativa
  modified_base (266)..(267): a, c, t, g, unknown or other
aaaattatatttttacatttaatggatttttttttttatatatttttatggtttcccctaaaaacaacacgaaaacaataagaaaactacataaaaataacatgtaaataacattaaaaaacaataaaaaataacatatatataacaaaaatcaacataacatgaatacaacaacataaaaaaaaaaaattaattatattttttgtaaataaaataaaaaaattcgtaaaaatatttaaaattctgtgaaaccgtatttttgtaanntttttgttgtttttgtgtatttataaaattatctcttataacaaatgtttttaagagtagtaacaacatcaatacaactactatgtaacagcccaattagtcacgttatgggccataaaattatacgatctaatcgtaaaacaaaataaacaagtaatgaaagaatgaaccattcttttataaaataaagagtagttttcaatttcccatgagggatacaagccgttgagagtgttgatcactatctttgaatcactttccactagaaaaatattatattatattatattttataaaaacatatcttaaaattcaaacttttattaaattattattatttctaatacaaaaaaaaaaatatatatataaaaggtgtgaaaaaataatattaaatagcaataataatttttttgtatgtgagtgactaaccacaagttgtttgttccttaaaaagttgaattcataaaaaaactttgcgttaaagaaaaaaatatatattggatccttttattttttttgagccctgtgtagtagctcatattttatacctatagagtcggccctatacaattatacatattacatattttaatttcggctattttcaaatatatgagaaa

SEQ ID NO: 91220 - DNA, 612 bp, Cannabis sativa
tgctagccaaaagaaatactcccgcgaaccacggtctccctctgttctgtgaaccaaagtctcacccatccggatgtggatctacacaactaggccatagccacaactacaaaatggtctattcccaacagtttagaaaaggattaactatggaaactgttggaaaaattaagtggaaatttttcccatcggtttagcaccgaagcaaaaaaatctttgggatagctattgccgacggtgtagaactgtggacaatactaaatggattttttttagaaaaaaattatagtaaatcccaacagtttataactgttaggaatactatgtatcctaacggtttatcaccgtggagaatgcttagtattcctaacatttataaactgttgggaaaatatgcattttatacagagctataatattagttcaaaaatttgggaaatttggctcgaaaatttcagatcgtctctctcgtgaagggctcaaaaatttaagaccagtgaccccaaggctcaaaaatctcatctctctctcgtggatgaatccccaaggttcaaaaatttccctatgacgagactcaccaaccaccacggtagctcctttcttctcagctcc

SEQ ID NO: 91221 - DNA, 581 bp, Cannabis sativa
aaggagtattgggctcagattttggtgatactctgctacagaaaggatacaagggttagagatctaagcgaaaggagtcatttaattctgctacaaccaatgaaaggtttctcatgtctttaatgtgtttatttcatatcgttttagaagttcatgtttaggatgataaaaacatacttgttagtaaatctgggtcctattaaaatatattctaacataaattgttccatagtttgaagcatctggaacataactggaatcaattcaaactatggtacctgaatttatagcctcacaatgcctagattgagctcattgaaaagaggggcttcatattgtcagatgatttaatctctatcatctgttgtaataactgtattttgaccattgttaggggccatccccctttgaactcactgtccatctccttggttatccaccatttctcttccccttgtgttctttgttgtgctcttcttctttctcagaatgtgcgctaaatttttagcatcaataggaaatagatcaggattgatgaattcttggtactcgtccatgtgctagagtgaacctgaaaaaag

SEQ ID NO: 91222 - DNA, 682 bp, Cannabis sativa
ccaaaagggccaaattaaaatcccgacgattttgaaaccccatatcgcctccattcttgtgttgacaaagtcgttcccaagacaaccaatagataccccgttgagacaaattagatatttgccaccaaaacttcgccatcatacctttaatatcctgagtgatcttcaaaggaagaataaagatattcatggcataactaggaagcgactgagcaataactttcaataacacctctttctcggccttcgagaggaacttcccatcccaaccttgtaaacatttacggactttttcctttaagaaacccaaagcagttgatctgttgcggcccaaaatgcttgggagtcccaagtaaaagctattaacatcagctggctgcatttgaagaatatgacaaagttgactcccctggaagtcacgcacgttagagctaaaaaatatggataatttattaaaattaacattttggcctgatgccaactcaaacttcctcaacagttcttgaatttttaaagcttggacactgattgctttacagtagaggtaactgtcgtcggcaaaaagcatatggaaaactttaggagcaccattttccacgttacattcgtggatccaccctctattttcctattttttgagtaaagccaacaagccttatgcacaaagaatgaacaaataagg

SEQ ID NO: 91223 - DNA, 826 bp, Cannabis sativa
ggcagatttttgttaattaaaaatatagattgtattattgtcaatcataataatgaataaactaaatagaaatatgtgacaatcaatttatatcattttgaagatgtaatgtcacatactatcatcattacctttaaaaaatttctatcttaatgttatttttgcttgaatctcatattattctactttttccaatatataataaaataacttattataataatcaattatttttgtataattttttaaatataatgtaaaaaaattatattaaaataattaaaaatatatataagtggagtcaaactgacgcaaaacacaacttagttctctagtattataataaaataaaatatttaaataataaaataataaataaaatttaaaaatattaaaattgaatttatactcctaataaaataaaaaaaaaataataatacaaataatatattaatatttataaatatttaaattaatttaatacacaaatctttattttgacgtcggtaaattatattacgcacgcatcaataccggtaacacttcacttgccaaaaaaaagcgcactaactttcaatggcgtataattgtgtcgataaaagttttcaataatcttttagccaacaattaacaacggtgggccactttttgctagcaaagaaaattgtcggtgcaaaacagttttgctgacttaaattcgtaaatgcgttgacaaaacatgttttaccgatcaagtatttgcggtataataattaccaatatttatgcgtcgacaaaagtttactggcgcatttgtgccggcaaaagccttctttcttgtagtgaa

SEQ ID NO: 91224 - DNA, 771 bp, Cannabis sativa
aatcttcttttcaatccaatgataactagtatggataatgaaatgattaagaaagttcccctgctagatgagataacttctactgtcgcatccatgcaacccttgaaggctctgggccctgacggaatgccaggatgtttctatagaaaatactggaacgttgttggtgatgtggtaacttccatggtgcaaactttcttcatggatggctgcttggatagacaaattaactatacttatatttttttgatttctaaagaagagaatgcgtgcacggtggataagttcaggcctattagtctttgccactttgcttacaagatcatatcaaaaataattgccactagactcagaggtgttactaagaagctggtttctcccttacaatccgctttcatccccggaagatggattgcggagtcatctatcttaactcaagagttggaacacacgattaagtcgaaaaaaggcaaagggggtcttatggctattaaacttgatatgcacaaggactttgatagaatagaatggagcttccttgagaaagtccttaagtgcaatggtttcgacaaccaagctagggggttgatcatgaaatgtgtctccacggtctcttattcagttaacctgaatggggtccctcgaaagaaaatctccccgaagcgaggcctccgccaaggagaccctctttccccattcctcttccttttgtgtcacgaggttttttctaagctccttcttcggcagcaaggaatggggaagcttcacggt

SEQ ID NO: 91225 - DNA, 666 bp, Cannabis sativa
atggacaagctacgacttagtaggccacacacgttgctgcaattaagaaaagaattgatgaaactgttcttgcatttattcttggaacatctttttattaatttaattttgtaatttatcataataacggtcctgtctgaccgattatgtaatcctaaatagcaattactttttatataaaggagtgatccaaattaaataaactaagaaaaaacaattaccaacaatggactaagcagatcgagctctaaccgaactactatcattttcttgtcttttttttttattactttagcttttatctatttcgtagcccaaactttgagtactcacaattccaagtgaatactcgcataactactagtgagttttcttaatttgctcgaatactcacaccatttagtgttgtctaaattccttcaacaatatttggcaccgtttgtgggaacgttattatataagatttttggaagagaatggaaatggctactgaatagacaaacataaacaccaacaacaaaaccatcaacattggcactatcaatgttcctattactggcggaaggaccaccctagttgatgctgtggttggaggagtggggcgtactgccacaacccccttaatatatttccctattttcaagccacgctggagaaacctcaacg

SEQ ID NO: 91226 - DNA, 622 bp, Cannabis sativa
  modified_base (50)..(51): a, c, t, g, unknown or other
ctgacactcatttaatgtaccctgagacccatttaatgtaccacggaatnnattccgtgaaagtacatcacgggaaaaaatcgtatccctataaatgtaatactaaattaaatttattttgattaaaaaaacactatattttattaactaatgacattattatttatttaatattttaatattatttaaatgtcatttgctttctttttattttttattttaaatttatcactaagttatttctcaattaatgaaaataatttatataaagatatatcttattagttttaaaaaataataattatataaagtactagtttttataaaaaaaattaaatttttacgttcaaagaatttttcttgcatttttatagatttctataagaacaacatgaaatcaacaaaaaaaaaaacctacattaaagtatcagaaaaatatcatctgaacaacattaatacaacaacaaaaaataacaaaataattaacaagtgtataacataaaaatacatcaaaaaatcttattttctataaaaagaagtataaaaagggattttttcaataatatacttaaaatacaaattaatcacaaaaattcctttataaatctcaattacaataata

SEQ ID NO: 91227 - DNA, 656 bp, Cannabis sativa
  modified_base (618)..(619): a, c, t, g, unknown or other
ccccgcccaggcctgttaaacatgagattcgcataagggagcccatttcacctattcggccatcccctcccgtgtttggaaaagggaaagctgtgatggctgagataagagcgatgttaggtgatgatggacttctgagtcttgtttgggcagtcaccgtgcatactactttgccttgtttgttgagcttcttgacttttatgccttatgtttctgatgtctgttttaaccatgttgttttttgttttgcatagacatgtctcggcagatgcttgatgctctgaagaagagaatgggcagaagctctagcgcatctcctccggccaagcactctaaaggtggtgaggggtcctcttctaagaaaaagaggcctgttggggaggtcatagatcttttcgaggagctaacgactgcaaacccctctaccccaaaagctgctaagtccaaggagtcccgggaaggaaacttggataggtctggactaccgaaggttgggtctgagctggtcaggagtgatcctgaacaggtgcaggcatctactccacctttgccggtactttcagaggctaagaagggcaaagagatgttggcccattacatgaaccggctggttcctgnngtcagtgagcaactggctggtgctgacaatgactctt

SEQ ID NO: 91228 - DNA, 784 bp, Cannabis sativa
  modified_base (148)..(150): a, c, t, g, unknown or other
tgcagagatcaaggaaagattggtcaggaaagttagatgatgcactgtgggcgtacagaacagcttttaaaacatggagttggcagttgcatgagagaaaagatggagttggcaggtgcaggagagaaaagattgctgcaattgaatnnnctggaagaatttagaaatgaggccaatgaaaatgcgaaaatctacgaggaaagaaccaagaagtggcacgaatggaacttagtcaggaaagagtttcaagccaggcagaaggtcctactttttaattctaggttgaaattatttcctggtaagctgaagtccagatggtcgggaccattcacggtggtcaaggcatacccatatggagctgtggaactaaaaggcgaaaacccagagactttcaaggttaatgggcaacggttaaagctctacttgggaggtcatattgacaaagcacagtccgccatgattctggtgcctctttgaagaaaacaaccagcatccagctatatgacgataaagacagcgctcttaggaggtaacccaagttttaatggtgtttttagttgaacaatcctactgtttttcttgctttttgttagtttttgttcattgaatttgtaaactgaattttagtttattgtttttcattcctttcaaaaaaaaaaaaagaatttttttttctgggcactgcccagtggccgcggcgagaccctatgtggccgcgacgggatagagtgttcaccgcggcggatttatttactgtcgcgacgaaatactcttggcagaaagg

SEQ ID NO: 91229 - DNA, 883 bp, Cannabis sativa
caggatcattacgtcaaaaaaaaattagcaggatcataatcatactcattactacttaattaacccataatatataataaatcctaattattcataattatatttcggagatattacataagagctcttccatttatatctgttaagccaagctcaaaagaaatcattattttagttctaaataggtatagaagctataaatttcatatctaatgccttggaaaggacattccacatataattgtgtaagtaaactttatcgctgattatcacatcagtgtaaatctagtgcactgataaatcatgggactaaagactttgaatcatataatcacaattactttccactgcaatgacatcactgtagttgtgaataactatatgttttggatttaacagaaattgtatattaaaactataatcatgaaaactacatgtaaatttaaatgacttctaatcttctattgatagtaaataatggattttatttagggcataaaatcccaacatttatgtccatcaattacaaccttcaattgctgttggagctgcaattttcagtccattatgttgaaactgattcccttgtggttgcaaaagaattgcaaactcctctagatgtagtttctgacttccattgtattcttactgatattagaaatctactgtccaattttttaggagtgcagatctgtttatagatttacgaatactgatgctcataagctaactaggtatgctctttcggtagacacatattatatttggttggaggttactccccctccgttagctactattgtatcttaactttttgattatatataatagtttattctctaaaaaaaactttttattttgagtaaataacgacataagtact

SEQ ID NO: 91230 - DNA, 647 bp, Cannabis sativa
cagtgacagttgctacacttcgatattcagcctctgtgctggatcgagagatggtctgctgcttcttgctcttccatgctatcaagttcgaaccaaaaaatatagcatagcctgaggtggacttccgatcatcagggtcagaggcccagtcggcatcacagaatgcaacaagatcaagtgttcgaggtgttgtgaaatgaagaccatgatgcaaagtaccacttatatacctgaggatgcgcttcacggcttgccaatgagtagataagggtcgttgcatgaattgacagaccttattcacagagaaagacaattcaggtcatgtgataatgagatactgcagggcacctacaatggacctgtagtgctgaacatcagccactggttctccttcattggcagacaatcgaaggccactaaccataggtgtaggggcagactttgaaccaagcatttgagctttgacaagaagatcttgagcatattttgtttgacaaagatgaagaccttcatctgtgtgtttgacttctatgtcgaggaagtaactgagggaacaaagatcttttaaggagaacttggagttcaaatcagtgatgagagcatcgacaataactgagtcatcacctgttatcaaaatgtcatcaaca

SEQ ID NO: 91231 - DNA, 2455 bp, Cannabis sativa
gccaccttaaaacaatgtctattgtagggacaaatagtagtataatgttgttcaaaaaaaattaattaaaaaggaaaaacaaaatttgtcaagataaaatttattgagacaaattttgttaagacaaaaaatattatgcttgtcctaaaaaagacaaaatagatgtctcctgtgtcttttttaaattaattaatttaatcagataaatatttaaatttaaataatacaatatgatactacattattttaaactaaaatataatataaaatataatgtaatataatattatgcaatgtaatacaacatactaaataaactcgtaaaccacataactaatagaaaatgaaattttcaaaaaaaaaaatagaaaatgaaattttacatattattgcttataaattcataagtccccctcttttaaaaaatatatatatttcataattaattttttttttctcaaaacaaatagaatgtcaacttacaaagtgtacttattattattattttgaaaagataataactaaaaataaatacaaaatttgagaatgagcccttaaatatgatgataattacaaaaagagcccttgttccctgtatggctgcacagacgacaaagggcatttagtactgcagtggcagtagctactactgcggactgccccccacacccttcctcctcaccccctcaaagaatatcctcacccaaattataataatcccctgcaaccaccactacctacactcccctctcccaccctggagcgtaataccacgcgctccacctgaggctgactttcacatccgacaattccaagtaattttgatctgatgcgctagggtctaccagaatccctaggcttcattgacctaaccaaattaataatacattcttaatttaatttaattactctattcaattcaactaaatttagtttcagtaattaccaaatgttattgtattaatttttaactacgtgtggtccagctagctagctatatcactagtaaaataattaattattattgtatttattccttatttatttaggcgtgtttatttagtttataattggaaaacttttcatttgggaacactttgtgatattaattttgcaaatttattatgagataaagctacataggttatgtttgactttttaacaataacaaattatagatcataaatttataaattagtgttgttgatgttaataaattagctcaacaacaaacaaagtttgtaattaatagacttggattcttcgcactgaaattaatcgtattaaaaaatctctacttcatttttcagatcctctagatgttattcttactcgatgatgtgatttgaatcttccatcttctatttataagcaagaatggatgatatgcttcccttgatctttcttcttattggtcgatatgaatttatcctcttatttttttcgtaattgtaccagtaacaatatttcacattgacacgtgctaaacactactaatgtcttttagcataccattataaaaaatagtaattgcatggagttataggtcgctgagcattgctatttgatacatactgatttgatattttataattaattggcgatttatatgttatttattaaattaaaatatgtgagaccaaatattaattaaaatgcatcaataataatgatatatgcttgacaccttaaaggagtgtcgttttgcaaagtaggaggagagagagggggcaaattgtgaagaggaagatttaggggggctaattattatataatttaattttttttacttatttaatatatataaaaatagatgacccttaattcctttaaggtgtttcttaacattttttttataggcctaaacatacatcgtatatttataagtattaggtcatctctaacagaacactaaaaatttcaatttaatattgtttcttactaattaaaattaatcttattatcattagtgagacagtactattcaccacacgaaaattgcttttcgttttttagtttttaataattaaaataatggttaaataattaatattttttaatacatatatgtaatatctatatttatatacaaaaattataaagaatgtacttttttttatgtaatttatactgttgtagttagaattaaaaaaaaattaatactaaataatacttttttaatattaatttaacactataaatttaaatttcattaattgatgttacaccattagaaattaggagagactaatatcatcacgagatatttgagtcttgagaatagtttaatataaatttgtggtagtatatattaatatagagatgtgattttgtccccttttaacggaatgtatttcgtgatacattagatgtgtctcagggtaaattaaatgagtgtcatggtacgtttttactttttaaccttaattattcctaaatcaatctcagccgtcag

SEQ ID NO: 91232 - DNA, 747 bp, Cannabis sativa
aatattccttcaaccaaaaatacaaaatattagttattatgaataaaaaatattggtattaaaaaagaaataaatattttaacgaaagtttgggtagtatttgcatcttgtatgccttaggaacattttcctaacaaccataatatggagagacattaaatccaataatgtttcctataagcctaataaacaattttccattatcaccaacaactttcaatgttctaccttttacatcaaaagtgacctcaaagaggttttcgtttattattctcaaaggcctcctccaaatttagtgatttagactttgatcttgttttctttgcttgcgctatatttgaataaaaacttatattagaatattaacaaaaaatcattatgtaattaattaacaaaaacaactacctacctcacacgttgtgggtatcctactaaggcctgggggaggttgactcctaccatctccaccatgggatcaagcaacagcagtagacataacttcatatgcatatattttgaaataattaaatttaaaacaataacaaatatgacaaaaattaagagtttaatacattaaaaaaatctacaaaattacaactaattaatcacaatcatcactagaacaatattgaactacatcattatcactactatcatcaaaatcactaataactacatcaatatcatctacatcatcattgacaatttcctcatcatgatcattaatgaaattgtaacaccctaact

SEQ ID NO: 91233 - DNA, 560 bp, Cannabis sativa
atattacataaattacatttattagttaaactattttgtatttaaaatttggacattagtgtttaacttaaaacttagattttatggttaataatttttattctatttggatattgaagttgaaatttacaatctatatcatattattacttttttattattattttattcaattattttatgtttactcaattatatttatcttatattaaagttcttaaaattaattgaaactataacatttttaacttaaaatataaataatatatatatttaaaatctaattatttgaatagtacaaactaacaataataatcataaaaaaaaaagtgaacggttttgacgggttaatccgaccaaaccgacaaaatcattgggcgagttgaaatttttctaacttttgattgggcgagttacgattaaatatttgcaacccaatatttataggggctttttcatttgtacacttctaaataattttattttattttttgcatttttacgaaattctacataaaaaccctattgcaactagcactgcaacctaaattgcaataaaa

SEQ ID NO: 91234 - DNA, 1004 bp, Cannabis sativa
ataaaagtgggtatatttaaaaaaaaaaaatatgaaaatagaggtaaaaattagaacaattaaaataaagtaggtatagaatgtaattttctcttacttaaagttaagctaagcccacctagattgggctttcaaaggatgctttgttgggccttcattgacatgggaccaatatcgcttgttagctttcgcaaaaatattgaattttgagtaaaaatttataattttactgtcacacgaattttttttttataaaaatactattattctatgaaacaaccgtaaaataacaaaacagaaacaactaaaaaactactgcataacaacaagacgtaacacagtacacggtataaagcttacacagtatttttgaaaaaaaatctaccctacagtgaaaaggtaaaaaaattgaaaatttcactatgtggtgtaaaaatccctttaataaaatatattgttgatatttcctaaaaaattatgtatattgttgatatactacagtaaaatgtaattaattttttttatgtatctataattgctttaaattctataaaatgatgctacactcaaattttttatttatttttaaatagaattcttaatttggaaaaatagaatttatagattttattttttttaaactcttaaaatccaaattcaaggtaggggtggtaaaatgggattcaacacgaacatggtacacgaacacgacacgaattttacaggttaggattaaaaatattagacgcaggtcgaaaatgggtcgacacgactttacacgaaaaaaaaacgagttaaacacgacatgacccgctaaacgcgaatttgatacgtttaacacagttttttaaaataaaataaaataaaaaattattaataataataatataattatgtaaaaaaatacatatttagtgatttaatgttaagttaaaaaattttaaatttaattttctttaaaaagttattaaaaaataatttttattatatatataaaaaaaata

SEQ ID NO: 91235 - DNA, 752 bp, Cannabis sativa
attgatgatcgcagctcactattagattcaaaattattcagaaaagaggtatgaaaaaatagagtaatgaaacacaccattaacagacaaatatttatattaaaaatcatataatttttaaattgttgcagatcatataaggatgagttgaaaatttgatcggagctcccaatcaaatctaaacaaaaaataacaaggtattgcattacttctgatgattgcatgttaatgattgaaacatttgattcaaaaaaatttgaaaaaaacaaaatgaataacagtgaataattattgttgtttaattgtttaatttctgtaaattatttaaataatcaaattattcaagaataaaacaaaaaatgaaaataaatagatacatttaccttgaaattaaaaaaaaatgtttatttattgttaataagttggaatgaaatggattttcttgactacctgtttgtcatgataaattctgttttgataaaactataatattgcatttaaaaaaataaataaaaattgttgttgatttattagttaaaaaatataatttagatgtttttataaatgaaaaatacaaataaattcaaataagaaaattattttaatgttaaaattataaatgaactaaacaataaatttaaaaaaaaaataaagtttcatatatattcaaataaatagaaattattgatttaatgttaataagacaaaacaaaattctttatcttaattgcctgttaagaattttaaaacct

SEQ ID NO: 91236 - DNA, 3200 bp, Cannabis sativa
ttatcatgactttattaggcctacgtgacacaagatgatagtttaatgaccacactaacagtaagagaggctgtttactactcagctcaactccaacttcctaattcaatgtcaacatcagagaagagagaaagagctgaggcaacaatacgagagatgggtttacaaggctcagtggatacaagaattggaggttggagtgtaaaaggccttagtggtggacaaatgagaagagtaagcatatgtatcgaaatcttaactcagccaaagcttctctttcttgatgagcctactagtggtcttgatagtgcagcctctttccatgtcatgagtcgcattgttaagcttgcacgacgagatgaaagaactgttatcgcctcaattcatcaaccaagtagtgaagtttttgagctttttcataatctatgccttctctcatctggtagaactgtgtattttggtcccgttttagcagcagaagaggtaatttctaacaagaagttggccatacattatacactgtcaatgagtgccttaattttattttagttagaaattgagtaaatagtactaatatataacttgcatttgtagtttttcacttcaaatggcttcccttgcccatcattaagaaacccatctgatcactaccttagaactatcaacaaggactttgatgttgtgagtgctgcaattttgtttttttttttaattaattttcttgttcaagaatgagattgagcacaaaatataagctcatagactttaaaaataactctatggctgatttgttataggacttagaacaaggttgctgtagtaatacaagaactgaaaaggccattaacactcttgtggagtcctacgaatcttctgaaacttttaaacaagttaagcaacaagtttctgagatacgccaaaaggtaaattaaatagatatgtgactttataatggctaaaagaaaattaaagagctcatgtaaaattagcttatatacattatttcgttttactatacatatatatttatatttacagaaagatgggagtgtaaagaataggggatgtcaatcaagtttcattacacaatgcagtgttctcactaggagatcctttgtgaacatgtaccgcgatcttggttactattggcttcgtcttgcaatctatattgccttgtgtttatgtgtaggaaccctttttcatgacattggctccagttatggctcaatacaggtaattctaatttatacacctaattatcatcttataaaatagagaaaaatatgcaagattctataggtttgtaagggaattgaatactaaattgtatgagttttcattgttcactttaggctagaggatcaatgctgatgtttgtggcagcatttttgactttcatggctattggtggattcccatcttttgtagaagacatgaaggttagtcaaataacaagttcatgtttaagagtttaacttagtatgtacactaatatgatttattatttgtatgaaactatatcttatatttttatgtattggaatttcaaaacatagcaatcgtaaactaatatgattcttaactttaatttgttaattagatatttgggagagaaagactgaatggacactatggagtggcttcatttgtagtggggaacactttttcttcaataccttatttggttctcatatctgtaattcccggagccatagcctattaccttgtaggacttcaaaagagcattgaacactttgcctacttttcaatcatgctctttgtatgtatgatgttggttgagagccttatgatgattgtggcaagcatagttccagactttctaatggggatcatcacaggtgctgggatccaaggtgtcatgatgttaaatggtggcttttttcgcttaccaaatgatattcccaagcccttttggaggtatccaatgtattatattgcattccacaagtatgcaaatcaaggattctacaagaatgagtttcaaggattgacatttccaaatggtcaagctggaggagagttgtccaccattagtggtgaagaagttctaaagagtgtttggcaagtggagttaagctactccaagtgggttgatgttggaatcttgattgggatggtggtaatttatagactcttgtttttgacaataattaagaccaaagaaatgataaagtcacactaatttgacctttaagggttacatgttgttaaccagtaattaactttcaatatttagttaaaattgtttttttttggattatgttgttatcttgacctcacatttagaattttgttcttattgtattgccacatattataacaattcttattctagtcagttttgatgtatttattatactattgtatggtgtatgaaaattctgatgcatagcaatgaaaagttacagaatagcttgttcaattatgttgcaatgcaattttttgcttgaaataacttctcatatccatcctataaaaatctacttgatcaatatctcataattatcatgatgatatggttcttttacatagtaagaatgtcctactattttgttgtctgatcaattttttatttctcataaattttatatagcatgcatatcatattattattatcattaagaaacgtatctgatgactatatcataactatcaacaaatgctttgatgttaaaatccttttacatagtagatgtttctaacaatttttttttaagaccaagatggagtacaaaatacaagctcacaatttcgtaaagtaggcatatcattatatgttataacacatcaaataggattgttcattaaactgttcacgttgtacaaattaaacacaccacatatactgcataaaaaaatatatgttttaaaatccttctcaatgtagtagtggttagaattttcaccaaaaaacgtagtgcaatgtagtttacaaatttgaatttaaaaaattacgattgaatctacactgcaccattttaatttaattttctaaagatattgatcttgattcgatctaatctcttaaaatgactaccaattgagtttgagtattatgatagtgttacacagtaagattgaacattttttaaatttttttttttcatgttctaaaatacttatatatatttatattaggcagaagttacgtgcaatgcacgtatacttagttttatatt

SEQ ID NO: 91237 - DNA, 532 bp, Cannabis sativa
ttatatatgacatttgcaaaaattcgatttttcaaattagtttacttttattgttgtccctagttgtgtgtgtagtaacattgtgtagttagattcgtgttagtcatgttatgttgtcgtgtttgttttgttttgtgttagcttgtaactgagaaggatagtgagttcatttcaacttggtttagcatactgctcgatgacaaaaaaaattattatccatttcccaccatttgtatatgtcttgatttttgtgtgttgaaaatgtcaagtgttattttgtccaaatgctaatctaggagcaattctttcaaatagatgtgtacttgtgctatcccactatgctttggatttatagaatgaataacactttgagacagtttaagcttctagaattggttggtgtaccccttgaggcaaaatcctagctagttttacaacttagaaatgatctaggctatttttggatgattgaacctttcaagctaacccaagaatatttacttatcagtagtcacattatttgagctaatag

SEQ ID NO: 91238 - DNA, 2644 bp, Cannabis sativa
tctatgggttttaggctcagcctaggtgatgccacatttcgtcttttatagagatctttgggttcaattcctcacccttaccctacccgcacctcctaccattatattatgcacaatgacgatgtaataataatagtagtagaaaaagaatgcctaattatcatcttgcgtggagtagtactagtagcaatgttttttttcctgacatgtctagtaacaatgttaaccttgatactaaagggaaaaatccatcttttttgttttcttcgaatatttcatgtatgatttaatcatataataatatttttccaattagtatctctggaaatgagaattattctacaaatgttcattattcatcagttgtgctgtgcatattgtttttgatggtggctataagtagtattcagcaatagtaacaagtattttacttttggtaggtgatttctgcatgccagtaccagtgccatccttgtctagtgtggatggagcgttttctgcttttgttttgatgaactacaataacagaaagagggattttctttaaactattttttcttttattattatgcattgtttgactgaataacatatataagaaagacttaagttcatttctatgagcttttttttttcttttttggttatggctatccaatattttaacttgtgcttttggaatctgttctcacttctaatttgcaaaggaaaatcagaagttaggagaattctataaggcaccccttaaaaagatgtaccaatgcgttcctaactgttttggtatttgaaataattttttagccaatttttttttattgtcatgtatgatatagttattttaaatattttgtaaaattttgaaaaattcaaaaaaatttaaaaagtgattattttatttatgttcgtaaaatagattattttaacacttcttttatgttgtaaattattttgaattttttaaaattttataagatgttttaaataattataacgtacacaaatataaaaaaaaaaattagactaaaaacttttattgaatgttgaaataggtaaatagtgtattttttttttttttgaaagcaatgatcaaatttattgataatataataatgtcatacaagctagttataatcatgttcattaaataaatactatacatgtcatgattattaaaatactatacatttaataaaaaaaatatagattttcatatttagttgaataagttcattcatttgaagtgcatgcccaactaatcgatgaataacatatatcatggacactcttggaaatttatatgacaaacttataaaaatttctaacaatgattttaaaatcattagaataggaaaatttaatagaaaaagaaatcacggttgtaaaattttagtaatctaatgttctcagggttatgcaatatgttaaaaacttactatcttttttcaaaaagcttgaaggaacaatagtgttttaactacacataaacaaactatacattagtgcaatgaaaaataaaaataataaataaagaaatattattataaatttatacttttttttttcaagcattataaatttatattttatttttactgtaaataaataaaataagcatcaataaatataaattatagaaaatagttactaatatactattaataactagaaaaaattgaaaaaaaaaaaataaggtgaaataatttatcttgtcaaatataattagtgtctgtagtagattcaggagcattcattgaatcatttaaataactattataactccaataacattaataatttcataacttaaataatgtgataacttaaataataactatctcatataattgtgtacaaaatatactttaattaagtattttaaaataaatgttatgttatatattaaacaaataaaagattgaaatcattttaatatatattagttaaaattattttaatcaaattaaaaaattgaaattttaaatatatattagattataatatatattattaataaatatatttttttttgaggggaagactattatattaatttgaataaattacacagcagtcattagtggagatggacattcatccaatcaagaacaagcagtgttcaccgtaagagcaaatttagtcataacatacatgagcataagtattaacagatcttaatagatgatagatatgtgctcatggaaaataggacactagaaaattaacatcatttgaaataacatgaaaagcaaaacatcattagttttctggctttcaataaaagttacttatcaaaaaaaaaaaaaataaagaggtttttacatggtatactgtattttggtattttattacttttatactgccacacggtagaaattacaaaaatattgtataatttatactgccttttatactgcccataacgccaagtgttattttgcatgcacttctctattttttttattaattaatttttttatatagtttttgatgtgatattcatggtcaaatcatggcagctcacatttttttttaaaaaaaacgtaacaaataaaataaaaaaaaacttaatatattatatttgttttgtaatcacacgttaccctcttatttgacatttcatcatttcatattttttttcatcatc

SEQ ID NO: 91239 - DNA, 959 bp, Cannabis sativa
atttatctctaaatagattgcccgcaaacttgaagcagctaatccaacaaaagagccacttaaatctgatttattggacggaaaatgggaactcatatacactacgtcaagatcgattttgcaaaccggggtgaatttcaactcctcatttcactttgtttatgtttttaattatgtcagataaggtagaacaacatagcacaaaagctattactactataattacaaaagtgattacaccaagactcggacactttgatcacattaggaaggaacttaaggtccttatttatacttgtataagtcagtttatgaactgatttcaagaaactagaatattctagccttgtgcttggtcctgagcttaaacccaaaactagaaaaatattgattttatttgcttctttttgtaataataaagtaattatgttcttttccacgtattgttgcactgtgttggggatgaaaaattataacatacctcaggaaaatgcactctctccataaaaacgtaaacatctcctctttatttcttcaacttttttatcacaaagggtctgcacatttctatatagtctcaactcctgtaatgtctttcccagttatcttttgtccttaggaatttttaaaagggtaatactttagtcattttatgttacttccatctttttggcagttagtttgatcatttgtttttaatgcatcactagattttctatttggcacaagacatcaatatgacaattgttactacagtttcttgtcaaaccaatagttaaaaacttgtttcatacatgttcaaatgacattcgcataaataatgttattatgacagagacctaaatttttaagatcaattgcaaattaccaagctatcaatgtggagacacttagggcgcaaaatatggaatcctggcctttctttaatcaggtattggtttctctcttatatttgttaa

SEQ ID NO: 91240 - DNA, 649 bp, Cannabis sativa
ttcagggtgaatttttaacggcaaggaggcatgatttggtacatgtcaaagtttgggaaaaaaaatcataattagcctataataattagcatgcttatacaatttggagtttggaccagcaattcaaacaatataccaaaaagaaagaaaatatttccttcgtgttattatttataaaaagttaatataatgcatagtaattagtacacggagttaatctgttatgcaaaataattacaatctttattaagttttagaatttttataagaaaaattaaaatttgaaaaaaaaaaactacaaaaatacttctggaaaaaaatttatttttattttttgaatttttttatttataaaaatacatttttattaaaagcagtaaattattttttggttattttataatttatttatagttgttttttggttgttttatagtttatttgtagttgatttataattctcatgattttttattgttttttatattatacttgtcatgaggttagttttttaattattttatattttatttatcgttgatttatagttatggtaaaattaatttctcattattttttaaaaaaaaaatgtatttttaattttaaagtgtatttttataatttaaaaaaatttactatgttttatgta

SEQ ID NO: 91241 - DNA, 616 bp, Cannabis sativa
ttcagacccgaatggtagtatggcctttgccttccaaggtgaaaagaacccgtctaaacctgactcttcgaaaaaccagcaacaaaaacgtggcagacccttctgcacacactgcaacatgcatggacataccatcgaaaaatgttacaaagtacatggctatcccccaggatataacaaatctggaaaatcaaaaggctgcaaatcaatttcatgcttctaatgacaccagtaccaataatgcagaaaacaacactatgttgcctcagttaactccaactcaatatcagcagttactgggacttcttgctgctcaaaccagcaatcaacagcccaccgatccaggaccatcatcaggtaaatcaggtattatcttaaccaattctacttttgattctgaggtcaatggttggattgtcgattctggtgcaaataggcatatttgctctgacgttaagtctttccaaagtcttcacaaaataaagccaactaagttggttcttccaaataatgaacacatcattgtaaacaaaagtggtaatgtctttcttaccaaagatttaattctccgtgatgttctgtacacacccatttttaaatttaatattatctcagt

SEQ ID NO: 91242 - DNA, 504 bp, Cannabis sativa
aaaatgcaatcatttggacatgcatgaatcttctcatacttcaaccctatcgaacttaaagttttcttcacctcatacgtcgactccaaaattttttttccatcggcaggatctctttaaaagtagatagaaatggactaaaacacttatcgcttactccattctttgcctttatgttataaaatttcactatggttgatagtcggcgtttttcacagccactaaataacgacctatctgcatctctaaccatgatatcaaatttttcaagattatgaataaactcttcttgaggtacatcaaccaattcttcaggatgatcatcacaatcattactttcaaaataatcatccacccctcgcctacctaacggatatgggtcacccatcatctattcaccatgtcaataccatttagtgtagcttttatcgagtccacaaaaaaatgcatgattctttaacatgctaatatttccttttcatatattaccacaatcgatacaag

SEQ ID NO: 91243 - DNA, 813 bp, Cannabis sativa
ttgctgattttgaaaaataccatttttttttctaaataagggcccaaaaaataatttttaccctatagcccactacatttcagggccggccctggtgatgttcggcctaataatagttgggaagattaatttgccaataaggcttcgatatgcagtcaggtcagtcagggtagttcctttttctttgctaagttttaaatttgtctccatgggtgtggaagcgggtttggttccaatgtaacttgtgtcatggagtaattgaatggtgaagggtctttgagaaattgagatgccttctttggtgcgaccaattttaaagccaaggaaaaaacaaagtttaccaaggtcttttagtttaaatttttggtcaacgggtttggtgaaatgcatgatgttattcgtgttattgctggccacgattatgtcatccacatacatgagaatggcaatgaaatatgactatgagtgtttgatgaacaatgagttgttagattgggattatttgaagccatcgttagtgagtgtggtactgagtttagagtaccattgtcgagaggcttgttttaggccatatatgctcttgtttaatttaaaaacagagttggggggccttatatcccggaggaatttgcatgtaaacttcttcatggagacccccatgaaggaaagtattatttatgtctaattggtggatatgccaattgtggatggctgcaagggccaaaaagattttgagggtattgaacttggcaactggaacataagtttgagagaaatcaatgccttgcctttggttgaaacctttggcgacaa

SEQ ID NO: 91244 - DNA, 671 bp, Cannabis sativa
ctgaccaagcacaaaacttttcaatgcagtcccaaaagcctttggcctcctctaaattggctttgcccacaaggattagatcatccgcaaagaaaatgtgagaaagcgtcgggcctcctctacttaacctgattccactaatggtttttgagttaagggcatcctctaaaagtctagaaagaatttccgcaccccagatgaacaggtaaggggacaaagggtcgccttgcctaagaccacaagagggaatgatctttcccaccgatcctccatttatgcagacattaagggaggtggtggcaatgcattgggaaacccaagatctgaactcttggggaaccgcaaagcattccataacatgatcgataaagccccagttcatcttgtcataagctttcattagatcaatcttgattgcaaacaaaccttctttgcctttctttctattaaaggtgtgaattatttcctgggcgatcacattattatcttgaatagctctgcctggaacaaaagcagcctgggtagggcaaataatctgaggaagcaggggtttgatcctgtttgcaattatcttagagattaccttgtagaccacattgcacagagaaattgggcggaagtggtttggtcttttcgggttttgcactttggggatcaggacgatattagtg

SEQ ID NO: 91245 - DNA, 948 bp, Cannabis sativa
atttagtaacataaatatgtttcttgaaagcaatattataaattagtaagtgttacatgatgagtcgacaataaattttttacgaacaaattttttacgaacaacaagacgggtcataaagcctttacaaatggtcagtgaatagaaaaaaattgtttaacaacccgcttgaaggattgtcattgttctttcgaattgatcgacatcttgcaaaagctaaattgcctttgacaactttctcatgcttgtccttaaagaacataattcaattaaagaaaattacaatgaatgaaaacacaaagcaattatctatctagacaactcaaattgagttttgtatcaaaaaaacaattacacatgtattcacattgagcctatccttaagcaaaagaactttatcattatataaagctctcatattcatagctcatacataaccaaaagttaatcaatttagaaataaaatagatatatccaagtattcagttgcaaataacggtattttctacttgaatattatactatcaaagcttcacacataaaagtatagagtaatgctatcaaaagactttcatctaatccccatattagaactttgaactcaaaaatcatgaatacataaaaataccaaagatttcacggtgatagcagttgttttaaaattatatggtgattattctataaatttattgtcttctttttattttagatgtttattttgtgtgaggattgttcaacttttaattttttttcactataacgtatatttgaagatatttttgttatgtactttcttgtatatgatgattttaatttttaatttttttattaataaattcatatatctattgaaaaatacataaaaataagtttaaaattataataattctattattcaattaatatttttatatatataatttaaaattactataaacacagcgaaga

SEQ ID NO: 91246 - DNA, 1008 bp, Cannabis sativa
agtgtgccctaaaagtgacccttgagacaacaaaaattcacttttcttaaacttagcctagagcttgtgttctcgtaatcgttgtaaaatcattcgtagatgttactcatgctctgcttgtgactaagagtacatgagaatgtaatcaataaatactataacacatatatagaagaaatccttgaatgccctattcatcacatacacgaaagtttctcaaagcattggttagtccaaaagacaaaactaagaattcataatgaccatacctcttaagaatggcagtcttaaaaaagactacctttccctgaagctaatcaaacaaattattgatccttggtagaaggtacttattcttgatagtcaacttgtttgattcctaatagtcaatacacatgcaaagggatccgtatatctttttaacaaataacactagaactctccagggtgacaaattgggtcaaggaaactctaagtcaagcatcctctaatgttgaatctttaattctttaagttctacaggagtcattcaataaggttccttagaaacaacatggtccactcaaggtgctaaatcaattaaaaagtctattactcgctgcggtggtaaacccagatgttcttaaagaaacacatctagaaattcttgaaccactttgatgtctttagttcaaacaaattcaggtcgaggggtatctaataccactgctaaaaaccctaggcaaccctcctacaataagtccttggctttcaataccaagatcactagaattcgagatccctgaactgatcccacgaacacaaatggtattttgcccacaggttggaagatcaccatcttttgcttacagtcaatattagcagcatacttggacaagaaatccattccaagtatgatatgaaaatccactaaaaccaattccactagatcagtgctcaactctctatcctcgatcctaattggcatagacataacctaccttttggagataactaattatttgccat

SEQ ID NO: 91247 - DNA, 619 bp, Cannabis sativa
ttggaataagctttggaatagtaagctttcagagtgtcataagattttgtggtagagtatcatctcaaactcacttccagttcgttccattctgagtgcaagattttgtattgataacctcatgtgccctgtttgtggaagcgagaatgaaactatggagtatcttttccttcggtgcaatctggcctttcacttggcagtattccccatgggatattttctctaatttagactctggtatttgtatgtgagattgggtcaaattcatttggagtcaaaaagataggggcattgatgtggataaggggtttttgtacgcttctattgtggtggacaccatttgacgggcacgaaatgataaggtacatactaataatctaggtaacattaaacactatattgactctatttcgttttgttacacagatgatagagttgttatcattccttctctcactctgagccaaatggatgtttggcgacctctcccgatggactggatcaaactgagttgtgatgttagaatggggatgaaacatatgtgcattagtatcgttgcaagaaatcatatggggatggtttgttgggaagttacgtcaagccttgattttactgatgc

SEQ ID NO: 91248 - DNA, 592 bp, Cannabis sativa
catcattagtattattcaaatatgtatgaaatatatacatacatataacacttattcacatgagacatgacccatatatctatatgtatatatatatattgccctagctaataaacttcattaagcctatccatattaatttgatatatatagttcattccctacttgaaaacaatggctagctcatacaatggatcatattcatattcttacatatatatatatatatttatatatataggttcatattatcattatcatcatttatcataattcccccaagacgaaggacacttctaaattcatatataatatatatttatttaaatataatggagtgtggctttgttcctttcattgactctcttgtcacattttcctttaacaaagctatttaaattgattttgacttttattaaaaaaagaaaaaaaaaattcttttattatgtacattgtatcaaattcataaaatattatatataggtgccgtttggtaaaccttttatttttgaattttttaatcacaaataaaagtaatatttttgtttttaaaaaatttatttttgaaaaacaaaaatgcgttctgtaacca

SEQ ID NO: 91249 - DNA, 519 bp, Cannabis sativa
attattacaccattgtagcaaaaagagaaaaggaagaaaacaaaagtgaaattttcatataaatttgtatgaagattttaatttattgttaatgtacaaacaaaaaataacaaaaacttattataattattaaaatacaaatttcaaatgcaaatttcaaatgaatctgattgagtttgatacataatatgatttttataatgaaaatgagttcatattcattgtatactaatccaacaagattacattaaaaaacaaagaaaaactccaaatctagtaaagtggagggaactataaaactaaattctaaaaatgaaaatacaaccgataagaaaaaaaaatattattagacattattattttttacgagtaattaataataattattaaattaaatgatattaaataaaattataacaataattatgatattttaaactataataaaattacgataagatacaagtaatttctaacattatttataggttagtaattagcgatattctttaaaagtta

SEQ ID NO: 91250 - DNA, 822 bp, Cannabis sativa
aaaacaacaaaaatttgtgatctttgccttttcttttctcccttaccctatgtttgatagaaaagaaatgagggaggaaataaaagcgtgaggagaaaagtggatggaatatttttttttttgggtaaaagaataaagattgaagaaaaaaatgatggaaaatccgtggctcacaaaattctctctcccctaaaaatgaatgtttattattattatcttttttttttttttttttttttttttacgttaggtagttaaactaaatttcttatttactaagcactaaaaaaacaaattacttcattcgaaaaaaaaaaaacaaaaacatattacttattaataacctttttttttttttgtaagtaagaatattattgcacatttaaacttcttacaacttacaaaccaattagagaactaataagttgctctcaatccctccaatcaaataataacctttatacttgttctctcttttgaaatgagaaaatttaaaataaatttctcaattaattctttttataagaaaattaaccataaatacatgagcatttcataaagtattatttcgggcgtcccaaacaaagtacataagcattcaggacaattatatagacttctcggtagaatttgggcctcctacatcttttcacccatttaagacactgttcaagatcagagtgttttccagtgatacctgcccaattacatatctcaaccataatttgaacactatacgtgcatttaaagaaaagatgctagtgtgacagtcagtagtcatgtgatctgtaaggggaaatatcgggtaagctgtgtaatccc

SEQ ID NO: 91251 - DNA, 690 bp, Cannabis sativa
tattgtttatttgtgttggagtgttctgaagctaaattaaggataattagattggtttgagctaggtttgtgggctgtctgtggtgttgtttaagcaagctttgagtttaagaactcatcctttgctctttaatggtgtttttgaattatgagtttattacttgatgttgttgcatggattctattatatatgatgtaattaggtactctcgaagttattgtgaaatttgggtttgaattgaagtgtgtaggtggatttttgtgttttctgcactgaaccagaattccagtttagggggacctgtaggaaccaaaattctagttggtccccaagaaaccccacagaaccagaattctggttggggaatcggtctaccggttggggcattttagggaaacctaatttttttcgtgtttgtaatatttagggtattgccatgttatccatcaatagggaaacttttagtttcaagtttaagtttctaagaagtgatttagcgtgtcactcatcagttttacgaataatgtgatttaggggcatgtaaatcgtcgagcagttgttccactcaagttagctagcacacctgaattcataaatgaggtaatattagtataatgatatgcatatgtgtttacatatttagcgtacatgttagttaagcctgttagattacattataatattggtat

SEQ ID NO: 91252 - DNA, 1068 bp, Cannabis sativa
agggcataaaacccaacattcatgccattaggataacctatgaatatgcaagcatgagcccgaggagagaatttgtgtctagtactgactagagatgaagcatatgctagacaaccaaaattcatcaaatgctcataaactggtggtttattatgcaacaattgatagggtgttcagtgctttaataaggatgtaggtgtttgattgatcaagtatactgcagtatgtataagatagggccaataggtcaaggctatagatgattaaaaagccaaggcacgagccacatttaagaggtgttgatgttttcgctcaaaaactgaattttgttgaggtctttcaacacaagaattatatacttgaatacctctttgaacataaaaggactttatattaagttcctttgcattatcataccttacaactttaatatttttagagaattgagtgaaaacaaggttatagaattgtggaattaaatgttgcacatcagatttggattgtaacatgtaaacccaagtatatctgctgtggtcatccacaaaagttagaaatatctacaaccttcaatgctatgaacatgaaagggaccccatatgtcaagatgaattaaatcaaaacaagattcaacaatatgattttaagaattaaaaagtaatcttctttatttagctaaatgacatatagaacaatgggaaataacatcattagtagaatgtaattgtttattgagtaatcttgttgtggacaaggaaggatgtccaagtctagaatgccatgaaaaggcattgttacaagttttattaaactgattacaaggaaatgaagatgtgggttggcaaattgcatcagaaagtataaattgccaatgcgtttagctatctcaatcttcgtgttctgagtaccctgtaatgtgcaagagttagtggtaaaatgaatattgttagatgtactagtgagaaaactggaaacactaaataggttgaattgaaagctagggacatagagtacattagagatgaaaagattctgtgatatgttgatgtcacccgagttatgaactctaat

SEQ ID NO: 91253 - DNA, 588 bp, Cannabis sativa
gaaaaatacaaaaagtgtcatataaaattaattatgtatagtattagtttaggggaataatttatgggttatttaagcatggaaattcaaatttccctatgtatatatgtatgagattcatgataaaatataggtacattttttaataatatactaaaaattgattttatttatgaaaatacgtttaaagaaattattttcacaaatattgatgtgccacatcagcatttataccagatttcaaaacaaataccgaaaataaaaaaaattgaaaaaatctcgtttctagtaattttcacgttttgagagttttgaaaaaagaaaccatttagttacttttaatgtgaataagatattaattggttacttttttatgaaaaaatttattttataattttacacatatataaataataaaataatcattttaatatgtgagaaaatatattttttgtctctaaaaaataacgactaatattaaaagttactttaacgtttctttttatttttattttttgtcaataaaaaataataaaactttaaacttaataatattcaacatatcaaataatatcataaattactata

SEQ ID NO: 91254 - DNA, 960 bp, Cannabis sativa
gatctttattaactagtaaatctcattatattgaaatggattttatttagggcacaaaacccaacacttggatcctacctaggaactttgtgaaagacatcctaccttggaactttgtccaggacttttatcctacctaggaactctctccaagacatagatcctgtctacaaactttgtacaagacttagatcctacttaggaactctagccaatacctagatctttcctaggaaccctgtccagtactaagatccaatctaggaacaatgtcgaagacatagatcccgtctaggaactctgtgcagaacttagagcctacctacgaactctatcgaagacataaatcctacctaggaactttgtttaggacttagatcctacctaggcactctttcgaggacatagatccattgtatacccttgtctagtacttagctgcttcttggagctcttcctagtacgtctcgagccaaattttctctggctggtcaatggcctttgattcgtaggctatttagttcatgatttttgattttatactttaccaattataggctttgtattttaatgtcgtctagttcatacccttaggttttgggcaattaacccatcttttgtctaaatccttttatgttctctagtttttcacctccctttgtcttgttccagagatgaactcgcacaactttagtagaggtgacaattggatttatgaagatatacttactctggatagctagtccttcttatacaactttgaatctgccgactccaattattattctgaagacatttgaggactttgttatttattttttatgcttttattttgcatagttcatcttttgttcttgtatggcctttaggccctttacattcgaacaggtgatatttttgttcttgtatggccttagggcccttttctttagaacaatattcatgtatggccttagggcc

SEQ ID NO: 91255 - DNA, 755 bp, Cannabis sativa
  modified_base (340)..(341): a, c, t, g, unknown or other
attatatttaagctagaattttttcaattttagaccaacttaaactagaataatttttagaatatattttattttattttaagaatcattttccacactaatattgaaatacatttattttaaatgtagacatttctaaattttttaattttgaaaattatatcaaagttgaaaattaatttattaattaattttagatcaattttaaattaagtaattttattaatgatttatttaaaataaatagactaaaatatatattttttttaattagaaaataagtaattagtttatgaattatctagacagatattttttaggtagactttttggtattttnntagatatatttaattaaattaaaaaattaacatttaagttgattttattctagacacttaaatatttgatatttttcttaagatatttataattaaatataggaaaattatatttatgttgaaaattaatttatttaattttagagcaacataaattagaataatttttccaattttattttattttattttaataatttcaaaaattatttttataatacaatggattttgaatttttttttttgttttatatttatagaaaattaaatttgacttgtaaattaattatttaattttggaccaacttaaattgaataattttcctaatatttattgtaaaattaatactaaggatggaaactattttttattttcaaatcttcctaagtataattttataaatattaaattaa

SEQ ID NO: 91256 - DNA, 640 bp, Cannabis sativa
ctcatgagaaataaaagctctaagctctaagtaattctaataattgttaacattaatcatgaaataaggacatgaaaaaatacaaaacatacatatctcaattatatttcaaggtttttaactacttgatatatagtgtcccgtttaggcaagattctaagatatcataagttaaatagagtggtcaactcttctaaaatgaacgcattttagcaactttttattcgatcaaaatataaaactgacgttatcccgtttatgcaagagtcaaggtcattatttcatgaacttctactattatttcatattaataaataatttctacgcagtcatctttagggatgagtctactagaaaaaaatttataaaatacttatctttcgagattttattttgtcaaattgtctaatggttgatcatctattatggggacaacaaagcgccttgagatcccattagaaacaataaccatgtaaaactcacaatgaagattgaatatctttattaaaggtcattaaaataaaatttattttctcttaaactattttattttaattatgaatgaaaaatatctaatttaagttgatctaaaattaattttaaaaaaaaaatcaacttactatttttcaaaaaaaaaaaa

SEQ ID NO: 91257 - DNA, 606 bp, Cannabis sativa
cacaagtctaacagttccattataacatatgttatcgcctttcaccaaaacattcagcaacacatcatcttcaaatctactccatgtacgcctaaaactcttatcgctacaaacatgtttactactaactccaatatccatatccacatgcatttctcatttccaagtcaccatattaataaattttacatatacatatcaaattaatgtttccaatacaaacaatgataagaattaaaatgatccaaattgttgatgctgaaaaattatcatataacaatcatataaaatattttatatagtcaatgatatatttataatttattaaaatttacccaatgaccatctacacatatttgaccaaataaaaattgtatattttataatttatttcattttgcaaatatatatatagtgttgactggaaaatttgccaactaactcgaagtctaaattatactaattaatcaccaataaaatgttagaaataataaataatagaaaaaatactaggaattataaaggtttggcccccttatgtatgggtaatgacctacttgttaactcaaacttttatatctccttgttttgatgattaacaaatat

SEQ ID NO: 91258 - DNA, 965 bp, Cannabis sativa
ggccggcctagtgactccccttggctagccaaacatggtggtatagctccttgatggcttgcttaaatcctttttcttgctgcttgacggttttgccatgcattataaggagaccttatcttgctattagcaaggttgtattccatatgtactctgtctttgcttatgtggagatgccacgtcagatggacaaaatttgggataaaattttcctccaagtctctgttcaaacatctggtggatagggactttctagctctcgtcttgtttgtagtagtctttatcgagcagccttgtctagccaagtgttggctttttgcatgacatgcttttatatcattgatcttctctctccatatatgtctcatcttctcttctttgatatctcttttttgtacctgccattcataagttttaagcttttaggaactttttgattctcatgttagattgtaatcattttggtatgttgatccacatgacagttttagaatgtgtaatgtgtgattttctgatagaaaagattcagttttgtcctttgttgtgattcttgactctttgagtcataaagaacacaaggcacatatttgagttttgaaaaaaaaaaacacacatttaatttcaaaactaaccctggccggccttggaggtcttgcttgagacctggcaggtcctaggacttaatcatgggagttggctaactttagggtttcaccttataaagctagtcagttcatgcttgggtttggtgaccttacccagttcatggctgagtcatgggaccctggtcaaccctttttgcttgggaaccctagctggcctgggcattggttctaagtaggtggccaacattatttcttcttttgacttcggtaagaatcctgtcatggccctgtaggcatatacaaccttagtctcatacgtggttcccttagaaactttgtatgaaacttaatggtgagtct

SEQ ID NO: 91259 - DNA, 983 bp, Cannabis sativa
  modified_base (454)..(460): a, c, t, g, unknown or other
ggagtcattctattgtgaggggatcattttttcaaacttcctaattaagagctattatgctgttgaaatacttgtaagttttcttgagaatattaagaaactcacttgattgtaccttgtgattttaattattctcaaagtaatataacataaaggggagtagactattaccattattacgggactaaacttttataaattttttgtattcttatatattgctctattattattattgttattattattattattatattagtgatcactgattattccatttcattactttaattactcagtttcgttggctaaaaaagatatatatatatgtatatacaaaagcaaccctcatttctacatgtcttctctctaaacctttattatctagttcattatatatagttctaattcatcataaattaacaaaattttctctttttttttaaaaaannnnnnnaaaaataaaaaaaataaaaaagtacgagcaagggcacatcaatctttttttcattaaattaaagaatgggtcacttctttctttctacatagaactcaatttcgagtcctcacatcacacagtcaccaagtggagttttgtcgttttattatatatgactcatagatgatatatatattcaattgaaataaacattataaatcataaaaaatgctaaaataattataattattagttattatattcttaaagttggtaattaaggataggtttggttgggagaattaaaatttaaatatatatatatataaaaaaaaatacatcatgctagcgatattttataaaaaaaaaattataatgttttagtagatttattaattgttaattttttttttttatatattatacctacataaaggtgtcgtcactgtatgattttttttttctttccaacacaaaatatatcatatatatcaaactttaggaaaaaggaaaatttgttatagggagaaatgagtaaaag

SEQ ID NO: 91260 - DNA, 569 bp, Cannabis sativa
tatatatataatctcaattcccacaaatccactttaacacctcacataacaagctcttgacaactgtacaagatattttaactaaacaagctgagttatcaaagataaacataaaacccatgtaaaacatgctcagatgaaactaaagtgttcagaccacacaaacaaaaataatttggcatatacaaaactatgactcttacatattattaccatattattctcattaaaataacaaatcaatatatactaccctaaaaaagtgatcatcaaagtagaccaacaaagaatgacacacgttttttgaaatattatacaaacgccaaagtatttgaaatattaggccaaaaactaaatctaaaggacttatactatcaatccaatatatatagcagcaagatctgaatccaagtaaaacaaagacaaaatcatatagctatagcctatatatatatagaacaacaagaaaccaaactaaaacttaaataaaatagagaaatttagagtgaaacttcgctatgttgtaatttttatacacttaactcttttttttttttttttggcaaaac

SEQ ID NO: 91261 - DNA, 1076 bp, Cannabis sativa
acgtattgataagttttaattttgaaaaattacaataatagtttcatgttggaatttttgtgaaattgtataaaaataaaaaatggggtatgtgaagtgattggagtcccacatggaatagacatagtgcaagtttgagattttggtatgagcccaagggtatccagttttgaggagatgagtgaagtgtcacttaagatgagtgaggtgtcacttaattttttttaaagaaaaattatttaattaaataaagatttatttatttatttatttatttattaattatttaacgttaaatgaagtagtaaaaagcgatcagtcaatgatctgctcttcactgccatgttcttactcctccacgactaaattaccgtttgcttaccgtttaattttagatcgacttctctatataaatcgtatcagaacaacagaagaaaataactttttcaacattaaaaaaaattctttcttcctaaccatttttctcaaagcaaaatttagggtgtaatcgagcgatatagttcggtgcagaacatatcgtatatggagactgttttatcttgggaaagtcgtggttgcaagactgtcgtgcacacttcgagtagagccacgaaatgtcttaaagaaagtgacattgtccgtgactcagccagaatgttctatcgataattcgttccagtttcattgtttttaaatttgatttaacaattttaagatgttctgttctgctatggctactactgataaattttctagttctgcttctaacgatattaacaagcctttccgttttgagggattacattttaagtgatggaaacaaaagatgttgttctacctgatgatgaagaaagtcgctttcgttctcactactctgaagcatgtcgtctccgaagcttctaccaacaaggataaaaaggctgaacgcgagaagcaacaaaaaatttggactcctgggtcaaaaacgactttctatgtaagaattttattcttaacggttagctggcgatctgtatgactattataatcagataaatcgacaaacgaaatctgggatgctctgcaaagaaatatga

SEQ ID NO: 91262 - DNA, 540 bp, Cannabis sativa
catttttagatgagattttttttttgtacactaagaagaagaatgaagagttgattttataaaattttgagtgagtatttgtagaaaaaaaaatatagtcgttgatgaatagtaaaatagagattggagaaaaaatagtcgttggtgaatagtgtaatggcggtttggagagaaaatatagtcgttattgaatagtaagaataagaagaacaaaaaaaagtgataatgatcttgattttatgaaataacaattggaaatgaaatagtagtaaataataacaagtatatttttatatttatttatatatatgtatagaagcattagatggtattaccttccattcaaagtaatacgttaaaattagatttacaataataaagagtaataatatatattagaaattagattaataataatgatctgttagacattatgttagttataataataattatgttagaagttaatttagttataataataattatgttgtaagttaacaatatatatattccctatattataataataaatattgt

SEQ ID NO: 91263 - DNA, 624 bp, Cannabis sativa
cgttagataaatgactggttgtgttgatggttctattgtgtttgatttttcaggccaactgcatagactctacagttcccgccgaggctgtgttccaacaagaagttaagaagcttcaagccgagcaattcaagcccttcgagcaagtgactcttgagccctttgagcgtgaccatgcttgtgttgttggtggctaccgtatgccaaagaaacaaaagcctgttgcttaaacatttatagcttttaggctttagacttgaaattaatcataataggcttttaggctttagacttgaaattaatcataatatgtatcagttgaagaagcaaagttagcagaacttttttgatttgttttttattttctttcttgttggattgtaattgctgagcatagcgttttgacttatgagttgagatcattatatattcacttaatcagtttgcttagtatgttctgtttatgattcattatataatcatttaatcagtttgcgtagtattgctgagcatagcgtttttggcttcatcattcatgattgattttcaaaaagctcactatatgcaatatggagattatggattcatctgtcatcgctatacttgtattatgtgggttatttg

SEQ ID NO: 91264 - DNA, 701 bp, Cannabis sativa
aggtcctagtctgggtccatgtttaggttcgggtcctagtcaaagttgtgatttcgatttcgtgtcttggttcgggttcgagtctgggtctgggtcagggtctaagtcatcgtccgagtctagggttgggtatgggtccaggtccggatcctgttctgggtctgggtttgggtctcggtcggagtccatgtcttgggtatgggtctaggtttgggtatgggtctgggtctcagttcagatgcatgtcccaagtttcgatcccggtctgggtttgggttcgagcgcaggttcgtatccaaatacatgtctaggtccaagtctgggtctgggatcgagtctcaggttcaggtttgacccagttcgagacctgaaaccagaatccgacaaggactgggactagaacccagacatgattttgtaaaaggacccgaacctaaacccaaactcagaccagaatctatgccaggacatggacccaacaatgaactgtgacctaggacgtaaagcaagaccgagacctcgactcagaccgggacccggacccagtcctaaaaaccggggctgaacccaagacccaagcaacagactcggccctaggacccgaaacttggacccatactaggactaggacccgaacacaaaccgggacctggactcggaccggtcccgaactcgaacaggaacaagaattggacccggac

SEQ ID NO: 91265 - DNA, 920 bp, Cannabis sativa
agaatattattttcttggtcccaagtgtattcttgtatagaggttctactgtattagaataccattccaatagaatgacattttcatcattttagtggaatgacatttttatcattttagtggaatgactattctattttgaaatgaaaggaaagaccattccaatgcaagatttaaaaaaatttaataattttttatattaattttttatgcattttaaattttattccattcaatttctattccaattccaattctcatttctatttctatatttttattcctcccaaccaaacaccaccatcttatgataattttatgctatctaaatttcttattcataaagtgaaaatttcatcattgatcatatataacttcactagtgatattagccatagactaatctttaatctcaacaatctcaaaattattatcttgtcattaatgttaataattgtcattggtggtgtttagttggaagtaatgtaatgaaatgaaatggaaagataaggaaataatcttcattccattcttctttttggttgcatattaaagtgttagaaggttattctaatagaatggcctttccaccattttggtggaatgacaattccattttgaaatggaaggaaagatcattccaatgcatgatgagaaaaaatttaataatttttttatcaatttttttcatgtattttaaagtcatttgaataataaaaattaggctcaaatttactagttacctttcttttattttcaaaagatctcgaataagtaaaaatattgaattcatcaaagaaatgttttctattataaagtgtgagcctacactatcttaaaatttactgttaagattaaatacatcatagtgtgtaaattgaaaaggtcccaatcattactcttattaaaatatcttattt

SEQ ID NO: 91266 - DNA, 975 bp, Cannabis sativa
aaaattatttcggatactaaaaaagaaagagatgtatcggtgtatcccttttaagagggtgtattatagaatttcccaaaaatttattacccttaatcatatttgttaaaaaaattagtagagaaagaattttttttttatttaatcaaattctccctttctaataaagtaaataagtaaatataaataaataactatcttactattaatttctagtaaatatgcggtaaaatcagtactcataaattatggtaaaatcaactcattataagtaaaaagcaaatggagatgcgggggatcgaaccccgtgcctctcgcatgcaaagcgagcgctctaccatttgagctacatcccctattgtgttagttctcacttttaaatttaattattttaaaaacatttaatatatacattttgattttcttataaaactttcccaacgatggaaatattattgaaagaaacttggaacaattatatgctatagcattgaataagtctatggtgaagatcactaaagaaagtgccacttcatttagaaaactgtggagattttctatcatatcaatagaagaattgatatgacaaattaatctattttggccttgcacagcttatttttatgtgcatatagttttcttaaatatttgaatatcattatgaaaaatctgttgtgagtaaattaagaattgtataaatttaaaagtcgaactgcaaatgctaagttaaacatgactttttttttgctcttacattttctgtagtgctagttaatttttcattattttttagtgctattacatttattacagtattgagaatcaaaataaattaatgaagcggtacaatgatccacagccctagccaagcccatacatataaggccatcctatacatataaacacatttgaatttctggtttttgattcattggaaataaatttagttaccatggattaatcaacataaccaag

SEQ ID NO: 91267 - DNA, 748 bp, Cannabis sativa
  modified_base (41)..(54): a, c, t, g, unknown or other
cattgttttagaatttatattagggtgttaatgaaacatannnnnnnnnnnnnntagatcctggtaaaatatatcctacaaatataagtaatgagaatgtttggaattttactggtttctatggctctccttactctacttctaaaaattgcacttggactcttcttaatcgtatttttgattctgctccttatttgcctttgtgtattagttgtgattttaatgataatttgtcaacgtcttgactggtgtgttgttagtagctctttgcagacgctctttccctatgccaccttgatacacttggattttcttattcagatcatcgtgctatcaaaaccattcttgcggaaataaaaattgctcctataaatcatggtcaattctttattgaaaatcactggttttttgatttggattttttcagagtggttaattcctcttgaaaaactttcagccatcataataccacattctctttaattgacttcttaagaaatcaaaataactgtgtggctaatatcaaagagtggatttctggtcaaaactctcttaaccatcaactttcttccactcagattactcttgagaggctttatcaaaagagaatacctaatggtgatgacctctcacagattagagctcttgagtcctctctcgagaatctgttgcataaaaatgaaatttactggaagtaaagatccaagattgactggctcaaatctagggacaaaaatactaggttttt

SEQ ID NO: 91268 - DNA, 857 bp, Cannabis sativa
tcagaacatcagctgcttgatccaaggaaggaacataacgaactgaaatgagtttgtctaaaatttggtccctaacaaaatgaagatcgatctctatgtgtttagagcgtgcgtgaaaaacagggttggctgccaatgcagtggcactctgattatccacccagataacaggaatctgaactatagccacctgaagttcatgtaacagagatctaatccatttgagctcagctgcagcattagccaatgctctaaactcactttcagtactcgatcttgctacaacctgttgtttcttagccgaccaactcaccagattgtctcctaagaacaccaagtaaccaccagttgatcgacgatcgtctaagcaactagcccagtctgcatccgagtacacttgaagagtcatagcagatgatggtcttagccataagccatctttgacagtgcccttcaaataccttagtaatttcttacaagcctcccaatgagttgaagttggggcatgaagaaactggctgagcttgttgattataaacgccacatccggacgagtgagagacaaatattgcagggcacctagggtgcttctgtaaagtttgatgtcttcaaacggttccccctctgttaaagacagtttaatacttgtactggtaggattaggacttgcttttgctccctccatgtgcaatttcactagcaagtcagtaatgtactttgtttgggacaagtacattccactgtgatctatataaatctcaactcttaagaagtaatgaactggaccaaggtctttcaatgagaaggatttattccaatccgagataagtttagagatgagagttgtgttaggaccg

SEQ ID NO: 91269 - DNA, 772 bp, Cannabis sativa
  modified_base (666)..(674): a, c, t, g, unknown or other
tttcttactttgaatgttgaggtttttttgaactttgaagctctcagaaaccagttacagtgttcatccacacaagtgaccacatactctcttggttcagatcttttggttataaattgaaaattattgatcatagcaaaaaaataaaaaaaaaacacaatgcagaattcaatattttcttgtcttgtaatctatcctttttcaattttgaaaatcttatgatctattattatttctctttcttcttcctcccttttccttttgttttcttgtgttttctcaatcatacaatcagcaacattatcagctacttgaaatatgtttggtaatgctagtacctcgcttatttatgaagtttcatcattgtattgcctacagtcgtatgctggctggttggttatttataaaaccagtttctgaacatatgtgctttgtgttacaacttcattttcagatgtttattgagcaatgatttggaatcttgtctcatctttagttgtgatgcaaagtagagattcaataattgcattctgtttctttctgagttccaagtagaacaacagtgacttgccacttattattttcattggtgatgaccttgggcataactggtaatgcatttctattggagtgttgcatatgattgttgggctttatgccctaaannnnnnnnnatttcaatgtaatctctatcatttgaatataaataaagagaagtattttcatcacttatttaatgtgtcatttggttcatgttatcatttatatgttt

SEQ ID NO: 91270 - DNA, 574 bp, Cannabis sativa
attttagtaatagcggggcaacttagatagacattggaaatctcgtgattatttgaagtattagatttgactaaattatccctaagtggtaaggatatgttattttaaatggggtttggggcataggtatgagatttttgtatatatatgtgtgtgtatgtttgttgaatttggattagtttaaatttggtttgatttttgtttaattttgtgtgcgtttgatttgaatctggataataagttgcggtggtggtgtgtaatggtgtttttgatggtagtgatttcggtggaatgattgtggtgacgattgtataaaaaatgaggaggaagaagaaaaataataactgaaaaaaaagaaaaatatgatctttttagaatgagaaaaaataaaagaaaaaaaaatattttttttaaataataataataattatatatgtggatcaataaatttatgtcatatgtatatgtgcacaatttaatataacatataaaaattggatggaaattagcaatatactattttaattgttaataaaaataaattataaaaaagataaaataaattagggtgttt

SEQ ID NO: 91271 - DNA, 2033 bp, Cannabis sativa
agattgcttgtgagtttagactttatattaaattattattattatagactctgagcattatattatagttgtgataacaatagttattactatattgatttcaatgtatgtgttgtatgaagtatgacttggctttgattgattttcaaataattttgccttgaaaccgcgtcattcagtcagagactcataactcattcattcattcccagccgacaatgctttataatttcattactaaattatagtatttctccaaataacatgtacaatatttcatgaaacaaaagttagttaccatccatatttgtaaaaaagaaaaaaaaaattaccatacacttcaaaattattactactctttttttggacatttaaaaaataacataggaaaaataataagtaatagatttttatttttggagggaatagtaaattgtcatttattgaactaaagactcataagtggattcccttaaagagtacctaaattttgtttgaaaaaatgtcacatagaaaaaaattcaaactctcaataatataatgaaattattgtagttagttagatatgtataacatctcccctaacaaaaaaaaataaataaaaaatatccctatatgataacattaaactaaatatcttttaagtagcatagaatgagtaacccaatccatacaaataataattaaaaaaaattgcattatacactcattttctcttgtattatacctaaaataaaaaagaacaaaaataataaaaaaaatagcaaagtgtgagaaattcagtgaaaaagcatgactacttggtattattgaggcataatgagggtggtgggtgtagtggtggtgacgttgacgaaggagaagaagatttttgctttttgaacctaaaaagaaagataaaacctgatgctactaacagtaccacacctgtaatcccacacaccacactcgccaacaccagcacgtgcctcacgtgatctccttctcctccgccgccaccgccgcggccatctcggatcccgccgttgctccaccacgatgtatcgttcgagttcatagccttcggcaatgcaacatcggaagacgaagacgaaggcctcgaatcgctgccttccgatcctcctccaaagaacgtcaccatctccggcgatttctttcccggcggcggagaatcctggtactccaatccgtgttccgatggcctcagctctctaccttccgattctccggccataattaagatgatgatcgtgcaaattgcgacgatcgccggtcgagaatagaatgacgccatagatattctctcctctttctctctcttattcccctttctctctctagctggtaactactttgctttctctctctcttaagcagtggagtttagtgagtgtgggggcctttttatataagagcttaataatatggataaagctcagaaaacggtgtcgttttaaggttgaaatgcttgctttgtcttcacacacaaaattcgtcacttttttttttaaggataataataataatattagctcttttattaaattttaaacaaaggtttaataaccgccgctacctactttgtcctctattgcttttgctaattaagtaaaaagggctaaatttaacgttgtttttcactattaaactttaatttttggtggtaaaatctaaattagtagtaaatttaaagtatcattcaattaattgttattataatttgtttatgtgtacactcttgtacacattacatatttatattaatacacttatattattatttaaaaattattttcaaaattcaatttaaaattaaataaaattataaaaataaaaaatatataaattttgaaataatttttatattttaaaataataatgttaagtttaccaatataaattttacacatgtacaaaaaagtacatataagtattttatattggcaattaactgtaaaaaaataaatgacaccttaaatttgcaagcagttcagtattttaaaaaatgttaccgtcaaaatttaaacttacaa

SEQ ID NO: 91272 - DNA, 696 bp, Cannabis sativa
aaagccgaggcacgcaaactcttagactcaatacctcgctatgcaattgttgaggccaaattgtacaggagaggttattctatgcctctcttacgatgtgtgttacctgcagaagccaatgaaataatcaaggaaattcatgagggattttgtgaaaccatgcaggttggcaaagtttgtcaaagaaaattatccgtcaaggacactattggccaaaaattaacaaagacacacaagaatttgttaaaagatgtgacaaatgccagaggtttttacatatacctcgtgtaccaccaacaaagttgagaatgataacctcaccatacccattcgtaacatggggcattgacctgatttgggcattacccgcaaggcaaggaggggcaaaatacgcagtagtagcagtcgacttcttcacaaaatggagagaggctgaacctctagtttccataacttgcaaaaaagttcttgattttgttatcaacaacatcatttccaaattggaataccaatcaaaatagtgtctgatgatggaacacagtttgatggtgagatgttcactgaattctatgaagggaataagactatgaaaagcttctcctcactatcgagacctcaagcaaacggacaagtagaagctgttaataaaatcttaaaagatactatcaagaagaagctggatgctgctaaaggaaa

SEQ ID NO: 91273 - DNA, 714 bp, Cannabis sativa
gggggagggttgaggaatgaacaacaaatggatgcttttcgggacacattatctttttgttctttacatcagcagccgtttcatggggacaagtttacttggatcaaggggagacataatcctaatgctcttaaggagcggttggattggtgctttctcaatgatctctgggaaaccattttcaaaccaatcactacagctcatttggattattattcttcggatcatagagccattgcagttacaattgattacatcacttcaaaccagcaacagccgactcgaaaaaccagattccggttcgaaaaaatctggttaaaagagcctgatgcagcctcaataattcgtgctcactggtcagatacggatgctggtggaatggacatttttctatcaaatttgcaatcctgcacagatgctttacagcaatggcatatcagaaaatttggcaacatgaagaagaagattaccaatatgcagcagcaagtttctcggcttaacaatccagcagatcgttcagtttcaaccatggatgaattaaaagattctgaagccatattagacgaactgctagaacaagaagaaacatattggcatcagcgttcaagagtggattggttgcaatgtggggatcagaacacaagtttttttcatgctcatgccacgtctaggaagtctaaaaatgtcatcaaatctttaattaacactcaaggt

SEQ ID NO: 91274 - DNA, 1443 bp, Cannabis sativa
gagatgaaggctaccgaggcggctgaaatcctgagtcgtggaagtaggttctgagttgatgaagacattttcatatataactgatcggtaatggagaaagataataatgatatggtgaagatggtgatatctttctttctcagtctctgtatatatatatatttatagcttgagaagaaaaagaaaaaggtaactactcttgaaattgcacatgttttttttttgtatttaattttagaattaattatgataattttaaaaaggaaatacaattgattttttttagggaagaatatatttgatattaattaatttgtgtgagaatataatatatattaatatacttgtagtacttcatagttcataccttaagatatccagtgtaataaatattagatatcacaatattgtttggaaaatcaattatatccatgaaaatgaaaaatatatattatttggaaaaaaaaaacaatgcgagaaatgataaatatcatttatacccttccgaaaaaaggaaagaattaaaagaaaagtgtgagtatttattaaatagtcataaaggactcaacaaaaagaaaaaatccttatcaacttatgatcaagttatttatgcattttaatgaattatatatgttgccataattaaattcaaaagaaaaaaaaaacaaaaaaacttaattaggcaactcattcagtcaaaggaaaataaacttgattaggcaactctattttctaaaaaaatatatattataaaaggtaagtccaagccaaacattcaatatttagatttactaaatgagaaatgttaaagggcatcagtagtgcctaacaccctcctatgtatcaatatcgttattggttcaactaagtaccgtgtctcatataatttaatacaatagtttttagggagtatcgctagccaatcgtaatgcgacatgtcgagaagatgttaaacaccactggtatctaatagtaatgctttggaaaatattaactaaagtatgttgttcatatcacgattgaataaggtttttctagccacataacatcttcggactggccattggccaaaaaataattacaaaatttgtcatttgacacttttgtaaacctttccaaccaatttcaataaaactataacttaaatttacttttttttactggaacagaggaagaactttttgttgaattatcaattcaagttatacattggaagaataaacaagagttgtcttaaatattagtgttacatctacgttattagtatataaggccttttaggaagtgtccaaaaacaacacagtgagggtttaggcccaaaacggataatattatactaatatggaagtcaagtaaggtagcggttaggaccggtcctaggttaatgtgggctaggcccgcgcctagggcacactgattttagggggcccaaataaaaaaaaa

SEQ ID NO: 91275 - DNA, 1081 bp, Cannabis sativa
cctctgtccaccctaaccaccaaaagggcggggagaagactacaggtaacaaatagaaatatagcaaagaaggaagagggaagagcagggccttgccttttcaatattttccatcataacaccttttacttctgagacctgagcttttactttagcaagcttgttgatctcatcaggatgatccacacaatattgcatgtgctcctttaatttggatctaaaaatatagttcgccaaaagtttgatgttagttcataaattagaaaggcttaactttatttaatggattagcaaagagaaatgatttacccaaactccctgttcaggctattagcaactgctgttgcagcttttccaccaccgtatctcttggtgaaatcctccttgactcgctcaaggaacgcaataggaatctgtcgaccaatagcctctacagcaaccacgcagtacgctgcagcaatcatagattatatcaattaagatctctcacagaaaatacgcaacaagtttattagcacccacacctgtttgattttattcatatcatatatattctgtactgtaacagaagtgtataaaactaatatagttggtcataacattctttttcactatacatacacatcaacgaataggtaatgaaaagagatgtaaaaggaaaggctttgaaatgaatttactaattttacaaaagattaacaaaacatatttcctaaatgtattagacatgaataaatgggaaagagaaacactttacattgtttccattacatattagtaacaccatagtacgaacaaacatgtctattttaatactatgacaatattcacccaagaataaaaacaacaatactatgagatcgttggtgatgcatagtatgctatcaaacttaatacaaaagaagcaatattaaatttagaacaattaaaacaaccatggcagcaaagcaagactcactaaaatccaaacaaaaaaaatagagtttcaaaatcgtacaaattcctgttttggtatgaaattcatagcacaatacagaacttcctttatttttcgttctgttaaagcagcacttcatattag

SEQ ID NO: 91276 - DNA, 750 bp, Cannabis sativa
  modified_base (37)..(51): a, c, t, g, unknown or other
aattcatattaggttgttaataaaacatacttggtannnnnnnnnnnnnnnggtaaaatatttccaacaaaattatcatcaatatggctctcatcagtataaccaaagtagacaaataataagaataacaaaagaacatattcctttttattttctagaaaattcggcagcataacggttgtattttgaataaacacaaaaatcataacatgcataatatttgtacacaaaaatatatttggcactcagtgccccagaatagtccgaaaaatatgcagattaagtttttaatttttcaaacaatttgtaaatcataaaatttagaatatgtctaatgttatacaacacatataaaaattaagtccaataatcaagttgagtccttacctctcccaaatcgctaaacattgtccaaaaggatgatcttaagctctttagtcctgagctccaattgtttagtctaatcttagatattactctcagctataccatcaaatggccaaaataattatcatcatcgcattctacattcaaaatcgagtccaacgacatataatatgcatatgcttaaagtttagggttctgaaacctcacctaagcggtgcacattaactatcggtggcggtaaaaattggtgtaccaaaaatgtcgtccaaaataggggtagtatatatcaaaatgaccaccttgacgagtagatcacacccatgccaaccatttgtcaaaatggtacacgatgtcgccggaaag

SEQ ID NO: 91277 - DNA, 638 bp, Cannabis sativa
tctctctttctctatttcctcaggtcgaagaaggttcgtgccaatggagcttcgagtttcagggtggttcgttgacggtggagcttcggagcattgagtttcagggttgttcatggacgacggcgctgcagagcttcgaggtttgcgactgttagaagtcaaccgaatttggggttcatggtggtttattgtcgatggaggattggggtttgttgtgggggaaaaactgattgtgaaattttttatttgttttgaaattggtctgttgttttttaggttcagttcatggtggttcaatggaggattgttgttcgttagtttcgttcatagaaactaattgtgaaatttttttatttgttttgaaactggtcagtaattgttgtaggcattttttaggttcaaatatgtagataataaatagtattgtttaattttttagctatataatattgatttaactgttgtgatgttagttttgtttgaataatttgtatatatataagactatgcttaatgttatatatttattttgattaattgttctttgtaatattttgtataacatttgtatatttatttattaataaatatattatttaatattatagctcaaaaaattaaatatagtcatactaatt

SEQ ID NO: 91278 - DNA, 920 bp, Cannabis sativa
cttttttttattataattttacatataatttcataatatatacataaacaacttatgcatgattttcttagattaaggttctgtggttgtgtgcagtgcttataattgtcttctaaagtttaattatgaagaattaggatggtttgagttagatttgtgggctgtggtgttgtttgagcaagcttttgagtataagaactcaagctttgctctctaatggtggtttgtggttctggttgttttgggatattttattgcttggtttatgtttattgtggtatattaagcagatctgaaaggtttggtgtggtttggtatcgatataaggttgtagtgaaattttaagtgtttcctgcagtgaaccggtcaactggttcagggggacctgtaggaaccggtcaaccagttggtccccaagaaaccctacagaaccaaaattctgattggggaaccggtctaccagttagggcatttttgggaaccctagtttttcccttttcgtaatatctaggttattgccatgttatccatcgataagaaaactttcagtttcaatttaagtccccgaaaagtgatttagcgcgtcacttaccaattttacgaattatgtgatttaggggcatgtaattcgtcgagcagatattccactcaggttggccgacacacctgaattcggtaacgaggtaagattagtataatggtatacatatggtcttacatgtttagcgtgcatgttggttaagcttgttagattacattataatagcggtatcaatatatgtagtattatatatgatattgataaatgtatgttgggttaagtgctactcgacaatattacatcggtacgactagtgtacagagtataggctggtattatggtcgatagtactgtactacttgacagtatcacatcggta

SEQ ID NO: 91279 - DNA, 943 bp, Cannabis sativa
ctaaatagaagagaaaattttcatctgtgaggttttaagggaaccaagatcgtggtaaccattagggtgggtttgaaagcccatacacttaccgagaatgcccaaactgtaagaagcatcattttgaatgagtgtgtcgaggttgagaatgtttctagtgttgtataattagacattataaaacagactgcccataggtaaagaaagaagagcagaagacagaggtgaagcccgctctagtaagggtgtttgctcttactaaggctaatgctgaacctagccattcagttgttataggttagctctcggtcaaaatttcttattactctcatttgtttgactctggggccactcattcttatatggcaacctaattaattaatagatttagtaggcaatatgataaagagtttggaatcttactgcttggtgcaaaattagttatctccaaaaggtgagttaggtctatgccgattaggattgaggatagagagttgagtgctgatctagtggaattggctttagtagattttaatattatacttggaatgaatttcttgtccaagtatactatttgtattgattgtaagcagaagacaacaaactttcaattcgagggtgaggaactatttctttttatgggatcagttcaggattcccaaattctggtgatctcagtgttgaaagccaaagacttgttacaagaggggtgtctatggtttctggcaatggtgtttgataccactcaacctgatttagtttggcttgaagacatcaaagtggtttaagaattttaagatgtgtttctagaagaacttcttggactgccaccacaacgagaaatagattttgtaattgacttagcacccgagggacactagtttctaaggcaccatatagaatggctcctaccaaaaccaagtaattaaagatgcaacttcag

SEQ ID NO: 91280 - DNA, 527 bp, Cannabis sativa
gcccggcccggcccggtttcaaatattaaaaaaaaacttaaatccctaaaaaaaaatctcaaattctaaacctaaatctcaccacttctttctcagactctgcactccgtggctccttcatctccagccccgccgccgacgactctgtctccctcacctctgccacccaagacccaatctcaaatattaagtagttattatttattaaaataaacaaataaattagagagagagagagagaaagagaaagtgggtgtgactgaaactccaaggaaacaaattcactttcctcaattcgaagaagaaagatagacggcttaggcagtcctctaagtctcacagtcacaggtatttgtttttgagttttaactatatatattatttattaattcatataaacaataattgggtagctaagcaatttgccgatgatcatgtgtttatgggttttgagttgtggtgggttgattcgatctccttttactatgcttgctgagaaacccattaaaggaattgagaccataatt

SEQ ID NO: 91281 - DNA, 549 bp, Cannabis sativa
caccatccttgcttcctgcatgaaatgaattaatgaatttatctttcgaagatttaagcaaagcaaaagcaaatatattgagcttgttgaacaacttacttgtgtctcgtggttaggtacatagttttcaacaggtgttatactcacaatctggtctactattgttgctccctgtgaaaacagcacaattttaattcactaatataagaataaagaaatgcacataaatgttgctgcagcacaaagtgataattctcccacagtcctactatattttcctgtcagtgacaggaaaattaaaaaagaaaaagacaacatcgtcagaactcagaaatgctcacaacaaaatctgattctaaaagcatcattgttttcgaaactcagcataaaaagttcattgacacaaaataaaaataataattgaagataactgttttacatattactcaaattattatagataggatattttggaatgcacgagttttctaaattaatcttgtgaatatggattggccttaccggaaataaagttttccatctctttct

SEQ ID NO: 91282 - DNA, 719 bp, Cannabis sativa
gaaataacacttccaaaataggataacaaaggaagattactacgaattgcttgaattacggagagacaatcggattccaccactacaccatgccacgcctttttcttcacccaacttaaagcctcccgaacccccatggcttcggccaaagccggttgaactgtacctgcccgacagcatgttagagcctccatcaaacacctattttcatctcttgctacacatacaaaagaataagttccatagctgtcaaaagttgcagcgtctacatttatttttatccttgtagcagctagtttcatccatttcactagtccatcagcatctgttaaataagctggtgtgggaacacaacttcggtcttgagcttgagaccagttggaaagggtagtatgagcaaggaccattacactctcagccgtggtgtttttctcagaccagaccagatcgttcctggtcttccaaatcgcccagcaggtggctgcaattagttcttttgtagctgtgtctactctcttaaatatggcttccaaccaactagcaaaggttataaccccctgaatatgagtccttattccaccagaatcccaacagagagaagcaaaaagacaagtgactaaacaatgtaagggtgtctcaggatgatcaatgcacctaggacattgattagcaatcggcacatgtctagattgcaaccttgttttcgtgggaagacaatt

SEQ ID NO: 91283 - DNA, 1026 bp, Cannabis sativa
  modified_base (184)..(194): a, c, t, g, unknown or other
gtctctgcagcgatctggcaaaataagaaaagagagttaagtatgagagatcagatgccacagcgtaaaactaaaagaaaaaacattaatagaggcttaccgcggtcatagcagcgctcatatcctgaatctggtagatggagtttgtggaagcgcaggctgcgtatcttttggccgagagttnnnnnnnnnnngagacaaaatggctcgtcaactcggaggcaaaaggagcaagggtaggaccgacgaagcggttgaaccagtctgtcagagggtccatgttcaggtcccaagcgttcttaaaggcctcctcgcgtaaggaattttgctgagcctcctgtaagacctttttcagggcttctacctcagcattcccccttgtgtactcggccatagcataattgtgcttggccatctagagttgctgcctctcctcatctgcggggacgggagtaaggatgatatagggaggtacaatgtattcttctgcttcaggcggaatccccgaatcagagctgacggccggagtgttcaccctcttactctttctggaagactctgcctcaacaattttgcccttgcgttttcagtacaagggggtcaggatctcaccctcttcctcctccttctcgacctctccgtcctcatcgatcaagatgatttggcctagaagggcgctagaagaagacctccctggggtcaccaactggtcaggcgctggaggaagagcagagtcagagctgtaggtctgggcaagagtcgacaataggtcctccattggcctggctgcttcaaaaagacaaacaaactaagtgtcagaatggccatgagaaaccatgcacacgaaaacaaagcagtaaacctagtcctaccctgactatctaactccgccctagcaaagacttgcactacaacactggcttcatcgtccccaagaaagctatcagaggggagaaaccagctggaagacagataagctgaatgatctaggggaataggtgtaggaggtttggaccccatctggga

SEQ ID NO: 91284 - DNA, 1115 bp, Cannabis sativa
aaatttattattttgatttgcctaataattagttagctatttttgtgcatatttttttttttaatttttatatataatgtgtatataaattaattcattttaataagacttcattcaaagtaactattttgtttttttaaaatatttttcaaattttaatttagaaaattaattattaatataatatttaaaaaactaaactaattatttatttaaaatatttttttcaaaagattatataaatctacatataaatgtaaatgccaatttttttccattacttctcttttctccttttaattttcattcttctcaaaattctttaatccattgtataatctacactgtaatatctatttgttggacaaaatttaaaagattattagaaaggtatgtcttttttgttaacacataaattgtcgttagagatgcatatgtatatattatttttcatatgtacaatttagtgaagaattttgataaataagattattattttaaccaaatattaatcaagtgtatgtataagatgtggaagtatttttattaaaatattaaataatatataaatatagtaaattagataattagtcattactaaaagcaaacccgattgctaaaattttcgttcttcccggcaaaactcaaaatttttcccgctatattttcagttccccctatttactttagcactctctcaaacccttattcctaaatatcacagagaaacctccgctccctaaattctattgcatcattgaaagtttgtttctttttccttttacatttctcacctgaatccagttgcagaaattccaattgcataccgtctcctcctatatttttacatttcacacaagttcttttcaatcgtagtctcactctcaatcccaatcccaaaaaggaaacccaaaaccaagtttggatgacaaagaaccattagtcttcatcgtccctccttccaacagcagcaatggtcggttccagtattcatcctcaccaccagcaatggctgcaagaagacccaccgcctcctccaaccaccgttggtacaactccttctcccttccttgtggaaaacctaatcaatcagctactgatgaggttagtattct

SEQ ID NO: 91285 - DNA, 568 bp, Cannabis sativa
tgaaaatttaacaaaaatataaaactaatttaaaaaattaaactaaaaaaatattatgcttacttaaaaaactcaaacttatactatttttacacaaattaaaattttaatatatttttttatatctaaatagggttttaataaataataataaattttttaaattgtttaattagttgtaaaattaattcttaaacatttgaaataattttttatttttaagatataaattattttttaaaatttaacaaaagaaatattaaatattttttatttttatttaaaaaggataagatttgatagttattaaaatttaagtgataaaattgctaatttataatgatagattaccccaacaaaataagtttcaaaactaaatttctgtaaattgtaaaagttcgataaaaaaaaattaataattggtataccgtaaaggacacgatcgtgataagtttagggacaattttatttatttatttttatttagggtaaatagtggcataagtacctaaaattttatgtttgtaagcgacataaacttaatgtttatttttagtgacataagtac

SEQ ID NO: 91286 - DNA, 634 bp, Cannabis sativa
aaacataacatttatccaattattaaaattttattacggggttcaaagttttaggggtgcaacacgagccttctcgcccatcctagtactactctagccaaagtacacttaattgtagagtttctgtgggatccggtacattagtgctggtaaagcttaaatctttattggtttatacatgtaattataaagatacaaaaacaactttttttttcttactttcccacataattactttcttttttttctttaattattattccaattgtgacttgttgaactgggctagctgtatatgcacgcagccgtgaacaaaggggcaacacaacagtttaaggatttattacttaacatgacatcctatgaagaaagacagaagagaacattgaaagtggcattaaaagattccttttttattttcttttctagtttacaatattggtgagtgagtgtaacttaaattttcaatattttttctgtttttttttttttgaaaagaaaaaatagatcataagaaaacaaaagctgtttcctttctctttcttcctgaaagaaaagaaaatataatgacaaaatttgcatagtgttcttgtctcattattaatattaaggggggtccctaatccttatctat

SEQ ID NO: 91287 - DNA, 799 bp, Cannabis sativa
gctttacattcaatggcccctgataagagccctggcatagatggaatgtcctcaatgttttatcaacaaaattggtccatagtgggagaatcggtcaccaatgcggttctaagtgtattgaatgatggtgttgatccaacaagtctgaataagacgataatcacccttattcctaaaatcaaaaatcctcaaagggttcaagattatcgaccaataagtctctgcaatgttgtctccaagctagtcactaaagttcttgttggtcgcttcaagaatgtccttccttatgtcatatcagaaacgcagagtgcttttttgcccaaccggttgattacggataacattctcgttgctttcgaacttgttcatgccatcaaaaataaaacagagggtcgggctggtattgctactttgaaacttgacatgagtaaagcgtttgaccgagttgaatggcgtttcattaaagaggtcatggttaagatgggttttgctacaaaatggacagatctgatcatgggttgtctcactacaaacaccttcagttttctactaaatggtgaagtaacgggttcactcactccttcaagaggtttgcgacaaggctgtccactttcaccatatctttttctcatatgttcagaaggattgtcacgtttactgcatcaagaacaagtgttgggtaatcttcatggatttaagctcaccagacatgccccgctgatctctcatttgctgtttgctgatgacagcctacttttttgccaagccgatgaaaactcatgtctagccattaaacgtg

SEQ ID NO: 91288 - DNA, 546 bp, Cannabis sativa
tgcagtatcactctcttagagtttctaaactacacaaatttttgtttattcactcggaagttctgttttgtgttttactggttttaaaataataggatatttttgtgagttccctttaaaataataaatagtatttttaaaaatcactaaaatatatgtgtattttaaaaagatttgtttaagacgcttgtgttgggtgggccggccctgactccaagttagctaatgtaacttgcattgttgtgagatctcttgaaattatgctttgggtttagacaccatcatattcatattgtagctaattgttgttgttgttattgttattgttatggttgtgttatgattcatgaatctctaaccatgcattttttttttcataatctgtatggttgtgacatttcaatatgaaccgtcatagtatatgcaacttgcaccttctattatagtataaaacttaaatagtgagtgtattatttttgtttaaaagcatttatagatattacaatttatatatatactaggtgattgttacgtgccaagccacgt

SEQ ID NO: 91289 - DNA, 511 bp, Cannabis sativa
acgaaaaagtgaattcctgaagcgatttaaggccgagttaatagaagctctgaatgagatctatacaccaagtggagtggtgtaccgaactatgtgaatactcttgatagacttacctatgtcaatgcgggagtggggctgccttttataaaattatgggtaaaatttttagagaattcactaaactaggatagacgtgcatggcccttaacgcacggacttttaattatactcttgaaaaggtggttacgtggtataatattagagatagagttcaagactacgagtcactctagtaaaatctaaattatattcactacgcagaggttcaaatcaaaagatacctttgtttatgctcaatcttactgttgaatgatactagtagatggaaatattttttaaaaattcaagtgggggactgttagaactttgttaaaattaatgaatattttaacaaaaatatgaaagtgtcctagtgtgtgtgaagtggaaagtgttggaaatattttac

SEQ ID NO: 91290 - DNA, 726 bp, Cannabis sativa
gactataacagaaatagagtgaatgaggaagttttgtagtctgcttgttttctttcttttagtaggagttataaggtaatggtattgtaatccatttgcgaccaggagaagtaatttacaatatccttcagtcagtttggtggagtagattatgctggctatctagtactgcattttttgtaattttgagttttttacttattgcgccattctattttggtagcatttatttgagacttggatatttagtttttccttttcaatgactatagggataacatacagctgctgagacaacgatattactatgcaacttggaaagctgatgggacacgatatatgatgttaataaacattgatggatgctacaattgatagaagtttcaactttagaaaggttcagatgaaatttccttgcaaacctacaagcaaagtatgctttctaatttttgagataaatttattcttggaccttattttttgaattattaagtacaaggttactattttttgttatattatattttatgattgttgctattaacttttgcattatgtaattagtttatagttagttattacgatacatagaatataaattttaggatcatttctattaacaatttcggtattatgtaattagttaatagaatcaattactaattttatataagttttataaacgttattttaattttttttgtatcatgtatttactattatata

SEQ ID NO: 91291 - DNA, 591 bp, Cannabis sativa
gctaggtttcgtcacattattccgcttaaatactgacatatttttataaattcgcaacattgccccctaaactttgatatcaaattctacctcctccaaataaaaataagaaagattcaatattttttggtaaatattaaaaaattaatttagatcttaaaaaattatttggaatggttaataaaattaaagaaagaaatcaaaattttaaatctagttaagcgatttaataattaattatttcttattaaaaaaatccacttagatataaaaaaatttatattaaaaaaattaatttttgtaaaaactaaattttacgggccaactcaccaaattgattttgttgcaccatattgattaaagcatgatatattttaaaattattagtagcaatgactggattcgaaataccagtcagattttcattcaccacaagtaagcaatagtcatgaacagcccgtggttgtgcatcagctgcagtaggtgttggttggttattattaatcggtgtgagtggtgtaacactttgatttcttcgcataaattgaattacaaagcaacaaacaaaataagaaaaaaaaatttaggtgc

SEQ ID NO: 91292 - DNA, 1036 bp, Cannabis sativa
  modified_base (898)..(898): a, c, t, g, unknown or other
tcataaatattatgttttggtgtttgtattaaaaatcacttttttatatttgttggagatatgaatatataatttagttgttatttattttatggaatatttttctttctcttatagtactagctattaaaaaatatttaagtagtgtatgtatcaattgtaattggaaacattgtctttatttatttaattaatctattggtgttgtttttacatgatattttacaggattatcacaaaataaaaattcaacaaaaaagaaaaagtaatgtcgagaaatggaaaagttcattgtcgttgctatgattgcgaaaaaaaaaacaataataaaaattaaaaaaaaaatcatttaatttctatctcatatatcctacttcttataatattatataaatctctttatattttctattacaaaaaaaaaaaagaacaaacttgctacaattttccttatttctcgttatatatataaatatatatttacacttatttgtttttttaaaaaaaacttactaatcttaatgatattatttgaacaaatagttggagaagaaaatatttaatattttgtataccaaaaaaatagcataaaggttataagtttcatcatattctcaaataaattagtttttttacatataaaaaaactttaaattaggtaactttcttctatttttattattttttataaggctgtggattgagtccctcaacactacttttccagaccagtcacacacaaaatattaaatatattaaatattatatgtgagccatgtgggtttatttaagtaaaataattgtatattaaataaaaataaatatacttttagtactctcacatttttaggagtgcttacggtgcaggtggtacgatttttgactattttttcaaacnaacccgcacatgcggtttttttaatttctcaaaccgcacccgcaccgcgaaacaaaaaccgcactgccaaaaattgtgtggtgcggtgcggtttatgcgatttttgcggtttgaactatcactaaataattaaactat

SEQ ID NO: 91293 - DNA, 717 bp, Cannabis sativa
aaaatagggatagtatatatcaaaatgaccacatcgatattgtaaaaatagtacgcgatattgccagaaagtcgtcagaaaggggcagaactacaaaaatgtcactgaaaaaagtagcagtctgggcaaaatagcttagtgtaggttgttctcctcgacgagatgagtcttgtggtgaagacgactcgttaaacagacaccggaggtggtcaaaaaatccgttcaaagtttgaatctcaaaactttcacttgcaatcctgggctaacgacggcgaaaagggcggtgccgcttggggttgaggttgttggacctggggtttgaatggtctagcgcatggggccagacagtagccggagagaggttgccggagtcacgccggtgatggggttttgtgggtttccttttgtcgtttaaagagagagaaagagagagagtcagtgagtgacgggtggaaaatgggttctatttatttttttatatacatatatagttgtttatttattattatacatatatatatttctcttttttactcggtcaaactgagtcttgacattctccgtttcttaaagaaattttgtcccaaaatattaaagtacaatctcatgttgaaaaattaaaccagtgaggatacttcatatacatctcagactctaactccttagtagcctcgtcttatttgtgattttttcataagacattgactattggaatct

SEQ ID NO: 91294 - DNA, 550 bp, Cannabis sativa
caaataattcatttttcattttatgatctcattacataaataaataactaaataccctttcaagaggtaagggtctccattttcccttttacaaggtttgtcttggctccatttaaggaaataataataattattatataggaaaagtttaaagtacacgtggatttcggtagacttttatttaattcggtgtttaagagaattttttagttttttttttttttttttatgattatgtacgttatagttattttgggtcacctgtaaattttaattgatttataatgtcaaaaataagattcaaatattttattacatttttttctcttatacgcgtgataaatatatgttttaactttatttttgatgtacatagagttgagcctagacataagcgaattaggtctctgcttaatatgatctaatactatttgagtaaaattgagtgtattctaaacaataaatattcacagctcgattggttaggatatatgagatattcgtaaaatttaaatggcccgagaagtgaaagaaatagagggtgtgtacc

SEQ ID NO: 91295 - DNA, 1993 bp, Cannabis sativa
tttatcgcttattaaaagactcattgtcgttggctaaaagcgaagtcaacactcatcgtaatagttgtttgtcgatatattgtcgataggatatcgacaatattataaaaaagtggctgaaagaagtgaaattttttaaacataagtaaagatgaaacaatcaggatgacaatcatgaactttaaaagtaaccctaaacgttaaattaaaagtctcgatagtttggatgatttatgcaatacatgcacaaccacccaagtgtgaccgattcacctttaaccaaatatagcttgcaacaacgacacctttggggaaccttggtggtgaataaaagagaacatcatctctttgaaagcgttcgacgacaccactcatgctgaacttccaaactcagcttcttctcatagtttgccttttgtttcgacatgtccttttgaaaggagtccataagtctggcgaatgagtgcttcccccaaggaatctagaagaagaactggagatctttgacatatctaagtatgctagtcgtaatcaaagtgttagcctcacgacccagtaacactacctcaacaaacatgcacaagccaagcttgtacacatcttccagattctaaaagtttgagaacctctcctggagtgcttctgtcttcacactatcaaatcagttgaaatatttgttgatcaactggtctaaccccgagcaggcagcctacgtagccttctctttttctatttgacccgaggtgaagttcatgcctgtaatgagtgcaaactcaaccactctaaatttgagctcctttcggccaatgtaaaaacgcatctcttctaccttcttaatattaaccttaatcttgtgcaacattacttagtgaaataataccaaaaaaaatgtgagaggtacgaaattcaaaaaattaccgaaaccgcatgcttttgccatctcattcaaatttattcctcaaacagcatcttgatttttgcaaaagtaccggtacctctatatatcacgcgaccattaaaatggtcggatgttggaactatgagtcgtggagtcatctgaaaaaatagataacaaaagcatatggtaagcacaccatcgacgaaatatagataaactatcgccaaataaaagttctttacaaaatcaaagatgcatagtaactgaaatttgtcgacaaaatattaacatcttgtcgacattatctcaataaaaaatataacagaagaaaaaaaaaattgtcgacaaaatgtcgatatcatgtcgacattatctcaataaacaaaataacagagcacaagaaacttgtcgataaattgttgacatcctatcgatattatctcaaataaaaaataactaaacacaataaaaattatcgacaaaatgtcgacatactgtcgacaaattctcaacataataaatcacagaatgcaatcaaatagtcaacaacatatcgacaaaaatgtcaacatactcaataaattctaaaaaaatatagcctaaacaaaattattgataaaccatagataacacatcgatatcttatcgatatagagcaaaaaattcaaaaaaaccagttacgctcaaataatcaactacccattttgatttttagtcgatatcctatcgacatttcatcgataacactgtaaaaatacacacacacaccattgaaacatatctaaaacttcaatctatcaccagaaagattacaaaatccacaaaaattcaactaatctcaagaacatacacaaattcacattcaaatctatgtaaaatcttattttttttaaaaaagaaacttaccttttgactgagcttagtggtggtggtggcgacagtttgaatcttaagctctgggttctctcgtggtggcctgttgtcgtttcgagctggtttgtggtcatggttgtggtcgtcgtggttttgagttggttcttcgttgtcgtggcggtggtggctggtcgcctgcgggaaatggagagagagagagag

SEQ ID NO: 91296 - DNA, 583 bp, Cannabis sativa
agaaagacttgaatatgagacagaagcgttgtcctacataatcttcactaactcaattaatcggcgatgcggcaaagaaccaggtggtgatgaatccttagaacatcttttgattgtaagatgttgattaggtgtttataactgtaggaaattaagcactacccaatatgctctacaccaacatcgcaaagtcacaaaaaccaaggtcaaacttcacctttgcttcttgtgcggaccaagaagcttttccccctcaaaaccctgccttttatggtagtataaaacctttcttttcagctgcaaaccctagcaacccattttcattacctcctctaaccctagccgaagcccccttctcttcttctccttccttcttgcttgaaaaccctagcagccgctcactacttctccttctcctctttcttcttgatgaaaaccttgcagctaaacaatactcaacctttcttctcttcttttatgcagcccgatcctagagcttccaaaaccaaacccactaatgccttttactcctctctcagcccttctattcttttccttgtagctctacaagagcttcctatgg

SEQ ID NO: 91297 - DNA, 729 bp, Cannabis sativa
  modified_base (118)..(120): a, c, t, g, unknown or other
  modified_base (686)..(691): a, c, t, g, unknown or other
ataaaacaagtagtgcatttcaattaatcaattgtcttgatatccagatcaagtatagtgtatttgactaaacccgaattacaggaactgtaggtctgtggtaagcaactgctttctnnnctattacttcttttgtgttcataaaatattatgcaacatcatttttctatatgtattactcctttagggatactgaattatataatgtttattaagtgcatctgaatatacagaagacatatctctaattctatccaaaaatagaatagagataacacagttaagaactttcttcagtttgaataactttccagcgcttttgaaagcaacaaagttgtttatcttcactggtggaactaaattattatagaagggtttttacattcttctagaatagttcctccacccctagagtaaccaccatctcgaatgggtactgagttggtgtaaatataaggattctaatatacacccctattatctaacatataggtcactttcaaaaattcttccttgattgtctcctaatgttccttgtttgattacatcttaaatggctcccactcaacagtaggagtctggttaagttcgtacacaagtgtacacttagcctcttactagtggttcttagggacatcttgttatgacatattgtcttagtctgaaactataagttccttctagannnnnncatcaacatagcattctagtattaacattaatgtaaaa

SEQ ID NO: 91298 - DNA, 590 bp, Cannabis sativa
tacaacaacccatatatatatataaattatcatagcaactcaaaccgtaaaaagttaaaaaaaatggtatataagatgattcccctctatattattaatgaaatgggtgctttagcacccctttcatcaaaaaaaaaaaaaaaaaaaaaaaaaaccttaaaaaattaatttaaaaaataataataaaaattagttagatagtttcttgattattacatttctcgtaattattattattttttttttttgaaatgaaaataaacacaacaaggattattttataattttttcttaattatatttctatttttttatactttaaaactcattaattattaataaatattataatttaaactaataacaaagttgtgaagaaatgtattcataaattttaactacaaaaacagcatatccactaataataaatctaataatttaaatatttatatcacaaatatttaatttatgtatttataatttcaaaagatttaaattataacattgttaaaacaaataaataaactatctctaaaataaacaaaattattaaataaacaatgtggtaccttatttacttaccactatac

SEQ ID NO: 91299 - DNA, 836 bp, Cannabis sativa
cacttatttaatgttttattttttaaatatgaaaaggccattttttgagcgagcattgaatgcttgttgatattgatggcttgtgagcattaaatttgctctgtgttttagggttttggtggaggtttttgaagagtatttggagagaagaaatgcagagcttcaggtataggtaatgatttctctacattatttttttttacaaaaaatcttaagaaatcttagttgtacagtctaaacttatatctgagtgattatatataggggatcaaaaattgatcaacatattttatcatcgaaggttagggggaggttctttgattgattgaagaattttgagcttgtgcgagttgttgaagacgatggcagtatagttttaaattgttttctctttattaagtttcgattaaagtcactgttcttagcttatggtgttgaaatagattttgtgattttaattttgagtccaaaagaatgtgttcgatcggtttgttttcgtttattttatatttttgaaattttcgattgaattctcacttctttgtattctgaatttcatttgtggagttcaaactttagtccaaaacaaaagttatgtgagttccttaatacgagctagtgtctcattcctgtgcctgtagattgttgaatggattggtcattagttaagttttggtctttgtctttgattcattattgagtggttagattaaatagaaaccaattacctttattggtttgatctttgtattcattaataccgaatcaaaagttcaagctttgatctttgtaaagaatccatttactttgtgttgtgtttatgttgttactatttt

SEQ ID NO: 91300 - DNA, 758 bp, Cannabis sativa
ctgaatcagtcccacttccttcagcatcttcctcatctgactcgcgatcaggagcctcctagtcctcgcctatctcttcaacttcagcatcagaagcatgcctagaatgaacaagatgttcatgagcagacaccgtggactcgctatcgcggatcttgatttccccggttcagcgagctcctaaaccattctttctatatccgcgaaggacagcaaacctaactccgcagttctagcaattggagtctctgcctcagagatcgaagtcaaaatgaagccatcctcctgaacctgatctccatcgaaggcatcacctccagagctgagcatctagctgtccgaaaaatcgctcatctgaaagatagaagatcttttcagcgtggtgaatgtgcgagaataatacaagtgacctcactcgcacaaaaaagtttaagatttccttggaaagatggttgggattctcttgaaaacccaactgacccaccaaggcataaattgcatgtgtgcgactagtagaatatctcaaaaaacggctgggagttacccagtgacccaaggggcatgcgctcttgagcatgaccatggagttactgggaaacacccagcgtttcaaaaaatctaaccaatcacaatctgtggacatacctcgaatatctaactagtggcatacctcaagaaacagctgaggagtctcctctatatcaagggacatgcctttctcgcatgaccattaggctaacagaaactcctcactattt

SEQ ID NO: 91301 - DNA, 588 bp, Cannabis sativa
cctcggtcgttgatgttactcctactgttgttactttggatcataatcaacaacttcttgatccgatcactaaggaggaagtaaggcgtgctttgttccatatgcatccggataaatctccgggacctgatggtatgatgcctggttcttttcagaaatattggaatgtggtgaaggatgatgtggttcagcaggttagaagtttttttgatactgctattttacctgatgcgcttaatcatacaaatattgtgcttataccgaagaaaaaatagcctgtttccatgagtgatctgcggcctatatctttgtgtaatgtcctttataaaattatttcgaaggtgcttgcgaatcgtcttaaagttgttttgccacatgttatctctcctgggcgtttaatctcagataacattatgatagcgtttgaggtaatgcattatttgaagaggaagcgcaagggtaaggagggatatatggctttgaaattggatcttagcaaagcctatgacagagttgaatggggttttcttagagcaatgatggcaaaaatgggtttcgccacttgttttgtggatcttgttttggcta

SEQ ID NO: 91302 - DNA, 571 bp, Cannabis sativa
  modified_base (444)..(456): a, c, t, g, unknown or other
aaagaggtcttgttaaatatttaaataattattttaagaaaatagttaattacaattaattaattctaaaaaaagaatgtctacctattggtaacatgctattacaagtgaaagaaaaatgtaaccatatggttacaataaaaatgtaaccattgcacataacaatttagagttttcttttatttttttttttttgaaattgtaaacagttaatttagagttccaatttatttattactttttcctaaaaagtttcagtttatttagttgacagtatcatattaataatccaaaatttaagtttttggtgtaatttagaaaaagtaaagtgaaagatgtcattgtaaaagtaaatttatcatcatatatatattgaatgccgctttaaaaggccctaaatatgtgtacaactctataagattgatatattattattattattannnnnnnnnnnnntattattattattattgtaattaaatattaaattatgtataactttttatcaaaaaaaaaaattatgtataatttaatataataattttttataaaatcttactaattaatcaaa

SEQ ID NO: 91303 - DNA, 582 bp, Cannabis sativa
ccattggcattaagacttggagagaattacgccaagcctggaggcattgactatttccaaagtgcataagccattggcattaggactttgtgcctaagacattggcgttaagactttgtgcctaagccattggcgtcaggactttgttcatagaggaaacaaagcctccttgagcgaggagcaaagctaccttgatgcatgagtaaaggctccttgagggaggagcaagacctctttgagtggggagaaaagccaccttaatatgtgagtaaaggctccttgagggaagagcaagacatccttgagtgaggagtaaagccaccttgatgtgagagtaaaggctccttgagcttgatgtggaagtagaggctcattgagggaggagcaaggcctccttgagtggggagcaaatccactttgagcataatgatcttggagggtatatccttaagcataggatcctggagggtgcatgctagagaaaggtctcgaatggtacctcttggagcaaggtcttggatggtacctcctggagcatacgataccggaggatgcctctttgagcaaggtcctagatggtac

SEQ ID NO: 91304 - DNA, 1068 bp, Cannabis sativa
tacctgagaggcaagaataacagcgtctttatgaagaaaaagagtgaaatgactagtgagattaaagcttccagttagccattttccaggaggaacaatgagttgtgctccaccgtccgatgccagggggctgagatgatcaatggctgccttgaaggccttagtattggaagtaactccatcgcccacgccaccaaaatcagtcaaaaccgcgctgtgttttcgagaacatttcactgttgttgttgttgttgctgttttcaaaccttgggctgtacatgttttactttcatccaaaatcaatactacaattagtaatactattcccacgaacaaacgaaatgattccattgtaagatgttatttctgtgttttttttttgagattattgaaaacaattaacaattgtatttataaataagttttgatcttgtaatgtcttttcttaattgctttatttttggcaacggagactatttgggacatatttagaaatagctaaataaagtagatgctttaattgaaaacgagaaataagggttgagaaatgaaggtcacaattctattcaatgaaccacatgaattatctctaatttaggagaattctattataccaaccataccattaccgatgtccttttgggcagttgggaatttggatggcttacaattctccacattttttcaagtcctatgattttaaggatgatttggtatgtaagattggactgaattgtattagttagatttggatatttgactataaattatcataatactatactatatttgatgcactgactaaataaattacattcttaaaaaaaaaaagactataaataaattacaagataacttttattaacgctttaaatataaatattaaataaaaataaaacttaacatcatgtattttatttaattagtagatatttcagaaataaaattaaagaattattacataaaaaatataaattaacatgttatttacaaaaatacctccataaggtaaggacaacatttatacattttatgtgattttaattaccaaaataccacttacactat

SEQ ID NO: 91305 - DNA, 792 bp, Cannabis sativa
agtggattaactcaaaaaattatgtatctatgaaaataaaacatatactcagatagtttctacctggttgaacaactaaataataacgcgcaaacaattaaacagcaactctattttaatataaaaagttatttggcatcaacacactgtgttaacttgaaaaaaaaaacaaaaataatctttaaaaaaaataataaaacaacattcttaatatatatatgtgtccataataataaactaaatatgattagacattcatttttttaacacaactagataacaacaacaaaaaaaaaattatataataattgtactgtaatatgcaaaataaataggcatcataaaatatttctatatggtcaaattactccggcaacccaaatgacaagttatacttggagactgaggggccatcaatggctacggggttttggtttctcatcattgtacggaacgaaggtggcgaggatggcttacggggatgggttttcaaagagagaggagagagagagagacttggtgcattcgacaatcaatgataattgatggttcaagaaggggttaatatatatttattattatttatattatatattagcttacaaatcgtaaactatttaatattaattatatatttaattttattttattagcttgctaacgtcaatcgttaaactgaattcgcttgataagatttttaaatttattgagaatttatttctttttataaaaaaaataaataagttattacttaaaagcgattaacaaactgaatcgttttcgtgagaatag

SEQ ID NO: 91306 - DNA, 512 bp, Cannabis sativa
ttgctattaaaggtgtaatttaattttggataacacatattttactttaataaaattaaaagtatttccaagaaaaataaaactagtttagatagatatgataattaaacttaatacataaaaatatggcattcaaaataaaaattaaatatatatatataaaatatgtattaccataaaaaatattaaaattactaagaaaattattaagaaattgatttcttcatcaagaaactagttttttggtgatttttccggcgacaataccaattttgacgatttttttagtaccggtagcaactccaacgaatttttcgacaccggcagctattctagtaacttttccagcgccggcagcaaactccggcaactttttagcaccaatgacaaataaaactttctaaaaacatatcaaaacgtacattaaatatgaactttgaaaacctaatttacatatatatatatactagatgcgagttacgtaaatattagttttattttaagttcttgtg

SEQ ID NO: 91307 - DNA, 703 bp, Cannabis sativa
attggtacttgataatcaatcctcgtgggaacgatactctactttattattatattacttatttcgattgcgtatacttgcgtatcaaattttatcaaacaaaactataatagccccagaatgattatgtttgagaatttaaattgtagaaatctagatctgacctccaagttcaatgagtatgtgtagttttcaataacatctgttttgcaggggtgcgaatgtagtaaatgtgttttgtacttttgtcctattattatgtgttcattgttgcactataatgctctcaagcattatagcagtgttgtaattggaagctcccttgtggctaaatttgccagtttagtaattctgttatgtttgaggtcatggtggaatacctcttgttttcgttgtgaattcttaaccatttctcatataactgactttttttaagtacggtcttatatgcatttgtccaagccatttagttctgccatgtggtactcaaattgtctttctttgtatgctttcgccgctccaaagaatgacatattgtacttagcaacatgtgttttgaaggttgttttaagattgttcagcaggtgatagccacagtatgcgtgtgtaatttcagggtatatttatattgctgctttgatgaggttctcatttctgtctgaaattagacactgtttttctttgacgccatatgttttttttt

SEQ ID NO: 91308 - DNA, 575 bp, Cannabis sativa
  modified_base (47)..(48): a, c, t, g, unknown or other
gcaacataaaatgttatttttgatatttattaataagtaaatctgannatattgaaatgaattttatttagggcacaaaacccaacactgagaagatgacagatcgggccttcgtcctgggcagcaaaaatgcgatctgagaagagagattggggctttgaggactgaggagggagagaagtgtggtgttgctggtcgccggagcagagacactgctttgattgagaaaaagaaagagaaagagaggcgagaatgagagagaaacagtattaatgatgttagggtttttttaattaaaaagagaagcaactaccttttttattttttttatttaattgttttttttaaaagaaagaaactacattattttctttaaatatttccttttattatttatgatttattttttatttacatattaataatatttgtatctttaattaaaaaaaatagagtatgatatagtgacgcgctaggtgcgttggaaaatagtttacccagtcatgtttggcatgtcactatagagtaatattttttagagtaataaaaattaaataattttgggttttactcta

SEQ ID NO: 91309 - DNA, 631 bp, Cannabis sativa
cctatgatgttctatagtatttttcacatgtgtaagaaattcaaaagtttatttcaattatttaaaaaaattaaaaaaaaaaattctaaacatatgttgattattctagactatattgagtattgtagaaatgtgtagcaatttctaatacttcttcttagtttagatgttcataactccaatcatattttgtagtagttccaatttccatgtcatggtttcctttgtgaacatgtctaataactcctattcaatcatccaatgcatgaggtcaattctttgcagccatatagtttggttgtagtcattgcttaatatactttgctttggttgatgaatggaaagcagttgattgcttaattgatacttgtttactcagagacagatcctagtatcttggacgtaaactttttacatgtgatacaaaagaaaatatcctggagttaagcagtctcgagtcatagcagtcgacctgagaggggtcccccaacattcatccaggttgaatctgggaaatccagaataggtttggatcccacgaagttgttccctactcaccatctttaagtatataaaccaagaagaaaaaaaggatccaatccaaggcctaaaatctgaaaaaaaaaaaaaa

SEQ ID NO: 91310 - DNA, 1219 bp, Cannabis sativa
atgaaaataacagtttataaaaaaaaccttacattggtggtagcagaatgttatggctcctttcgtttagatctctaattcttgttcctttctgtcacaaaataataacaagatttgaacctggatctcctttaggtgttggaattcttcacaatcttccacactatgattgagtacttgacttgatatgagtgggcatgtactctatcactaatagctcaaaatttaatgaagaagaagagggagaagtatttctaactacaaagaaggaggctctcaatttctatttgtctgacaaagaatgaaaactaggttattaggttatgagaatgagagccatcttatttcttttatagtatttcatctagagttttggatttaaattatttggagtaaaaaaggataaaataatagcaaaataatacttaagtggccaaccatagttagtggaccccactagttacaattttcccattttattcaataatttatcttttctttcactaatgacatattttccaattttaatcctataaatgtcaaaactttttatttattaataataattaattatcaaataaaagtattatttaaattatttattaattagaccttacaaagtctcttaattaacaaataaaccctaaaacctcttttctttacaattaacataacctaatcctgctaaaccaggaatactaggaaaaagagaaaaatttaaactttaaatcaagtacagagtgaaaatataagttgtaactatttaatttacaaacaattccaagagattacacatgttttgggatcccataaaaattttcacaaaacattacaagtcatttttacgtgccgacctaagtgacaaaaaccgagaatacaaaatacaacaaccggtagacccaacccgcatggtctagtgtggcctgaacatgtacaatgaactgccaagctctcgaactcatggttgatcacaaattgattagtcctttcctgcacagtagagcacctgtgagccaagcccaacaagacaatataaataacaatatgcaatatattattaattcaaataaatactgatgccactgcatctgttgtctatttagcatagtcctacgtgctgcgctcacacgtctatttataataaggccttagattagtttatttcgattctgattaccgagtctaactgtaacgccctgtctcatagggacgctacatg

SEQ ID NO: 91311 - DNA, 652 bp, Cannabis sativa
  modified_base (88)..(92): a, c, t, g, unknown or other
ttcaaaatatgtgttacggccatatcactgattaaagtaccaacttgcaattaatttattatggtcatatgtatatatatatatatannnnnatatatatatatatataaagctttatctagatatatgttataatgacacattatgatgatcatgattttcacaaactacaattgattaccactgactgaataagcattccaatcatgatttcaaaaagaaaaagagagagagaacaatattccaatcttcctctcttcgtttaaatttttaatttatactcctcgttattttttagctcaatattgtaaaaaaagccaaatataatatacttggaattttttttccatcaatttaagtttattctaaattctagaaaaacaataaagaatgttatatttatatatcattaaattattatttgcgtgcctctactttgaaaataaaaattattctgtatctttctgatctacaaacttttgaaaggaaaaaaagaaaagcataaaattacaacatataaaacaaaatagtgcttttttgatattgtgtgtctgcatagataagagtaggaactgtttttcttttttctttggtggtacaataaggtccctactctgatttttttagaaaaaagtctcaaaattattgagct

SEQ ID NO: 91312 - DNA, 1422 bp, Cannabis sativa
ctaaaaccacacatttttttttttgtatatattatataatttataattggacaaggaataaggatgatgagcattttcaatggttctcttatatattcttgatttttttttttcatctcattgttataataagatttcctaaaagtttaaactatgtcatgtgacccatatttatttaataatacataaaaatgttatttgttttgaagtaaaaaaaaagtgcaaactttacatttaataacgataaatgatgatcataaacataatttcgtcacagagagatagatagaaatatattaggatatatatcccaatatgaaaaaaaaaatatatatataataataatcaaaggcaaactctgtaaaatgagagatgaaaattcatgtggccttaatccctaataatgcaaggggtaccccttcttttcttattaaaatggcaagggcacgtttttctttttttttttttacaaatgaaagttttgaagaaaaactaacaaagtgagaatattgcattcacattttatatattaagcttaatcctatatcgatatatgtatggtttttttttttgtttgaaatttgaaatttccttttctttgaagacaaaataggaataggaatagtgcattatttgccacaattttgtgatcttcttttttgctttttgattgtagttggtagggactacttgtagatttttctagtctttgttatattttagacagctattctatattctatatatatcttccttttttttgattaaaggtttccttttttgagcgtatttggctctattcattattagattatactatttatttataatttaatgggcttccaatttcagagctaaaattttttatcaaattcttttattttattttttatgaaaaagcccctaatttttttttaggcttacaaaaatcaatttttctaatggtaaagcatattgtttatatttatatgttaatatgatgtaaattaattacacttgtccaaaataaaaaaaaaaatcgtaatggtttagaaattaaaagttgaaggacttttttgctacaattaaaattttaaggactaaattataataattggtatgatacaatagtgtcacatacctttcttaaatgtggtaggacatcattatttgtagggaaggatcaccattattgcgatattgggacatgtatgttatacatccacctaattacacccaataaaatattgggcactttttatttattttgtagatattttgaacaaaatacacattatacataaaccaaaaatgagagggatactgcatacttcataatttgatctattttgcttttaaagactcacttttatttttattttttatttttttgtttttgtttaacgggatgttgaaaataataattacataagcacccctcct

SEQ ID NO: 91313 - DNA, 609 bp, Cannabis sativa
acatttattgttatttaaaaagtataaaataaattagagcttgtaaatttagaaagataaatattaacgaacaataacaaattttgatgtgaatatacctatttgaagaaggcatttttcggcacttgatgatgtgtgggtattaatcccttcatttgattgtaaaagattggccactggaacatagtagaaacatattgttatgttactactataataaaatattttgattgttatatatgaatgaaagttgtagtattgataatgttaataataccatttgattgaagcaattgaatgtgacgtagaatcttctccaatttcatagattttgcgaaaaatatcactatttctaggagcaaagtaattttctttggtaaatcatgtttgtatctactatagatagtagtcacttttcgcttgaatctggcatgcttgcacatcttcttttgcagagcaacaaagttattgtttattgtgggagatcggattcttaatgaatgtttcttaacttgcaattttaatttcctctcttgtcgagataaaattgcgagttgttgacgcaagtaagaaaattgatgggggatattctttgaatcactaaattct

SEQ ID NO: 91314 - DNA, 968 bp, Cannabis sativa
  modified_base (320)..(325): a, c, t, g, unknown or other
  modified_base (789)..(789): a, c, t, g, unknown or other
  modified_base (817)..(817): a, c, t, g, unknown or other
tctaaatttcataaaattatactaattaataagctttaataacaaacctttcgagttcattgattcacctttcaaagtggtacatattaaaaatgagctttttcaaccatgttctttaaacacattttttttatctaaaataaagaatgagtcttaactaaattagttccaaccatgaaaaaaaatagttctatataatagagaataaacagtgagctctttaagaactctttattttgttaattgttttaatattattttaattaaaaatactattatttttttcattctttcattaaattaatttatatttaataaannnnnnttataaaatattattaaaataataaaatgctaactaaaataggaaacattattgaagcaaaaataataaaaatgactctttattttaatttttttaactatttcaactaaaattttggtaaaaaaatataaagcaccattagagataatcacatcatgatactaaaatatcgcatataatttagaacgtatcgtgaataattcaataatataaaatacatatctaattgtttcattaaaataattgagatataatgtaaattagtaaatactatactaacttactaaggttttctttctaaatctctacaactgaaatagatcaatatataaattaataaaagtatataattttatatcacatttttatattatattatgctaaattttaatttatactaaaacattatatatttaattaggtgcacataaaaattaatatcacatatagttttatataaaaanattgcataaaatacaattcaatataatnctatacaatacaatacggtgtaatgcggcgtatcaaacgaacccttatgaatttaaataatccatgtagcataagaatttgacaatatatatgtagggttaatttcacaaatgcacaaaaataacaaaaaaaaacaacaaaatacggtttc

SEQ ID NO: 91315 - DNA, 974 bp, Cannabis sativa
ttggggggggggagaacagtttatagccagttgaaatactatatttatgcttctggaatacatcaaagtctatcagttctcgaatttgttctttcaaggcaaccatcttcttccaataccaactggaatgaatggagggagagtaatccccccatttgtgattcttaatataaacactatggacccatctgagccataagctctcttgtttgttagaaatagcccatacatacttacttattgcagcattgttccatgcttctaggttcttgatccctagacctccacttgccttaggttgacaaatattattccaagcaacagaccctgccccttggaacatagcttgacctttccaaagataagctctacaaatggcttcaatagatctcaataccttctttggaagaatcattatttgactccaataggcctgtatagcaataagaactgagttgatgagggtgattctcccagcaaaagagagattctttgaactccaacttctaattcgggcagtcattctctcagctaatatatcacattctttccctgaaatccttttcccacagattggtattcccagataggtgaatggcatttcctatctggtgaatcctgatatctgcataatgtgattgacttcactaggttgcatgttgctacagtataaagcagttttgctggcattcggatataatccaaaagtgagagagaaggtttttagagcctgcaacatgtataagatactcatgaagtccccatgacaaaataatagtacatcatcagcaaaagcaagatgattcagtttcaaactagcacatctgtcatggaattgaaacccctcttttccccccactttcttcatcaatctcgacaagtattccatacccagaacaaaaagcaagggagagatcgggtcaccttgtctaattcccctttttgcctcgaagaacccatggagagttccattg

SEQ ID NO: 91316 - DNA, 1024 bp, Cannabis sativa
caatgcctattatcacagcaatttcgggttgaacacatccaatctttcccttcttgaattcttctaccataacactatgatgattctgagctacacaacccatgccaaaagacaagactcgaaccagaaaaaactaaaaggaaaaagctaaaaaaaccatgtcaaaaagacaagactaaagaaccatgtcaaaagacaagactatagaaccatgtcaaaagacaacactaatagaaaactaaattagtttcaacacataaacacgatcacatcattaaaattaattaaggaatgaactagttataattctaaccccataaaaacattaattggaattaaactaataatagtaaattaataaatgaaaacaaaaaatctgaaactgagcacatcgttgagtcgaactgaaccacactctcagacaactacttttgaacccctcacagaagaagacgttgatgtgagaatgagaaaaactttggcatcaatcaagaaggtcaatacaatagtcttctcctttggtaatatcttgtcctcaagtttattttctataccattgcctcagtttaccaaaaaactctcaaatttaaattgtgtgcatgaattcttgaataggggagatggtagatagccgataaaacaagagagaggaaggaggcgattcaaatcgtaatgtaattaacaatgactccagaatgccaatcctctaacaataatctcctcaacggcatcaaataaataggtggagagacccctttgccgagagagaaactctgaagaggaggaatcgctaatattcttttgcttatgctattagtttctccgaatgattaataacacagggttaacatagtaatttcattgctgcggtattgtttttgacttgagattgagaaagtaagaagttccaaccgtcaagcgacagaagtacaaccgtccacgaatattatgtgagtaaatggtattaaaattaaataaaatataaattggagattcaatcagattctcataaaatttatcaatt

SEQ ID NO: 91317 - DNA, 932 bp, Cannabis sativa
agaaaattctcatctcttctttattttctttctctaaattataatattacataatattaatatttcataatagaaactttcttcttcttcttttttagaaagatataaaaagtttggagaaccaaattgtaacaagtcttgggaagataaggaaagacaaattaggaaatgacgtaggaaattaagattggttatccaaatccaattcattaatgctattgttatctatatctatatctatctatctatttatataatattattgttaggcatgatagcctctataaaatttcctatattttttttgctctcattttttctaattttttaaacttttcttaatatttttctatttaatactaattacattaataccaaataattaaataaaaataataatatacgtgccttctcattttttttttgagtgtttcattttaattttttaaataaatattcagttataaaaaaaattatataagtagatcctatatttttatttttatctttatatattaaaggtgtttatctttattatccattttgttattcatattaatttattatttattttaaaaaataattattagaaatgctaagcttttttctatattttttaacacccaaaataattcaacatgtatatattattttctatcttcaaatttaatgtttttttaatcattccacttaaacaactttttttttgttggaatcacatgtaatctttccaattaatcaattaggctcgatgatttagagaaaaaaaattaaaaaatatgtataaagctaattaacatcaatatttaatcgcaccaatcacattatttcatctcttatggtactaccttaaatacaccttaagttgtgactaataagtagaatagcaaattgtgtcctaatttctttgtgctaatatataataataataa

SEQ ID NO: 91318 - DNA, 651 bp, Cannabis sativa
gcggcacatgtgcaagaacgtctggatcgatacttttgtaagcaagagtggaatagtttgtttccgtctgttaaagtcattaatggagattttattcattcggaccaccagcctgttgtggcggttctggaaaatattgttcgtagtcaaccgcatgataaaaagagaagttttcggtttgaaacttattggttgaaagatgcagagtgtcgtgatattgtttctcaagcgtggttgtctccggatggcccgttggataatcaagatagtattcttgatatttttgggaggtgtgtcgatcggttagaagcctggaataaaagtaagtttggtttaattcctaagttggtccgagaaactcagaaacagttggatgatctcctcagtgcgtcggccccgttggttcgaatggatgaggtcaaacggcttgagactaagttgaatgatctgttggctagggaggagtgttattggaagctgaggtcgagggcagattggcttgctatgggtgatcggaatactaagtactttcataataaggcgacgggaaggaagaagaagaatgtgattgtggagattatgacggaggatggcagaaagttaacttcggaagaggatatagtgggagagattgagaattattttggcact

SEQ ID NO: 91319 - DNA, 628 bp, Cannabis sativa
ccaaggattcatcgacaacaactaaaaaaaaaaaagatatttctttatttgaaaagttttccttggagaggtttggagaaaaataagaaaggactaattacataaggcactattttttttgtaaaatatttacatttttacgttcaaaaaatatttttttacattttcacagttttctaaaaaaataacatgaaaacaacataaaatcaacaaaaaaatatataaaaataacactaaaataacaacaaaaaataacatacagataacaaaatatcaacaacaaattaacaaaattactttttatcatatcttctgtaaataaaattaaaaaatcgtaaaaatatttaaaattctgtaaaatcgtatttttataattattttattattttaatgaaataatcccaataggaaagctattataacatcattgatagcccatcacattcaataatataatatagtaaaccatgttaagaagcaacctttaagatatttataattagtttcacgtcccataattagcgatgttctattattattattaaaataaaataaataaaatctaataataaattagactagtaagaatacgacaatttatttataaaagtataggcaccatgagtgc

SEQ ID NO: 91320 - DNA, 762 bp, Cannabis sativa
ataatatctttaaattagattattattaagttttattttgacaaaaaattaatttagtttgtacaattttaaaaaaatatacggtgttatttaataaatcaaaaggtttaattggtaattttttagggtttaaaatggtatttctttttactcttgttttaaggagatatctaaatttaaggcatcttactcattttaacaacacgaaagcatcataccattattgggcttgacaaaaaaactaatttttttgtttaaaattcaaatctggtcattttcgattctatttctaaatcacatttactcatagataacaaacattaatcataaaatttattttttgaaaatatgtcgatcgtgaaatcgttgggtccgcagtggtcattgggtttgtggtggttattgggtctatggtcatggtggtcgtagagagaagggacttatgttatgtgtgaccaatattgaatagtttagatttagaaataaaaattagtccaataaatatataattagtcaaattttccatctcatctcaaatgtatacataattcaaactcaaattaaataatacaaaatactctttttttttccaaatacaaaacaattaactgctataaaccagttgtacaaagtatcacaacttttcgcttgtcatttatacctaatttgttatgtttattatttttttttcatctttttatattataaaaattaatttatgtaaatataatcaaacactttaatgagatttcaaataaaaat

SEQ ID NO: 91321 - DNA, 764 bp, Cannabis sativa
gggtagaagttaatttcgaggacgaaattcctttgagggtagattgtaataaccaatttttttattactattttctactacattatatatatatattattattgttgttgttaactcgatgtagaggtagtggaattttagaatatgttatttgaatagtattactttaagttatgaaaatatgtacttttaataaattagactttcatagatgattgtgagcatgataacaaagtggtgagaacgggtgactattaatttcatgaatggttatgaataatatttatgttagattctcattctctaatatacatgtataatgagtggcacagtactattcaaagatttaggcatgttattattttatttgatcattaaatgaaataaaggctaaagagtagtaaaggttataggattcgtgagttgaaaataaataatagtgagagagtttaatttgttacataggacatgcatatgaagcatgaggagatcttttagttacattagcttagtgagacttaattaaaaaaactatagagcctaataagcttgcacgtgtacacttattgagatacatacaagttaaaatagatgagacttggtctaatactaatcattagaggtgttcatgtatggttgttgagtaatatagggatttaaattagaatatttatttagggcttattaacataagaaaaaaagttctagttagtttcaatctttaataaaggaaacatagtgacaagggagtgatagtccaacct

SEQ ID NO: 91322 - DNA, 548 bp, Cannabis sativa
atagggtttattttaagaaatagacttattatgattatttttataattatggagatatatttaaattctaattgtattagctatagtttacatattttttaaatttttatgcttaataacagtagaatatgatgtttggcctatagagtcacgtaaatatagtaaagtttcttggttttagcaaggtaatatagttagacattgagaatattaagattattcaggagtatgggtttggaccatattacctttaagttttaatttacttcatggtaaaaaaaaataggtaatttaataattttatcatatagcttatcgagtataggctgatattatgatcaatagtattgtcatatcaatgttatagattcagtacacatgggaggcgagataggattatgattgggtgtatgagcgcctagttataattttgtttatatttatgttatgattatgcttttttactaagtttgtcgactcattattattgtttacatgtgtaggtaagggcaaagctaatcctgagcagcagtgagtgcaagcagata

SEQ ID NO: 91323 - DNA, 878 bp, Cannabis sativa
  modified_base (837)..(837): a, c, t, g, unknown or other
atcttagaaagtgcactttatatatataaaggtttctttattcttatttctatatcatcaaagataattaagttggtacgtggagtccaaaggatcaaccaatgttggattttggcctataataataatatatatatagaccccacatttcatgattcagtcttatgtatatatgatgagaagatcttttaaatatatacatatattatatagtaggaatttcagacattgtatctttgctactgctaacttgtttaactttgagtattattgagtacaatttgagtatattttttatattatttattaaatcagaggtgcaatattgatttggactattatttcttttaatatttgatactttaaagtgttcgttaacattttgtttttacagtacattgtgttttgcataattcaatatatgttagatatataaatattaaaattattaattcagcattttttaacaatgatcctgatgattaccaatgcaatttatatctctatatattatttatggtaaataaaaaatgtcgattaattcataaatgttatattttgttactaataaataataaataatgagtatattattatttattacactgatactatctcttaattacactaatatttctcaatgtcgaaatgtgtgaatgaataattgtcacttttctagttgttactcaatggctgagtacattaattttgtttattttttttctaaatttatagccatatattaatttgtgtaattcgtaaaataaactcacttcccaccacaaaaaacagttatttttaatgataattttttagtcacaacaaaaaattacttgngactaaaacatagtatttaaacacaagttgtcactaattta

SEQ ID NO: 91324 - DNA, 1316 bp, Cannabis sativa
aatggtgtctagaaaagggtgtttcagtaaactcttaattctttagccattcagtaaaacattttattgtaattttttttcatgatcttgctcgttgtagttatttaaaatcatctataaatatttaaaaaattctgaatagtttactgtgctgaatataaaattcaaatagttgcttaccacacatattatcccaaaaattacactggtgatgtggtatgaggcagaatgacacgtggcatagaaacagataacaagtcggtgtatatcatatcaagaaggttggaagctggatggagtgattggaagacaaggaagtacaacgtattatgttagaattgttaaatcaactaggataactcaatattgatgccaaccaagcatccaagcaactagtaaactcaaaaatcaatgtagtcgatcagcgaggatcgatctgactttttccaaagaacatcaaaaaatgacatcctggatggaccaactaaccagtatacatggatctattctagattcgcaaaattagctcaacaattcctaaagacgaagtcattataggtgcctaaaattatgggattgagagaatagttagattttaatgaatattttgtaataagtatcatttatttacttgtaaccctataaaaagtggctcattttcactgttttggggatccaatttctaacttctaaatataataaacgctgtcaaaatattttactgtaattctgagaggataatcaagaaactctcttggctctggttcaattgctcttggttattccataagtaatactaaaaaaggagagtaggttattaccaaacaatctggggtcgaacctctataaatcgatggtgtaacttcttggtttcagttattttactagttcacaaacatattgtcgtatttttgatttcgcatcgttgactaaaacctaagtcaataatgttaagagtgaagaaagagaatgagcaaaagtgtgatttcatgaaggagcaatagttcgatatatatacagagtacaatatagttagaaagataaaagcagttgataaatacagctgtacatgtaataacagaatcctaactaacatgtacagtaagtctaactaacacctaattaccctcgcaaactgagttgggacaaagagaccaatctcagtttggatcaaagcaaatgaaaacgaggtgtagatagctcctttagagagtgaacgaaatatttatttagagatcgtgtataatagaatcacccaaaaataattaaatcctcatttttttttacaagaaaaaactctttatatatatatatat

SEQ ID NO: 91325 - DNA, 742 bp, Cannabis sativa
tttttttgtaaattcaaaattcactaagtatttctcaatctctaaattattcaaaggtattttgagtatcagtccacactattctagtttatactcaggcttttgtggaagattgtgatgaatacaatcgaaggaaaagaagatccaagttcagtcttgatcatactctgcaacagaaatgatcaagggttagagaactgaacagaaggagacaatatatttcactgccattttgtaagattttctataactttatgtatttttttcatcgttttaagattgttcatatttatgttattagattatagaattataatcaacatacaagttagtaaatatagatattggtaaaataattttcatcaactggcctcaaagccatgatcatctatttacttttatgaaatatggattaaaatgatttatgtattgtttgtaattgatttggatgttcatgtttggtttatgtgatgataatgatgtttgaataataattaaaaaatttcgatgataattttattgtaggattaaaattattttagaaagattccttgtgaacttttaagggaattaagcttttacggaacccaatttggcttaaaattgagtaagttatggagttttgaaattttggggtgtggctgtgttggaatattttaccaggacctagatttactaacaagtatgcttattaacatcctaaatatgaatttctaaattaatgtaaataaacacatataaa

SEQ ID NO: 91326 - DNA, 640 bp, Cannabis sativa
attaaaattaacgtaaaaaattaaaaacacaattaaaataaaaattctgttccatagcacattttatatagaatagataaatatatttaaatggacatgattttgtcgtgattgtaattttacggaatgtattccgtgatgtacggcagccgttaatttaatgtaccctaacactcatgtaccacggaatacattccgtgaaagtagaaacaaaatggtatccctattttatataatgcaatgaccaatcgaaagaaaaggcaaggattggcaatataacaaaaagaagtctaactgatatatcaactaacttgttatgtgattctaaatttaaagacaaacccaagaagataagcacaaacaatatatttaaattaaacggaccataaaacataaattcatgtatactaacagtaacataattaagttattagaacaaaaataaatatatcataaataattgaaaaaaacagacaagtttcaaacatcaagagctgagacaatgggagaggaagtgagggcaggaattttagtaggccaaaatggatagacaatagggaagtgttgtaggcgcattccaaaagcatgatagccaggatgtggaaactgataaaccttttccatcttgtcttccctaata

SEQ ID NO: 91327 - DNA, 1225 bp, Cannabis sativa
cattaaatgtgatataatcgataatcgttaatcgttaatcgttattattatatctggtggttcatattccacttgattgacatgtgttattctctgaagtacagctgaatttcgggtttaacattaagatattacaatatgacatcaataaaagtgataaacacaactagggcttttagtatttcacattagcatttcaaccatacacaacaaaataagagaagaacccaccaatgagcgaagtgtagctcaaattaattaatttttgtttttgctggaaaaaataataaaatctattttggttactaagtgaaaccatctcttaaaatccattctgtttcttcttcttatagttaattgttacttatctttttcatgttatttttgtttaataaaatgaagaagaatgataacaagaagatcgtaaaaaggaggtataactaattcattgttattcttattattgttattatgtaagttttccttaattatatatattatgattatgatatttcaattatatattttttttaattgttactttttttcatagtgtttttctccaatatataagatcacaattaataatgaggtaactaatttcttatttaattgaggtaagttcttattgttcttttttgtctactcttacttgcatgaatgaagatatatgagaaaaagcatatttacatttgtaatttctagttttgtatgttgttgctgcactttttactactaatatgatgttattgaaataacaaagaaatatacaagttagaagaaagatgaagaagaaattgccttaaattgtcatgaattagactactgatcaagtactcacctgcatggccgtactttaggcgtgctatgctttcattttcatgtttatattattattatttgttacttaattaatatgcttcaagacattgaatttgcatatcaaacaaccttcaatatatgattattcttatttcatccataaattttagtttcttaagtacatacaattttcacaaacaataagataaatcataaattgtatattaatcttcacttgatcagttgatcatgagtttgtcacaattagaaaattctacaaattattactttaaaatctgaccaagtatgtagatagcatgttaatttatgatatttcacaataatgtatgggatttttttacaaaaatattgtctttttataaaacaaccgtaaaataacaaa

SEQ ID NO: 91328 - DNA, 2320 bp, Cannabis sativa
taatcaagcatggttagatcactatcagaatgctgagggaaacttcctaaatgagggtttgtttgatcactcacctggcatattctctctgtatcctaggtggaccagtgagaaaaggccttttagatatttcagaatgtggaagagccatgctgattatgaaaagaatatatctaaagtttggaggaagcagattgcaggatcaaagatgtactaggtggttactaggctaaaagccctaaagcctgtctttaaggaaattaacaagggttaattttctgatatccacacatcagtactacaagctaaaaatgagttagaaagagctcagacggagttgcagcagtgttctcttaatgatattttaattggtgaggagttgcaagctagaaataaactgatgcaagtgtagaaagattatacatctttcctgcaacaaaaagctaaggcttgctagattcagaatggagacagtaacactgccctcttccatgcaagcataaagcaaagaataaggcaaaatcaaattttttcgattgagcagcaaaatgacactagagtaactgaaccaaatcaggtttcagaggcttttgttgagtattacaaggaacttttgggcactcgaatggaaggcaggaagagagtcaagcatagaattattacaagagggcctgtagtgaattctcagcaagttgaaatgttgactcaaaagttcactaaagaagaggtgaaacaagctttatttgatatacctggcaacaaggcacctggttcagatggcttctcaagtttcttttatcaagacaattgggatttttttggagaggacctgtatgaggctgtgacatcattcgtagaaacaggaaaactgctcaaggaaataaaagctattgttctgacattagtgcccaaattaaaatttcctaatacattcaaggattttagaccaattgcttgttgcaatgttctttacgaaattgcaaccaagctgttgtgctctagaatcaaaaacatttttcctaatttagtctctcagaaccaaggaagctttattaggggaaggtttttaggacataattaggcattatgggaggaaaaacaataagcttggttgcatgatcaagttgtatttgcgaaaggcctatgacactatagaatgggacttcattgaggaaatattgaagggtttacaattcccccaaagtttcattaacattgtgatgacctgtgctagaacaccaaggttttcactaatgtttaatggaactttgcatggcttctttgagtctaagagaggacttagacagggagatctaatgtcacccttattatttgtgttaggtatggaatacttattctgaataatagggaaagttagggaaaaacctgacttttatttccatcacagatgtacagaaataaagcttaaccaccttgcttttgctgatgatgtactattgttttgcaaaggtgattttagaagtgttcactacttattacaggggcttaagttgttttcaatgacatcaggattgtatccaaatgccacaaaatcagcaatatactcaagcaacatgtctgatgattagttaaggaagctgttgcaaatttttgggtttacaagcttgtctctgcctcttagttacctaggagttttccaattggagcaaagaagatttcaggaaaagattgtgaagtattggcagagaaaataactgctagaattaagacatggagttcaaggaacctttcatttgctggaagggtggtggtaataaattctgtgttgatggccatacatgcctattggtgtcaagtactcattttgccaaagaaagtggtgaatgctattgaagcaatatgcatgaattacttgtggaatgggaaagcagtatatcaaggacttggtgctatctcatgggaatccatttgtcaacctcaattagctggtggaatcagttttaagaatgtggctacatggaataaagctgtaatgggcaaatatgtgtgggcgattgtaaacaaagaagatacattatggctgaaatgggccaatagtgtatatttgcatgatgcagaatggtgggcccacaaaccttcaagtcaaagtagttagtacttgaagtgtttggttaggctcaaagaccaatacaaggaggcaatgggaggagcaatgctacagcaaaaatactcagtttcacagggttattgtttgctgaaaccagcaggaacaaacatacactagtgtaaataggtatggagcagattgaactcaccaaaacacaactttgtgctgtggttagcaatgcaccagagattg

SEQ ID NO: 91329 - DNA, 709 bp, Cannabis sativa
  modified_base (504)..(514): a, c, t, g, unknown or other
cctagacatttttgcctggtcacatgcggatatggttggaattgatccttctattatttcgcacgtcctgaatgttgatcccagtttctggccagtccaacaaaaactaaggttactggacaaagaacaacaagtagccctgaaggaagaagtagaaaagatgcgcaacaataattttataattgaagctttctacccagcttgggtcgcaaatcccgtattggtatgcaagccgaacaagaaatggcgagtctgtattgactttagagacctcaacaaagcatgccccaaagattgttttccactaccaaggatcgatcagctcgtagatgcaacaacagggcatgaaatattaagcttcatggacgcctactcagcctacaatcaaatcaaaatgcatccactagaccaagaacatacaagttttcgaacagatatgggtctatattgctacaaagtaatttcatttggtctcaaaagcactggagctacataccaaagatnnnnnnnnnnnatgtttaaagaccagatcagacgaaatatggaagtgaatgtggatgatatgctcgtcaaatccagaaaggctggggggcacataaacgacttggacaaatacttcaaagtcctcagaaaatacaatatgaaactaaatccctcaaagtgttccctaagagtcagctcgggaaagtttctaggcttcttcgtcaat

SEQ ID NO: 91330 - DNA, 978 bp, Cannabis sativa
tctttttattttttatctttgtatctttaatttttgtttcagtttcttcttcttctttcttatttctcttatttttgttagtaaattaacaatgggtaagaaatatttcaaagaaaatcctcatatccctacatcttctataacttcgaaaaggaaattagttgttcattatctggaaaagagaaaattagttgttttattttcgataatgaagattttgagatacctaaagtgccgaaggtatttattttttttttttggagttattttagagtttttttttttccttttttgctgtagatgttctgatttttttttcctctgatctatgtcttctgctcattttaatttattttgttgttgttatgtatttcgtattttttgtttcttattgtatgcatatttttaatgttttttaacgactattttgttgttatttggcttgttcttttgagtcattttttttttaaaaaacagctgaatatacattaccccaaattcattacttattgatattctcatctacaccatcttcaaaattttcttcttcttcttcttcttacgcttgcttttttttttttttcttcatttgtttaaaagattgatttacgttttttcaattgtggttaccattactttttgctcttctcatcttcatcattttcaaaaaaaaaaaaaaaattagtttcttaagcttcttttttagtttttattttttattttttgtttgtgcatgttcagtctcagatatcgatttgagattttattcatcactctctaattttgttaaattttatatgttttgttgttctgtatgtgctattcggtgtttagtattatatacttaattttttatgttttttaatggttattttttggttgttatcaattattttttaatgtatttagggtaaggggaaattttccaaggtgaaggtttcctctcgtgatgttatagaaatctccacttgcaaaaga

SEQ ID NO: 91331 - DNA, 667 bp, Cannabis sativa
gtatcttttgtaaataaaattttaaaaaagtaaaaatatttaaattttgtacaatcgtattttctttgaaattagggataattttagaaaagtacaaaagcaacaaaaaaattacaaaaatatagttcgtagggagttttcaatatttttacggttttttagattttatttacacaaaatacagtcttttgttgtatttttatgttgtactcttgttattttattattattttttgttatttatatattattttttatgttgttttgatgttatgtttttgtgtctttatagaatattctaaaaatgtaaaaaagaaaaatttgaacctaaaaatataaaatttcacaaggggagttatatttgcacccataaatttataaatacaccctattattaaaaaaaaaatataaacttaaatattttttaaaaattaatcttaatatttttttaaaaaaatttcttcacattattttatgttaatttcaatacttattttgatttcattttcataattttttttaattcatatatatatatttttattttttttcaagaaaatttcatatagatatatttttgtcataatatttaaaatatactttattttttttatatagatatattttttaagaactagcaaaaaattacgtgcgaggcacgtatact

SEQ ID NO: 91332 - DNA, 575 bp, Cannabis sativa
atcgacgccaccgtgggacacgaactaatgagcttcatggacgccttctcaggatataatcaaataatgatgcaccctcctgatcgagataaaacatcattcatcggtgagagggggacatactgttacaaagtgatgcctttcggactcaaaaatgtcggggcaacgtaccagcgaatggtgaacaaaatgtttgcccaacagttaggactgactatagaagcctacactgacgacatgttagtaaaatccaaagatggcgccgaccatgttgaccatctgcgagaatgttttcaaatcctcctcgcccactcgatgaaactcaacccagccaagtgcgcctttgctgtcggatctgggaagttcttaggccatctagtaacgcgacgaggggtagaagtgaacccggatcaaatcgaagcctttcaggcgacaggacaaccccgaaccataacagacatccaaaagttaaccgggaagatagccgctttaagccgcttcatctcaaaactttcagacaggagcctgccattctacgacttattaaaggggaaccccaaatttaattgggaaga

SEQ ID NO: 91333 - DNA, 1152 bp, Cannabis sativa
agcagagttggccaagattttatgaatttttggaagatattgtggaaaaacaacaaccaactgctccatcaaaattatgttcatttgtgtcagcttggtaatcttttgcttgcatgttacatcagtttattgaaactacattgttatccttaacatcaaacttacttcttactcagatattttcaatcaattgttattttatcttattacatattttattaacactcagaattggtttcgacgatttttacagatcgacaaacacaatctcgcttgactcagatcggcaaccacaaactttagctaaaccagtacaatcaacgacgaacaaacatcattgacttgaatctgcctttaatctggaaccaggaatggagttaaaatggacttgaaaactcgcaccatcggcccctgcaaaaattagagagagagagtgagagaccaagagaacagaacatagagagcgacaaagattacttactttatggggcttgttgaggacggggacgacaacgatcgtccaacgttttgtgcacagagacaaagagaaaccgatcaacaagcactatatcttgtcgtcgctcgatctccaccatcggtgctattcctcaactccgatcatcgtctagcttatgttcaggaagaaccactaagaacaacccctcaccatcaagaaccccttcgcaaaccaccgagagaaataatagcgagaataactatgaaacaaagagagagaagatgcgagagagttgagattgagattgagattgagagctttgttttctttagatgcagttgatcgtttaggagtgcgactgtgttttgtttaggtgcgggtgagtgagaatatgatgagaggtaggggtttttatgtttaaattggagagagaataagaatggttaataaattttattaaatatttccttgcataaaaataataataataaattactattaaaatataaaatctgatggtttatatgtttcttattatttttttaaagactagtctcgtccaacatcaaaatggacgtgcttaattatttttttataaaaaaagaattgttatttatatgtattactatattatgtcccccacttattttttatgtccaatattattggatataatgtaaattttttttacgtcc

SEQ ID NO: 91334 - DNA, 902 bp, Cannabis sativa
caatacattctctacttgctacataaagtgcatgtatttagcatgatttaaagttactcgtcaaaaactttgtcaggaaaatccagtaggataaaacttgagctaacggaaaaagagtgccatagatttatatatatatattcatatttatttataagttacatcgttaaaaaccttgctcctgtatgtcaaaatctgaactaagagaaaaaaagtgcaacataattattttagtgataatatatctcataagattattgctatcacttttaaaatatcaccgtatattagctataaccatatatttactataactcttcttgagtatatatgtgtgaacttctaaattatggatgagggattcttggaacatcaatatttatctaacttattgaatcactcatgcatgtgtatatacataccaaagtgtaaaattttatgtaatatgaacatatatacatattaatcataatataaatttcatttccaataataatggtactccaataccatatatttattttattctcgttgtatgaccttaattttcatattaaatgatcatatctataattcttgatgcatatgatgtacttcaggacttctcatctaatacttatgaacaaactatatacatttaatatttctcaatacacaagaaataaaagttttctcttcaattatttataatatagttaaaaaaatttcaagagtctatcacaacgtatagtttactaatttatattacatagacagttttacatgttcttcaactaataatttacttacatgtctttctttcatactaagacatgtattaaatttttctagaattttttagtgaggtatattttaaattctcactatattaggagctctaaataaataactttttgttgcaa

SEQ ID NO: 91335 - DNA, 900 bp, Cannabis sativa
gccacactgaaagcaagtcttggcccgacactcaccctgatggtgcttcttacatttgggacactttggatatgattagaatgtgcacctgtggccttgacggccacttttgtttccccaaaactttctattacccccttactgatattaccacttataggaggatttgatgccatggcgacatcctttgcagtctgctctttaatcacatgtttctcagccttcttaacaatcaaggttaattcgaccactttcttatataaagtgtcgtgagcagtggtaatcttcaagtcccgactcattgtggcattcagtcctctcacatatttatgttttcgggtgaaatctgttggcactagatcaccaataaatttagatagctgataaaacctttaagtgtactcggccataatcatttttccttgagtcattttcacaaagtcttccatatgtgaagtccgcagagcgatgttataaaatttttcctcaaacagactcttaaactcatcccaagtcatcgtgcttataacatctcgagtctgccccacaatgtcgcaccagacgcgggcatgatcttgtaacatgaaagcagcacaattcactctccctgttcccgtcacccccatattatctaggatgcgggtgatagtactcatccattgttcaactttaattatatcagtacctcccagaaacgttggaggttacagctttacaaagcgcttaaatattaaatctctgtgcggcagtatgaatccctggttacccaccactgtcactggagctagtggtaacacttgttctgcaggagctgtcggtgccggttgcctcaactgacacaatacatattctttacgaagtattatacttcgcatttcttgaaacatctgctgccaatca

SEQ ID NO: 91336 - DNA, 564 bp, Cannabis sativa
ccattctattacaaatggtttgccgcatgtgactcggcgtattggaactaaagaaaactgatgacttagcaaaattgacttgctgacccaatgctttagcaaaaacatcaagcatatgctgaatattagctacttcacattctgtggcctaacaatacaagaagctatcatccgcaaaaatcatgtgagacacaatagaagcaccattcgccactttacaacccatgaattaattttctagcctcaaaacttttgattagagccgataaaccttcaacacaaataagaaagagataaggcgagattggatcaccttgtctaagacctctactaggagtgattggcccaagcgtatacccactactcaccacattatactgaaccgaagagaggcagccaaagataagccgaacccatttgtcaccaaaccccaaccgagataacatagcacaaagaaaatgccaatcaacccgatcataagctttactaagatcaagcttcaacgccataaacccatccttcccactttgctttctcttaagataatgaagaatttcaaaagag

SEQ ID NO: 91337 - DNA, 917 bp, Cannabis sativa
aataagattatcttaataatttgtgttttttttatcagagttgtatattttgtttgtttatatcaattattatttttttgtcattttttttaaacctcacatttttttcctttttctcaaaaaaacttactcgattttctcttttaaaatatttttattttaagtcttttttatatttttttaccattttttttctcctctgtttctttttttttttttttttaccattttaatcttttctatttttgtgttgttattattctttatttttcataaatttttgttataattattattttattttattattttatttttcttttaaactctttttttttttttttgaaataatggaagaaaaaaatttattgcacccaccatccactaaacattacacactgcaatgcaaagtaacaatccaacatttcaaagactacttataatagtcattatatatttccttttaaactttgcttattaatagtgcaaattacatggatttatatttagacatgacaactaataattttaattttaataagtaaacctatatcatactatgtatataacttacaaataaattttaacagattattgtgctgtttggtaacacttttttatcaattttctgtttataaaattgaaaagtaaaaatatttttaaaaaacatgttctataaaattttttttactttcaattttttaattgaaaatcaaaattttaaaaacaaaaaaaaaaaaatcactttcaatattttcttaaatagttttttttaaccaatattttagaccttgatcacggccctggcgttgaacccggcctctgtcttgaacacaaatctgacctggacctagacccgacgtaaataaaatcaaaaaataaaaataaaaatgaaatttacagaacacacttttgtt

SEQ ID NO: 91338 - DNA, 548 bp, Cannabis sativa
ttattgtgctcaataatatatagaccaaaaaagccaataaaggcatctataattaggggtttgtacattggagtggtgttgacactatgtaatatagtctaatttgttagatcaattttatgtaaagtgttgctcaatatgaatcatgatcacatgtcattttttttcttcatttcttttttggttgagaattccaaaaaaaaaattattaatttaatgtgatgtgggattatggtgggtaacttttagagttgttaactattgaagtatttattgaaggaaaaaaatgtatcaaatcttatatggatgaaacatgaaataaaaagtaacattttaacattttaagattatttgtgtacttttgtcaactataaatgttatcttcattgaacgaacttgtaaatggaacaaaaatatatgcttttttcactttggtttcttattcctaatgtagtacacttgtctatctaatttgtatcattttttttttaactcaatttgtatcatgtatttaactctccatatattatctttggatcttccaaaac

SEQ ID NO: 91339 - DNA, 1042 bp, Cannabis sativa
attaagctctcaagtcttgagctccaactatttagtccaatcctatatatcactttctcatatgactatttaatgggaaaataattatcatcattgtattctacattcaaaactgagtccaattatatatatcttgactgtacttgaagtttgacgttctaaaacctcacattagaggtgcacaatgacgatcaatagccgtagaaatcaatgtaccaaaaaaatcactaaaaaaaggggtatccaaatgatcacgttaatgagtaaatcacaaccatgctaaacatttatcgaaacaacacatggtatcactgaaaaattcactagaaaggagcggagccacaaaaacgtcaccagaaaaagtacgaatctgggaataataacttagtggagatttttatccttgacgagttgagtctaatggtgaagatagcttgttgtgagcaaaatatacgttcaaagtttgaacctcaagactttgactcgtaatcctgggccaatgacgacaaataaggcagcactgcttgggaattgagaaccttgatagtcaaagatttgaatggtgcattgtgtaaggttaggcggtgaccataaagtggttgttggagctccattagtggtggtatttgtgggttctttctagaaaagaaagaaagaaggagagagagaagagagaaagtgccatgcatgagagagggaggggaaaagacgccaaaattaaataaaagtgtggatcccataacatttatataattttttttttacctttcttttggtttcatcgagattttacattcttctctcgttaaagaaattttgtccaaaaattttaaagtacaaactcaaattgaaaattaaactagtgaggatacttcatatacatatcggactctaattcccaagcatcctcgtcttctcgatatggttctaccataagaccttcactaccagaatcactctcctccttaacacctttgactctctcaccaagattctaatagcttgttctttataagtcatatcttcttgtataggaatagcc

SEQ ID NO: 91340 - DNA, 737 bp, Cannabis sativa
tgaagttatcaactccaaattttatcctcaagggagttacgaatttaagctacaacttaccgaattggtcctgcggatgcgactcaagctcaaaaattgacaatcgacctccggagttaatttgacagttagatcatcatcaatggccaaaaatagcctatgtacttttctatatttttttagaatattttattattattttaataggatctcttttcctataaaagaagagctcatctagctcattttttacattcagaaaagtactcaaaaggtcaaagcatctctctctagaaattagagcttttaaacttagtcaattttttgtaattctcgtgagaaataaaaactcgaagtgtagctccattactatcgcaacatggggagtgaactattataaattttgtacgtctctctaatttttttacttaaacttataattcatctcgtcaatctagcgagctgatattgtctacttttcagcgtcaaaaaacagaataatgggataaaatctaattgaaggactaaatttctacaaatgtaaaagttcaaggaaattttttaataagatatatattttataggacaaaactaggtagtgtggaaagtttagggaataaaattgttaattattcttattaattaaataaatatttatggtgtacgtatatagaaatagagtaatttgcagcataaatacttaaatttaattcttaattggagataaatacttaagt

SEQ ID NO: 91341 - DNA, 1315 bp, Cannabis sativa
aaaaattatttaagtttatatattttttaataatggggtgtatttataattttatgaggtacaaatagaactcctcttctctaaatacacttcaattttactagacccccaaaataccccttccatttaaactcacctaattctcacactctccctctgaatctctcccgctctctctcaatcaccatagcagcatccaccaccatcaacaacatccaacacaatcaaacagcctccgtctccccgtctttttattttcttcatttgaaacccacgaactgccccgaatcccactaaccaacgaaacctagcaccccaaaattttaaaagatcttggtattttagcgagggagtccacgtacattggaagacctgataatccaaaagcttaatcaaaagtttaagagattttttcttaattttatgttaaagttgtgtgtttgggtttgatttctgagattttttttgcaatttattgatgtttctcgacatattagcaaagtttgtcgatatcatcaaccttaggttagaaagtcgatcatagttagcgatgtttcttgatattttagcgacttttgtcaataccatcaaccttagactaaaaagttgttatagttagcgatgttagtcgacatagtttgtgacatctcatgatattagctatgattgaattggaagttgaaactcttagccacatgtagcgatatgttgtcgacatcatttgtaattttgatgttattttggttgtttgctctgtcttgttgtagttagcgacatgtgacgacacatttgtcgacatgtcgggacatatgccttggggattttttctcatagattatgtgtatgttttagcaattactattgatatgtggcaactttgttcgcgatatgttgcgatttattttgtgatgttcggcgacacatttttatgtgttttaatatgtttcttttttttttatcttaaattttgcagatgactcctaaacattatttctacaactatcgacacatatcatagacaatgtcgatagacatcgcaaaattcataagtgaaaagcaaatattttcaattgtcgataataatatcgctacatgtcattaaaattcatccctaacctttagcacacaccaaaatcgctagatatcaataacgacatcgccatacattgctgaactcgagaaaaactagaaaatgcagaatccaagcagttcgagttccaaaaagaaaacaaccaaattaaaagagtgatatatatagatctattcatatcaacctaaatacaattaaatctaacaataattactaaataaatta

SEQ ID NO: 91342 - DNA, 545 bp, Cannabis sativa
atagccaatcctgttctcgtcccgaagcccaacgaaacttggagaacttgtattgacttctccgatcttaataaggcgcgcccaaaagattgttttccacttcccatgatcgaccagttagtggatgcaactgctgggcatgagcttatgtcatttgtggacgcatattctggatataaccagataaaaatgtatgtcccagatcaagaacatacaagcttcgtgaccaacatgggactctattgttataaagtcatgccgttcggactgaagaacgcaggggcaacgtattagcgattggtaaacgaaatattcacaaaccaaatagggcaaaacatggagctttacgtcgatgatatgttagtaaaatcaataagaagtaaggatcacacctcagacctcgcggaatgctttgaaatattaaagaagtatcacatcaagctaaacccaaaaaaatgttccttcggagttttctcaggaaattttttgggattcataactaacgcgagagaaattgaggcaaatcctgaaaagatcaaggcatt

SEQ ID NO: 91343 - DNA, 1076 bp, Cannabis sativa
gcccaattgagactatggaaaagttctttggcctccatttcgtgtgatttaaaattgccaacaatcgccattgacagggcagccacaaccaaaccattttcatctcggagaacagcttccacaccagtaatatttgttgaggagtcaacagccgcatccacgttgaatttgtgggcaccagaagctggtggagtccacggaattggagccggtgttgcagcagaattaacctgcttgtgcgaagttgctagtgtagtcacagttgcagcagtgggtttcggttgggcagcttggaagttctgtacgaacacagatgcaaaaatggataagtcttgagctgttcttgctttgccgccatgaaccaccttgtttcgttcagtccaaatagcccaaagtgtacaaatgatatgttccatctctaaccttgtgtaaatagttgagagatgtaataagtaatcaccatttcgcattgatgtacacttttgccaatcaaacttgaaattttgagctctccaaactgccttagcataggtgcagctaaatagagcatgtcagattgattcccaagcttttttacaaacggaacatgtggaatcggtaatgatctttctatgcataagtgaagtagcaactggtatagcatcatgaatgacccgccaagcaaaaatcttaactttttgaggaatttggagggaccaaaagaacttccaccatgacagggatgaggaagagctggagctgtgatcttcttcttcaagaaaggttgcaaggtggtagccaccttgaaccgtgtatgtgcctgtattgtggtgatgccatataagtttgtctgttgtgctaaagtagctcaaagggatggtgagtattttgtcaacatcaagagggcaaaaaacttgctgcaataaaggaacatcccactctctttctcagttataaaatttgataccacagcatttgggggtccaatgtatattattggaaggaaagaagtataaccaggaatccaagggtcattaccacagttgacagtacgtccctctccaattttccatcgcaaccctttggtcaaaagatca

SEQ ID NO: 91344 - DNA, 848 bp, Cannabis sativa
agtgacagttgacaatgcttcttcaaatgatgttgcactaagaaaattgaaggggcacttgttggaaaaggataatacatttccactaaatggtgaaatatttcatatgaggtgttcgacttatatcttgaattcgatagtaagtgatggtttgaaagagttgaatgaagctatttcaagtattcgaaatgcggtgagatatgtgaggtcatctccagctagactgaaaaggtttaaagaaagttgtatggatgcaaatattgatacaaaagccttgttatgcttagatgttgctgctagatggaactccacctacatgatgttagaagctgctataaaattcaagaaggcttttgacaatttagaaggagatgcaaactacacaaggtactttgatgaagaaagaatggctggtccgtcaagtaatctagattgggaaaaagcaggagtatttgtcattttttgaagagattctatgatcttaataatcggtttagtgggtcattatatgtcacatccaatctattccttccagatattttgaaagtacaggctgatttgactactatggcttctagtcctgatactttattaggaactatggctattagtatgaagcggaaatatgacaagtattggggaaggattaaaaagctaaatatgttaacatttattgccaatatccttgatccgaagtataaattagaggttgttaatcgaggttttagatttgtgtacaatccaagtgaggctgaaaaaataatgaagttggtcaccgatacattggcacagttatatgtgttttataaacaacaacaaacaactcagccatttgaagctcaacaatc

SEQ ID NO: 91345 - DNA, 654 bp, Cannabis sativa
aaaaaattaattccctttatttatcggatttcatgtcttttagtttttaccttttacagcttcatccttttaatttcttttattttaactttttcacaactatcttattgtatttcacatttttgcaactttatccttttaatttcttttatttttactttttcacaaaaattttattgtatttcaaaaataactttcctatttaataaaaaaaataattctctttgtttatcttagttttcacaaaaataatgcaagatgattgataactagggttgacaaatcgggtcaaacatgataacacaacttgaaactcgcacgagagttagtggatttgggtttgccttaaatggaatcgggttgacttgtctaacccgtttaataaacgggtcgtgttcgggttgacacggctaatacgaaattaactcgttaatgacctatttaaagttattgtagtactttaacatgtgataaatgtgttataaacttgttgaatacttcataaacgtgttattagttgacatgttaaacgaaatatgcttataaattggttacacgggtcatgtcgtgtcaacccatttataaacaggtcgtgttcgggtcaagtatatacttattatacatgggtctcgacacgacacgaacacgacccgc

SEQ ID NO: 91346 - DNA, 3024 bp, Cannabis sativa
ccaagtttggctttattttgtttttgttttcgttttcttgagtttaactcttggttttcatccaaacaaatcctatgtagccatgtaagccacatttttccttttcttgtggacttggtggataccatgaccttatgcacacatgggcgctagtggtccatgcaaaagatcttttttgacaaagtttggctttgttttgttttgttttcttatttttgtgagttcaaatttttgtttacatccaaaaatatcctatgttacaatgaaagccccaatttttcgttgctttggactcggtggatgccacgaccctatgcacacatgagcacctacacaccatgcagaagatttttttcgaccaagtttggctttgttttgttttattttcttattttcttgagtttaacttttggtatgcatccaaacaaatcctatgtggcaatgcaaaccacagtttttcgttgcatgtggactcggtggatgccacgaccctatgcacacatgggcgcctacagatcatgcaggagattttttttgacccagttttgctttgttttgttttgttttcttattttattgagttcaacttttagttttcataaaaaaaaaaatcctatttggccttgcaagccacagttttttgttgcctgtggactcggtcgatgccacgaccctatccacacatgggcgcctgtggaccatgcagaagattttttttttttgacaaaatttagctttactttgttttgttttcttgttttcttgagtttaacttttaatttttatccataaaaatcttatgcggccattcaagccacgattttccttagcttgtggactcagttgatgccacaaccctatgcacacatgggctcctgcggaccatccagaagatttcttttgacaaagtttggctttgttttgtattgttttcttgagtttaacttttggtttttatctatacaaattctatgtggccatggacgccatggttttccgttgcttgcggattcgttagatgccacgatcctatgcacacatgggtgcaagcgatccatggagaagatattttttgaccatgtttggctttgttttgttttgttttgttttcttgttttcttgagtatgtggccattcaagcctcaattttttgttgcatgtggactcgatgaatgccacaaccctatgcatacatggacacctacagactatgcagaagattttttcgaccaagtttggctttgttttgttttattttgttgtgtttctagagtttaacttttggtatgcatccaaaaaaatactatgtggcaatgcaagccaccgtttttcgttgcctatggactcggtggatgccacgaccctatgcacacatgagcacctacacaccaaggaggagatttttttttaccaagcttggttttgttttgtactgttttcttgttctcttgagattaacttttggttatcattaaaacaaatcctatgtggccatgcaagccacattttttcattgcctgtggactcagtggatgccacaatcctatgcacacatgggcgcctacagaacatgcataagatttttttgaccaagtttggctttgttttgtgagtttagcttttgggtctcatccaaaaaaatcttatgtggccatgcaagccacgattttccgttgcttgtggactcggtggataccaagaccctatgcacacatgggagccaacggtccatgctaaagatctttttgaccaagtttgtttttttgtttttgttttgttttcttgttttcttgagtttaacttttttttttcatccaaaaaaatcttatgtggccatgccagtcccaattttctgttgcctgtagactcggtggatgccacgaccctatgcacacataggcgcctacaaaccatgcataagattttttttggccaagtttcgctttgttttgttttgtattcttgtttcttgagtttaacttttgtttttcctcctatcaaatcttatgtggccatgcaagccacaattttccgttgcctgtggacttggtagatgccacgaccctatgcacacatggacgcctacacgaccatgcagaagatttttttttttgactaagtttggctttttttttttgtttttattttcttgttttcttgagtttaaattttggttttcatctaaaaaaatcctatgtggccatgcacgctacagttttccgttgcttgtggactcggtcaatgccacaaccctatgcacacatgggcgcgtgcagaccttgtagaagatttttttttttgacaatgtttggctttgctttatttagttttcttattttcttgagtttaaattttggttttcatccatacaaatcctatgtggtcatgctagccacagtttttcgttgcttggggatttggttgatgccacgaccctatgcacatatgggtgccagcggtccatacaaaagatcttttttgaccaaggtttgctttgttttgttttgttttattccttttttgggtttagcttttggttttcatccaaacaaatgttatgtggcaatgaaagccacggtgttttgttgcatgtggacttggtggatgccacgaccctatgcacacatgggtgcctacagaccatgcagaagatattttttgaccaagtttggctttgttttattttcttgttttcttgagtttaactcttggtcttcatccaaagaaatcctatgtagccatgcaagccaccgtttttgtttcttgtggacttggtggataccacgaccctatggacacatgggcgctagcggtccatgcaaaagatcttttttgacaaagttctgctttgttttgttttattatttttgcgagttaaaatttttgttaacatccaaaaatatcctatgttacaatgaaagccccaatttttcgttgctgtggactcggtggatgccacgaccctaagcacacattagcacctacagaccatgccggaattttttttcgaccaagtttggcttt

SEQ ID NO: 91347 - DNA, 1311 bp, Cannabis sativa
  modified_base (1268)..(1271): a, c, t, g, unknown or other
tactatgacatccccaattttcttaaaatctatggcttgtaataaatcctatttttaaattttgtagcaaatacgaaaaacctcttcccttcatcgaaacagaatgtccagtaacagttttaagccaaaacccacctataatatcctttgattttgatatactagagcatgaacaagcagaaaaattcatattttctgttctgcaaccagacccaaatggcgaaacagtgaaaataaccgaatcagatctttgataaggtttgggacaagacccagttggtaaagtttgtgactttggtgtggagaatagttttttttttttttttgagaaaagtgtggagaatagtttaaaacaactggtttgtggaaaagtcctcacagccaatggaaatgcaggagtcttagctaaattagtgtacatcttgtatagttttacactcaaagtagagctaagagcttaaaataatcttcagagagaaagaatcaaacaacctgaattgggaaaaacatggattagaagaaaataaaaggtccccatatgagaaactttaacattcaagctctaagttttagggtaaaaatcaacaaaaaatcaactatggaatagttatctatgaaactttctcaaaaaccaaacagacaagggtattaaacagaagtgaaaattgggcaaacaggaagaagtaaaacctggttggggacaaaaatcatagcagaatccattgcaggcactgtgtcaatctccaagactaagcaatacctccattactaatatgatattgatgagaaaaactgaaaaatttcacaagaaaattgttatcaattacacaaacacacaacaagcacagctttcactttattaaattgataaaataatcttcatgtgagtagtgtgttaagaactcaaaattacgttccttaaaaccctgagtaggtagaataacagtggagatgaaaaaatcctgttgaagagaagagcagaagataaaaagtgaagagattagttagaatgttgtgtatgttacctgattgagataagcggctgccgttggggaacctgaggaaagagagagagagagagagagagagagagaaatggtgggtgaaactttagggtgaggaagcttttaatgaaatgaaatcatattacaaagaaataaagaggtttataaattaagtagcttaaaataattttgatatttctatctgttgcccctaattttgtccaatatatgtggaccaatcagacagggacacgtggatcaagnnnntcacaatatttgctaagtctttaggccataagataacatc

SEQ ID NO: 91348 - DNA, 631 bp, Cannabis sativa
  modified_base (235)..(247): a, c, t, g, unknown or other
ttaaataagttaaatagagtaattaattaagaaaaatataataatttaattttttttaccttctatcatttgtaccaaactatagattatatgtacttggaactaaataaattatattttaatagagagattataattaaatagaattagactaaaaaaaatttaaaacatcaaaatatatcaatgtaacaacaataacaataaacaattcttaatactatatcataataaaatnnnnnnnnnnnnnatataatatttatatatgtattacaatttagaataaagttattaattctatataaataaagttataaaatatatgtatatatattattaaaatataattattcttatatagaagtatactttgttaatacgagacttaaaaaaagtataattatttataatttaaaaattatttttatttaactgatttaaattgagactcaattttttataacaaattaaaaattattcttcaataaaacaagacaaatgttctactgtatctaaaaaaactagactctcctctagtacacaattgctaataaatatagttccaattagtttaaaattaaatgttccatttattatgagattaagaaggttgcttttcactattgtatttatt

SEQ ID NO: 91349 - DNA, 530 bp, Cannabis sativa
  modified_base (28)..(28): a, c, t, g, unknown or other
aagtaaaattttgttgtgactaaaagtnacatttaatcataaaaaaattatattgcaactaaaaagttgtcaataaaagtaaccgatttttgtagtgttatcatctaattattattgtattctagattatatataaatttgtatgttgagttatttaatttttccaatagtaatataaaaatttaaggtaaaataaaattaaagaaatttataagatattttaaagaataaattaccgaagaagctgatagtaaaatttcttttaaaaataacaatattatggtatagaaccatattcacatactcatgtgatttataagtccgtgactcacaatatcgatcatatattctccaatcgtatatcgaaacaagaaaatattatagatgaagggtataaggtaccttataactttttttttttgctcgtttcgtatgttgtattgtattgtgtaagattgtgttgtattatattatattgtattaatattatttaatacaatattatatttggtatttacttgtattaatag

SEQ ID NO: 91350 - DNA, 527 bp, Cannabis sativa
  modified_base (457)..(460): a, c, t, g, unknown or other
tagtttctatgtaggttgctataagtattttgattgcgattttagttgttctgttaattgcaatagaagtttctatgtagaattccgtaaaaataacaaaaaaaacggttttaaaatgtaaaaataaaagtccttataaaaaatactattcaaataatttattatgcaagcgtataaaagatttacgtgtacaaaagattgtttgaattatatttttggggtattatttttttgaatatcttaaaattttacaatatatcttaaataagtacaatatatacaacagttaaaaaaataatttttttccgaatgccaaaaaaatagaagtgtatcagtttaccattttctaaaataattatacaaaaaagtaatacatattatatataatagaataataaaaaaatgaaatatacacggtatatgttatattatttataataatataatatatagattnnnnatgtgtaataaactaataatatgtaacatatgactatattagttgtcatctttttgtaacatttggg

SEQ ID NO: 91351 - DNA, 977 bp, Cannabis sativa
aaaaggtaggcattgctcagtgagccggtgctgctttttgctcattctcatgtcaatgtagagatgcaacaaactacattctaagtacctttactagcatattctatgtttattttatatctatttatttatttttatggctgaagtagatattgaaaacatgtgtaagaaaaaaacttctagtttgtgcatctgatgcttgaatttactctaatagtgtgtatctttgcttcggtaataactaatctcttatgtttaactagttttgcattttagtccccaaccttatttttatttttatgacatgtaggtagacaatctttagccaaggatcccttacatttctttagatttttattttattttcttccaagtgacactgtctgaaacaactactttgaatgaaacttccaaaagactagccaatgcaaaataatttactggaaaatctaaaatataactctcatgctaaggggagaatattagccacctgtttttggagtgtgattttgttcaagtattatgtccaaattgctcactgaattggacattcagtggtgcatgcctgtgcatttagatgatagagtgtgtattatttgggtgaaggaggttggccacattatggaccatagttatcttcgctgtgttcagggctgtgtgtggctagaaagaaataatagaattttcaaagataaagaggaatcagtagcagggctttgggagaaagttaagttttgggtagcaacttgagtttatcaagttaaaggttttgatggcttatcttatcttgatcttagtagagtgtgggcaacttttcagtattaagatcgactgagggctttatgtgttagctttcattgtttccttttgttgttgttatttttaccacatttttcttgtgccataagtgaggacaccaaataaatttgggaggaggtcactcatggacatgtgaccttgtttctttcagaaaaaaa

SEQ ID NO: 91352 - DNA, 526 bp, Cannabis sativa
tcactcaacatgcactcttgagaagtcactcggcatggactcttgagaagtcacttggcatgcacccttgaaaagtcacgcggcattcacccttgagaagtcactcagcatgcaccattgagaagtcgcatagcaagggcattcgcaaagtaactcgtcaattacattgtcaatgtcactcgacatgtgtccacaaatgtcactcgtccatggcccgacaaaacttggtggaattttcccaagcaagagcagagtgaaatgacaaggatacggtcacaaggacaatgcaaacacgcgaggagagtacggccacgccttctagaagctctgaaagccaagggtacaagttgtgggagcatcactctcgcatacctggatgccctaaaaactaggactctacaaccactaccctacaactcgagaccacttaactctagacaaaggtacaaggcgtaaagattccacttgcaacctccagctcatggatgtcaccttgtcccttggaaccaccatgtatcttagatct

SEQ ID NO: 91353 - DNA, 783 bp, Cannabis sativa
ttttttttttttttagaaaaatttttttttttttttttttttttattatttttttttatgcaacgttagtttgtacatttcaaaaattagagtttgatccttttaaaattaatgattctaaatgcaacgttggtgtgattaaatctataaaaagataaaaatatgtgtgtttgttcacatatgtgtgtgatgtagttcctagtagaaatgtttatacaatctaattcacactattttgctcatagtatatctaattgtattatgtgataatttcataatttgaatctaatccaatctacataatagatcaaactcaattaattccaatttgtaaagttgtggattggataagttatttcgtatttgttacattttaatattaaattatttaatatttattacaaaatatatatatatttttgcacatagctaacatttaacaataaaataaattaaattattgtttttttatgtctccaacaatatattaaaataaataaaaaataacttttaaaaaataaatgtgtaaagaaatatttaattttgttttagattatattctctttataaataaaaatggaatatgtatttgatcaatgaagttgtgaaatatattcatattgcaatacgtattagatttttaaattactattttcacattaaaatattaaatgttaatttatatagtattttaaatatatatatatggatgatttctaaatgggtaatacctattaatgggtactaaaaaactgattaggtggcaatttggtgacctactat

SEQ ID NO: 91354 - DNA, 509 bp, Cannabis sativa
ttctaaactaacagaagaaacatgtctttcttgaatttcataaacactggtgctttgtcaaggacaagaccactgggcaggtgctcctcaaagggaaggttaaagatggcttatatcaattgggtgctgactctccatcatgtcctactactactcttcaatgcaatcttgtgtccagttctgacaatgatagtgcttgtgtctgtaattcaatgaagattacacctgataataccaattgtaatactttgccaattaataaagattctacaattgttgattactctgtatcttcccctgaagtctttctcacttcagttagtaaagacattaattcatggcactgtaaaactggtcatccagccccacaaatattgagcaaaatattaccacatgtctctcatactggtactcttaaagacctccaattttgcactgcttgtcaattaggcaagagtcatactttgccatttcccacatctgaaacccgagccaatcaaccacttgcc

SEQ ID NO: 91355 - DNA, 588 bp, Cannabis sativa
atcattaggcggttagtgtgcgaggagaggttgttatggtggcttgggtggtgtggaaagctccgaatgagctggtgtggagggggaaacattcttttgtagaagaggtggtccttaatcaatggacaaatgcttaatcaataaagaagggcccttgtttactcctactggaatggatgaaggcgtggagcattattggatgaaattggtattgaatacgattaaggtgaatgctcatggtgcaatctttgagtgggaaggttggtttggggctggtgatgtggctcgggacaattccggtatgcttttggaagccttttccattagtaaacgggtgtgtagcaactgcttttgctgagatgtttggcatcaaggaggttttaatcggatcaaacgaaaagggtgggaagatgttcaacttgaaaccgattgtcttgtgattgtttaaggagttcaatccaaatgcctcttttttggtttggaaattcttgactgcatgttgttgttaggctctttaaagtcaattaagattcgttttgttaaacgttatgtaaaaaaagtcgttcattatattgttcgtgactcttg

SEQ ID NO: 91356 - DNA, 898 bp, Cannabis sativa
gagtactcgcacttattttatatttactgttattattattatctattttcggtgttgtaaaattccttcaataacatttggcgccgtctgtgggaacgataatactttgctgatttagaaggaaaatcacaatggctggaaatcagacaaatgaaggtcttaacaatgaatcaatcaacattgggatgatgaatgtcccactgccgggaaatagggtacctcccgcgaatactatcactggtggtgtgggatggacgaacgtaacacctctcaacttattccccaaaattgctgctccccacattggggaaacatccacactagcggctacgacgagacattttctgcctattacgcctgtagtggtgtccgagggcatcattatcctaaccactgatcagtacacggcaatacaggatcaaatacatgctttgcaggccgaaatcgatggacagaataggactcgacgtcctactcgagtgcccactacccgctcagatgatcctcaggtaacgaaatctagacgtcgaaataaccgtactcgcagggaacgaaggatagatcaggaagggctcaatttaaatcagccgatgtcaagggatcaatccgcaaggaacttcaatcgtgaggtgcaatcgaaagaagatccaggacgacgtaaccctcgcagcaaacccgaaccacgaaatgaggagaatgatgttgaattcagctcttcatcttcgtaaagtcgaactctaagcaggtagaccaagtcaggttcgatggaaacaccgcgaggaggaagataccaagttcatagtggcgacttgcgtgaccacctcaatgtcattttcagggcacgttctcagacgccccgaaacgatgaagagcgtcatgatcctcagttgggcgatcg

SEQ ID NO: 91357 - DNA, 753 bp, Cannabis sativa
  modified_base (61)..(67): a, c, t, g, unknown or other
  modified_base (363)..(367): a, c, t, g, unknown or other
tatatatatggatgtatatgtcatattaatatagtgatatataatatgatatttgaatatnnnnnnngttaatatgtatatgtgagatatacataatttatagcatgtatataaattatatacatattatatatatgtgaaacatataataatatatatttatgatgagaatatttatgtatgtaatacatatataatatatattatgtaaagataatatatattatgatgagtatatgttatatgagatgataataacatacataatatattacttagcataaaatttgggacttataattttatgcatgagagttatatacattattagtatataataatatatgagtaactaatcatatnnnnngtatatgataataataatagtgataatgatggaaaatatgtattcatcattttttgaatggagttttagaattaattttcaattagtgattttatctcattttatgagatgagaaaatgaactatgagatttactcttttttggatttatgttgcgaaagagtaaatatatcaaagtggatcaaaacttgtaaaatgagttataattggaaaaacaattttagactcaaatcaaagtgaatcattgtggattcaaaaaattgtgaaaagataacaaaattagataagcaatttgaatcttaaataattaaagtggtgaacaaaattgatgagaattttgttaactttggtgtaatatttgggttaatctcaatgaggagataacct

SEQ ID NO: 91358 - DNA, 680 bp, Cannabis sativa
taagtgggaaaaaacctttcaagtattttcaaatgtggaagtcacatcctatgtttgagacttatttgaaggaggtgtggaatgcaaggataaaagggtccaaaatgtctcaggtggtgtccaacatgagacttttcaaggctaagctcaaagagataaatagagatggtttttcggatttacagagtttggttaggaaggctaaagctgaccttgaggcagtacaagaacaattacagcagcaaccgttgtctattgagttacatagcaaagaaaaagtagctagagaaatgctaatcaaagtacagaaagattactcatcctttctacaacaaaaagccaaactagcttggctagagaatggagataccaattctgctttgtttcatgcttgtataaagcagagaataaggcagaatcgtattctttccattgaaacaaatgagggggaaagggtgcacgaccttgccaggatcacagaagcttttttgagcttttatggagagttacttggttctaaaatggaaaatagaagaaaggttgagagaagtattgtggcaaaaggtccggtggtgtctactgagcaagctcaaatcttactacatagtttttcgaaagaggaggtgaagaaagctgcatttagtattcctgggaataaatccccggggcctgatggattc

SEQ ID NO: 91359 - DNA, 705 bp, Cannabis sativa
tagttcagggagaatttttaacggacaaaaaagttcaggagacatgatttggtacatgtcaaagttcgaagaaaaaaattaattattagccaaaaaatattggcacataggttgaacaaaacgcattaaattaaaataataaaataataataatattttttaaaaagcaatagaccagaaaaatatttgcaggaaggcacgttaaaaatttacattaaatactccacagataagatttcttcttaatgcctcgctttggaaatattctatacaaatagccctaatgaaaagacatattattgtacaactttgatgatgggtcgtgggctaagtgaggatgatgagaagaaaagtcgtttgaaaagggggaatagttacctattatttaacagaatgtttttaatgtgataatatatatttagtccatacaaaaacatatagatacctctattaatttgtatataagtatatataaaacagtatcatcgtatactatattttgtaattctttagaaattagtctttttttagaactttacgcactatgattaactattcaacaacaatttaatccaacaatattatttggtatctaagactcctctatctttttctcttataggaaccatatatgagtagataaaataatttcactactacaatatgggcctttagcttccctttttttaacccattttataaaaa

SEQ ID NO: 91360 - DNA, 540 bp, Cannabis sativa
tatatatatttatatatacttgcaaggcacttgcaagacaatcggttgagatatatatatacatatatgttataatatagtcccttagaagcgattggaccaaacatgcatatgctcaatgctcacgatgaaattagctagacacgtaacaaattcacaatcgtgtctaatccatctaatgtgtttttgcaagaataaaatatgaagactgattgtgtgttgccctttgtatctacagccataatggtctatataattatgagctatatagatatgttcgccactatatgtacttatggtatatatatgatattataataaaatatgcacatatatatgtgattaattaatttttctaaaaatcaaacattaatatacgaaactaatgtatatattttaggttattaaaaaaatttaatagcaaaattccgcccaagaaacacagtcatcagaaaagtcgtcggtgtacgaaaaagtcatcgaaaaaaatattattgttggaaaagtctccagaaaactcatcatcactggaaaagtgat

SEQ ID NO: 91361 - DNA, 655 bp, Cannabis sativa
ataaaggtatatcaatttttaaggaatatatttttaatattatcttggtataaaatctaatttttttttgttcatcctaaactctaagatccaaataaagagcaagtcaaagcaatatatgttttttttttatttttattgagtatttgactttgttttgtatggttccaattttctctatttctatattaatatatatatttatataacaagtataataaaataaaacacgtataaaaacaaatttaggtttgtaagtagggctgaactcatttattataggatcaattcttgtttcagaatatttatttatcaaaatctttagttctgagatttgattgagtttgagaaaacaatgaataataataatatggaagaagagcaaagagcaaggcttttaccaaaacctgtttcatcatcaatcattgaacaagtgaacacaacccatttgagaaaagacctgaacgaggatgatcatgatattgtttctgaagtgaagcagcagcttcaattggcaggtcccttgatatgtgttaatgtcttaacatattgtttacaggttatttcagtcatgtttgtgggtcatcttggggaattatcattagctggagcttctatggccacttcttttgcttcagtaactggtttcagcttg

SEQ ID NO: 91362 - DNA, 6962 bp, Cannabis sativa
taactattttgccaaacaaaatattaggaattcatttgtaattaccaccttatatctaaacacacctaaattttaaaatataatctaattactaaagtgtataattaccaccctagtatttaccctatcttgtaattacacagttactaaactatgtctataaccacaattaacattaatttaagaaactaatttcccctatgcataattaattaaattttccatacataattcctttacattatgggatgagaaaaccaacacgatcaaattcaatctgaattggctggattgaatgatctgtgcaccccacccctatcattaatcatattcgccatcttgctcgattaaggggctgcaaaattttatgcatataatgcactaagctaaccttgttgctaatcttttggctaaatgagttttagatttttaagtttgtgcttcgttaaatatggggtcattccctctgttgcgagagatgctattatagtggactagcctcttgtgtaataatgtttcttattattgttaaatgaggttttataaatgctagcaaatttggttatgtgtcaagctcagttactaagtagttgcctacttggatttggatgaacactttggaaaagaatttcaaaattcatataatttttttttttttttgacataaaaattcatataattaattattcagggaaataaatattgtcgttaaaaaaaataaaaagaaaaaatatatataaaaaataaatcttgggaatggggaagaagcattgcatgactctctctcacctggacctctctgctcaataataaaacattaacacatcaagtaagaaagtgagggacaagatttttcgttgagagattggaaaaacattggagtctcctcaatttgggtttttgacgtaatcgcccacctttgccttgtactttccgaaacaagtcctttgtgtctttctcatatctaatgggcttctcatattcttgttgttacattcttctatttcgtcctctgagctgaaagatcttctcttttaatcattttgacatttaaagcttgcttctttctggtccctgtaatttaagttctgttgggtttttggtggtagttttaaatggcaaatacatctgggttatttactgctccttcagttccgagccttaggaggatgaatcagccttcaataggcatttaccgatctgggttttgctcttcctatggaatctcgaaaagggtattctgttctagcaccattgaaggcgcttcaggaatctccgcttctgaatctcgagtacgcaggtgagtttcctttcatgcttgagcaatttgaccccacttcttcctttcatcgcctataaaaatgagataccaatgcatattgagtcgttttacgaggctggtttttgttagtgaagaattttgtaaaatgagtagcgtgaacattggtttggggagtattgttcttcgtttacaatcttatctgattattgattttgtgaacacggtgtttgagattgttgaaagagacagcagtttttgaatcattgtaggtgtttcctcggttattttcacttttctcgattgtatcgaaggtttatttgagcgggttacggttgcatgtgatgatggtgtaaaatcatataatgagttttcttctcaaacttcaaattctttcttaatgagaacgataactaaattaattacatgggattgagtctcgtgagtttaactaatcaaatggtgattaaaagttagaagcgtgagttttacttatgtatatctattagtcaaggggtacttttgaagttaatgattgataggaagcagaagcttgatcatgattccatttatgggtgaaagctttaactttcattgaatggaaccaagtaaaatctataaactcttcacttcatgtctagttagtgagaatttccaagtcctgatttaaagatgtgtgtgttttattatttgttaggtggttaaaagatttttagtttatataatctatttctgttataatgttacatatgctatttcttctttctagcaccgcaggttactatctctttctaattcaaattaaaatgtatttgctaaaattattttagtggtcgtatcagttctttgaaagtcttgtcttagaatttttttgttttttgttttttctggtagttttgtgtgcatatttggcttgaaagttgaaagagcacttgctgttgaaaatggaaaactgtgtgctgtgtgtgcactttcactttcacttgctctgctcctttattgaatgagtatttatatttttacaggcttgtcagtcaaggctgcaagctagtaggatgtggctcagcagtaccagcacttaagatttcaaatgatgatctatcaaaaatagttgatactaatgatgaatggatatctgttcgcactggtattcgtaatcgacgggtcatctcaggtcagttcattctattaataatgtcaactaccttaaaattatatgctgctacagtctgaggtggtaatgcttgcactaaccgggcctcttgttgaatctgagttgtgtctgggttgatctatggtcattttgaggtgtcctttttgatacatgtaaaatttggaggcctaatttttcttgaaattacatcttaataatggctctaattttctgttgcaggcaaagatagcttaacaggtttatctgtagaggcggcgaggaaggcacttgagatggcacaggttgatcctgatgatgtagacctagtcttgatgtgtacgtccacacctgaggatctctttggcacaggtccccaggtatataatactcaatgtaccttgttattggattaagcagagaataataggaattcatctgcatggtgcacccttatatgtttggccatttttagttgtgtattcttctatacttttctttccatctactgtcacacacacaaacagttttatgcatttcatgccattagataacttactagccaagaattgtgagtttggtgcattatttacattttgataacagtgtcagttctcctgatttatttaaaatttgcttgataatatacagccatcccaattcagccatactatttcatgatcttatttatctattatatttgaaactctcagatccaaaaagcactaggctgcaaaggaaacccgctggcttatgatattacggctgcatgtagtggatttttattgggtctaatttcagctgcttgtcacatcaggggtaacaattctgtttaactgtaagaaattctatttatacttacaaaacatttgagactatgaatgcatgtataaacaggaggtggttttaagaatgttctggtgattggtgctgatgccctctcccgctacgttgattggactgacagaggatcatgtatactctttggggatgctgcgggtgctgtgttactacaggtcattatttctctctcaggttgccaatgttcatacttcatacctattatgttccttatcatgttcctagcctaaacacccagcaaaatgtttgatgccaagccagccagacatttattggacacaatttttcttttgacggtgaatagatttatgcttgttgacaagcatccatgttgaaatattttaaagtaaatgatgtgcttaagaaaaatgaaattccttcaaatacttgtattctctctcctgcatttctttttctccttgtcaacaattgtcaacttttcattatgttgaactatcagttaaaacttcagaaatgctgttatgacttattacttcgttgtcttgagagttgagttgctgtttcagtaatagcttaagataatggtaatcttgtattgtttatgaagtattgttcaatggctgtaattactaaatttgcccttttataattgaattatcatacaggcctgtgacagtgaagaagatggtttatttggttttgacttacatagtgatggtgatggtctaaggtacttacctttcttagtctctcctttgtggcagattcggtcatctttagtgatctttgcaagagcattgttacaaggaacacattctttgatggtatatactttccttcttgtgcaggcatctaaatgcaagcatcaaaggaaatgaaaccgaccatgctataggtaccaacggttcagtggtagatttccccccgagacaagcttcttattcgtgcattcagatgaatgggaaagaggtctttcgattcgctgtgcgatgtgtaccacagtcaatcgaatctgctctagaaaaggccggtgtcacttgttctagcattgattggttgctgctccatcaggtatggaagctaggcgagtttttagcttgaatgctgcaaaattaacttgaaactacacttgctctttctgctgtcaaattagattgtaatagaggtcttttgtgcacaggcaaaccagaggattatagatgctgttgctaaccggttggaagttccacaagaacgagtcatatcaaatttggcgaactacggcaatacaagtgctgcttccataccactggcattggatgaagccgttcgaagtgggaaggtgaaagcaggccatactattgcaactgcagggttcggtgctggtctcacttggggatctgctattctaagatggggatgatgttgaagtgaaatgaaaccactacaccctcttggccctcataaaacatcaaaatgaaaaagagaaaaaaaaaagaaaaagtacaaaaaagaaagagaattttccatttagaaccagcaattatgcagtttatagcttcaaatgtcatgtgtattattaccttggcagttggcatgcaaattctgcatcagtgagcttccttttgtttgtttttgcttatgttactctttattagctttggcaaacttaataaaattgatttatttctttcttttgatgttgatattgatacaagtctggaattctcataaatgtgctgttaaaaatcatcaacaaaacagaggaaatctaagataatataccatagatactgccaaaattgatgttacatttataaacctctcatgaaacttacatcacaaagctataaactctcgtaacttccaattacaagagggaaagaatatatatgataaataattacaacaaaagaaagagaaaggaagaaaggaaaaaaaaactaaggtcactgaacaaaaacttgttgttcaagtctagatttaatcctccgaagagtaccatcaatggctaaatcaaaagcatctttcttggttctcaaacccatcgaactcatatgtcttctatacataatctttggtataagctccataactttctctctcaagctcttgactttagaccttggaatactgctcaacacgtcgagtattctcaaccctttgaacacaacttcttccttaggaatagtcacagagaattcctcgtactcatcctcaggcaagtgccacgtgtactgcgacttggcagaaagttcctcgaagaacacaggtatacaaccggctaggatgctgtcgaaggtggacctccgcgtcggagtatcccccggcggttgaagacaaaagctcgcttgtaacattggcttcatgaaccgaatcgggtcgtgctcacaaatcccattagagcaatccacaatgctgcaaagagcggtggagttctcgcactcattccttatgctccggcgaatattgggtgtggcggaaactccaccgccgccgacgaagagcaccagagtgctccgtttagcgcggcggacacgctgagtccaagcctcgagaaacgacagagtgggaggatgaaacgacgtcggataaggcaccgcctgatcctgccacggccaggctcgggcctcaaccgttaaagccgtgacattaaagaactcgggcagttccagaaacgacgttccccaaatcggtgggtcattaccgggaggctgagagaaatcccaggccggacgagccataaccaagaaatggtcgtgacccatattccgtttccacgctttgggctcgtccttctgcaagaattggaacaagtcgagtccgtgttcggcgctggagttaacgtcgggaccgtacaagtatctgagagcatcaattccggcgtagtaagggaggtaaatggcgtcagcggcagcaggatctgaagtgagacacgggtactcgagcatccggcgatggaagacgagttctagcattgaagggtctgttcggtaccagctctgggaacgattgtgggtcttgtgacccaaaccatggttaggcaagtaagagcagaagtcaccagaaagtggatattcagagcagttggccaatagatcaagattgaatcttggcggtagacggcgtatatggatccaacggtgggaacaatccgaatccgaagggtcggattgagcaaattgtggaacaaagaagaaagcgagtaattgggtaatggtgatgataatcaaagtaccatatttgcaggccatgagagagagaagataagatttttaacagcgttctgatgaagaattgaaataaagttgttatctttgggttaagaagaataataatgagaactatgtgagtgtaattaatgtaaagaaataaaataggaaaatttgaagaaaaaagattgaatctttggtgaagtttagtccagagatgagattttgtcgagtgttatggaattggaagttccattgacccagagaaaatgtcggtgtgtgtcggtggtggtgaaggttgatattattattattattattattattattaatcccactttcttcctcctaatgcggcggcgtttcctccattatcttttatttttatgcggctctatctcatgggctctacttttctattctcggcccattgggtattttggatttgcttccattgggctcaaatggtcaaaaattgggctgaaaatacttagctattttaaccaaaacctgataggta

SEQ ID NO: 91363 - DNA, 943 bp, Cannabis sativa
aaaaagtactttttaaatgtttactgatggtacattcatcataatccctttcttaaagaccacgcatgccctcaatttaacggctccacggttttgagggtcattatcagcattaatgaacttccctttcatcttttacctcattcccaaccgttagattttctacccgttggccttaccgttattggattctaagtataaaatgacagttcaagctagttatattccataaactcgtggtttttggtgaatctcatctagaaattggattgtcactctcctacggagatgtcccatccaggctcagaaatttatccttcaaaacttgtaacgctggaatataccaaccacttttcttctccatatgttttcaaaaacttcaaacctcagtttaaattggaaacgaaagattccacggctgaagatcatccgattaatccaaaccaaggagatacagtcgatcgttacaagcgatcctcacaagagatttctgagggtaagcatcatcctttgcgaatggtgatctaatctgaattcgtcgtttttttaccactgttgcttcattgatcttttatctttgtctctacaagaatggatgtagattttgagagcaagttcagaggtcctccccaagccgacaaggaatccaggaagaaggaaatcctagttggcgaggtcatggattctactaaagaacccaaatggcccaagaccaaagcttacacgaggaaatctctgaactacccaatcactggtgtttatatttgaggctgggaaagaggtctcggccgcagggaatgagatctccactgcaggaaatgggatcttaaagaatgaaggtcttctgctgcagagaatgaggtctatgcagaggtcgagtcctcttgcatgtagacggtctttctcaagctctcctgtcccctataaataaccttgtattctt

SEQ ID NO: 91364 - DNA, 649 bp, Cannabis sativa
catataatatggatttgggtacttatgtcgctattttcccaattatccttatatataaaagttaaagaacaatataaatagtataatttgtttaaaaagagctttaaaatgatgaagaaataatttagatcaagctagcatatgacgtattgcgtgttttcatttttatgtaatttattttaaaaaaaaaaatcaattataaagcatctatttgtaagtgcttaattaattagttaattatcatgaataaataaatatttcttttaatatatatttttcctttttacattctaaaaaagtacaagtataaataagatatattctcatcaaatatatttttaatattaaaacaaaaatatatatgtataaaaatttgagtaaaattacttaacaattatttatttttccaataattaaaaaaccacttaaaactaatagtgtaaaaaaattgacaaaagcattaagaatatatagacttcaatatttttgtgatgaataatttttgtcctattaattttgacatgtactattacacctttgaactttttaacttgttaaatattctgtctaattctattcaattttactaatgcagtgattatctagctatgtactaaagcgtgccttcaaaactttgatatctaccaaa

SEQ ID NO: 91365 - DNA, 544 bp, Cannabis sativa
atcctgaaccatcttgtctgcagtatcattgtgcaagccatcaggttgattttgaattcgtgtcagcttagcttctaactcttgaataattttatccatgtcattcacattgcattttttccatttcaccaattctctccttacagagtcactgttcttcagaaaacgatcagttgctttggtcatagtgttttgccagttagctttaacaatctccccacattcgttcgagagagcccaagcctcgaagtaacgaaaatggatgaaacctttatgatgaaacattaaagtatcaagcaatatggcgccatgatctgaagcaaagattggaaagtttttaacaccagccttcgggttatcgttgatccaaagaggcgaaccaattgatctgtcaagtctttctcgaatcagattaccattgaatcttttgttttgccacgtaaatttacaacccgaataccgcaaatcaataccccgactttcagtgagaaagttgttaagtgtcgagaagtccctcaaggaaaccggcctccctccttgtttt

SEQ ID NO: 91366 - DNA, 580 bp, Cannabis sativa
ataatcctgagtagcagtggtagatattggaattgtgagaatcttgtctatgtccacaacagagaaatcacgttgaagcaattgtaagttccattcatggctatcagtgatataatctgctacaacagcatgtgtcaaaccagaaaaagctgctggtgtaaatgtggactgcccaggaatccaagggtcagtacattttatttgcaaaccagttccaacttgcatcctcatccctttaatcagtaattcacgaccccaaacaatgccttgccaagtgagtgaagaattgtatcctttgtttgctgagagaaaatcagtatttaaaaaatatctagcttttaggatacgtgacagcaaggaagtttgattgaggaagattcgccaagcttgtttagccaataaagcttggttaaaatggacataagatcgaaaccccagacctccttccatttttgttttgcaaagaaacttccactttttccaatgagtcattttcttatcatccgttgaaccccaccaaaactgtgccatcatagtatctaactgatgacaaaagcttttggagagtttaaaacaactc

SEQ ID NO: 91367 - DNA, 501 bp, Cannabis sativa
ttaaacataataagatctaaaaaatgtagcagtatatgcaatttaaattttactttttatctttttttattataattaaataataaatataataaaaatatagtaagaaaagtatattgtgcacatttttttaaatattttaaaaaaataggataaataataataaatatatagaaaaatcataattttgaaaattccacacttatttattatttttttaattaattttattttgtataaaaaagtcataattaacaataatattatttttttaaaagaaaatatcaagtgttactcttaactacttttaaaataacatatataaatatcttatcattaataataaactaatgtctatctataaataaaataattaaaaaaaaaataatagaaatttttacttttacttatagtggatgatatataattaattttatgtgtgtacatttggtacttagatactactctgaacttaaatatatatataaagaagagatataa

SEQ ID NO: 91368 - DNA, 783 bp, Cannabis sativa
agagagactaaggatgagagagctgaagagaggcaatctggagaggtcgtggaagtctcttccagggaaggtgaccactcctagaaggataacctcgaagagcagtatgaagccaaaatctcaagtctgacgctcctcccaaacagtaatcgtgcctcactttcatctttaacttacttcctcttttgagacacacctttaattttcatagagacatttttttctatgcctggtccgcgaggcactatgtaatagtcgtaaactttttgcttttatttactcatttttttatgcatgctaaactttgtttctatcacgctcgtttattagatcgttttaagggctgccttttaggttgttaaaggtccctggctccaatggccagagtctcaaaccttagacttatgaaattttaatccctctacttacttaggaagtatccatagatacaatacttgtctcctacaacaaacataatcattttatgttaagaccctttcaaaaatcacaaaacttaaaattaattaaccacttaggcagcgtgaatgggttattacttcattctcaagccactaagtggtcatggaacttaatgcctttttggtgcctcaagtattaattaattatacaggatgttgcccatcaaacgctgatagggatggtttctcacgaaaggttgggcttctatgttccaggcgttccctgaatatgaattttgtgaggtcaggttttttgggaaaaaatggttgttcatgtcgttgatttcaggcgttactccttagt

SEQ ID NO: 91369 - DNA, 509 bp, Cannabis sativa
tttaaatgcgcattatctttattagttttcataatatattttcacttatattaatgaataatttacaataatacttattgtgtattattttatttttttcacaagtttaaataataattattattatagaatactcaacaaataatacttttttttttaatacttttatcattttataagctaaaaaaataattattgttttagtttcataacacatttacttccccttatattttacaataacacattttttgtgttattttatcattctcataagtcaaagcccaaaatataatgaaaactttcaattccattatcttttttttcttcataacacaatcaattagaaagactaattaattttatttcataatacctgttttgtgattcaaaatatccaaaatatgaaatacaacattctaataaactaaatctcaaacacaccaactgatttggccttataaatataataaatctcattacaagaatattgctaagtcttgaaatcc

SEQ ID NO: 91370 - DNA, 510 bp, Cannabis sativa
acctagtaattatacacttacttccaaacacaccctaaattctcatggaaggccatgagaattggaaagtgtaattgcaacctcttaattacttccaattacacagttacagtgtaatttcatagtcagacaaacatgtcaaatcgaataatttgcgtttaagaatttacgtcttgtaatttaaaatatagtgtaattactagactatgtaattaataccctagtaattacactgttacttctaaacacataaaaattaataaagttttgagtgtttctacggttcactcccttcatattttcgatatttttatagtaaacttttttatatatataatagtgtatagtataattatgtaaaatattttgtaaaatttagaaattcaaaataatttataatatagaatgtttagattgtctattttacacacataaataaaataagagacgtgtgtacaataaattatttgaaccttatttttgacgtattaaattattctaaatttttta

SEQ ID NO: 91371 - DNA, 1336 bp, Cannabis sativa
aacggatcgttgtgcgagaaattaatcttgacagcatcttcatcattacatgttatggtgggttcccctgcccatggtatttttggcttcatttcttcgacagccaggacaacttcttcttgctcgttctacaatgtttgcgcatacctctcctgggctttgtatgaatcttcagctatgtgtggtcctccagtaatgacttgcaaatgcccatctactggtggtggcagtaaatattgattatagtctgtctaggcggccctctgattttgatcgaccttgacatatttttgcacgtgcgggttattgtttcttattgaaaattcaatttctcacttcaaattgttgcattcattggtgtcatagccataatctccatgaaaatgtcaaaattttcacatgtccctcttacttacgacctttttcataggagcaggtttcttgtacggagctactaaatgagtagccatgtagatagtctccaaatcctcagttaagacagagaaagcagtgaacttggaaggattctctctaggggtctgttcggctttgccagcgaactttccctttttcccgttgccttgcctattgttgttgttagaccttttactacccgagcttgaattgctttggtactgagggagctgaacgaatattccaccagagggagcttgtggctgactaggcttaagctcagcttttgctcgctaaatggcctcctcaagcttgatgaagctatctgcacgatcgaggaggtcactcatggaatctactggtacgtctctcttgatgtccttccaaagatctcagagaacttcgatgccccctaatattgtggttaatttcccttcttcagctaactatgcaactttcatcgcctctataatgaatctgctgatataagctcggagaggttctcctagcctttgcttcacttcgaccagatcctctaaatgcaacgggagttggcaagattaagataattttcttggaatttcgaggagaaagccctccacgagttgaactttcttggtgtcaacttgaaacaccattgctgggcggcccctttggagagtggcacaggaaaaactctacaacatacatctcccagtatacatcttcctggtaggcatcttaaacttgtgaggcaactctagaacatttatctctagagaaaaaggagacccacgtgctcggtccaactctagatcgttgttcttctgatcggccaggccttagaacatattttttagtccatccaattgtgcctgcacggatagatgaacttgtttggcctcttggccgaccagggtcacatcaggatctctttaagcca

SEQ ID NO: 91372 - DNA, 716 bp, Cannabis sativa
tatattttccatatgcttagtttattttgtataattttctaatattaataaaaacagtgacaagcaacttagatagatctttctgttatttttttttttgttttcatatgaatttgaattaggatttattttttgtattaaataaatatacatgtgttttctatttaaaagttatttgaattttatttaaattattgttactgatatctacaaaaacagcagagtcttgaaaaagactttgaaggagggcgagggatatgagcgccataatgatgggactgttgttcaaggtaagatgaaatgacaaaaaggttgatgcatttcgggtttataaatctatggtgttaataccgaactgactcgcttttatcttctgccagtgaaacttactgggaaattacatgatggaattgtgtttactcgaaagggccatgatgatgggaagccatacgagttcaaaatcaatgaaggtaatgacatattatcatgcactattacctattcgtggtaatggaagagaactattgtaactgactatttggatgtgtgtgcacttgatatttagagaaagttatcggtggtcttgatcgagctgtaaagaatatgaagaaagggcaagttgttttggtgactattcaccccgagtatgctttaggctcatctgattcgtcacaggatttggctgttgttctagctaattctgttgtttactatga

SEQ ID NO: 91373 - DNA, 647 bp, Cannabis sativa
  modified_base (587)..(588): a, c, t, g, unknown or other
aataatcactatccaacatattgactcaaattatgagtagcagcattggtgtccctccttagatgagaaacaaactgacttgtaaaaataaataaataaataaaatcaacaattaaatcttgaaatgaaaaattgtttacgagtggttcattcaaggaagggaaacttacaaaaatactgaaatttgagttaacttttacaaaaatactgtcacacggaaatgttttaaaaaatactgtgtttttataaaacaccagtagaacacagaacaaaacaactcaaaataacagtagaacaactataaaacactagtagaacactagtgaaaacttaacacagtatactacagtatgaaacttaataaaaaaatacattaaaaaagcaaaaaatacagtctggcagtatttttgtaaaaaaaatggcaaaaattagtataccatgtaaatttcccttcaaataaagcatcattttcaatatatagtgatagaaatgataatttgtgaaatgaaaaagcaattaataacgtttttgtaaggactcggtttgaccgagtcaaatatgttaatatatatataaaataataatannataatatatatatatgtatgtaaaaaaaaaaaaatttattattttgaatatatactgaa

SEQ ID NO: 91374 - DNA, 704 bp, Cannabis sativa
taaatactaagcagactgatctctggttaaaatattacaaaaattatgtgaaagaaaagtaaaataaaatattttaaccaaagaaattgggacctttaaagaatgctatcatcagatatgctctaagatagcactcccagagaaattataattcaatttgtgaaactatattattgaaaaaaaatcttatataattccatatttatattcataagagtatgtctcacctaggactctctttttctcacaacattcccaagagaagggacaatgaagaagtgcttaattttgaggagcgtaacacctaagcatgtttcaggcatggcatgcatcaatggatgtgatgtttgtctagaccgaaaagaagatagtggagttactattctgaaacactcacaaacaaaatatactttctccttttggagagatattaactaagatgccatgcataacacttctcaccactacccatcatccatttaatttacacctaaatcatgcacccacattaatgtagaagacaacccacaacaactttaccataaaagttacacctcttactaatatcataaacattgcttttgctttttctctcaaaataaaatgaatattgttcatttaaaaaaatggtcttcacatctatccccaaaataatttgtagtcattccacagaaggggaacatgatatatctagagtgtagtaa

SEQ ID NO: 91375 - DNA, 752 bp, Cannabis sativa
taattggcagggagaaaaggaaactatttttctctctcaaaatgttcttgctcatgtgttgagaacttaacaagaacaaattatacacttcatcctaatagccttactattctttgtgtgtggtggaacgatttggaagactacagtgtaagtttcttattaaccaaaaggatacaacctacaacaagttttgaggatactctaatagttatcaagaggtatatattcttttcttgtaatttatgttttaatttaatgtatacacatctagatatccattgggactacggtacaataataattagatatacaaaatctttcgctgcgtaactgatttagtaccataaaactaataaatggtatccagaatagttccatgaatgtatatacattaaatatgctccaggttacccacaacgggtctcgccgggtaattggtatcctaaatagttccaaaatggccatcaccaccaagagctaattttcactgttagatcatcatcaacggtcaaaaacatcaaatttatatttttcccctattttttggacctccttcacctataaaaggagggcacccttagctcatttttcaagctcagaaaactacccacatggtcagtgcttctctctctaaaaatcaaagctccaaatacttagtacttttttgtatcatgtgataaataaaaacttgaagtaaatgtagctcaattactgtcgcaatacaaagagtgaactgttgggttttatgccct

SEQ ID NO: 91376 - DNA, 506 bp, Cannabis sativa
tggataatttaatttaaaaaaaaagggttatttattttattttttggcttgttttgggtatattagaattttatggaggcttcaaccttctctatgtattcttggtatatacatatgtataaaaaaaaaaaaaagaaggcaatatgtgtggctccatgagctccaacaaaggagccaaatggctccataagctcccacaaaggggtcaaatggctccataggctcctacaatggagctgaaaaaaaaagtggagctaaaaaaaagagagtggagccgattgaatggctccatgagctccaacaaaggaaagtggagctgaaaaaaaaagggtggagctggttggaatggctccatgagctccaacaaaggagccgcatggcataatggagccaattgccacaagaggagacccaattggaattattgttttaaaaaaaatgtgtgtatatatatgtaacatggggcgtggagatgataaagcctacatcaattcctacatactcca

SEQ ID NO: 91377 - DNA, 573 bp, Cannabis sativa
tttaaaaaaataataataaatttgtgaaatattttaaaaatatctatcactttaaaatttaaaataattacttagatcataaaaaaaatcataaaatattattaaatttagaaattgaatatagttttataatttaattatcactaaataaaatataaccgcacgcgaagcgcgatttgttttctagttttattaataatgtatgcataatgtaatttcccataatgtgtatggtattagtcacactaatttttagttgctaaattaagaaactgagttaataataattaagttataattttatttttgtaggtacctagttaaataaattgtcacataataattttgtccaagtgaaaaaaaaatagttacggaagtgacaaaatgacacgtggatataatgtctttaacatttaacggtggaagtcacaaaattataactaaattattattaccgtcaaaaattaacttaggtaagtatttatacggtaaattcttattgttttttttattaggaagaaagcaaattctagaaactccattatgaatttatgagttattttcattaaagag

SEQ ID NO: 91378 - DNA, 730 bp, Cannabis sativa
  modified_base (208)..(223): a, c, t, g, unknown or other
aagcgcaaacaagtctgaatgtacctttcaactgatttaccttatcactctacaatatgatatagtatgacacttggaccttttgtaactcacaatgaatatacagattacatatgtttatttagtttagcactattatgatgagacctacaattaagttaagtacacttgaattcttcaacagcctcataataataataataataannnnnnnnnnnnnnnnaataataataataataattcctagtaagcaccttgagaactcactatggtataggcaaattagacttatgactaggacctattttagttcaggagtttaaaaaaaaatctttttaaaaatgtatatattttttactaattttgcaaacatcatatttctttttttaaataagcgtttattttttttctatggcccactaaagtttaggactaatatgggcatcttaaggtgctaaacactatactgatgtagtgcgttgtgagtgattagtaatttcttgtattatttattaaattaaaatatgtagaacacagtattaaattgtaccaattgtcaaacccgaaaattaataaggcttattcgtaagattagtcaacgattagttttgagaaaggaaagaaatcaactttaagagttgctcgagaaatgaccaagtcgacgcatgtatctcggggccattcgacaaaccctagccagggtggccactcgaccaagatgaccttgaag

SEQ ID NO: 91379 - DNA, 814 bp, Cannabis sativa
tatgtcaaagttcgaaaaacaaaaattcatttttttttttttttttttttaaaggaaaattcaactttattaaccttcaaacacaactaccaagcaaggtagcaaattagttgggacaaactccatactgaatatacaatcgggatataataaagatgctctaacaaactcatgagcaacattattagctgaccgtttaacgaaagaaaaattaacatgacataactcacacaacatggttttacactcttgaatgatagcaccaaacaaagagaccatcttaacaacactcctcaaaaaggtaatcggtctcaatccaaattaagcagattgattgcttattgatccaactcaaagcttcgcgaaagcccattgcttctgcaataccaacaaagccattatgatcacagattaaaagagacaaatcaaaccgattttggtcttccaaccaaaccaagccatttttcttttttaataatactagttatattataatcaaatagcttaagggcgcttattgtctcattaattaaaaaataagtgtttattaagtgcatttctttgatgctttgtgatttattggtttaatagttgatgttgttgttagagtttttttccacattattgtaaacaagttggtatgcttatctttcatgattttgcattcctttactttatttgattgtattttatggcatggttaccttagttggaataagaatgctaagtaggggaatattttctattaaattgtttacttttaattaagagatattaacagtgaaaatactagaattttatttttttacatgtt

SEQ ID NO: 91380 - DNA, 792 bp, Cannabis sativa
atgttaaaataattatttttatttcataacattttattccctttcatttctcccattaatttattccgataacgattacgctttagtaaacgtgccataagctcctagagagcaaacactggtattgtagggaagttagattaactggtattatcattggaaatgtgtttccagtatcatccttttccattacattagtttagttagtagcctaaatgtgatacagtttgcacattagtttagtatcatccttttccattacattagtttagttagtatcattggaaatgtgtttccagtatcatccttttcaaatttatttttgagatgacttaatataatttatgtacttatattgtttcgttatttatattgagtaatttttttagcaccaataaaactttttcttttttaaatttctaataattctaattttaaacatatattgatcataccttaaaattaaatttgtaaattaaaacgacacttttcatatattattaaaattacatagagatactctctcaacaaaaaaaatgacataaagacaaatgaggagacaaaaataacataaagtgaaataatacttcttttcttttaataacattaataatgttatctttttattttttttcagtgctcaacattttcatttaaacgaagataagaaaaaaaaaataattttctcataatcttcaaaataaagaaaagctcaaaacattgtttctcgactttatttttcaaaatatattaaaaaaaaagaaaaagaaaaaaaaaactcacaaacttcaa

SEQ ID NO: 91381 - DNA, 929 bp, Cannabis sativa
aaaccttaaccgagactaggactcaaccccgaacctagaccgggaccctaacccagataagaactagaactcggaccaagaatcaggatagggaccctagcaacaaaactaggatcgggacctagtacccaaactaagacccagacttgaacctaagacctagctcgtgacccagcacccgaaatggaactagaccaggacccgagattgggatccggatctggacccggggcttagaccgaacccgtagttagtgttcggatttgggacccagccccggccccaaacccacactaggacccgaacccagacccagatctcaacttagtgcaagacctaaacttagactcgaacccataccctatgaccgaaaattggaaccaagacaggaagtagaccgggacccaggaacgggaccagaacaaggacttggacttggaaccgtaatcgtacatggatgtagacccggaaccgtaacctgaccaggacctagacctaaacccggacctggacccggatcccaacccagacttggactcgaacccaaactcagacccaaacatggaactggaattaggataacgaactggggccaggacctaaaactacaccccagtcttgatcctgaatccaaactcagacgtgggacccaggacttggacaagaacaagaccgggacccgtgatagggatccagatcttaactcaagatccgggaaacggggcttgcaacagacccgtagtcggtgcttggatctaggacttagactaggacccgaacccagacgaggatccaaacccggacccagacctagacctaggacctgaaattagaacctgaacaagaacttccgaaccaggaccatagaataagactaggactgtgaccaggacccggacctagacctagaaccgaactcgaatcttgcc

SEQ ID NO: 91382 - DNA, 698 bp, Cannabis sativa
catccaacactaccctaacaatatcagcatgtgtagagacaagtctctcccaatcaaatgttcaaatttcattcttctcgattgctgattgggggagttgccaggacacaccaagatccatttctgactactgtctcttccttggcagctctcttgtatcctagaaatctaaaaaaacaacagatagtgtctcgatctttagctgaagcagagtatcgagctatggcaaatgccacttctgagctcacatggatccttgctttcctcaaatactttggcattactcactccaccccagccttgctttactgtgacaacaccgcaacaatgcacattagtgagaaccccgtctaccatgaacacacaaagcatgtaaaaattgactgcctcttcattcgagagaaggtccaacaaagctccgtcaaactcctctatgtatcttcacaaaacaacttagctgacattttcaccaaagtattactgcccattcacttttcaaaaattgtatccaagatgagtttgattaatatctacactccatcttgaggggagctattagattaccctttggtttagttagttaagttagtttaagttaggtacattactagttagttaattctaactaactttcttctccagctttacctatttaaagcattgactgcacttgtatcaattcagttgagtaataaaat

SEQ ID NO: 91383 - DNA, 543 bp, Cannabis sativa
ttgttttatttttattaattgtcacaattattgttggttttgtttacaatatttggaatgttaggattataactttaatctctgagatattgtttggactatatattaattattctttatgtagtataaaagttgatttctataataagatttactataggagttaaattttagcatttgtagtatattttattgcccatttatgattataatttttataatttgttaatgtagaattacttcatgtattattttttaactttttttattttaggttgcaatttaggtaagcttgctatgtaaatttttgttaaaatgtaaaaatgcaaaaatgcaaaaaaaaaaaaaaaagatttgaaatgtaaaaataataataaaaaatcatggataaattctatgagttaatttaaaaataaattttataatataatttacttggtagtttataaaaaaaaattattttagttacaaaataatattttattatatataaatagattttttattaagatatttcatagtttagaaaatgatgaatgatat

SEQ ID NO: 91384 - DNA, 582 bp, Cannabis sativa
ttccttcaaccttcgtattgcagcagttccttcttctcttcctccttttcttcttgctgcaacacagagcggtagggagccgagccttctccttctcttaatctcctccttcttcgagctacaacagtagctattatggccgagtctactactcatccacacctgaaaaacaaacactacacaacccgaaaaaaccagagacaaactaaaccaaaaactggcagaaaaataaagaaaaagaacacaacacttgatttcggagttccccttaaaatcaagggtacatctccgtcaagcttccctcaaagacgcttgattcttcattatccatgtcaaaaccgattacaaggatgggagattcctagccacaagcttagtaggtaatctcaagtctttctctcctttttcactttattttctggtttgcattacaatatctctcactaacactctctgattttctctcttgttttgtgaggtgtattacaaagtaaaacaaaggctgccttttgttttctctctgctggccgaatggtgctctgtacttaaaatgaggaggttgaacctcatatttataatgtt

SEQ ID NO: 91385 - DNA, 584 bp, Cannabis sativa
aaaggattagtgaacattaaggtggaaattgcaccttatactctttttttgttaacccattttatttttagctttcttttctatatatttaatttataccctttttatttgttatattccaactatacccttatgtaatgaagaaaaacctttctcaccttcctgaacagtacttgagggtataatcggtaatagatttataaaaggaaatacatttcaattaatttaaaataaggctatttttagttaattgatggaaaaaaaaaaggcatatttcaactaaccccaatattaagccaggcaatatgtcataacatttttgaaacttcgtggaaacgtatataaaattttattttattaatttctaatagaaatgtacattatatattgtgataatatttagccagtcatttaggttgccggcttatttaaattttaactatcataaaggataacagagtcttttttataacaaatttaattttcaaatccaataagttaaaaatttggtctctattataaaataatataaaataaaataaagtagatgagaagaaagaagaagaagatgaagagagaaagag

SEQ ID NO: 91386 - DNA, 782 bp, Cannabis sativa
taataataataataatgtatgacaactactacaaaaaggtgtgaaaacacttggcaacaccactactatattaaatataactatgtgtctaaatataaatgttgcataatttcatgcaatgcaagtataagtttatcttttattttatataatgattcttttttaaattacatcatcaagaatcttcgttttttatgttataaaatatattctacaaattttgctttctatatttttctactttcatttcttcctttaataatactatctgtttctaagaaaatagtgggaacctgggacaaggagtacctaaacaatcattttttaccatatgagaaacaataaattgtatatttatataaaagaagaaaagatagcaatctaaattaaagttaatggtgccaatcataaattagcatctttccttcgcaagtgagggctcccaatacatttgggaggaggtcactcatggatacgtgacctttgcctctttcaaaaaataaaaaatcacaaattaacatcaataaaagattcaaacagccacactatatttcactctctccaaatggacttgaaaaacattattgtttctttctatctataaggcccaaaagtaaggaaattattgtgtgctttaacttacaaatattttgttaatctccgacaagcagttaggagtaatgttactgtaaggaattaaaattaaataacatgtaggggaagcatacatttccttgcttcaattcgaaaagtctctactgacagttccaaccaattcctaa

SEQ ID NO: 91387 - DNA, 664 bp, Cannabis sativa
aatttggcatatagttggttctccttaagtcggtttagagtcatcttcaggtgttcctcatgttcctccacagttttggagtagataagaatgtcatcaatgaatacgacaaaaaacttatccaggtactccttgaccaccctattcatcatgtccatgaaggcttccggcgcattagttagtccaaaagacattaccgaaaaaaaaactcttaccaaaaactcataatgttcatatcgtgttctgaatgctgtcttaggtatgtcttccttctgaaccttcagctggtgatacccatatcttagatctatctttgagaatgcagccgagccttgcaattgatcaaagagatcgtctatccttggtaaaggctacttattcttgatggtcaccttgctgagctcacggtagtctatgcacatcctcatgcttccttcttttttcttgacgaggagtactggagcaccccaaggtgagaaacttggtctaatgatccattttgtctaagagctcctacaactatactttgagttttttttttccagctcataaattgccattttgtatgaagccttcaaaattgaaccactcttggagataacactctacatcactgtctgagggtatcgtcagttgttgtgataaatccaacacgcaagtatac

SEQ ID NO: 91388 - DNA, 779 bp, Cannabis sativa
  modified_base (263)..(266): a, c, t, g, unknown or other
agttttggtggggctcttcccctagtcgtccttcaattcgttggaaaaagtggtctatgatctgtcaatctaaatttgtgggaggtatgggttttaggtccctggttcattttaatcaagccatgttagcaaagcaggcttggagaattttccatactcctaattctttactcagtcttactcttaaggctacgtattttccacacacttcttttcttgatgctgttccaggtcatagtccttctttctcttggagaagtatnnnntggggtagagatcttcttaagagagggcttctttggaaggtaggcaatgagcaaactattaatacacttgaagaccgctggttgcctaattttgctcttaaaagctttgatttgatagccactctaccttctccttctggtgcttgggacttgaataagctgagatgttattttcctgctttcatcattgacaatattttggatatacctatagctggtcatatgtgtcccgatgttctaatctgggggaaggaaaattctgggattttcagtgttaaatctgcttatcatctcgctattagctctagagatatcccctcttcttcctctttcttgggaaataaacggttttggtctaagatctggttctcatctattcctgctaaggttaagcattgtgtttggcgcatttttctcaattctattcttgttgcttctaacctttatcataggcacatcatccctgcacccttttgtcccctctgtcatgtagcaccagaaacggtaacacat

SEQ ID NO: 91389 - DNA, 734 bp, Cannabis sativa
aatttaatgacttggaccaataaagaattgccacgggaaatttacttaacaattaacaatcaggtacctacaaaagtttgagaattataacttaggtattattaccgcaaaaaattaaacttaagtatttatttacaaatgggagttaaacttaagtatttacgccgcaaattactctaaataataataaagagagactttttattataatgcaaacttcccaagatcttagcaagcatccacatattaaaatttgcataaatcataagtctttttcttctaactatttattataaccgtagctggaaaaaaaatataacaaatatcttaacatgtatataagtgaactccatcacatatataaactctaaattttacataaaaatagatcggtaaatggtgacataaatacctaatatttcagattttatatacttaaatatattatttttattttttgagataaaaatacccaatattaaaattctcttacatccattactaccacttctgttaactcatggacacgtggagggcctagatgcattacatttattattagtgaaagtagaattgtatctttattaatgaactaaaggtatttatacaaagagagccaaatacatcagcaacaaacatactaacagaattagttatgaaaataactaattttaactaacatgtcaacttgacaactaacagtctaaaagtccccctcaagatgaagtgtagag

SEQ ID NO: 91390 - DNA, 579 bp, Cannabis sativa
  modified_base (129)..(135): a, c, t, g, unknown or other
tcatcaatttaagttatcaaaattatgataatataatcagattatataataacaatagtagtgatatgaaattttatagaagtgcaactcaaattataatagtaaaaatactataaatatatatatatnnnnnnntatatattttttttttttctaaatcaaatgatgagctataatcattcaaccaactaacttttaattacagtctagaaacatcttttagcctgaatatataattatcaaacttacaagtgatcactccaatttatattatgtacaaatattatctttcatttaaaatgcttgaagctaaaatgcttgattatgatttttccaaatatggtatacggcagcagctactgtagcaaataccttcttcctccacttagatagcttgctcctttgaatcaatttcaagagatcttgcaatggtagtggctgaagtaatcctgttcaaccaactttttaagatcaccaagattttaatgttatttgtgcagctaagagatgggtagtctcttcacggctgccacaaactacacaaccattatctgttacaatattcattttgagcaacct

SEQ ID NO: 91391 - DNA, 755 bp, Cannabis sativa
  modified_base (696)..(717): a, c, t, g, unknown or other
agggcataaaacccaacaacatgtaccatgtaaaaactattttcttctttattactacattttattatttattaagctcttatttaattgatttatgaaaatctcagtaaacaattacattagtttggtttttcaaaacaaataggaataaataaggaaacttaattactttcctaaataaagagaaacaaaatgagaaactaagtagttttcctcttctctcctgtcagtgtgaatatattctccaaaattagggatataatcgtgacttgaatacttcgtatagaaaatatttctaaagatatactatatgcacgtactctgctcgatgtatgcaaactgaccaatggtcgaatggcgcagcatactctatctagatatttccagcttcctcttcgagttggttgtttataagtaacaaattactcaggatggcttatcatcaagcgtgttgttctcctaggttatgaaatcttctacacgtgtcacttagatggatgttacatcaccctatgcaaaaactgggataacaggtttattctgtctcaaacacacttcgagtgcaacttgaattgttgagtatgcaactctattgtataatattcaagtgatcatgtttaatgcacaatgtaacgccctaatgctaaggcacactacagtattttttgtttaattacagtgcaatctttgctaatnnnnnnnnnnnnnnnnnnnnnntgtcaaattaaaacttttatagtaaatattaaacttta

SEQ ID NO: 91392 - DNA, 586 bp, Cannabis sativa
  modified_base (47)..(53): a, c, t, g, unknown or other
atggatgttggatcgattggatgctgaaattaattggatcggatcgnnnnnnnaaatctaacatccaatatatgattggatcggatctggataggcctaaaaaaattggatgtgatccaatgaacacccctacatatgttattctaaacactatgagtggctcttatccatgaatccatttgattttcggtttaactgattttcaaattaatcaatgtgtatagatatcagtcacctacaaattatgtaaaagtagtgtgttactatttctaacgtaaaagaaaaacaacttttccatgtatagagtagaaagaaaattccatgtgatgtttaactttgtggttttgaactatactttgtgacattatttatgataaggattaaattccagagcagaacaagccttcccttctcttgcaaggtttcttatattattttttccatctctaatatgattaacaaatggatctcctgaactaagaaacaaaattagtgtgatttgatttaatcatttaaatgaacttatcaaaagtacttttcgggtaaatattattttgtgtactttcccactaaatgaaataatagg

SEQ ID NO: 91393 - DNA, 1370 bp, Cannabis sativa
  modified_base (667)..(682): a, c, t, g, unknown or other
ataaaatattaaaatagtataatatgaatataaaataaagtattatatgtttttaatgagcattattaataataatgatttttataattaatttattataatataaatttaaaaattaaaccaaatataattttataatatattttcagttaaatttaatttaaaatataatctattaaaaataatcttatgggcatacatattatcatatttcagcacatagaaaagagatacattaggaaagtcaaataagagctacaaagttgatttaaattaaataaatttaaatgaaaattgataacagctagcagtacttttttttttttatatatagaatattaggtatatactcagcattatttattcgcatatttatcattgcacatgtaaaaatgataaaaagtagtagcaaggaaggagaggagggagagaagtgaaaggagaggaaaaattccttatttgctaagagagagagaaaggaagggagatgagaggtgtggagtgatacattcttcctccaaattttaaaaatagtaatttacggtataaatatttaagtttaagttttggtagtaataatccaaaagttatatttttagaactctgtaggtagcgaatcgtcaaatgttaagtcattatccacgtcattttcttattggtatatttnnnnnnnnnnnnnnnnaaaaaaataaaaaaatttaatgatttgggccaatcaaaaattatcacgtggcaatttacttaacacttaactgtcaggtacctacataaaagtttaaaaattataacttaagtattataatcgtcaaaaattaaacttaagtgtttatttacaactgaaagttaaacttaaatatttatactgtaaagtactcattttaaaaatatatcacctcattaagaagaattagacaaaaagataaaatatgcacatgatatatattaaaatgatcttttaataaaattacaaaacctactgaactcctattctgttttgctctgtaacactctgtccaaaaatcacagttaagtgtcacggtgaaatgtcaacgtgtatatacttgtacacgtgacaaatttttattagtccatataatttaattattttaaatattggaaaattaattaaattttaaaaataatttatttttaagaagaaaaataatttaaaaaatcttttttttttctttttcttttcttctgtaactctcgacaagtcctcctcctcctcttcttcttcttcttcttcttcttcttcttctaccaataccaccactagaaatccacttgtgctcctcctcctaaagcgttcaaaccaggaaaaaaaacagtcgaagacaaaccaaacccaaaaattacgaaaactcaca

SEQ ID NO: 91394 - DNA, 711 bp, Cannabis sativa
ttttcagtccaatccagtccaatcatgcgtaccaaacgggccctaataattttaagagaatcactaaaagcactactagtatctagcaccattcgtagtgtcataccgtcattagtataattaagtagcagattatatataatttaagaaaataaattataaagagtattgctaaccaattgctataggcacgggatattattagtacctaataacacttctacacatatcgtcttgcgattgattaacgatactttctaaaaattattacattaaactatacgatacctaataattaattagaccaatagtaatattaacatataaaaaagtactaagaacatcttcaatagtaacattattgaaatgctatatatttctacatcatccaaaaatataattttattttatctttcttttatatcatttttgacacttttacttctaaaaatatttttataacatattttaaaaatgatataattataatcttacacattattatatatatataattttttttctttattaaattattatagtatctttaatttttatttaaaaaattatagcataatgctattgtaaatcatcaatacaaattttaagaataatatttcttcattcttatattttgctaaataaatttattttttacctgtattctctaaaataagcaccaatatgttttagcatttgcgattaaattta

SEQ ID NO: 91395 - DNA, 922 bp, Cannabis sativa
ataaactaggataaataattatatgttttatgaatttgtggttttttcattttgggaaaactacccaaattatagtaaatactaccaacatactttcttaattatattttgttactttttaaatagttttctaatgcaaaaactaattggtaacaattcgaaagttcatacaaaaaattatatacataagttaatttgaaccaattttagttaattaaataaacatttgtaatgcaactatattttttgaccataagctacgttaataaattacttttaagaaaatatagaaagtgcaacagaacatgcacatttataattctttttttaaattttgaataatttattatatcaaaaatattagttttatatatatatatacacgtcagtgcaactcactatataaactattaactattgtattttttgtttttgttattgtttttgttttgtttttgttttgttttttttttaagtcgaccacataattctcctatatttacatataaattctgaaaaagagtgcacccacatcttcattctgtttatataggtataattaatttatttttataatttgtattcgtatttaaaatattttataagaattttttttagaaatttgattaatttaaattttttaagaaataagatttaaatataatttatttcgcgaaagttttaataacagtaagtataagtgcaataaaattatatttctgcaatttagaatctataaaaacaacatatagtgtgcagtgtcatataagataatagaataattattatttaggtgctaaaaatatggtatgaatcgggatatatattgtacaatcatttatttgaattgcattcacagttctctatatttatatatatttttgagtagggaatatatttttcaccctgtaaataattaacg

SEQ ID NO: 91396 - DNA, 685 bp, Cannabis sativa
aggttaacaaaatatcaaaactgggacagagaccccaaatattgaaattgcaatcaggatagaataaagaagctctagtaaagttatgaaccactttattagttgatcgcctaataaaaaagatagaaacatttttaagttctttcaataacgccttacaatcattaaccacttgaccaaacatggaaatcatttcaattgaactatgtaaggcttggataaacactaagcagtcggtttcaaggatagcatgacatggttgatttcttttgatcaaacttaaagcttcctttacacccaaagcttccacaaattctggtgtagccgaaccattgaaaagcttggtaactccttccatgaaaagtccttgtgaattacgaaccacaaaaccaaacccaaactgatttgtgtcggcaaatatagcggcatcaacattaaccttaatgctatctccatgtggtggctaccactgctcagctccgtcacctggaataagacaaggactcgggaaaataacattagaactatgagcagttatgtaatatcccggaaaataaataatatttaaataggcataatttattaaatatgtaattatgttggcattgaagtaagattatgatcttacttagggtaattattgagaatttactcaatgaaataaatagcgtaatttattaattac

SEQ ID NO: 91397 - DNA, 588 bp, Cannabis sativa
agtatacgtgcctcgcacgtaatttttgctagtatatatatatatatatatattcacttgaaatgttcaaatatgtgatataagagtacgtaaaagattacatgcatatatagaccaagtccttttataaacctattcaaagatttgttcacctgctattgaagaacacaaaaattgtatgatcaataatatcaatttttaatttacttatgtatatatatatatatgaggttgagtaatattgttgtatgtgtagtaataattatatatatatatatatatgtgtaatggagagtactactaggtttattgtgatagttttattagtagtagtgttgatttgttgtaataataataaaagtgtgaatggttattttagttcatttgtgtttggggattcacttgttgatgctggaaacaatgattacctttttaccctttcgaaggcaaatttacctccttatggtattgactttaaaccatctgggggaaaacccactggaagattcaccaatggtagaaccatatccgacattgtaggtatgtattcactataaaaactgttacttttaatgacaactttttagt

SEQ ID NO: 91398 - DNA, 3564 bp, Cannabis sativa
atgttgagcatgagaataaatttcggagttaatttcttgagaggaattgtgaagtttatacttgaggtagtttttcctctaatcttttatttttttttcattcttaaattaagtttgttattgagtattgcatgcttggtttgactgaagtttataggtggaagattaagttttcatgtgtttatgcttaatgttcttggagttgagtttggatttattgtgattgtgtttatgttgagcatgagaataaatttcaggtcattctttgtttattgattgtgtttttggatagtttgttgggatgagcatgaagattttagtttgtgttcttgagcttgtaaaagcatggtttggtgtaattgaatcttgtttgtttttaatgttcaggcatgtattttgatgtcgctggcacatattatgcattatattggatgtgtgaattgattatatggcttaggtgaagtttagtttgagtttgggtatttttcgaacccagtcgtcgaggccagacttatggtccctgcagccaagacatgcaaagagcatttctaattttttagattttgttttggccataacttttgactccgaactctgatttggacgttctttatattgttggaaagctcgttttgagctctattacttggtctagtgttagagtcttaaatgtgaatgctatgaaatataattttgggattaacctattgtgtaaaacctgggaattgtgactagggatactggcacttggtcagaatcacttgtagatcgagctttctcctcataaattagaaatcaagtaagatagtgaactaaacacatatagtatagtgtggtggtgcagttatatgatatttaattgttattaaatcgtgacctagagttattaccctaagtacctattgttataaatatgcttaaatgaatatctgagtaatgttatgcgggtaaggtctaaccaggttagactcggtaaatataactgagagaaccctagtaaagccttaaatgtaaaaagacgtgtgaccgtaaaacgtaggtctatactatatagacatttattatagtgacattattatatagaataatgtaatataactgtggtggcacagtgtatatatgcagtggtgtactgtctatagtgtaatgattattataatcatcatactgtaatattttctatcttctgggccttggctcacaggtgctctattgtgcaagcaagggtaaaacagtggtcgggtcaaccatgagatcaaggactttgaggatgacttgtgcatgttttgaccaagctagaccacgagggttggatccaacaggaatagtatagaaatttctattttgccacttgtgttgacctgtataaaataacttgtaatattttgaaaataaaattttatgggatcccggatatgtaactttaaattattttagtttataataaaatatcgaactttattgtaagttatttatttaaccaagtttatatttattttaaattacctggcttatggaccctgattaacgtgattactagtttgtaattacgacacgtggcgttcctctgagtaggacgttacactccatacctaggcaagaagacatttctcatatgttaataaatctcaactcatctcttctattcttttagggttgaaaaaatattagatgagcatctttttattacctcaaagtattgttaaagaagttgataaactttgtatgtagtttttgtggtgcaacaatggcactaagggaaattttcacttagctttttgtgataaggtgtgagcttcttgggttcttggctttcaagaatgagctaagtgaaataagtctatgatgctaaatatgtttgggaaattgcctcgaatcaaaaggctctttagctcaaacgagtgaatttacttaaaagggttaagattttgggaggcaccaacttaaagctgacactagctggtattagcgtaagttgtgctatattagataaacttttccaaaggagaatacaacggttgctggggcttatgggaaattcagtactagcaagctatacatgaggttcatccatcaagacaaagtgaactattatttggaacaggttgagtgtttccaaatattgatttattttttggtaacttattattgccaagtttcttaagagagaccatttgtagtgctatcacattcctttggatagtttgctatgcctgatctataggttttttgatgaagataatagtcatttatgttttgattgtagtgattcttaactagttttttttttttttgcttcttaaaagaaggatatgaagagcttgacctcaatagtatactgattggcttggttttattgacgacatatgaaaaaggggtgttagttgagataatgacaacaattgtccatcatatttggaacaacaggaatatttgtatatacactaattattcttccaatgttcaacatactgttaaagtgattaaaagtgatgttctacagagcttatagtattatactgagaaaaatgagtgaggatgagatgagatttttgttgagagtatgttccttgtaattggttttatcctagccttttgagactttgtttgtatggtgtttggtgattaataaaaaatttctaatgccacaaaaaaattaaagaaaaaacctttatatttatgaaagtttatcaaaaattctcatatttagtgtaatttctacaatttattttaaaaatatacatttagctttaaaaagacttattttaaaaatatctgagattgtaagagtggagtaaaagtcttcatcctttggtaggggtgagctctcctctctcgggaattagggaaaaagagatttttttgagatgaagaagactatttcttcttgttttggaattgttcaagcttcaaagtagagaaaactatctggtaagatttctagtccttcccaaattttgaaaattgattatgtttctgtgattgttggtttttctgaaattgctgagagtgctagtagctctagtgtttctaaaagagtaaaaatagcgctagatgatatagaagaagaggttaattactagagatctacactagtatgctatgttaaggtgataatcctccttttcaggtaatggagggtttctttcatcatatacttgggttcttatacctgaaattgtttgggggttggtgttttacttcgaattttgtctatcatccgaatagaagaatcattttggtttggaaccctcttagttttgacatcaaaatttatgaaacttcatattcatgcttgggttaaaccaaagcaatcttaaggtttggctctacttttatttatgcacataatgaagctgctgattgtgaagtcatttgggataatttaaaattgatttcttctaagcaattgaatccttggattcccatgggagatttcaattcaatcttatctccaaaacaaagaattagaattgggaagttcactaaggatttcaaggctttaaaaaagtttgtagaagagtgtgaattaatagatattaaatagggaaattttatttacac

SEQ ID NO: 91399 - DNA, 1061 bp, Cannabis sativa
  modified_base (982)..(983): a, c, t, g, unknown or other
gcaaagaacaaccagccagtggtaagttacaagtaatttcataaccatgcaagttgtgaaattacttgtacactgttgtgtacatatatctccttgcgccacatgacggtgttcttcaacatggtgaaagcctccttaactttgtaatctctggctctcaggaatttcaagaggatcacgtcactcctgtcatcgacgagaaggggaactccccacatcgaaacctcctcctgtgggacacacacttcttattcttccttttcttcttccttcttcttcggttcctccgcttctgtttttgctgatgagcttgcctcgtcgactggggcaggggttacagatatgacggattcttcgattgcttccacagtcttatcgctatcatcatccacagaagcaacctcggtcaccacaactacaaccttctctttctctttctctgtttcaaccttcgaagcctcttgatcaacagttttcacctctgtttttgcctctccctcatctttcttcttctcttcctccttgggaggcccttgtttggcagttttctcctctactcatcaaaccaaaaaaaaaaaaagcattcaaaaattgttagattgaaaaatttagatttaagtggaaacattcactatcgattgaaagaaaaactcaccactaagagttgttaccactaagagttataattaaccacttaatcgagaagatgagcaaagcgaagtagtgtgaggaggtaatcccctaacagtggtgtgaagatagtaaatttggtaaatttatgttagttgtgacctaaatttatcgattaagggtatggcaccagcgagttctggtggaatggccattgatagagaagtaggcgtactgcaagtgtccacaaacaatatttaaaatttgtaacaaaaatcaatgaatgaaaaagaagactacgaagaagaaaaaagacttacggagtgtaaagccatagctgcgtttggttganngtaaaccaaagcgagagaattggatttgataatttgggaatatagggtttgttagagagatatgtggctaagatgatt

SEQ ID NO: 91400 - DNA, 680 bp, Cannabis sativa
tcctctaagttaactaatgtgaggccatcttcgatcctaataccattaggaacattagcccatagacatctaaaaagtggaatttgaaatgtgtgataatctaacaagattatctcttttaggactccatagtaggaaaccacatacatctgcaacttgtgattgattgatctttagcactggatctacacatggttgttgcatcaatagaaacaccactattctgtgttgtctttttatcatcttctacattgaatctttgaccattgatgatgaatcctgtgcaagatattgcttgtttcctaggtccatatgctaaccatttcaacaaatcattttcttcacccttatcaataggaacctgtgagaaatagttttcaattagttatattaatcaaaactataagaaatattggttaggaaataaccaatttaccttttccttcagccattttggaaatgtctctacatgccttttccaaagcaagccactatttcttgcataaatttggttggttttccttaactcgtccttatgcatcctaattaatttgataaaatgattaaaaattactattttaacataaagataaacaattataatccttcagggacatactctagaaaaggctccacaatagatgtattcagtagaacgtatcggtgtgcaatttctaacc

SEQ ID NO: 91401 - DNA, 691 bp, Cannabis sativa
cagtgactagtctttggggtttttgagatcagcggctgggtaaaagtgggcagtgagaattgaaaagtactccgaaggggtttttcgaaaaaataactccttaagaaaagaaaaattccaactataaatcctaattcttgttttcgaatctaaagtggctctgattccatgtaaacaatggtgaagagaattgtacattttattccatagaataatatatatttatatacaaagctaggagactaaatgggaaactactaaatacaagttaccttaatttttacaactaatatacagctaatattctaacaagaataaataggaaaggtcataattttctttctctaacaataatagaatttgaactcgtggactgaatacaagtatgattagcatgcacatttatttagtaaacttttattttctatttgatgcttaaaataatatgatgaaacaaattaacatcgcaaacataggagataccaataacagaatttaaactcgtggactgaatacaagtataattagcatgaacatttatgtagtaaactattattttctatttgatgcttaaaataatatgatgaaacacaaattaacattgcaaacatcggagataccatggtgtggtattgcaagactgcaatacactatagaaaatccttctggtgatggcaacagaaaatattta

SEQ ID NO: 91402 - DNA, 1519 bp, Cannabis sativa
ttattccgcatgttatatacacatcatatattttatattatacatataaatgtctaacatatataagatgaatggactactcatttcattgtcaattaattttgtttttttttggtggagtcgtatagctattagagagtttgttttatttgtttttattctgattctatgttagaatttgagataatataaataaggttttatctcaaaactaattgacatcaattagttttgagataaaaccttatttatattatctcaaattctaacatagaatcatcagaataaaaacaaataaaacaaactctctaatagctacgactccaccaaaaaacaaagaacatccacacattattgcaacacataaaaaaaaaaaaatgcataaaacaacgatcattaaataaaaacttataattgatcatttacaacgatcttattgatattacattataaaacaaagaacatacacacattattacaacacataagaaacaatgcataaataaaaacttaccaatttataaaactaattaaattacaataggttgccaatgatatatataattaaccaacttgaggagttgaagtaacaattccattgtcatcaacaacaacacgaactctatcacaccgaaactgatgatcgccaataaaatcttctgaaacaacaatcgcatttacagtagaattttccctttcaatagtctcttttgcaacctcacctcttactcctaccaactctggccacgatgtctttcctgtcaatatatttataaaattaataatgttaaatatttgttatatatatatataaattaaaattaaataaaaattgtaaaaagtttggtaaattttgataccttcatcacaactcatctttgctcaaacaataaagaccaagcctctaaaattgtgtatacaagaaaatatattatttgattttgagaatagctttgagagatgccctatttatagattttcaagtgtttgttcattattgactttttttttcatatagctacacaaacaaataaattaaatataataagagtatataatgacaagtatttgttatcacaataaacatttcatacttgtgtatatatttatgtagttttatgtatacaagaatacacgcatacattgaatctatataaatatatatacacgttttactaataataagaaataaaattatatatatatattttttttttggaggaaaagacatttcattaaacaattaaacgattacaaggaaatgacaagtcacgttcaatcgtttgacgagcacaagagggagaaaccccaatccacatagcactaactttgttggtcaaaacataattggctaatacatgagcaactacattcgcttcccgaaaaacaaaccgcaccccagtaacagaatgatgctgaagtagactttgaatctccacaatgagactgtcttcctgccgacaacctacctcagcaccattaataagacggacaacttgcaagcagtccgagcgaacct

SEQ ID NO: 91403 - DNA, 603 bp, Cannabis sativa
tcttgaaaaagaacccaacttctatacggtggaatttggttgctttggagttaggtgccgagttctcattggccaaccctggcattttgactataaactcatagtcatgactcccttagaagttggctctgtggttacgactgaaactctaagtaccacccctttttggattcaagtttcaggcatccccttcttgaaacgatctcgtgctcttgcacacaagctcggtgaagtcctggggcgttttatcgaagtagataatgcatccctcaaagagacttggggtccctatctccgagtccgaattgaaatggatgttactcagccactcccgcgtggaacgggccatttccatggaatggttgccccggtttggcttgaattccgattcgaaaacttacctgatttttgtcactactgtggccgacttagccatatagtgaatcattgccatgagtttcttgctaagtgtgactcctcttcagctcctcctttgcttcattatgatcaatccctaggagcaaaaattcgaatcacttcaaatcctttctacattgcctgttctcgtactagactgcggcctcatattgccaatcctgcttc

SEQ ID NO: 91404 - DNA, 664 bp, Cannabis sativa
cattcattatacctggattattcaagaaagacttcaactacaatgtcagaaaatgacacatcaatacaagaaatattccggtggaagtgaattagttcaaatacttttcagcaagaacaagaatttgcgaactagtttttctttcacaacatttcagtgcaatctatcatatgctcatactgtttaacatggggctcaatccaagtatattggaaaatacacgtttatctgttcatgttgtatagttgaaaataatgaaatttaactggactacaaccgtactgcaacccgggatcctttctccgcctttgttccacccccgaccttcaaatcatagtacctgaaggacattacctctcaattaatttagtgaaaataaattattcaatgaacaaattagcacatacaataaagagtagttatttcacttggaacctatgacagtattatgtttatgttacccaaaccaaagtagaaacatgacaaagtctgaacacttttatgtaaaaaaaatatgacaatctttctaaaaggtgattttatcttgactttagatgtataaataaagtatagaaaattctatggtgaatgacaccatttttttgatttaagcgtttatatattacaacatgttttacctgggactcgaacccagaacctccaa

SEQ ID NO: 91405 - DNA, 626 bp, Cannabis sativa
agggtgtttagtggctatgtaagattttggtttggaaattccattttgtagtttggtgcgcatgggatgagtacgggtaggtacaggcagtggtattgatggaccattggtctctaggagtggttgtgtatttgtgtctgtaggtggtatggtaatatttgttggttggttggtcagaggtgctttgtggtaaataggatggctcggtatttaagggatgtgtattggtgttgactgggacaggtgctattatcgggttgggagatgcagcaggtgcagtgtttatttggccattttgggaagtagtatgggaaggaggctcaatgtcattgattgcagaatggtgaggagaatgggagttagtacgagtacagtgtacattattggaaactgaaaactgagcaaatggaaagatgggcagtgaagttgcctgttcagattgttgttttgtggatgcaggaaagagattttcattgaagacaacatgtcttgcaataaacagtcttccctctgaattttcacagagatatcctttgtgtgaggaggagtagccaagaaaaatacattgttgagtgcgaaactccattttatatctgttgtagggcctaagatgtggataacatgca

SEQ ID NO: 91406 - DNA, 535 bp, Cannabis sativa
aataattcttaaaaagtatcgctaaccaatcacaagaaaacatatctaaaagtattaaataccactggtaccaagtgacggagccacatagagtcatgtgagggcaaatgaccccactcaagttttattatattacaattttgtttaaatttttttaaaaattttaattttgctcctatacaatcaattttttatatttttgtccttataaattaatattttttatttttattctcacatatttttcatatttattcttataaagtgtatatttttcatttatatcttcacgtatatttatttttattttaataaaatttataattttcttttatcaaacaaaattaatattttttttatttatatcctattttaaagtagaaaattttttttgccccataaggttaagagctggttggccactgttactacccaatagtaatgttatattgtaaaattgtaatgtgtaatattactagtttaaaaaacataaaaaaaactctaattaatcatagtgatatattaactaactttt

SEQ ID NO: 91407 - DNA, 775 bp, Cannabis sativa
tatattgtttttgagattagattaacatgtatacttgcatgcattaatgtattatttgtcgatatgcctcaataaaccaataggttgattaaatgaaatatatgcatatatatttacaaggtagtttataaaataataaaatgttagtatactatattattatgtagatatatatgctattttaagaatgcgtgcattgtatattttataaagtttattatgatatgcatacagtaataaactagtaggtttatttataaattttctacatacagtaataaactagtaagtttattttgttacaaggtaatacaaaataaacaaaattgtacttcaagctcatatctctatctttacgcagtattttttctgggatagtagtcaagtatgtgaatgtagataatgctctattcttgtaattctcccaataccattttgtatgtgaagcttttttttgttctttaatggagattttttttggagagaaggtttcgagttgtgattttgatttgtataatcgcagtgaagcgattttgcatattcttattgtttataaatcacctgctattaagaaattcaatgccgtgattttcggagtagtttagcgcgttgatgagcgagattacagattgggattagtttggttttacggtaggggtgatgacgtttcacgttattagtattgtattagattaattaacgttatttctgttaatagattgtaaattaagtacattattgaaaaaatccccataaagtttgtatgaactcttaa

SEQ ID NO: 91408 - DNA, 521 bp, Cannabis sativa
atcacctcttaccccttgcaaatccatttgtatctcaaaatattttagatgtgacaagggatcctctttccccgtatacattttccaagttggcattttgaattttaggggtaatttaaggacttcaatcttcgtggagaagggtgatccgcgtgctcggtcaagttcgagatcagtgagttttaggctgatcaggccttgaaccatgtttttaagttgatccagttgtgcttgcattaatggatgaacttgttcagcctgttgagtggcctgtgtcacattgggatttctttgaactggatcctagatgtgaatgcctggctggacagctagtgggacgtattgttcgtccaggcccttcttcagtttaagtcagtcttgaggtcatgtacggtgcccacctatcaaacactgaagtaccaggtggtattggcgtcttacatgtttggtgaataggttggccagagatttcagtggggtgaagttattgtgtgtaactccacccaagggacggtcaggca

SEQ ID NO: 91409 - DNA, 665 bp, Cannabis sativa
  modified_base (235)..(235): a, c, t, g, unknown or other
tatttagataatccttaaatacttagagtaattttagaataatattaatatataggatagatattgttgagtgttaaatgatagatatagtaagctaaagaaaaatacaaaaagggtctattgggataatattagtgtaatacattttcttagagtaaatgttttttttaaaaaaagtaaatgtataaagatattaaattacatcaaaattaaaatacaaacacatattataaantataaaatattaataaaaaaatacctaatatacaaatacttagagcaatgtaaatttgtatttatttaactttttaatttaattttatttatgctttaatttaatttaattaataataaaaaaaaataaatttagatttttaataaaagttaaaaaaattatattaattaaagctgaaaaaaatttataggaaacccttatggagtctgttattttatgaacaccgactccatagggtccttatggcgtcgcttatttcataataaccgacgccatagggtccctatggtgacggttgttttataccccttaagcgtcacccgaatcagcgttggtagcgaatttcaccaaaaccgatgctgaaaggccttaaaaactgcctctaaagcccatatttgtagtagtggggctttttctgagcttttttcac

SEQ ID NO: 91410 - DNA, 633 bp, Cannabis sativa
gtctacgaaataagaatgaataataatgtatatataataaaatgaaacattagtctcagtatgactataagaaatcaactatagcaatcccaactttgatggtaatttgatatagtaaatatgagtgatgatgaaggaatagtacacaataaatgttgactattaatcaattagaattaatatttatcattgattgttacctaaatattctaacaaggaaaaacaattgcaatgcgacaaaaggagcttccataaagagagctttgtgttgtgtcataataaccgagtggattagtttacgtacgtaatgtaataataagttgctattaatttcttttgttgattggcatgcacgtgtgtagtgtatatgaatttgttttgttgtgagcatgagctttatgctcattcattaaataggattcgaaaatggctactatattaacatatgaatcttgtcttttaaggggagagaataaaatgatgaagcattcatttatggatttcatagtaattggattacttggaatgttttaaaatttttacatattacaccacaattttaaaataaattataaaaatacgttaatatatatatgacttttttttactatttaagttttttatttataaaaa

SEQ ID NO: 91411 - DNA, 727 bp, Cannabis sativa
aaataacacttgtaattttataaattaaataacctttctactttatagattgatgatacataaatcaactactacaatgcatgttttgattgtatatgtatcttccaaactttcattttgagttgaattacaaagcaatatatgttttcattttatatgttttgttttctttgcgtaaaacacacaaccgtgttcatgggaaaagtaaagagaatagattaattcctattgatgataatggtgatatcactgagttttattcacagtatatatttctctcaaaatttaagttggtattagagcattcaggtcctcgccaatgtcgaatggacagagtcagatctctcaattctgaccatcatgttgttacagctacgactccttttagtaacactctcagccatctcttttaactcaagcttgatcgaaacaatttctctttatggaagactatgttgtttaccatcatttgtggtcataatggtcaaaaagcttgtccgcaagaattcatcacagttgagacaactgatgagaaaggggaaataacctcataactacttcaaaatcttaaatatgcagcatagtcttcatatttgctcctagtgaaagggtatccttgattggattttctaatgatgacttggcttgttgtccccacaataaaaagtcagttagaggttattatgtttactttggcgagtccttaatttcttagtcctctaagaga

SEQ ID NO: 91412 - DNA, 760 bp, Cannabis sativa
ggcatcaagtatttatctgccctgctcattgtctatgcctcacagggatggggtgagcaacaccccgcacaacaccaactggctctttgatctgaaatcaatctccaagcagagcaggttggtatttctctatacttttttttctcacagatcgaggagaagtggctgacgggcaccgtggactccgatgtgagcaagataggcaattttgtggaccagtactacttcgtctagagaatggacaccgtccatactcggttccagcagattccctcgtactgccgccctcccttcacattggggctcagggaaagggcacaaagaatcctttaattgtcggacgctgctcggaacatcacttttctgaccattgaggccaattatgtcaaattaacaatggtttcacatcataaaaaatatagtgaaggacatgaaagttctctatttctctcttttacaatgttctttaaattaatatctctttaaataatgtagtagaaaccgctagtgtacactaactcaccgaactagaataattttttagctttattcttatgttcgtaaattgtaatggcaatgattaataatttatttactttgttaaaatgatgactttgaacctttcaaaatttagagtagaaaattgctgttgtcaaatattaatgattagtggttcacttatttggtttaaaaactacatttggaaccactgagtattttgaagggttttttagtgggcataatattgattgttagtcaa

SEQ ID NO: 91413 - DNA, 754 bp, Cannabis sativa
  modified_base (695)..(723): a, c, t, g, unknown or other
tttatttgctaaatagggtttaagatctccaatataaagagccttaactcaatcctaacacccctaagtctcattttaagcaataaagctctaagtctgaaaccctaatccacttctttcgctctcatagacgccaaaagggctttttctccctttctctcacagacctccaaggcttcatctctctcattagagacctacctactgattcatgcatttcaacctgaagagagctatatcagatcgcacctatagtaattttaatagtattatctcttgatatcaatacaactaaaaggggagtaggtcattactcgctaactcggggggtggaacctctatgaaaatccttgtgtttatttattatctagttctaattctataacgcgtggcaagcattagtttaatatgaatccattgtcgcttggccaatttctaaggtcaacagttttgtgctttcattgagagcgagttaaaatcatatctaatcaaacgccatggttaaaacaaggacaactccagttgcaccatctgcatcactgggtcttcctcaagaccctatgacttcagattttgatgtccatgttctagtcatgactaaaatttccatgaacactacaaatgtggtcaatcctgcaatttcagcaagcaccatgaatctggcatggtagacacatgttggaaattattttacnnnnnnnnnnnnnnnnnnnnnnnnnnnnnttattaacatcctaaataagaactttctaaa

SEQ ID NO: 91414 - DNA, 559 bp, Cannabis sativa
ctatataaggaaaaataattgtgtttatgaattttatatggggtaaatattattttaaaccttatgttttgtaaaaattattaattgtaccatctattttgttaaataaaaaaatagattttatattttctaaaataataaaaaaataacaccatcagctcaattttcaacaattttattttttttaatataactaagtactttaagacatttttaatacaaatggctacagaaaatgtaacaaagttttatcataacatttctagatcagattattattaagttttattttaacgaaaaatcagttcagagtcttatttgtacaattttagaaaatacatgatctattttgtcatttaacaaaacaaatagtctaatagatttgcaaaacacaaggtccaaaataatatttatccttttattttagtattataaatttttcaaaattatttttctaaaaatattgtagaatgtgtgtctatattatataacatcatacaaaatatataaattataatttctcaaaatagataaaaaaaaaatcaatataaaagaaaaa

SEQ ID NO: 91415 - DNA, 591 bp, Cannabis sativa
ttacacctcagcaaccaactaacctaattggttagttactcaactgaagccagcttataaataaaacctggtaatcatcagtagtaaactatgccttgtcaattgtaattagagggagatatagtgactgagagccaaacacagagtgtgtggtcgaagggatgttaaagcctaaagagattgttcatccaaaacagatgacttccgtcatgagaatttttagaatattttatatgaactcccataaataagttgctcatagagtgtcaatattaatatatgtggatcactatatatatacatggtataatgtcaattatgcaattaagattataatggcatggtcagttttcttatctacatttgaggcacatggaagcaccctaatgactataaattagcccattaaattatagtccaccactactagcattttaaacccaaaattatgcccactctacccctaaggtaaattagtgtatatatatatatatgtgtaattttagtggaataagagtgatatatgggtgatatggtggtaaaagttttacaaggggatgatttccataagctctcttaatgtcatgttgt

SEQ ID NO: 91416 - DNA, 553 bp, Cannabis sativa
agaggtggtttctgatgtgggagtggcatctgaatttgacatatttgtgtcaattgaaggtgctggtgtgggataaacaccaggtggtggcaggggggttgtggcccgagttatggggcaaaaaattggtttgattataggctgaaagagctggtttatggcagtgatagactgctgtcctgttaagggaaaaatatcctcataaaaaataacatcgcgagattggtagatttgcttggtttcaatgtcaagtagagtgtatgctttcatgccttgggggtatctaataaaaattgaggcacgactccgaggagaaaatttgtgtctactagatggaagagtggaggcataagctacgcatccaaaagatcgaagatggtcatagatggggggttttttgtgaagtacctcataagaggtgctaccttgaaaaactttggagggtgttctactcattaaataggtagcagtgagaatgaggtaagaccaataaggaagtggtaaatgagattggaagcataaagctctggcaatgtttaaaatatgttgatgt

SEQ ID NO: 91417 - DNA, 713 bp, Cannabis sativa
accactcattttatttgtccaaagtctatataaacccacataggtttcatttatatatatcccaaaacaaaaaagaagaatagctttagttaaaagcttagagagagaaattttttttgagagaatttttatgagaaaaattctcgagtataattggggtgtgggttgtgaggattgttgtaaaacagtgtgtatttttgtttctcagtttcagtaaaagatttgtagcagatttagagacataccaaaatttgttatcaaatttgtgtgtgtgtgttatttctgttgttattttattctcacttatttgattcataagaaaatttccgtaattttcttaacgtaattaacttcaagtaagatatgacgataacaacacacttgagatacaagtgagatatggtgatgggaacggtcttaaaatcatatgataagtttgctataaatttgtcaattcttataacaattcgaggtgtcaagcctaatacatgtcgtgtttagttatttattacaataacgagatttggtaaacacaagttggatcggtctgtttatacacttaaattttcatacaatattatatgaaaaattatattacaatttgatataatttattacttagttgccattgaataaaatttacgatttattttatatatataaattaaaattttttaaatatcaagaatacaaatgatttactagttataaaa

SEQ ID NO: 91418 - DNA, 503 bp, Cannabis sativa
aaataccctttagtgtcttttaaaccctttctgtgtgggaggggtaaaatggtcattttgcctcatatgcttttatcctttagtgagattagattgagtaatctaaattgtatttcatttccatagtattagtaatatcttttatttaatagaaattagaaaaatggaatttgaagataatcaaactctctctctctttcattgagtcggccactaagaacccaaggagaaaagctggttttctttctcttctagtagatcatttcttgagggatttagcaacctagactcgagtattttactcagataaggttcctcttctcctttgggaaatttaactcagaaaatttggtgattttgcatgttcttatgatttagtattctgaatttgtaaagctcttggtttatctattctgatattatattatggttatttgagctgatttgaagttagttgatggtttggtttggagtttagacaaggtttgagttttagaactcaa

SEQ ID NO: 91419 - DNA, 700 bp, Cannabis sativa
actcggttataaaaaccagcaacaaatccaaaccagtcaagttaaacaatattttgtgtgttccaaatattgctaaaaacctgttgagtgtttcaaagcttactagagataataatgtgtatgcaaaattctatgctaactcttgtgttttgaaggacatggattcgaggaaggtgcttcttcaagggaaacttagcaatggtctttatcaactcacattatcagcatcacaatctacaagtcacagtagcaatcaccacagtcatcaacctacaccaaaaccacctaatatcagtcctagttttaagtctaatgagtcttgttttctaatttttgtcaatgagtcaagtttgtggcatcataggttaggccatccttcctttaatgtactcaaacatgttttaaataatgaaaagaagtctttaccttctagcttgcaattctgtcaaagttgtcaactgggcaaggctcatcacaaatcatatcctgctgcactaaaagagtccaaacaacccctagaattgatacattccgatatatggggtccttccccaactatatcaagacatggttatcgctactatattcattttatagatgactatagtcgatatacttggatctttccactcaagacaaaagatgaagccttacccacattcaaaaactttcaactacaagttgaaaaacaactcaacac

SEQ ID NO: 91420 - DNA, 1416 bp, Cannabis sativa
tgttgtttttatagaaaactgtaaaaatataaaaaaaaaattctaattttttttacaaaaaataatgtctataattatcaatttttttatacatgtgtaagatagagtttttttatacatgtgtaaaatagagtgaagcccatataaatatttggctcttattatgggcctagtctgatgtcccaccttcttggattggatttaatggtaatgttagaattggcgttgagttttgaaactccaacgggggctgggctgccacttaacaggagctgaaaaattcatcttagtgaggttagattctttgttgcaacaagtagaattagctgctgagaacttttccaaataatccataccccaatcaagagtcatcacaacagaaaaaaccttagatccatggactccagtattcaacctataccaaatttgccaaaggagcaccaaccatttctccaaatctgaaagctttacaacatggaaaactataaaaagggagtattagtttgatattaataagtacaccaatctgaaatcttgtttatttttgtgaacatctcattgtcaattaggtaacaatagagaactaactaaaaaaaaaactaatgctgacaattcctaatagttattctgtttactgttattttccgtttattcctcttgttagttgggttagttaatgtcggtttatagttttttggtccttgtatatataggttctcttcatatactcttgtcattatttagatgaaatctatcacattcaaataaacaatttcactttctctgtttcgtgttactcaccatagcatcatcaacaagagttctgagagaaagaacaaagcacattatccatggggattcattcatcaaaatagatgaaaatgttagtggcagaacccacctagcacccagagccactcacaaacaactctcttccccacataacacttttacaaagataagaaaaattacacgacatctttgcaatagacaaatcacaagtggcatatatatgaagagaatgctgacatggagtgtgactcagctactcatgccaattcagcaaaggataaggtctccaaaacttgatgaaatggtccctgcacaaattcaaaatcagtagcatatatatttgcctttttgttttactatattgtgttggatgaaattgtacaatgttttgtaaattatggagctgttcttgcaaggccattctggtgcaaaacaatttcgaatattctctattaagaagtcatcaaaaatgtgtatatttaatatagcctatcgtagcatagcatttatccagttttgtttttatatctgtacttatggttcgtttggtataccgtattgtattgtactatattcaattgtattttataccatatttttatgtaaaactataagtggtattaa

SEQ ID NO: 91421 - DNA, 873 bp, Cannabis sativa
actaagcggtctttacaaatataaacctacctacaaaacgttttattacatcaatcagaatcataatatatgtacaaaacattttgtttttgtgaccaccaaacatcctaacctatatgccttaattaccaatctcattcactaatttactaatttcatatatttaaaaaaattcattatcacctaactcctcattattctattaccatacttacaatttaattatatatacattcttgtaatgtgaaaaagaaaatatctatatatatactacaacatatcatataattatatatacatagcatatgttgtcatattttgtagagtgagagcattgtatctttgttaaggctaaaagattggagatgtcacaaaatcataaactacacttttggaaaagtaaactaatatccaatttgatattgatatatatacacttctgatgtacattttcttaaaaaaaaaaacaaattaaatagaaaaaaaaaattaagaagtggtatgtacaataatttttaattgtgagaaaccattttgcttaaaaaaagtttatttcttatataaatagtctcatcactctaatcaccttagaagcttgagcatatttaaccatattacagaatgcataattaatctttctaaaaattttagtagcaaatctcacacttaaatttatcattatatatagtaagtttaaacacgaagaaggcatttaagaaaattattttaactttaacgatcattgaatcaatattcaaaatataatctagttacttttcactaccacaccaacaatgatgaggtgcttgtaaaaaaaaatataaagctatagaagaaaaatatataaattaatataggtcatgcacatattat

SEQ ID NO: 91422 - DNA, 873 bp, Cannabis sativa
ctaacaataattactaaaggaaaattgtaatctaattgtcaaaaataattcagtcaatttttaataacgtttttatttgtttgggtatgttttaatactcttatttatatctttcttttgtttcatttttcacgttactctcttcatctcattttttctctcttctctcaaattttaaaaataatttttgatcacgtcgttactcggatgagcctaaaaaaataccattgtgatctattatttaatgtgaatattacaatatgtgagaagcatatatttttttgctatttctgaaaaagaaactatttggttactaatatagtgataagttactgttttattttttaaatcttaattaacatttattttagaattttattaattgaattatattatattatacaataactaattagcttttaaaataataaaatgtatataaaacaattgacatataaaaatggtagcttattctaacaaaggaaggagcttgccaaactaagcaagggatgccgcaagaaagaaaagggcagggccatgacaactcattagtttcgaaaatattttttaagattacctaaatatattttaaattattatctaccgtaatataacttaaaaataactaattaattataaagatgtatataaataagtttttagagagtaaccaaaatgtatctcaaactatatgatataaaaataattaattgatttcttatcaacactattaataactaaaaaattacttttaaaaatatcaaaaaaaaaaataataaaaaatcaaaaaaaggtcaaagaaaaagtcaaaaatatcaaatttaattgatatgacacgtcagtaataatataaattattattataaattaaat

SEQ ID NO: 91423 - DNA, 596 bp, Cannabis sativa
tttcttacatgacctgctattgtggccaaattcatggcagttgctacactttttagtgctagaaacacctttcctagttggttgtttccttgaagtaggtggcaagggtctctcctctcctgcaactcttcttctacgatgctttttaggtcttcctggtggtttcttcacaactggtggtagtaattcctcatcattaaattgaggccacatcgattcatcaggaattggatgaataacttgctcaaatgttttcctccacatttcagtagtgaagtatggggagcaataattggctatgtcagccctaatggtagttatgcaagcaatcgcatggatacatggtattcctctcacttgccactggccacaaattcagaagaattcattcagtcgaacagtacaccttttttttttcataatccacttgaaattcttcattaccaactcttgtcactaatgcaaaacgtgctttttttttgaatttcttgaaccttaagatggacttttggagtgagcttatgctcccatctatcagctgttacttttcttgcatacatcatggctgtcttttgcattcttataccttccaacaa

SEQ ID NO: 91424 - DNA, 538 bp, Cannabis sativa
ttttttaaaaaaaaataaagaatttgtttagaacgtcgtattcgtattcgtattcgtattgtattgtattatattatattatattgaattggattatatatcaaatttttatataatactatgttaaactataatttatattgaaatattatatatttaggtattaataaaagttaatactatatatagttttacataaaaatattacataaaatacaattaaatataatattatacaatataatataatgtaatacaccgtaccaaacgaacccgaaatatatatttttatacatatgtaatgtgtttcatacttttaatggaagaaatagagcatgtatgatttgatattgagcctaatgacgttttagtaatgttttttgttttgtttttatcagtgctttctatacttacaagacttattgttaacgtttttttttttattattacacctatgtagtatattatattagaaatatatgatagttaattagcactttcaatagtcataaaaaaaaatatcattattttagacaaa

SEQ ID NO: 91425 - DNA, 523 bp, Cannabis sativa
aaggttgtcagaccaagttcttttttatcaaagatactcagccatggtagtgcttcccttgcatattgtctgaatcttggttcgagtatcgtccatttttgcatgtgaatgtgctccataaagactctccaaagttgtccataaagtccttgctgaagagcaccccgtaacctctacagctatggcttctatcatagatccatagagccaacccattaaaatttggtcacaaattatccacttctcatactcggggttcagcataagaattggatctgatgtatcttcagatgtagctctaggtgatggtacaaactcaggtggacaggtccttgatccattgacatagccttcaagacgatgacccctgattatagtagagacaagatttctctagagagtaaaattgtttctatcaagtttgatagaaaatggttgagtaagagtattcccaaacggtgagtttttgaaacctccaaatccagtgtgaaatccttgctgtgagcctccattaatggtctga

SEQ ID NO: 91426 - DNA, 663 bp, Cannabis sativa
ttaatgacatctttctcaaattttctgtcgtttaatcaaattaatgttgtttcttaattagtgtagaatttttttgtcgctttatcaaattattgttgtttcctaattggtgtcgttttatactgttccccatttttttgtcgcttctctatatttatgtcgttttttacaatcaagtgttattaaatatgatctctataaattttctgtcgttttataaatttaatgtcgtttctcagttttagtggtttaaaatcatttctccaatattttttgtcgtttatactaaattatgtcgtttttaagtaggtgtcgtttgtattatcttcaataaattagttgtcgttttatgaaataaatgtcgtttctcaattgttgtcgttttatgtcgtgcttaccaaattttttgtcgtttttccatatgtatgtcgtttttttacaatctgtgttgtttaggatcatccatccctaaatttattgtcgtttcatcagtttattgttatttctcagttggtgtcgttttatatcattttttctcaaattgttgtcgttttttacaatcggtgtcgtttattatcatcttcctctaattttttgtcgtttcattgatatgaatgtcgttttgaattggtgtcgtttaagatcgaatttttccaaattttt

SEQ ID NO: 91427 - DNA, 677 bp, Cannabis sativa
ttttggttattttatagttgatttaatttatagttgacctatagttgtcgtgagattgatttctcgttatttttagttttttttttattattattatttgttgagaaaagtatttttttaataattttaaaactttacaaacgtatttttgtaaataaaaattttaaattgtaaaattgtaaataaaacttaatatatatatatatataaaatttatgagtttttatatttttgtaaataaatatgactttttttcaaaaaggttattttataggattgaagaaaaagttaaaaaaaatatggtaaccaaagggtaaccagtcactataaaggggtaattaggtaccttatgtttttttttttatatatatattttaactttttctaaattttcctataaagaattttttttaataaaaaaattatatttttgcaaacttatactttaaaagccataaaaataaaacttccaaaaaaaaacataaaaaaaaaactaaatttttttcataaactctaaattaaaaaatttaagtgacgtttggtaacacttttttaattagtaatctgttttaaaaatgaaaaagtaaaaatatttttcaaaaattatgttctataaaattgttttcactttttaattttttaattaagaattgaaattttaaaaacaaaacaaaatc

SEQ ID NO: 91428 - DNA, 548 bp, Cannabis sativa
ataataacaaggacatatgtagtaagatttaaaaaaaggaagctgaatatatgttctaccctcaagaacagctcttaaaattccagctgagatgtatgctcacttttttctcttctagtacaaagtgaaaagatgacagagatggtatagtatctacctctttccatcagaatgtgtcataacaatatccatatctccacaggacgctttcccgcgtctaaatgatcctccacatatgattactacctgcaagcagaaactcacatcatttgattaacaagttacatgctagaataaagatttatgcttgcaatttgtaggcaaagctttacattgtagcttacaggttacaaattttaactttatttacattatttcttcttggtagtcataggatatgtgtgtaaaggcaaaactctgatttggctcagtaagattcaagcttacaggtgccgctgtttaaacattagtattcattgaaaaataaaacatcaatgaaggaaaatacaatcatagccttgtaaaattataatagctaattgaccaat

SEQ ID NO: 91429 - DNA, 618 bp, Cannabis sativa
tttggcaaaaggaaaaagaaaggactgtactatacgaaatgttatttttgtcaacataattcgctactaaaaattattgtgcatttcgcaaattgtattggtaaaaatattaaagttttaccaacatataattgtgttggcaaaatttatttttatcggcgcaacttatatttacgttggcataacaagccttgtaaacattctcctcttgattatttttattaacgcaaaagtgtattggtaaaaataatttttgccaccacaaatgtgtaatgtgatagtaaaagtcacttttattaacgcatcttgcgaactgcgttggtaaaaggtcataattttacataaataaattttaatatttttttttatttttgtttaattttatattttttttattatttagtatcatataaaattattttaatataaaaaataaaattatttaattttataatcttataaaattatttttaataaatttgtaattgttaataactatttattattataagaataaataacattcttattttttttatcgtaaaaaaaaaaagaaattgttgacattgaatttgatcaactaataacgaagccttctttgttactgataatcaccac

SEQ ID NO: 91430 - DNA, 751 bp, Cannabis sativa
gaaattaagaaagagagttaaataggatttaatttaaagagaaaatgaacatcaaattaacttcatccaaaattctaatagaaaaggaaaatgaagagtatcaaagtaatgagtgtaaaatttcataaaaataaaagtaccaatttaccaagtgataattgcatgtatagctttagtgtaattaagtgtcgggttttatgtattttaatttaataattattaggaaatttttttatttttattgttttcaaaacacaagtttgcaaaaatgtgattttatggaaaaagaaaaaaacatgtggaaaacataatatatggtaactggtaattggttacctttaactgtttttcttatatttttaatttttttataaaatatttttcaaaaaaaattatagttttgtacatattgtataaagagccataaaacatgtaattttctctaattattatagaaatccgttaattattcactaaacgctatctcatagtaatattaaacaccactatgtacctaataacttcttacaaacaaaacaatcaataggttaagcaaatttaaccaaataaaggaagaaaagggtcataaccaaatttaactcaataaatttcaattaaaagtaataactatcatgtcactatgtgtaatatttgaatataaaaattattactaatgtagttaaatacgacgatcaaaaaatgcttaccgacagtagccatggtgacaatggaaaaatatagagaggtaaca

SEQ ID NO: 91431 - DNA, 892 bp, Cannabis sativa
aactcttcatgcacaccatgccatctaaaactgcatcccgcaggatgtgactctcgagtcaactatcttatatagcacccctatcgatttccataagcatgcaattgccgctcaaccatccaactaattcatacttgcatcacgcccttctggcttccacgatgcactaagttccaatgatgcaaccctctagccttcatgcaaactctagcacccttcttgaccttcgcatgcaaatatgactaactaagtctcgctggtacaaccctctggctttgacacaaactctagcgccatctcaacgcttgcgctcggtcttctcagccccgctagcttctttgatgcattcattccacaactccgcatctccattgatgcctttgtgtgacttacgccctctaacgtttaaacaagccaacacatcccactcaactgtctcggcacttccatactgatcaaataaaagtcacatgcgaacacctccaagtacaaccatactctgaccattgcggcctctgcccccttggtctccatgtgcgtccctcttgacacacaatgtagcaactgaagcattccatgtctattccaatatgaaccatctcggtcatcaactcttgacctctgtcgtgactaacaagaatctgacagtccctgcaatacttccactcccacaccaacgagcttcctttttaacaaaagcgcctcctgcggcttacatgtcactcgagcaaactcggcctagtgtatcaagcatacagtctgactgcccaatcaatattgtaccatgccaacgagtttcaaacatcctgttgcgcctctctacaatcacatgtggtagttatcttttctagcatccttccacacgcctacatcctctctacgataggccaac

SEQ ID NO: 91432 - DNA, 821 bp, Cannabis sativa
ttttagtgattgaatctaatttgtcacacaacacataataaattttggaaagaattctacacgtgacttgtcacgtgcatgttttatctagtatatatataaatcttcaattgcggcgataaatccgtaaacgtgacaatttccaatatattatcgaaggtcatgaatttggagtttgggattaatcccctcctccacctccacacaacaatattattgtttactttataattctctcttatattttttttattttttaattttacatttataacatttttttttatttttacgaaatactacataaaaattcctattacaattagctgagcaatttaaatcgcaactaaaaattctataccaacccacataaaaaccactaaaaaaaatcacattagaaacttaaactgtaaatttaaaaaaataatatattaagtaatttctttatatttttttttttttctttctcctaactcatctccaatatcatagattcaaaaaagtacaacattggagttgacattaataaattaattatttgtatagatttacttaaccgatcgagaagatcgaaagaatccattcccaatatctaacttgttttgtttataattagttaaactcattctatatcttataacataaaaatattaatgaagcttcatctagtttgtgcttcccatcattttaattgattaaacctaagcactgtttctttcttttcttttcttttttattcttttttggtttttcgatccataaatggatgtctcaagaaggaccacttccttaatattttatatgatatattgatagtaatg

SEQ ID NO: 91433 - DNA, 580 bp, Cannabis sativa
ccagaaagttagcataaaattcttatatcattgactagttgagtttaagaacattacggtcatcaaatttttaccaccccctttaaacaatattagctcagatataccacagctcaaattatagataggaaaccacatattgaaatcatagctgcaattgaagttcaagtatgcgaatataacttgaaacttacgattttcactcaattactttacatgagaaaagcaaataaacttgaaatcaaaataaactttcatttaattgaaacgaaacttcttgcaactaaataacccaagaaccaaaaaaatgaaaaaataaaaatccataatgagaagcatgaaaatactgacctgtgtgaggctgggcgtggtgctgcagagaccaaggtgagtgcgttctgtagtgagatgaggtactgagtgagagtgagaaatgaagggtttaatggttgagggttattattgtaaatttattcattttgctttacggcccttttactttatccataactgcacccaccctgatacttctcagggcaactgaacactgtagacgcaagacctgtaaaggaagcctttt

SEQ ID NO: 91434 - DNA, 1316 bp, Cannabis sativa
aaaaataatattaaaaattaattttcaagaacattgtttattcctctaaaaaattactgagaaattattagtcaaaaattggataatccacttgtatgcaaacagagtgtgaaatataaatattttaccatttcaaccactcagtcaattgaaaattacgataaaatttcacaatactttcttgtatttctttttaaaattattctatcttaaaactttatttaataattcttttcttttaatttttattatacaatattttctttaaattttgcaaaaaaaaaaaaaaaaagatgaaatttccaaacaactgtttcagaacttacattttttttagaataaatacttattattataaattaaattggttggtcatttacaataacataataaataaatggagcggccatattcgctagaccagtatgcatatattatttattattaatgataatatatatacgtatcatttgctattttactgaccaaacaaaataaaattaaactagaaataactttagacaattttgacagatttattttatttttccatataaagttaatttttttatagtttaaaatacagttgtgagatagagtaaataacaacttcaaaacatgttattatgtttctactaccttgctacattatacatcgtccacaccatatatagagaaaaaattatatctactttttatgtttattaaatatgtatacaattattaataattagcccttcaaaaaaaattcttcacaatttgcccctccccatttggcaaagtctccccgtcaatggataccatagtataattcactaccatattactttaaggttcaagacttgacttcaacgttacagatttttttaatgaatattctcatctgaataatgataatattttttattttaactaagataattttattttttttaagttgtattgttgtattagtttatgttgaataaatattaaggaagttaatgaagctatttttgatattccgagatgcaaggctctagggccagatggatttagtagctttttcttttaggataattgggatatggttaaggaagacatatgtgaagcagttctcccttttctacatactgggaaattactcaaagagttaaactccacaactgttactattgttccaaaagtgaaatgccgcgaatcggtgaatgacttcaggccagtagcatgttgcaatgttatttaaaaagtggcaactaagatgctaagtactagactgagataagtactacctgaactgatagcacagaacaaaagtggtttcattcaaggtagat

SEQ ID NO: 91435 - DNA, 627 bp, Cannabis sativa
caacctgcaccatatgaccttgtattaatctaccttagcattatttgccaaaaaatgctcacataaacttcttccaataccaacgatcacatcagatttcagctcatgaaaaacaaaatatattgaccctttaagtagatgctattgatccactttatccaaagcacatcttagagttgtgcatgggttaagtttggtggttcacggtattttaacgagctaacccaattagatcggtcagaaaaaattttaacccatttaaattatattttaggaatatttgcagcaaaagttctcaaaaatttaaaagttgatgtagattaatttgttagtctctagttaaatgatccgcgtattcatttaaaaaaaaataccacgtgttgacaaattatttgtccaagtcataattttaatttaaaataattattcttttaagaaaacaaataaattattttaaaatttaagtttttctcttttctttttttattctcagccccgaccctttttcttctctctctttcgttttcttctttttccgcatgaacctccatagccaccatggccaaaagcttcgaccaacctttaagctccacttctctcaattccgttcgagttagactaccccaa

SEQ ID NO: 91436 - DNA, 797 bp, Cannabis sativa
agggcataaaacccaacaagtagcacaccaataaaaggtggctcgatacttcaacaagcaagtcaaggcaaggaaattatttgtgggagatatggtccttagaagagtattccttaacacaaaagacagcacggctagtgtgctcggacctaactgggaaggaccatatcaggtggtcaaagttctagaattaggggcatataagcttggacggtatgacaaaaatatagagcttgttctagtaccaaggtattagaatggggaacatttgagaaagtactaccagtaaatgtacaaggtcggatgaccactttaagtacacaaagcaagaacatttacttctaagtagatggccttctgggcggatcccgcccaaaggttttgatgaaataattaagtactcaggtcggatgaccacatttaaaagtacaactttttttttccttaagtgcaattttttatgtttaaatttagctaaagatcatattagatcatgtaatagctttcataaatgtaagttactacaataacaagactgtttcgaccaataaatgaataaagatgtttatttccattcttattgcgtcaattgtattaacaagttatgaatttaccattaatgcatacaaaaggtccgctcgacccaaagcaccgaagagaaaaaaaccatacttgtgaaatgcaagtgaccaagagtcaaaagtctgctcagtcacttaggggcaactacacccgtacaaactattggaaaaataaagtaacaagctcaaaaaaaaaaaaacataacaatttgcaca

SEQ ID NO: 91437 - DNA, 899 bp, Cannabis sativa
tgggaacgggttggcattgggactgcaattgcagctactggggcgagtagttttctggactggtgcatccagtcttttgctactgctgatgccgataaaaggaagctgttgccggttctctgttgggcgatatggagtgcacgaaacgactttgtgtggcagcaaaaaacaactactgctgctactattttgaacacagcgacgggattccttgatcaatggagtaaagctcagaatactcttattgagacgtcttggtcgagttacacgattcatgacggagctgagcaatgggtcgttccaagtgaaaataaaatcaaggtaaacgtcgatgctgcgttgtttaatagtagtaacaagtatggttgtggttttgttgctagagatcactacggtatgctagtccaagggaaaacacttttgttcacatgttcgccttcgcccgagcttgctgaatcaattggcatacgggaagcattgagttggataaaaagtcatgggtgacaacatgctacagtggaaaccgattgtcttacggtagttcaagcacttagaagctcaatggacatgatttcctcctttggtcaagtcattttggagtgtaaaaagttgttatctgatttgaaaactgtttctgttttatttgttaagcgatcagctaatatggtagctcataactgtgcaagagcttctatattatatcctggttgtattttcgatatggagtctgttccattcgacttgctaccctctttggtagcggattttgatggttattaaagttgcattttaccatttaaaaaaaaaaaaaattaataatcattatagttttgcttaatttaatatgcacgtatttgttaaatttattgaaaatcatatatgtatatatttttgcccat

SEQ ID NO: 91438 - DNA, 1069 bp, Cannabis sativa
catatagtctctcattaaactctccaaggaacttgtttgagagttttgaggttggtgtggttgttgaggtcttggttgttgagaaaatctcaatggaaatagttgtttttcttgtgctggtgctccacttgaactcgcttcttgacctccccatgacaaattcagatgatgcttccatgttggattgtaggagtttgagaatagattgttgttgtcgttgaaattttggttacccacatagcaaaccgaagctgaatttgaagggcaattttcaaaagtgtgcccatccccacaatacacatgagatttctgccctttgaatggcagcagctggttgtacacttcctcccatattcatgttcttcaaaatgttgttcattgaggcctatttgagcggttagagcagtcaaagcatctacttcaagaacacccgtactttttggcttgtaggagctctgttggttgaccattgatagttgtttcaagctatcctttccaaaatctcaaaagcttcattgtaagacttggaaagaatggctccattggctgaagcgtccaacaccattcgagagactgcatttataccattgtaaaatgtctctagttggatacaatgaggaataccatggtgtggtttcatcttctaattattgaaaggacataatttcgctttgaaactttgcattttttgttggaggaaagtactttctcaagaattttttcgctaagtcattccaatttgtcactgaattgggaggaagggtattgagccatgctctagctcgatccctcaaagaaaatgggaacaacttcaactttaaagcctctttacttactccttatagcttgaaaaaatcaatcaccgccaaaaattagcgaatatggagatgaggatcttctgttaacaacccactaaattgaccaactgtttggagcatttgaaatataacgggcttgagctcaaagttgggtgctagaattttaggtctcacaataccctaattaagctcgttgaacatgggggcaacatattctcttattactcgggctctatcatcaaccaaggcaa

SEQ ID NO: 91439 - DNA, 505 bp, Cannabis sativa
attgtgagagatattacattaaaataaaaaaaaaaatgtagtacaatgtaacatatatattggttttattacttttcagccgatgaaataatcctagcccatgtgtaatattttaagtagaagtattattttaatttttttttttaaaaaaaatagatttaattaccacaccaaagatataagagcattatttttgtttttgcaatagaagagctttttatttttgacacctgaagaaattatatcctaattcttttcataatattgtttatataaaaatttaaacagatagttgtactcatgcatgttttttgtaacttattattttgaattttatttttgatattattaattatttaaaattttttaaatatagggatatctagtataactacaatatacaacgttatatatataaaaataaattgagtataatttttttagataccaaaaataaaaaatagcgcgaaaataatatttttactaaaaatctacatataaccaa

SEQ ID NO: 91440 - DNA, 964 bp, Cannabis sativa
tgtcccagtataattgtaaagttttggtccaaaaacagtatttttgtaaaattccctttttatttgaagacaaactttttagaaattgtttatttcataagttccttgaatcattcattggtttcaactttataaaggtgaaagatttgactaactcttactatctacatattttgtttaaaaagttatataacaaagttgaatttttagtttaaaaattggcaaacaaatttcattggtgaaatttaggtgatgttcaaacaactttctttaagaaattgagagacaagtaatgtttcttattagtatatgacaataaattgtagatactcttaatatataattatttaaacaaaaatactactgttcttaattgttgaatctttcaatgaggagaattctttcttattattatttggactatatttttcttgtggtggtaatatggcaccgccttataaggttttccataacccgaaattcatgttttctacaaagattctactttttgttccactgtcataagaccgaatggtacatagtttcagtttgtgtctaagtgcccttatgacaagatacatgtaccactttaaaaagtcaaaagtagaaatagaccgaccaaaatacatataacccaacttcttaatgttgtttggttttaaatctacataatctagaacattttataaaaataaattacttgtatattctattcattggtttgttttgcatgagtgatttgatttgattctaataacatgctgtgtttccaccagtgacaataatgatattctttaggagtacttcccgtcttatttaatcttaaaattgcatgatgtttacctattttattgattcttatgatcatacacatgatttttataaaaaaaatcacatactttattgtggcggatttcttttaatgttttctaagtggagcgcgatgagatctaatcagtgagat

SEQ ID NO: 91441 - DNA, 1709 bp, Cannabis sativa
gaccatgtcctcatgtgaccaggaaaaaatttctaggtttgctcttaaaaattttatcaatgaggattttacttcgagcagcaaaccttttctaattttgagtttcctggtcggaacttttgggtagattccaatctcttctagttcttccactcggcaacatttgtattttgttccgcaagtcggggatccacatcttcgtccccgccttgggcggttccctatttgggaatgtcttttcccttgttcgaactctgactggaggatacttcctttttagccttggtcagggcgacgttgtaacattcccgtgcgacttggttatttctctcaggcacccgaccccattcttcgtttgaaacttaaggcacgaatgaaatatcgatgtaacatcttttaggtcatataaggctggtcggcctaacatgacattaaaagttgactggacatctaataccaaaaattgtgccattcagttatgctttttggagcttgcccaacagtgaggggtaggcgaatttgccctagaggtgcaatcggagaaactatatacgggctgaagacggggggttaaatctttcagttggagccccatcttttcaaatgtgttttaaaaaagatatttgcggaagctccattatctatcatagttcgggccactatttttttggctatctgtacttccacgaccaacagatagttgtgcgggaaattaaccttgacagcattctcttcattgaacatcccgtagtatttttggttttctttcttcgacggccaggatcacttctttttgcttgtgctgtaaggttcgggcatacctttcccgggctttacctcaatctcctgctatgtgtgggcccccaatgataacttgcaaatgcccatgtactggtggtggcagtaaatcttggttattgtctgcatgggcgaccctctgattttcattgacctcgacatatttctgcatgtgggggttattctttcttatcaaaaattcaatttcctacttgaaattgttgcattcattggtgtcatggccataatctccatgaaaatagaaaaacgtggacatgtccctcttacttatgtcggttttcatgggagtatgctttttgcacgaacctactgactgagtagccatgtagatggtctccaaatcgtcagtcaagacaaagaaagcagtgaatttggaaggattttctctacaggcctatttggctttgccagcgaactttccctttttcccattgccttgcctgttgttgttgttagaccttttaccacccgagcatgaatttcttgggtactgggggtggtgaaccgatgttccagtagaaggagcttgtgattagttcggtttaagctccacttctactcgcataatggcctctttgagcttgatgaaaccatctgtgcgatcgaggaagtcattcatagagtctactggtccatctctcttgatgtccttccaaagctctctgagaacttccatgccccctaatattgcggttaatttcccttcttcggttaatcgtgccaccttcgtcgcctctatcatgaatctactgatgtaagctcagagaggttcccatggccttttgttaggctattttttggcctacgttttggatctattctatgtgtgtttttcactgtattgggacggaattacgcttgttttctatgttttcaggttctttggaata

SEQ ID NO: 91442 - DNA, 546 bp, Cannabis sativa
aacaaggttcattttttcaaaaatgtactcctagctcaacacactactttttataagtacatgtaccaggttatcttcagaagcaaaataaaagcctaaaattctactgacaggtaaatttttaaaaattaatatcagggttttttgttcaaaaatctgctcaaaactcaatactttcaaccatattaataagtccaaatacgagattactttgagaatcaaataaaagtctaaaaattgactaccatgtgactttttaaaaatatcatggttttttgttcaaaattacactcaaagctcaacacactctaccatactcaaaactacaggtaccaagttactttgagaaacaatataaaagcctcaaaataccaagttgcttttccaaataacaagatactttgttcaacaatacaatcacgactcaaaatatgctttaccttattcacatatatagtaccaggttacttttagaagtaaaatcgaaataactgtcatgactcaaaatactctaccttattcaaagataaggtaccaaaaataaat

SEQ ID NO: 91443 - DNA, 847 bp, Cannabis sativa
tttaggcttatatatttaattgatatatatgtatatagataaggattttaaataggaataatgtgttattgtaaaatttaagtttttatatttaatttttttatctaattaaaaaatattctcatcattttttacattatatggattgaggcataaaaaattaagaaaaatttatttgtcaaaaaaaaaattgagtttgacttaaatattttttatacaaacatatttttttatatagtatataaagagatattttttaatattcttttaattaagtagctagattaagcatataaatttaatttttttattattcgtaataagatcaaaatctaataatttaatattatagttaaatttttatagtaacctaaaaaaatattgtatatatatattatatataaattcaggtccagccacaatgctagggagaaagcattattattgtaattcaaacatgttgcagacgatttatccattgccattagtaaatgtggcgacgtgtctccatcgacaccgtttatcttcatcatcagtgactaatttcacatgtgatggtggtagtactactcttaatgtgaaattgaatagtagtaaagatgatgatgatgataattataataaccaaaaaattgtgaagagagatgggcataataatagaagaagaatgaagatgaatgatgaatattttgatattgagctcgaagttcgtgattatgagctcgatcagtttggtgtcgtaaacaatgccatttatgcaagttattgccaacatggtacgtaattacttttaattgttctgtgcatgtgttgcatgccctagtttgcgtttttttttttttttttt

SEQ ID NO: 91444 - DNA, 631 bp, Cannabis sativa
tccgcctagtcctgcaaaattttgtatttttttatgaaacttctttcagtgtccccaagaagggggacaaatttaaagacaatttttataaacttcaggcccattcggccaatgagacctcagtagcctttaacttccaaaagaatgtaaaggagtatcgccacagttttttcttctccttcgagttcaagggttttaagcgcccagatctgttgacggactaggtcaggattcccccatgcaccgtaccactcccacccaactcttcctaaaccatgcccaagtgttcgctggttacaggaaagaaaatttgaacatgggtgacctagttacgatggtcaactgcaagaggcccaagttgaccctagagagtcaatctattgatgacttcaacttgttcaaagtcctctgccccaatgtctagaatcctaggagtgagaaggcgctcagggtagacatcattttgtccgcagaggagaaatacaacaagtatagatacaagagggagcaagagctcacgtacactcagctgcaagctgcctctaggagggtctcccgagaggaagatgggaaggagaaaactccaatccggcccaaattttcgttcccagtccctaactctggagccccc

SEQ ID NO: 91445 - DNA, 609 bp, Cannabis sativa
atgtgttaaaaggcccataaaaagtgtttccttttatataacaacacttttaatattagtgttattgtaaggtgtattgtcctaattttttaagtaagcataataagataacacttttttaaatattgtcaaagacttgcaacacaacacactaggaggcaacatttttaacttacctatctattaggaaattctttgggatgtctaattagaactcaaatgagctaaaaaaaacaatattgggaaacttgtcatgcgtagacactgacatttcaacaattattacacacataatattttaaataaatatataacttgtaattaccaaataattaagtgaaatattctcaaatcaacaaatgagagagtactgcaagcttgtgtatactttgagatattatatgtagctagtcgctgttataagcccgttcacctataaaaaataatacaatgattttacattaattatataacataaatatatagaaactaaaaaataacaaaaatatataacttactgaaataattgtccaattgtgactcccattcttcttcattgacattgtctgttaataaaacaaaaaataacattcaatatagatgatacat

SEQ ID NO: 91446 - DNA, 810 bp, Cannabis sativa
ggctataccctactaagcaaaaaattaccctctttccagtgaagtaatattttggagattttgattcaaggtatgctacccataatgaatgataagtaattagtctcaaaactctcttaattatatctcaaaatataccaattacaaagtacaaaacaattgaacaagtgaccacaatcaaaatttagaagagaactttgttttcactacacccttttctcactttataacaacaaagtacatgatttgtttcttgactgtctctcagattaggaaatatctttttataaccctaagattcccattgttacagcaacttgagtgcatgtgcaacactctaacaggaaacaggaagcgacggtctgtcagtctctaactaaatatcggtccatttggttcattatcccaactgaactgatccttctcactataacactcatattaagcctcccatttacagtaaaaatacagagtgtagctcaacacagaacaatacagattgaacattatatattacaatgtgaactttattaacttggaaacattctactacttcggtagaagaatttcttcacgaaaaacctaaacgaaatagttaagaagatggataaagaacttctgcctctgatcatcgatagtttcgtgatttcaatttttatccagctcctctctccctaactagaatctcagattcagttaagctaaaatcttctacaacttttctttgggcatatttaggtgcatcctaataaaagcatatcaagtcattgatccaagtgaaaagattttaacattcaaatagggtcgcct

SEQ ID NO: 91447 - DNA, 590 bp, Cannabis sativa
  modified_base (533)..(550): a, c, t, g, unknown or other
ttgtgatataaattttacatcatgatgtattttttctttttttttttaataaaaaagagaaaacttcattagataagatcatttagaagtacatctctaaaagcaaaactaatagaaagttcagaaaaaatacgatcaactggaaaataagaagctttagcaagataatgagccgccctatttgcagattgtttaacaaaaataattgagcaatgccttaaagtagataacaacctttgacaatctttgacaatagcaccgaaataagaattcaaaggatgaggattacgaatagagtgcaccaacacaagacaatatgtttttactacaacctttttccaattgttcctcttgatccaacttaaatcttccttcacacctattgcttcaacaagacccagttgaaaaataccaagccaacaactagaaatagcagttaaaagaagagaagtgctatttttggccacacaagcaaagctatgacagtcacgattataaaaaatagctgcgtcctgttggaaattattttaccnnnnnnnnnnnnnnnnnnacaagtatgtttattaacacactaaatatgaactttctaa

SEQ ID NO: 91448 - DNA, 799 bp, Cannabis sativa
gccaaaaatggaattaacaaacactacattttattatacatatacatgaaagactataacaatgtaataagatatgaccgattttgttttttatttttgtttgtttttttcctaataaatcatatcatttttctaatagtaattaattaaaataataatatgcaatctaattaaaatattttttcgttgaaaacataattaggattaaaattaaaaaaacaaatcaaataatcaattacctaatttttaaatcatttgacacaaaaattaaaaataaaatcaaattaaaaagattacagcatcacagttaactttaaaaacacttatatttagtttcatctaccgctcagaagacacaacagtaaaaactgttaaaaactgttacagtaaattcgttcaacctcgtagcttaagcacccaactattgtgcaaggtacgtaactgcactacgtactaataacatcttcagtcgcagagaacttgttattcccaaccactaacagcaatttaatgatgagctatccacgaataaaaaactaacaacgaaactaaacaaaacaaaaccaaactatatcacacacacaagattaaaacactcaaaactatgttatagagacaagactataaaacactgaaaatcatatcacatagacaagactaatcgtaaaagtaaaaattgaatcgcaataacaaaacataaccccgaccaaaccgtacctatacccaaaaaaaaaaaagcacgagcttgacagtaggaaaaaaaaacaaattcctgtatctattttttttttttttacat

SEQ ID NO: 91449 - DNA, 759 bp, Cannabis sativa
  modified_base (469)..(470): a, c, t, g, unknown or other
aattcaggacactattttgtgtcattttgaaaaatacaaggtccaatttatcatttaacaaaacagatggtaactttcgcaaaatacatagtccaaaataatatttattatttttttataatggtgtacattgtacttaaaatttctcacaaaattttgtaaaattccaaataatttaaaatatcaaaaataatttttaaataattaatctcacacacagatttaatatatgcataatttatattattgaaaatagagtttaaaataattatttttacatgggtaattttacgatatgtgtgttctttttgctcagtctcctaccaatgagtgcgtcttttaacacatgaataaattatgggaaatttacatagtatattaacttttgtcatttttttttataaaaatactaccagacggtgtttttttacttttttatactgtgtttttttttataagtttcatactnnagtatactgtgttaagttttcattagtgtgccactagtgttttattgttgttctactgttgttttgagttgttctgttttgtgttctattggtgttttataaaaacacagtatttttgaaaatatttctgtgtgacagtatttctgtaaaaattaactcaaattccagtatttttgtaagtttctctaaattataatataaatatttttatttatcggtctacattatagttattaggggtgttcacaaagtatccgatccaatctaatccgcacgatccaatccaatc

SEQ ID NO: 91450 - DNA, 1413 bp, Cannabis sativa
gccagctcctgttccctcttaaagaggtacttctggtaccggtcctccgccgaggcgattatctccacccgaagcgccctttccacagcgggagtcctcacatttgggcagatgaccttggagagattgaagtcatccaccgactgattctccaatatcagcttggccttccgacagttctccgttgtgaccaactccccaacgtcgagggccttcttgtcgtaagtagagaaagtcttggcccactgcaggaacaatcgggtaggcgcggtccgcatgtaaagtgggatcctgacccactttgtaagaagctccgggcgatccatggcctggaagccagagggaaagaagaagcgatgacgttactccttcacctgcttctggtggttgaaagggacggggcccttgttcaaagggtgggcccgaaggccataaaagcgtctttaaatttatcccccttattggggatagaaacaagtttgtaaaaatacaaaatttcagccggactgggcgaaccctagctccgggtggcataaaaaataaataagcctgaaagcaggcggtaagcttgagggattagtcggtatggcgcaaggccgacaaaaacaagaaaattaacaaagtagtcctgaagagggagcatagccccaaacattaaatgggtctggctccaagcttcaaagcccccgtagttgtggttgggtgtctcctcatccctgggtaaccggtggaaggtccaggaggctgagggtttgatgcctgccaccacctcttttcaagttggtgagcacacgtgagcgtggagttgagctcaaccgcctcccatccgttagcacgggacttgtagttctcttgggccacaagaccctgcatgacctccttcagggtggccagttgagcctctcccttcttggaagacttagaaccagacgcggaagcagacattttggttttgaaaaaattgagaaaatccagaagttaggccctaaaccaaattctaatgttcaaaaaagggaatgggggtcccctaaccgctggaaaaaggccccctccggacacttgccaaataagaaagccccaagaggctttccttggcaagaatcgagtgcaagaatcccaaaggtagtgacatcggaaaaaaaaaaaagagaaaaaagggaaaaaaagggcaaagccgaaaaggcaagatctactctaagccctaaaatcgtcattacataagataaggatgattcctcaacaaaaacgtagtgaaaagaagtaatctaaacgcgaaaaggaggaatttaacacatcacagaaactcaagcaaacccattcctagaagttcgacatccaacccagaaatcataaaacatgctatataaacgaacagtaagcaagtatacaatatacgaagaacttacatgaagt

SEQ ID NO: 91451 - DNA, 560 bp, Cannabis sativa
gttggatctaattctccctctcctacaactcttcgttgataccaccgcagttggaaaggttcgttgggttcattgattcatccctgggttcatcatggtctgttgggtttatcgcagaagaagaaaaaggaacaggggaatgggagatctggttgttccagtcgcagagcacttaacagagccttttgaacgaaaggggtaaatagttgacagaagtgagattcggagggttttaccaccaaaaaatcaatttatgtggttaactgtcactaatcatggagttcaagtagttttaccgctaatatccccactaaaaatttgccacgtgtagactcgtgtacactgtggcatgtccaccgtgacacttaatagagccctttgaatggaagaggtaaatagctagcaaaagtgaggtttagagggttttaaaaaaaaaaaaaaatgatttatatagttatgtgtcactaatcatagagcttaagtagttttgctgccaacatccttatatcttttattaatttattaattttttccatgaatttttctaatgtatgtaaaaa

SEQ ID NO: 91452 - DNA, 1052 bp, Cannabis sativa
catcgacgtttaggacatgcctcctttggatacttaaaacgtttgtttcctaccttgtttactgatttggatatttctactttcaaatgtgatgtttgtgaacttactaaaagccatcgtgcttcatttcctttgattttgaataaaagtccaaatccatttatgattgttcattctgatgtttggggcccttccaaagttcctacacttggaggctcttattggtttgttacatttattgatgattgtactcgaatgacctggttatgcctcatgaaatccaaatcagaagttactgtattatttaaaaaattctacaatactgtcagaacacaatataatgcccagatacaagtacttcgcagtgataacgggggagagtataacaataatgagcttcaacaattcttagactctcacgggtctattcatcaaaccagttgtcgagatacaccacaacaaaatggtattgccgaaagaaaaaatagacacttattggaggttttctaggcttctctcattgaagcacacatgcccactcattactagggtgaagctctcatgtcaactgcctacctcatcaatcgagttccttcaagatcactcaactttaagacaccattacaagctctcactgacgcagttgtagcacccagtgttcccaatctaccaccccatgtctttggttgcgttgcatatgttcaccttcccaaagatcaacgaagtaagttaatgcctcgagccttgaaatgtgtgtttgttggatatgcattgcatcaaaaagggtatagatgttatcatccccctactcgacgcatgtttatcactatggatgttgttttccatgaagatgtaatgtattactctgaggttgaatttcagggggagtatcttgaagaaattcaaacttttgaatacaaccttgtgacagatgcagaagaggtaaggcttgatatggaaaaaaaatctgatgaaagtgtggaattagatacaagtggtgacaccttgcatgaaaacatagaactaaatgaattagattctagtgatgaatg

SEQ ID NO: 91453 - DNA, 971 bp, Cannabis sativa
ctctctctctttctctctctctcgtctgaaattttctctcgcttgaacaatgcatttgcgactgcacttacaagcaaaatcctccaagatggcgtctagtataggagcagcaggagcatcgacgttcgtctccctctcccatggctacttcgtattcgagctgctattttaatggctacttctactcctgataatgaagttcccaacgcttctcccatccccaaagaagcagagaagcctccgattgagctcataacgttgcccactattgaggaaatttgctgccaagacatttggaacaactgtgctgtttgtagtctctttagtggagtcatgggtatgtccccaaataaaccctttttcttcttctaatctattttgtttatttgctcctttgtttcagttttatattgctttatgctttcattatctggaaaagtttagcttgtttgatctcactgtagccgaatttgtatacagtgttatattggtgtcttgaactatgttcaattattaaaacatgtaaaaaaaattaataccattgtcaaacacgaggagtatgttcccttttctagttttcttatgatttgtggaattagatttatcaacaatgcttgcgaaaccttgtattgtaactttagcttttacaaactcgtgacaatctagaatttgattcatgttgaaacctcaatttatttattttttcatgctaacatttcaattttcttatcccattttcaagtgctcttctttttttttttggttggatattatacaattttcatactacatgtatacttgagacacttaattaaatctaaaataatatgccctatcataatgttgatcttaggctataaaattaaatagtaaaaccttattacaagttatatgtcattttcaggactaacttgttttgtttaagacaatggtgtggtctctaagacttttgttgtggtcggtatagaata

SEQ ID NO: 91454 - DNA, 1515 bp, Cannabis sativa
gagcagattaagaaaagatatggcgacagaggatcaccttgacggagcccacgttcaggaatgactgaacctttaacttgaccattaattagaaaagagaaagaagtggtgtgcaaacatgtcataataagagagatcaatcgaatattaaaccccatttttcccattaccgcagccaagtaagaccattccactcgatcaaatgctttactcatgtcaagttttaaagcagcataccctttggaacctcttttacgattcttcaaactatgaaccatctcaaaagccactaagacattgtctgtaatcaatcggttcggtaaaaaagcactcttagtttcgaaaatgaccagtgggagaatatgtttcaatctgagtgccaacatcttggaaatcaatttgtacactacattgcaaagacttataggccgaaagtctttcatagtttttggcttctttatctttggaatgagagtgatgagagttttgtttatcccagctggactaccaccacaatttaagacatttagcacgacttcagtcaccaaaggaccaactatatcgcagttgtgatgatagaacatagcagaaaaaccatcaattcctagacttttgtctgcacccattattttcaaagctatagtaacatcatctggtgtgaattcttgaagaagaaaatcattgttagcatctgtgacaatagtagggattgttgaaaggacatgggagagtacccaatggtcttcatttaaagctttgaaaagagaagtgaagtactgtgtaatgaccgaggcaatatcatcatcagagtgcacatattgtccatttccatcttgcaatttggtaatatggttgttagattttcgagaggaagcctttgcatgaaagaatttggtattacgatcccccgacttaagccaatccactcgtgatcgctgctgccagtattgctcttcattggctaaaagctcatctaaaatggcttcagcagattgaacttcctgtgaaaaattcgagtcaggtacaacacaattatttaattgttcaactctagcttgcgcctccttgatatgttgtttcatgtgcccatattttccattatgccattgctgcaaattgttcgaacacatttgaatgctatcagtaagctgttggaaaatatctctctgagtaccagcatttttattccagtttgcagaaataatggcagaagattctgcatcatttaaccaaattttcttgaaacgaaatcgcgatcttcttttctcatgctcattttaattagaaaatttgatatccaccaagaccgctctatggtctcagccataataatcaaggtgtgaaactgtaggcaaagagagtgtagtctgccaaactgtattcgcaaaacaccagtctattctttcttttagtgcagcagggttctttttgcttcgagtccatgtgaaatcatcacctaagtaagccaattcattcaaagaacattgatccaaagttgtacgaaaagctgtcata

SEQ ID NO: 91455 - DNA, 844 bp, Cannabis sativa
tgggacatttattttaaggactttgttgtccttttgaagcatacacttaatgaaattagatgacgtaatattagtacttttgctatcttcattcagctgaattgttgacactctttctttatgtatgtgtaaaaaaataatgtagatattttttcttattttctctttcttttgctatgagctgattaattaaaagaaaaaaaacttatagtggcaatgcactttaattactattatttatttttggtgaggagctggaaatctgataagccaccagattaatttagactataggtttagttgttaactctcctaattttttattaaaagctgatgtatattggtggctgagttgtattagttttaggggctgatgtggcaattatgtaaggacaccttggagtatataaggggagagggtctcatagaaagggcatggagaaaatgataagagttgagactcattgtggagagccccaatcctctcgtacagattagaataggagagagcaagcctctctaaatcttgtgatttgtaattttgtccatcatttgaataaagtttctgcaaagaactgcagctaacctacagaaattagttctatccactttgtatggtcaattataagagacttggatcaggaatgtatatgtattaggggaaaaaatgatcaaggacagaacatatgcctagcaggaatcttgaattctgaatcaagcattattcttgtattaatgttccttttgatgctacatgttctggtgctagtttttaattacttcctccagtaaggaataaattagactctaatggtctgcatgtaacttccaggttaattatgtt

SEQ ID NO: 91456 - DNA, 750 bp, Cannabis sativa
tttaaaaaatatcatagttttttatttgtaaactttaaataaagttttatttgtccaataattaattagtgttttactaattcaaccttcgttaaaaacataaacttttttttttttaaaaaaaaaatgtatatagcttaagatattttaagaccgcgcaacgcgcggcttttgttattatttataatgaataattatttatatgatttagatttctaaagagcacttaaggtgtatatcattattcatgattgagcatgttattatttattttttggcaccctaaagcaagtcaggtggtgtaaatgttggatatatgttttggattgtccttgatgtaaaaagaaacaaagttgctctccaaagttgtgatactttgaggaaggtgacttttcatccaaaacacactcatccctagattgactgaacataactaaataaaattagtcaaagaatcaaatgaaaaggaagatattattctgatacattttaacacaataattcacttttaagtttatactaacatatataattagatcactaccatcattatttatgagtctcattctcccttcttttggccgaaacttcttactattgggatcatgatgttgtaagatatattggacataaaagatacaaattggagactttggacagcaaaactgtaacgccccgatttcccgagacgtcacactagctagtccgtttaaaaccatttaagataaagacaataaaagacttctttaa

SEQ ID NO: 91457 - DNA, 963 bp, Cannabis sativa
  modified_base (804)..(810): a, c, t, g, unknown or other
  modified_base (918)..(921): a, c, t, g, unknown or other
actcacgggtgcttcatggtgcaggtatgaagactagcaaatgtgttcagccatgagccagaggtcttccagtagtgtaaatatcagccgtggtgtcttggcttcttggaagcaggatcaacttcttttccttatgtttgacaatgtaactttatttttggtaataatggttttgaaatttgttaaggaaattttataagcaggggatccccatacttagtggtattctaaaaagaaaaattcatatgtatattttaaactatcagattttaattaaaccacactttttcctaagctagcaagattagtgataataagattgtaaaagcacacacgtggcgttcctgagattcagggtgttacattgcacctcgcccatggaatgctgcaagcgccgagatagctcggcagatgaggctgcatatcactccttgcgccagcataggaccctgccagcagcctcttgaatggcacctaggtgcttgcagccgaaaatctgagtttttggtgattttttcaccaatttaaaatttttccaatttcaaatctcaaatatcaatgtaaaatatttttttgtatatttaaacctaaatattatttatttaaaaaattaataatatttaatttttaatagattattattaattttgatattttgatgtttaaatttaaaaattgattattttatattataaattatggtcaaattttaaaaatttattattttgtcaataattatagggttaatacgattttggaccatgtgttttataaaagttaccaattggaccctctgttttgttnnnnnnnaaaatggaccctgtatttttcaaaatggtacgaataggactcttaacttaatttatgacaactttttttttaatataaccaacttgaaaatacgaacagatacagaannnntaaatagttttgtcataacacttttagatcggattattatta

SEQ ID NO: 91458 - DNA, 1568 bp, Cannabis sativa
aaatgataaattgataaaattatcttttactttaatttttatatttatataaaaaaagatattaaaatcattttagctttattttatttaatctttttgtgatgtaattctaattatataacttttctaatgtaactcgtaattttcattacaataaatcaaacatattatgtatcaaataaacataaaaatatgagaatatgtgtcatatgaacataattacgaaatcatttttttttatcaaatccataaatgtatctatctgataaatactttgtacatttgttacatcttatttgacacattgactaggcctcatctttggcttaagttaatattataatatattttggtgttgaaataaaaatattacactaacaaatttgaaaacattattgtggttgtctaataaatagatccaagtgctattggagttatgtacactgattcaaaaggaaagtctcataaggcactaattcgtaacaaaggagaagtaatagtaagtgcaggtgcacttggaagccctcaacttttgctactaagtggaattggtccaaaatcatacctctcatcacaaaatatttctatagtcctttcacaacccaatgttggaaaattcatggctgataatccacgtaacagccttaatctcataatcccatttccattagatgcatcaacatcaggacaacttgtagcaattaccaaagattattacatagagaccaattcttatagcatgccattttcaccaactatgttaccttttggattttaccccaatccattatccccaccacaattaactctagccgtctttgcggaaaaagttgttgggcctttgtccacgggtgctcttaggctagcgtcagccactgatgtcaaagtcgcgccacatgtgaagttcaactacttctctaactcggttgacctagctcgttgcgttagcgcaacgaagaagtttggcgagttgttgaagactaaatctatggatcaatttaagtacactgatcttaatggtaatagggattttatgttcttagggccacttttgccaaccaaccaatcaaatgattcatccattgaagactattgtcgaagttttgttacaacattttggcattatcatggggggtgtttggtgggaaaagttgtggatggtgaatttaaggttattggaactaattcacttcgagttgttgatggttcgacttttaatatgtctccagggaccaatcctcaagccaccgttatgatgattggccggtaagttagttagttagttattattattattatataatgagtgtcggtggtgcccaacactttttataagtagcatttcacgattaattaacgatattgcctaaaaattatttttttaagttatatagaattcaatacttaattacactaatagaattatgacaccgtactaagcacgaataatactttgaaaaattttcttatataatttatatttttcattattctaattaagttataactataaacgcccacaaatgttttgttatatatatatatcaactgtttttaatgggtaatta

SEQ ID NO: 91459 - DNA, 532 bp, Cannabis sativa
ttaagatgtttattaaatataaaataaagtcaacttgatatagtatcattaaattatggtcatttaaatttataaaatataaattatatattattattatatatataaaggaaaagaatgagggagtgacgtggcggtctaaaatatctctaaaactattttctttttctttaattctctcatttttaatattttattataacataaatttataaattaatattttattattattttaataatttttccttaaaaatatctatgataaattaattaatttttttaaaaaagaatatatataataataaatatatacgtatatatatcatagtagattgcatatgaaatttaataataattgcatattaatattaaattaaataattattaaattatatatatacgtattcataaatatatatatatatatacgtgaagagtttttttttattttacagaatataaaaagagtggttgtttgttttataaaagaaatgtattatgaatcaaacattatgaattgaacaaaaaa

SEQ ID NO: 91460 - DNA, 870 bp, Cannabis sativa
  modified_base (27)..(34): a, c, t, g, unknown or other
aatcaacatacttgtgagtatatctannnnnnnngtaaaataatttccaacaaaatttccctcagaaactctaaaatccacactagcaaactgaatgtccattcaaatgtaaaaataactaattcaatctaattcacacttatttatatatattgtaaaagttatatatgtaagtaatattttaaagttaaaagaatatttatgtaaaaatctaatacatatagtataaaatatatttaaaaggttagtatataaaatatatagtctatacttatttatatgtaaaactatatttaaatcaaaattaaatatatttttttgtatatgtttgtttttttcctcttctttagatttgttatttttgattttgtatgttttaatttgtttttggagacattaaataacaataatttatttcatgttgttgttagttatgcgaaaagatatatttttaatcaatattatatatgtaaggaatcaaaaataatagatttaatctatactattgcggattggattgaatttgagctattgtatggattagattagatccaaaatataaaatttccacttaatacagatcagatgcacaataagaaaaaaaagtgtgaatttgattggatgaacatccgtagaaaacatattagaaagataacttttttttaggaaagagaacttcattgaaggttaagaaaagggcaaaagcgctacatacccgacggacaaaccacacaatctcactaggagtaggagatgagacaaatatcggctaaccactccgatgatggaatgagccataagctcaaggctcacataagagaatctaaagggataaacccccaaaacaaggcctaaggccaacaccacaaa

SEQ ID NO: 91461 - DNA, 685 bp, Cannabis sativa
  modified_base (412)..(424): a, c, t, g, unknown or other
gtttgggagaaaatgaggaaaaactttttggcatcaatcaagaagatcaatacaataatcttctccttcggtaatgatctacctgtacggactttcatttacataaaatagggtttttttatgtatttatatgttgtacttttgttattttatttgtatattatttttgagaaattctataatgcaccccattagaagagatacatcgatacatctctatctgttttagtatccgaaataattttttagtcaattttttttcatagtcatgtaaattatagttctttaagacatcctgcaaaattttaagaaattcggaaaagtttagcatgctgaaaattgcgttcaagctgtgtgttgcacgtgtgattattttttttatacgcgtgtaaaaaagattgtttgaacattnnnnnnnnnnnnntaaattattccgaatttctcaaaactttgtaagatatcttaaatagctataatgtacatgaatatgaaaaaaaaaattagactaaattttttttttaatgccaaaacaagtagagggtacatcagtacatcccttttaaggaggtgcaatgtagaaccacccattattttttatgttgtgttaatgttatttttttgttactttcatgtaatttttttgtttgtttttatagaataccgttaaaatgtaaaaaaaaaaaaa

SEQ ID NO: 91462 - DNA, 660 bp, Cannabis sativa
atttgaaggtcctgtgttgttgctggcagcatcagtgtgctgaggtgaattcgaaggtgctgtgttgttgttgtcagcatcagtattatcttggtccgaaatatcaatgtcttggttatgatgtgtatcctgcaagtttatattctggtttgttctttcaacttgaaaaggattgttagtgcaaggagtatgttgaatattattaggaaaatcatgaacatgagtatgagagatgttggtagagggaaaaaccatattagtaaaaggatcaattaattttgtttctgtgttgagtcgatgaaagggataaattctttcatgaaagactacattcctggaaacaaaaaaatcttttgtattaatatcatacaatttatatcatttgatacctttaggatatccaataaaaacacaagttcgagcccgaggagtgaacttatttatgtgagcagtgagagtattagcaaaggcaagacaaccaaaatttcttagatgctcatattttggtggttcattgtacattaattcataaggacatttattatccaaattagcagtgggagtgcaattaataaggtaagctgcagtcatcacacaatcactccaaaattcgatagggagtttggcttgaaaaaaaagagctctagcaacatttaaaag

SEQ ID NO: 91463 - DNA, 550 bp, Cannabis sativa
gttttatacataattataggtttattatatgagttctattaaattaatatatagttattcacaattacagtgatatcatcatagtagaaagtaattgtgattatttgtttcaaattatttagtctaacgatcgatttatcaatgcacttaatttatactgacgtgataattagcgatggagtttggttacacttggataaatggaatatctttttccaggatattactaaagtaaactagcatatgatgtatcgatcatacattagactagacaaatattgacagtaaaaatgatatcacaaatttactgttatatttttttctaaatcaatattgttacttagttaatcatagatcatttcatcacaatcctgagatagttaagctttagcttaaatgtattgcacgagttctttgacttgttcgttactagcttacccgtaggactagcccatacttacaacttgggagctcagtagtacaatttagtgagagtgttaatcatagatatgggcatctataacttctatatgaagtgaaacgatggctt

SEQ ID NO: 91464 - DNA, 5625 bp, Cannabis sativa
  modified_base (105)..(106): a, c, t, g, unknown or other
accatatatataatataaaaaaaattgaaaaaaaaatttctaattatatataaaaatgtatgagaaaaagttttttttttcacatattttgtaattaattaaaannatgtatacaaaattgtaaaatgccgtattttatataccaatactattttatattacatgagatcctacataattaattactaagtggtatcttttacaacaaaaaaattctataacattttctaacaattagctactagttgccataaaatgtattattatcatataatttgatattgattagtattaaaacagtaacatttcatggtataaaaacatgtcatactaattggtatctacgtaaaccacttgaggttagctcaagtggccatagggggtgcgtgtgtattggagatcttgggttcgagtcccaaattatactgatgtaatatataaacgcttaaataaaaaaaaaaaattggtatctacgtaacaacatgtcatggtatctagaaatgttgttgagtataatatcctatataattagctattaagcgataactttataatataatactaaaaaaaatatttcaagtgttcaataaaattagctactaactagtgaattgttcttactacttgatatttagtaatataattaagataatttgatgttattgtgtattaattcacatttgtcctgcctgttgaggctccatttgtcacttacaaaatggttgaattgtgttggaatagggtgggtattggtactgcagttgcacttgatgcaactttctttggctggtgtgctactacatttttacagtgtgataatgaaaagaaagcctcttggaagtagtttgttaggcaatttaagcggcacataatgatctagtttggaaaggtaacccaatgagaattgagaacatagttatttttgcaaaagggtatcttgatcaataataaaatgctcaaaatatgagatggattcgtcatggtctgatttttaagcgggtaatggtagtgagcattggacgagtccacaacttaaggtcaacgtagatgcaattttgtttgattgtggtcagagttttggtttgggtttggtggctaggaactctagtggattcctcattgaaggttatacaattttctctttcgacattgttgatctggagtttgctgaagcaatgggtatctatgaggctcttagttggatcatgaaccataagtggtagaaggtcactgtagaaactgattgcttaggggtggtgcaagcattacgtagctatatcaatatgatttctttgttttgttttgtcattcaaaattttaaaaaatttcttgctagtttgagtaatgtttctgtttattttgttaaacgatcagctaatatgatgctctcataattttgctctagagcttctattttatatcatggttgttatttaatttaaaatacattgtaactgatttgttaccttatttggtaatgaaaattattaattaaataattgtgatttttttcattaaaaatctctttatttataatgtaatggtattgtccaattaattagcaaatttatataaagaaacttgtaattggtcatttataattataaatcacatgattcgggcatattatatttttactaacagaattgtcattatttttttttttaataagtataaagttgtaaagttccaaaaataaaaaccatactaaatattgatttaataaatgtccacatatttaaaagggataagtggacaaatatttctatttttatctattaatcaaaattactctttattatgtctagcacataatttacattaacaaaggggtataatagataaattataaaatataatttcccccatttaaaatacaagtatttacttaattatataaatatttttatagtttagaaaaataccatagttttcagcccaaacataggcccaaacgggcagcccaataagaaactagggtttcttcatatctcccatcttcctcactctaacacagagaaaggctgaaatttctcagctctcagccaaatttctctgtcgtcctcactcctcgccacctttcctcgccgggatcttcaccatcctcctcctcactcacggtacataactaattttcacaccataaatcttttaaggctatttgggttttcgtttttttagagattttgctgtttagtaatttttttctctcttttcatggaattattttaattaaagctcctgttccttttgttattatctctcttttcggacttgtaatgtttgttttgaacttattgaagatgttgttgttgttgttgttgttgatatggtgtggttaggccggtggggtgtattcaaggggtgttctcatatgcttcgattttttagggttttctcatattctctatccctaactctttcgtttcctttcagttggctctcatattttagcttgataaaaagatgaggttggagaagtgttggttctgttcttccactgtatatccagggcacggtattcagtatgttcgcaatgatgcaaaggtgcttcaatctatttccttcaatcatttcttctttcttgtgtaattatagatacccttttctgttttttttttttcttgatatgcaagttaaagtatttctgtctttctgcaatgttttttctagtttggttaggggatttttttttgttgttgttggttttatttttgtttgtgatgaatgatgtttagaaagaacattaagatgcatgaattgttgttggttttataacttgattgcaagattgttgtagtttttggatcttcttctagctttttttgtcatttaaaagcttcgtacttgattttttttcttgttctcatttctctcgtaaagataatgcccaataaccattacttggcagtgctcccctgccctcctcaattttttcttttagttaggctgattttttctaaaagataatggcaatgtagctcaactaaaaagataaaatgccatcaaccacccccttaactgcaattccaaaacaaagaatctggctctgcattgtggatgccgtagccgtgtatgttttatcattatggcatgttggtcattgtttctaatcgctattgctgtaaactttagccttttattggatgttccttgttattattaatatttgttttgtcattcaacatttgaaagcgaacttgacacttttagaaggaatttcgcagcatggatttggggatctaccctatgatattgaaattttctctaatatttttccaccaagttttatatttggatgtgtttctgctataatacatagttatgtttaggccattttcatctgttgcttatcatcatgttatttgctgtatatttttgtcgtctctttctcttacaagtgagcttttctgtagattttccggttttgtaggtccaaatgtcacaagaatttcaaaatgaagagaaatcctcgtaaagtgaagtggactaaagcatacaggcggttacatggaaaggatatgacacaggtttatatgcttcttttctgctttaatcataatttcttctactttcatttattttgagatagatttgattgctggtttcttacgtcaagtaaagatatttatggttatgatctttgtttcacttgtttcttttccaggatgcaacatttgagtttgaaaggaagcgtaacaggccagagagatacaataggacgacagtggagaatgttttgaaggctattcccaagattctcaaggttaaagctgatagggcggctgaccatattggcggcaggtaattccttcattgtgatttggttagttcttaaaaaaacatgctagtggggtatctcttctttgaatgtaactgtaacttttttgacaggcttaaagggtcgaaacaaaagaaacgtaaggaagacaagagggaactcgagcaaagccttcacatggtcaaggctccaggtgcgttcaacgaagatccatctttcactcttcctgtggataccaagctcaaagtcaaggtcaaccaaaaacaagcagtggccatggaaacagaatgagtctgcaaagtttaatatctttatctcaactttatattttcctttaaacattgttcgggaaatgtctcatgtgtgggaccaaaattttgtcaaggcaatagtttatgtagtgttcttcgtttcaaatgttacataccagaacatgtttgtgaaacttttgttatttggagaggatttcttagaaggctgtaactgcacttgcaattgttgtttcattctcttcaaaaaaaaaaaattatgatcaagtctgaaaaaaaaataattattgggattgttatttatgctgcttataatttttggattttggtataaatagagtgaactatattattgatgtaacaaggtctgaggcatcctttatagtgtcaattttttctttagaagaatgttttcttgtctcttatttggtgtttgaggtttttatgatctatgtataaattttctctcattaccctttttgtttaatagacctatcatttcattaacccaaaaactagtttttcgactttcatgggaggacaataacatcatggtctgcaaggaaacatgttcacgttgttttgattggcaataataaatgtatgctttcttcaaaaataaatacgtttctttatttatatttttgaaagacagcaaaaaaacattgctgtgttgtggagagaaaataacaagttctgaaggcgaacaggcgaccattcttctcagagtggcatgacccgttttttgagagcaaaacctctgatgtgagtttctaacataggaaacaaaatccatcaatagaagaataatacaaaataaatgatttttttttttaaataattttttcctatttcttaatatgattcatttctcctacgttagtagaattttaatgatttatattcattttcttctcaaattacaaacgatgatgtatgtaaaaaaaatataatgtaatataatttttaggagaaaagtctcaaccacaaaacactataagagcagcaaacactctaaaaaagttaagggtgaggatttattcaagaatatcataatctatcaatagttcatagatacaactcgaataacctgtctatcaaatcacactactactagctaataattaataaataatgctagtttgccaaagaatgagcaacaacagtacaagatctataataatgaataaaagtaacaacttggaacatattacaaagactaacattgtcatccaacacaagtcccaaagaagtaattatagacacatcgctcttaattttaagagtaatactcaaacaattagattcaatataatgttgtcatacccaaaaaaaaaattgacactaaaccaatgcattgtgaatagccaaggcttctgtcacttcaggatcaaaacactcctctattttccagctccctgaagcctgaactatacccaatctgtctttgattaccattcccaaatcactatagcaactaatcaagtcaatggtcacatctatttcaattttgagacaactcaaaggaggaggaaaccatttaagcaccatcgaaattgagtgagagcttacctc

SEQ ID NO: 91465 - DNA, 646 bp, Cannabis sativa
  modified_base (93)..(112): a, c, t, g, unknown or other
tagtgacaacaaatattgagactaaaaactcatttagtcacaacaaattgtaattttcgtaactaatacttagccacggaccttttagtcacnnnnnnnnnnnnnnnnnnnntaattagtcacaacttttttatctcacaaattttgttgggactaaaataagattttttgtagtgattttaaattaatttgttaaaaaactattgttataaaaataaataaatagggtaatgtaaaaaaaataatagggtatgatatcttaatgtttcattatattttatccttggtatgttatatcaactttcaaaatttgatattttcttatataatatattttcttatataatatttttaataatattatgagtacttattttaataaacttttatattttcttacttaaaaaaattatattgtcatgtgaaacggaacaatcaatgacttacgataacaatatactaaggaattttaagaattcaagataatgaatttagtagtaaaatagaaaaggaacaacatcatgttgagttcgagttttgtgtaatgttttacatatcggttggaaccgcagcagtcatatctttattgatatcagtatttacaaggttacaagaatctttacaaacttctcatagattacgagaa

SEQ ID NO: 91466 - DNA, 986 bp, Cannabis sativa
gatttgttagatatcaaagtctgatgagcataatttagtacataaacaatcaccaaattagtaaaattaaatgaaatttgggataaaagtccttaaagtcaatactcttaatagttctgggggaattttaacggtaagaaaagtttaaagagcataatttagtacgtgtcaaaatttaagggacaaaaattataattagttaataaataattatgaagtttttttgatgtaaatagttatgaatataattatatatttaagtgttgtaaaaaaatatttttagtacgacacaataaaatttttgactaaaaaattatcatttaaaattttgtgactaaaaatattagataaaaattaaaacataatttataaggtgaagaataattaaagaaaattattaattatatatgttaattacaaaagcaaattatattattgagaaaatgaaaattatttctacatccacaaataagaaatttggaagctaggttgacaaacatgtgagaatattaattaagcacatagaataaaattcatatatacaaaagagaaaaagaaaataaaaaagaaagtgaaaaagaaagttcaacacacatgggaaaaaggatgcatataatatcaaattctcaaggcactacccttaacttcattactaaggtacaaaaacaaacatatataattactttaaaacccaaattctaaaaagtaaagtgaaaaataattaatatttataataaactatttagaaataacataaagagaaataaaatatatgtaaagaagatcattataagtttatatgattgataaataattagctatgcatctaccactagagattattttttaatgcttaaaacatcacatggggattttgatattggtactttcacttagaaataataataataacaataataataatagtaaattgtttctcatttcacaatcaaaactacaatgtaattgaatttgtgtgtaattag

SEQ ID NO: 91467 - DNA, 603 bp, Cannabis sativa
aagtaaaaggtttaattttttttttccttgtaattcgcctgtaattaagactaaagtgacaaatgaaaagtctcacctgtaattcgcctatatacatatatttcagttatcaaaaattgtgtacctagctattatgtaattttaacttatactgttatatacaaattttttagtgtttttttatattactcctatatgtcgagaaatactaatgtcgtcactcctatttaaataagatttcaggtgtagtttatcattactatatatataattcactacgaaaaagttactttacaaaatttgtgactaaaattaaaaatttgtgattaattataaattatcattctaatattgtaattaaaaaatttatagctaaaaatattaatcaccaagttaggactaaaactaaaatagtgacaacttatatttaaatattatattttagtcacaaataatattttttttatgattaaattcacatttaaatttatattgtgactaaaaaattgttactaaaagtatatttttttaatatatgtatacaatttattgtgatatttatttatttgaagaaacttatatatattaatattgaaatattac

SEQ ID NO: 91468 - DNA, 685 bp, Cannabis sativa
gtatatgtgatgcacatattatattgtagtataagtatatgtgatgcacatattatattgtagtataagttgcattgcaattggaagagcagcacttgaatttatctaatgccttttcaagccaactaatctttctttctttttggcctttttcctttttcatttttgctaacataaagtagtagtgtagggtagtcttcactagtagtgttgggcaatactatatttttatgtggacatgtaatgcttgaaaagtaattacctaaatgtgtacacaatatttccaaaactactaagcagtagcttttagctttatcttttttttttttcttttgagatcacttctatagaactattatagaactatgttagtaaatgtttttattacaaaacttgtagagaaatgacctttttagactatttattatttatgtttttgttatacctaaagttcagtaagcacataagagaaagacacgtgtcgagctgggaagaacgaagaactcaaacacgcaaacaaaaagtatacttagcatggaacaactcattggaaatataattcgcagggtatgtttataactcggctggctggatagctttctacgagacagaaacgtacgaactgctaacttatgtattgacgagaaaccatgtgggtgcacacgttcatgacgaggcctcaacc

SEQ ID NO: 91469 - DNA, 843 bp, Cannabis sativa
acatattaaattataaattaatacctataaatgtcacgaatttgagaatattatagacacgattatttcttttatgtactgctattgataaataacatagatatatttttttaaaaaataaaaataaaaagtagattaaatgtaaatatgtggacattaattttgtatatattatatattcaacctgcactaaaaaaaatcaacaataatataattttacatacatattatattgcaatactaattatatttatatagatagtatactcatgtgatgtgtggtataaggtatttaaatttttttgaaaaagttattttttattaattaagagaaattaatataaaacatgtgtgtaacaataaaaaacttatatatgtgtattatgcttatttattcatttatttatttttatattacttttttaaaaatatttaattttcaataagttagaaactatttaagtaaattagtgggaatgacatagttgaaataaaagtataatattatgactaattattaagtaaaactaagccttgttaaaaagatgacatttgtcattgaattaactagagagtgcaaaagagagtgtgatagagagtgtcatcagcactcttcttacattatacaagggagtccctgttatattagcaaagttatgtaatgaggattacattacaaaaaactaaataaagtaaagcttaaatgactctaatatccttttttatataaatataaaaattaaaataaaggataattttgtcaatttatcatttattccaatatccattccaataacaaaccattaatcttaatcaattcccattactattcttattccatta

SEQ ID NO: 91470 - DNA, 606 bp, Cannabis sativa
ggttaatgatttgtttccttctcatgaggctagcataatcttgggaattcctttaagtcgaactgcaggggccgacttttggtcatggacagcagaccacagaggtgtttttactgtgcgcagtgcgtactctttgctgcagaatgagaaaccagcagcccccacaccagataactcggggttttggcgaaaactctggcacttaaagatcccaccaaaggtactaaattttctgtggcgtgttatctctgactccctacctacttgtgtgaatcttgtaacaaaacatgtacctatctctagtcaatgcccagtttgcaaaaggcatcccgaaacagctattcattcactattaaattgcgagtttgctcactcctgctgggtattgtttggttggcctataaatgttgctgcacctaccagttttggcaactggttcgaaaacatgctgctggtgtgtgatacagaacaggtatgccgagcctttatgcttgtttgggccatttggaagtctcgaaaccaagttctttggaagaaacgaagatgtactaccaacgatgttttagcatcagcctccaccacccttgatcattggagaaaagctca

SEQ ID NO: 91471 - DNA, 557 bp, Cannabis sativa
ctacactttatttaatatgtataaaagccatatgcatacaccatgaagcagtaatatagtatgtatgactctgaaaaattcaatatcaaggaaggagagaaaaagatttaggttcagattttgataatgctctgctatagaaaggaattaagggctagagatctgaacggaagaagtcattatattccgctgtcacataaactttatatgtgtttatttacattattttagaaattcatattaagatgttaaacaacaagtagtaaatctaaatcctagtaaaataattctaacaaaaaaaaagaagaaaagtcatacaataattcctgctctcttttatggattcatgaccaaaattataaggaatggaaaccccaaaataatactaaatttcacaagtattatattttctaaaacatcctcatcattattatataagggtataaaatttagtggtagtattcacatgagttaattttctaacaaacaaacttacctttattttcgtgcatcattgcctcgatagtacatgagagaaataacaacaagatggcctt

SEQ ID NO: 91472 - DNA, 507 bp, Cannabis sativa
tttaaattttgataaaggaatttattcatttgataatgtatttttatacttatttttaaaaatgaaaccgcacaattttgtattacagggtttagctagtttatagtgatttttaaattagagaatactggataattattatcgaataaaataattaacgaaattattctttgttaataactattatggagaacttgataatataataaaattatttaaaataaaataatttgctgtataaatacttaagtgttaaataagttgttatgtgataattattaattggttcaaattattaaatttttatttttttttaaaacaattaatttaaagatacgaataaatgtgaataataacttaacatttaaaagttaggtacttataaagttctaaaaatataactatcaaaaattaaacgtatgtatttatttacaactaagagttaaacttaaatatttataccgcaagttactattttaaataattttattatattatcaagttctc

SEQ ID NO: 91473 - DNA, 512 bp, Cannabis sativa
agattatgggttgcaaagtcataacttagctctgagaacatgctcacaatatcgtgctcagatctttgcttgcggcgagcgcaataacaaccccacatgcctctcgaagtaagatcgtctaaaggaagcacttgaggtgaaaacaagagggtgaagaaggcatccggagataaccctcagtagttagtggacactcaagaacgtgtgtacatggccacacgacaaaacactcactaccaagaaccaccactcttattccaagacagtatccagagagaccccaataagagatgtgagtatcataatgacatccaacatataagtaatgaatgcaaaaatttgaaggatgaaattgagagcctaatatgactgggacacttgtatgagtgggtaaggaatggcttgccacatatgagggaggcacaactcaaagttcaagttgttggtttttatggtccatatcttagttaaaaaagcaaaagtgtatcttatcaaaaattaatttaatctaa

SEQ ID NO: 91474 - DNA, 605 bp, Cannabis sativa
taaatatttttatatgataatattagtatttagaatcattcaaaaaataataaattttacatgcgtataaaataagcttcaaaataatttaattttgtatttttaagatatggataagtaaacaatctaaattcatttatatgaaggcatgcatagattatacttatttatatctcacaaatttgtgagaaaatcgatatattttatagtgctcaaaattttaaataagttgttttaaagtgtgttatatgcacataaaataagttgttttgaaattaatttttgatattgtaaattacttaaaatttgtcaaaaaaaaaaaatatagtatacaacttaaaattcatatacaaatattttagggtaattcgcagcgaaatctttttatattttaattttatacacttaactctatatattttaagtttgtttttatttgcaaatttgtggcgctaattaaatttcactgttaaatgctaactaaattgtcattagatatacttgtatatacgtagtatattttcattagattcgagattttagtatcatgtgtacacaagggtttacagtgacaatcttaattagcatttaatcgtgaaatttaa

SEQ ID NO: 91475 - DNA, 688 bp, Cannabis sativa
aaagtttgaaataactaaaacaacaacaaaactaagtaataaaaggaacaaaatatcataaaaataaatatacaaaacaaccaaatgctacaaattcaacaaaaaaaaatccaacaaaaatataatgaaaatatgtatttttaattatacataaatatatataaataaatttttaattgttgtgattgttcactaagtgaggaaacaaatgcatttggctcaaccccataactaccaactgtcagttatgacagttatgatcgggctcaaccaacacagattatttatagccatctgccactgctattttgagacataattgagggagagatttcagaggtttcatgagctagtttagtgtgcaagaaagagagaaattgagattgttgtattggcctatggtgtgattaatcacagtgtcattagtgaggttgattgtaaatgaagttatgcttcttgagtgattgtgtcaagaatacattggtgatcaacatttgtaattctttcttctagctcaataaagtttgaatccattggggttgttctggctaaggagtaggcaagtgattcatcatcactttgtttgaactttgtaatttcttgtgtttgattctctccacttccttgtctaaattgttcattgttcattagttttggatcaggtttttcttactggtttgctactagt

SEQ ID NO: 91476 - DNA, 978 bp, Cannabis sativa
caaaaaagtcatcagagttgttgtcgacgtcagagaattcgtcgaaattggcattgttgccagaaaaattactgaaaaattaccaagaaactagtttcttgaagaagaaatcggttggtttcttaatgaagaaaccaatttcttgatgaagaaaccactttcttagttattttttcgttgacaatgccaattctgacgacttttatgacactagcagctactctgccgactttttcggcaccgacagcaaacttcagaaaagtcatcagaattggcatagtcgtcagaaaaattaccaagaaactgatttcttggtgatttttttggtgatttttctgatgacaatatcaattctgacaacttttctagcgttggcagcaactctgatgacttttctgacaccggcagctactctagtgacattttcggtaccgacagttaactccaaaaaaatttgtcaaaattagcattgtcacttgaaaaattaccaaaaaaatctccaagaaattggtttcttggtatttttttatgatttttccagtcataatgccaattccgatgacttttttagcgctggcagcaactctggtgactttctcgatcgtgacagcaactctgacaattatgccaatttcgatgacttgtttcagttaactttattgtttagtatttatatttcattatcatagtgtcgaatatagtttcacagggttcataagtttgaaactggttttacaagttttaagggttctgtaatgagggtgctctattttatgatgttattgtatatttttttattttaaatttctttttattattttatttctatgtttgaaactggtttacatacttagattttgttttagatcattgttgtgcattgtgtgttaaattgtttatatttatgagtattttttttgtgtttttttttttctatttggttgattgatgaaactggtttcaattattttcattgta

SEQ ID NO: 91477 - DNA, 693 bp, Cannabis sativa
  modified_base (67)..(69): a, c, t, g, unknown or other
  modified_base (202)..(205): a, c, t, g, unknown or other
ggcttaactaacaaattaaagaacataaataacactcttgacattgaacataagcatgtcaagattnnnatcttttgatctaagatcaacaagtgatagagacttagaaagatatggtaagattataatatctttaccaagatcaatatcggtccctatccaatgtatactccttacatccgaaactagcatactttgccannnntctggaaagaacataacacttgtgcaaggtgtaagtatactttatcactgatcatcacgttagtgtaaatccagtgcactgatgaatcagggacattaccttttgaagcatataatcactattacattccactgtgttcacaccactgtaattgtgaatatctatttgttctggcttgaagagattttgtacacattaaaccataacacatgaaaactacatgtaaatataaatgatttctaatcttctattgataacaaatcaggttgtattgaaatgggttttatttagggcataaaattccaaccaatatttgcttgttcagcgagacatgaaaacctggaagttgtacatggatagagcatccaatgaacatggctttggtgcaggggtgatactaattttgccagaaacctttaagtttcattatgccttaagatttcaatttgacacttcaaataatgaggctgagtatgaggccttaatcg

SEQ ID NO: 91478 - DNA, 1056 bp, Cannabis sativa
actcaattcatcacccccggtccagtgtggtgtataaataatgtaacaacaaacatagtttcaagacaacagaacactacaataacaattaagtattataactctcgtaattagttattttgatcgaatcttggaagttggaactatatatgtatattattctaccaattatttgaaatacatttttcaaattctctcatttttataatactataacatatactactaacacttgaaaaaaaaaatacactactaactttgttctacataactattttaatcttttctattagaataatatctttaaaactcaacttaagacaaaaggaagaccatgaaataatgccatctcctccacaacatgaggctcgaaggtgccagtcaaggaaacacgcaaaaaaaacaacactatctcattggagaccaaagcaaccactcccgttcccattttcaaatcctcaacacagaacccaacatcaacaaaaagattaatctcactcaatattaactccccaatagtgacaaaagtagatattagccccgaataggtacgcgagtcactatattactttccaagagcttatggtcttgaacggaagtactgtgcctatgccaaatacgccaacaaataacaataaattcctccaattcgtatttactcaaaattatcaagatttataaaacattgaaaaaatatattaagatttataaaagaactccctttagctcattttttatattgagaaaactactacaaggttagagcttttctctataaattggagcttctgacacttgcttatttctgtaataccatctcatgagaaataaaactcgaagtagacgttgctccattactgtcgcggtatagagagtgagtactactataaatttactgtgtctcgtataattacttaacatttatttcattctcgccaatctagcaagcgggtgtagcttagaagtctagtccatatttttaagtcaacataaactctctcttagaggttaataatagggaaaaaattaaagtttcttgttcctaaatctatagct

SEQ ID NO: 91479 - DNA, 680 bp, Cannabis sativa
gaagagaggacataattatattttggataccattggcgggaaagtttttttaatccatagacgaatttcttaagcttgcataccaaatgctcaccctcactagaggagaatcattctggttgtttcatgtatacctcctcctctagatgaccattcaagaaaacaatttttacatccatctattccaactctaaatcaaaatatgagcaactaattccaagatgactctaagggaatttttctttgataaaggagaaaagttctctgcatagtcaattctttcttcttgactaaatcctttagcatcaagtcttgttttgtatctcccaatgttgcctaatgagtcctttttagttttatagacccatttacaactaatgaccctcgccacattaggcaactttacaagtttgcagactctgttgcacttcatagaatccatttcatcatccatgacattgtaccacaatttgattctctcttgttcatagcttgtaaaaacttttttggatcattttttgttccaatgtcaagttctagtaaatataaaacatagcctttataaacctttgatttgacaagtctagtagatcttcttaagacttcaccaccgggctcttggggagcagcaactggttcagcaggttgtttaataattgtaagaaactcttgaacatctt

SEQ ID NO: 91480 - DNA, 581 bp, Cannabis sativa
tttattttgttgttggtttagcttgttttagtagttttttttattttgattttttaggattgggcttgttaatatagctgctattgcacatggtgttaaggctgtgcataagatggttagttttttttaatctttttttatttgttttagtgttgttttacagttgttttgccaaaattatttatttgacattgatttcactgtttttgcttaatctcgccgaaattaatgattattttctgggtatgttcgtgttgctgtagtagttatgtgcatgggtatggaagatggagacattgttcttgatattcggtgtttacagtataaaagaaaaaaaaaaaccagaacaatataaaataattttcccgtgtgactattaaattgtaaacatttgtctaaaacccaatatttttgtaaggttcctttatttttttaataaactcaacttttcaaggggataacgacttgtcacttccatctgaattctcaaagcctattttcaattctattactgttgttatttattttatttttttcaaacctttcatattctattttctatctgaaaaatcgtgtttttg

SEQ ID NO: 91481 - DNA, 1007 bp, Cannabis sativa
  modified_base (691)..(698): a, c, t, g, unknown or other
actatttgagcttctattaccaacgagtcattacaagggaagtgcacgtgcatggcgtcgtcttttgtaaaagtcatgggaaaattcatcattcttggacactgggtaagtgattacaccaagtggcaagcttcgccttgattcaactcattcttctgtccattctgagtgcctcttgtagtatgagatccacctgaaattgtcgttgcatgtccatctaaagctggtaatgcagctccaggatggtacaaatttctaagaccaaatgctacaactactaccgctgctagagtgttttgggccccctgaagggcttgcacattcggagcttgtattccaagaacttgtggatggcctactccctgaggaggatttatggaaccatactgtcttggaacgaaaaagctatccatgtgcaactgcctatcctagatatgtgactaggattctcacccaatttattaaatgtctcttttgtactaccctgtaaagaccgcttagctttaatttggaaattagcaaataattagggctttattatgaaaattatttattaatattgaattaattatttatgatgatttatttgaatttagaatgaatttttatgtcacatatagaaatttcataattttgcatattttatgcccgacaacattggaacgcggtgtatggctattagaatcacatnnnnnnnnttttagtatagcgggacaataatttagacattgggattgtcaggaatagtcgggatttttgaatttcccaaaataccccttagtaccattttatgacttttagtgtgggaggggcaaaatggtcattttgcccccattagtcttttgtcttttgtgagttttttttaagttaataaatcagatttttattaaccttaaggctgattttaagtatagtaaaaccattctattttcttcattttagaaagattagaaaaaacataaaatttacaattctctctcaagctcgctctctctctttctctctct

SEQ ID NO: 91482 - DNA, 1272 bp, Cannabis sativa
aaaaaatcgacataactttaaaataaaaaagattttaacaaaactaatatagattatactataatttttaagtaattggtttttaattttaaaaaatatataaaaaaaaataatgtattaaaagactataaataataaataatgtaatagcgtcatttctttacaaattttgaaataaaaacatttacttatataattttataatttaagttcattttaccataatttacatttttcaaacaaatagaagagactctagtcactaagaaagaaggaagcaggagccgttcaaagcctcaccttataaggctaggctaatttgaaaaataaattacgtgtagctataaaaattaatattttaataattaaaatagggtgaactaagtattttctttttttattgaatgaacttagtctttgggtgtatttacccttttttgggccccattataaagtcggtaatttgacattggaccaactagaatctaattcaaaccaattttaaatacggttcaaacatgataactttttactaagttctggaccaaatcgacccaaattatgaggaaatgtgcttagtacaataaaaacggcaaaaaaaaatatatataattcaacgtatccgaattcagtattcaactctttcttttgttttatttgtattcaaccgattttttttctttttttgaaatggtattcaactgaattagcaatacttttgccgcatgaatgaaaatgtaaaatttagaggttaaaagcgaagtaatgagagagagagggaacattctgtgcatttattgtagtagtcaaagggtacaaggaccacactgctacaaaaagaataaataacctagaagcagcgttaaacaaaagaaatcttaaaagatgagatgaatgaaaaagagaattacccaacccacagaaacaaatttacatcactactaaacccaatctctctttctactgcaggaaggttaccctgccaaagaaggaaaaatactccggcccgagaaccttaagaatcatcaaccgtgcgtattgccccaatttgaggcctctgcacaaagaatataaattttgttgtgtttttcaaaaaaagaaaacctaaggttaatctgtcactgctcccagaatcatcaatcagaatatctttttcgtgttgttaggaccccattagagaaaatgaagttagcaaagtcaggctctagtttgatattgtggctccagagagcaggtcaataaaaaaatggtgtgtaatctaataatgaaatg

SEQ ID NO: 91483 - DNA, 563 bp, Cannabis sativa
agtaaaggagtgagctaaaagcccacgaagaatatgcttgtcatgcaaccatacaataacatataacattaatgcgctaattaaattttaacaatatcatatacattatcttatgtaaatttttatcatatatgtccatgctaactttttatattatacatgtatagagatcataattccaatatcgtactcatataaaaactataaaataatcatgtcgttaccataacattgacatatcataggtattgcatgcataatctgggcctaacttgcccctacaataacctatgcatacgtagccctaccattattataggatatggtatctttacaatcaacaaaagcatcattgtatcataccccactataacaatcttgtatataactcagaaaaatataaagtagagtatctctacattcaacgaccttaccccgtatcatacctcaccatggtcttgatttatttataatattaattttttggattcattcaagtagtatatatatactaaacaaaactatatcaaactgctaacaaataatattaattaattaaaata

SEQ ID NO: 91484 - DNA, 689 bp, Cannabis sativa
gaacttgcacttttgaatgtggttgagcgtagggtggttcataaaatagctaatttaatccaattcccacgacccaatataatttgcaaagtgcggatttgattggattgaaaaatttaaaatccgcacttgtgcggaatagatgttgattgacatgtaaaaataactgatctatatttataaaaaaaattaaaaaactatatataaataacattttaatcttaagaaaatagttatttaaaaatctaatacatataatacaattatatttcaaaagtgaatagattttccattcttatatgtaatttttttctaaatataattttaaacaaaactaaacatttctttatacatacaattttttttttctttctttgaattttttattttatttattttgatttgatgttggaggcataaaataacaataattggtcttactttgttgctatgtgagaaaaatatatatatattttctttttcataaatattaaataattttatattaaaaagtagccaatcttaagtaattgatccaatccgcacttttgcgaattggatttgagctattgtgcagattggattggatccaaaaaataagatccgcatttagtggggatcagatgcactatgaacaaaataatacggattagattggatgaataccctagttgagcgtgtttagattt

SEQ ID NO: 91485 - DNA, 658 bp, Cannabis sativa
ctttattgatatttaaaagataaagattacattaaaatggagttttatttgcggcataaaacccaacacatggttgttacaaaagccctcatgtacctcaaccatgaggagtttggattcttctttcgtgacacacctcaaaagcgacattaaaaagcttattctatacattactccatccatgatgatggagcgagctacttttctcattaattttttagctttgtctcggtcaggttaaagaatacattgctctagatactgtccaatcgtggtcatccatgatgaactattgtcaatcatcaagatagactccaagtctttgttgattctctatttggctaggtatttgatgggaactacactaagagtatcaaaatcttttgtactagctagtttagctagtgagtctgcatttgaattctgttcacgcggtacctgttggatggagtggtgtttgagctgggctaataagtatttagatttgcttaagtatgtaatcatgtttgaccctcgggcttggtactcaccaagaatctgattaacgaatcactgtatatctcgagtgatttggctttgattagaagtcatttatgtttacatgttgttttcatgtttaaggtttattatatatatatatatacaaaatctgttaagt

SEQ ID NO: 91486 - DNA, 905 bp, Cannabis sativa
  modified_base (874)..(879): a, c, t, g, unknown or other
gcgacagtatcgccagtcaaggcataatcgagcttgcattaaccttgggcgaggcacccctatccgccatagttatgcaagactttctagttgtgaacctgccattggcttacaatatattgttgggtggttcaacattaatcgaactagggccagttagttcgaccaagaacctatcccttaaatttcaaacaccagggggtgtgggagtggtgcaaagcgatcagatgctagctcttgatcgctatcgtatagagctatagcatagaaaagtcgatcatcaattaatggcagttttggcagaagaaagcaaaaagaaggatgaggatcttcacccctaatttcaagatgaaagaaatttattaaaaccaattgaagaattggaagaagttattctcgacccacgaaatcccgcaaagtgtgattaaattgggaagagcctggacgagtagctaaaatagcagctaataagtttcttaagggccaatcaagatcagttcgcctggagccatggagatatgatagggattgaccctagtattatctgccatcatttaaatatcgatccaaactacccagcaaagaggcagaaaaggagacccttggattccaagagacaaggggcgctaaaacaggaagtggacaagttataagtcaatgactttatacgcaaggtgttttatccctcgtggatagccaatcctattctcgtcccaaaacctaacgaaacttggagaacttgtattgacttttctgatctgaataaggcgtgaccaaacgactgtaatttatgtaatttatggatgcatattctggatataaccaaataaaaatgcatgtcgcagatctggaacatgttaggttttatgccctnnnnnnaactccatttcaatgtaatctatttt

SEQ ID NO: 91487 - DNA, 587 bp, Cannabis sativa
cattttgcagccatctatatgcactttttattgtatataaaaatgtagcctctttgctccatgtccaacagacaaaggcagaaggatactaagtatcaaagttcgatccctttcatcaaataattaacttaatatcccactcctttttatctacacataagagggttccaactgaatgattcttcaaaccaagatggacagtacaaatataagagaaatcatcatcagggtgccatggatcttcagtaattgatgtttgaattctactagcaatactctttctagcaccagctttaataagatcttgaattccaagatgtttctccaaatataactagaattatttcctaaagtagtagtcaagaaagaaccactagggaaatatatagccttgaaaactctactaactaatctccatgcttgtttgccaagtagtgccaaattgtcctgtctcaaatccttaaaaaaaattttaataacttataaatataaaaactttacttttattaataatagtattaagaggaaattacactctatattttttttatattgttctattttatttttaccatcttttttaaaat

SEQ ID NO: 91488 - DNA, 1292 bp, Cannabis sativa
ttagtttccagaaacagatatggcgactggtggtggggataatgaggcagatgtgagagttttggaagatttcgacaagacaagacaagggtttcggttgaaataggtatggcgtggtacttctctatcgttttacttgattaaaatctaggattatatcaaagaaacccacttcaattcaatcgagaaggatttttcatttggtggatcgaagatcacatccatttgtacacacaagtgtatatgtaattatttctatttttataagatgatatgtacttgttctgttctgttagaacaagtgggggacattaggagttactacgagtgagtatgtatgaggttgtacttttgaagtgattttgttggtgtcagtcaagactcgagaagccacttcagttattgcaacatttgttggtgcacaaataagagttgtgtagttgatctttaagaagtgtagcattgattttcgtctttcctgtcccaggtggaccccatataagctcaaaaccatctctgctcttgcagtgtatcatgtgaagacaagacaagcaagaactgcactagtctgagactcattcatattgcatgcatatgtcaagattgcatgacatatgcaatgccttccaatccaaacccttttgttggtggtcaaattccccaggaaaacaacaaacaatgatgtcttcatctgcatatctagttcaaatttctttgaagacttggctttgaaattagtagtacaattagagttactatcattccccttctcatcctcagtgactgatataaaggcccataatcttcctgtttctggtttagcattcactaaaatcatgcatcatgtctccaggcaaagttttatcattgaatctgttcctccagtaatcaacttgaacttgataaactttttctcaaaagcaactgccttggcataaggtaatctatgatgcagcgtgtccatacttgagtataactgcgctcgagtttcttccaacaaagggtacacaaaagatcccaaataattctgaaccgattcaaatgattcaggaatttttgaaatgtaccaataatatatacacataagaaatgatttgcttacacatcaaaagtatatcccaaaatggaaatagcaggaaaaagaatatgaggactaaattcaaactacatagacaaacaaaacaaattagtagttatataaaccacatttgtacctattaatctcatacttgcatcaaaagtaagcaattactaaaattggattttcccctatttcataatctaatccatgc

SEQ ID NO: 91489 - DNA, 902 bp, Cannabis sativa
tcatgggttcaaatcccataatactctttttttgatattttttttaatgtatttttgagggccccaaaatttatttcgtcttgggcccatatattttcagggccggccctgcctaggtcggtctgcaatgacgacgatgacagtgctggcttagtggtcctcggcaacgacgacggagctggcttaatggtcctcggcaacgacgacggccctagcatgtacttgcatccatttgagagagaagaagtgtaacgagaactggaaaataaaaacgaacgaaaaagaaagaaaaaggaaaaaaaaaatacattatgttcacgtagataatccaacatggcatttaacagctaaatttggatgaaaactgtaaattgctaacgttatcgtggttttaggagttttaccgcaagaaattaattttgaaagttaattgcaagtaaaataatagtattaggggttttacgcaatatacccaatttataataatggggtgttctaattttatttatatatactctaattttcaaaaaaaaaaaaaaatagccagattttacctccaaaacccttacccccaaatccaaaaaaaatcctccgccaccactgttgtcttcgtccctgaaaagctctgccattgtcaataggtttgtgcttcgttcttgaaacctcaatctctgtgaatgtgttaatggtccacaatcttaatcctatctacgtttccattgcagtaggatatttctcatgaaatcaaacttgttgtcattatagttctatcagttgggtttggttgtagatatggttctgttttgttactagtctcacccatatatgtaggcttctcacttgtttatcatcttgttcttacccaaaatccccaaactcactttgctgattctctaccattt

SEQ ID NO: 91490 - DNA, 630 bp, Cannabis sativa
ttttcattgattttgaaaagaatgttgaaagaggctccattgtccaccatatatcttgttatagtcgtattcctaatttgtgcagtaacgaccaaggggtcattgtgtgagaaactatcttggattggatcttctttctaagaaggagatcatgggctctataatcattggttgcatagagcctcattattttcctttcacgaagtcacttttgggctcgtgatagagtgtttgagcatagcgctctatggttttgttggtcttgcctgcaatatggggttcgtcaatgacgccccctaagtgttctgccactagaggtttgtgtataattggtggtacctgcctgtgcgcctgagggaggccagcatttgtggatggaggctagcctttggacatggaggtaagcctccagatatggaggccagccttcagaggtagagattacccttcagagatggaggacaaccttctggaatggaggccagatttctgagatggaggccagccttcggaggtataggacaaacttctgagatggaggccagccttctaggatggaggctaccattctgattgttgggttttgtgcccttaataaaacccatatacatataatcagatttactaatt

SEQ ID NO: 91491 - DNA, 548 bp, Cannabis sativa
accgcttagtttggttttggatattcgtaaaaattaggatttaattacgtaattagaataataattatgatttatcattttaaggagatatatttgaaagccatatatgaatttttctattttgcaggttttgtgcccggcaacatcgaaacgcagcatttggccattagaaatcacaatttggtattttaatagaagtggggaaatgtattagatattgggaatgtcgcgattagttgagatttatgaaatgaccaaaatacccctaagtgacttaaaagcttttggtttagtgatgggtaaagtagtcttttgccctaggttacttttgtcttagtgggattttaagagagatatattatgattattctttgataacttagttagataaagtttcgtttatcccatattattaaattatgaaaattagcaaaaaatctatattttcctctcctttctctctctttctctcgtgaaccctagaagccaacaagaaattaaggtttttcttcagcaattcagagattaagtgtaacaccctaactagc

SEQ ID NO: 91492 - DNA, 522 bp, Cannabis sativa
tttgagtgattctggactgatagtcatatactatggccaaaacgcaataatcatatcatagtgcgccacgatatgaccctcatgttcctagggcaacaataattggaagacagcctgtgatgatatagattttgaggtcggctaggtggaggtgcctgatgtcggccatggggcttaaagctgtaatatctagtctgagatggaggaggatgtgcctattaggaggaggacttacagtacttgtgctatctttcccaattgctctctaggcggatatcacattaatgggcagccaatgaccacgctaggccaaccttcaatgtcttgattctatcttcagagccttagattcatgacgttggatcataggaagaaaggtgggtctctcccataccaattattcctatcaatacttttgacaggatattggctagtggactagtgagacgtgtccaatgtgagatacccacgacgaatggctagttacttctgctagtggcagtgttgccgcgacaccaatac

SEQ ID NO: 91493 - DNA, 696 bp, Cannabis sativa
ccccatccccgcttcgggtattgaaattgtcccccaccaccgccccattaaccactaagatggggaatccccaccccattaggtgtgggtccccgcggttacccatctataaatttccatctctactctcgcctcacctctatgtaggttatggttcaggcagggtcgactctagacataggcaggctaagcctgtgcctcgggtccacacttttcggaagctcaaaataaaaaataaaaaatttcattacatttttatttaagtaaaattaagtatattgtaaacaacaaatagttataacttagttagttgaagtgtatgacatattacataatatccaagtttcaaattcataatacttttttttaatattttttttttatatatatttgagggtcctaaattctaattcgttttaggcctatatattctcaggaccaatttcaaggcaaaaatcatatttattctaaaatatattgttttaaaaaatagcaattccattattgttagactttggccaatggaaattaatggtaatttgaaatgtttgtacatttggcccacgatgttcagctataataatataatcaaaagggaaatttgaatttatatccatattttgtacttaaattaattttttaaactaatacttatatctattgaaaaagtaggatcacttttccctataccctaaa

SEQ ID NO: 91494 - DNA, 714 bp, Cannabis sativa
caaaggagatggtatggcatcatactgggagagttagagaagatggtgtcatgtgtcatcctgtagatgcacaaaagcgttgaaaaactttgacaacaggcatcccgattttgcgagagactcaaaaaatgtttgcttagggttggctgctgattgatttaatccatttggaaatatgagtgaatcgtaagcatgtggcctgtagtgttggcaatctataatcttccatcgtgcttgtgtatgaaggacaacaacttcatgttgactactcttattcttggagccaaatcaccaggaacggatatggatgtatttttaaggccattgatggatgaattgaaggaattatgggtgaatggggttgatataagagatgctactaccaattcaatgtttaagatgcgtgcgactctgttggggattgtgaatgattttcttgctcgtagtagtttatttgggtggagtggtcgaggttacaagacttgccctacatgtaacgaagacacttgttccatgagagtgctcggtaagacctcttatgttggccataggaggtttttactgtctaatcatcgaatgagatatgattgcacatttgatggaacaattgagaagagaatttttcgttttgttccctaaataaaacccatttcaataaaatcagatttactaattgttgaccgaggttttcggcaactaataaaatatgattat

SEQ ID NO: 91495 - DNA, 619 bp, Cannabis sativa
atattgttctgtgctgaagtgaaaagttgtccattgttttatataacagagaaggaggtctcataaattttcatatatgactgttatgtttgtgtgtgcatattaatataccattaccatctatgcttatcaattactagtttatatcgtgttaatcacattttcttgagaaaagatatatgtatatatatagtaagagtggttaatttggatttttgctattgaatttttacatgatgtctctcatattaaaaatttacttaaagacttttgtctaattttgttaaacaaaatctgacgtagatgaaaatttaggggacacaatataacacatgttaaaatttcatggcataatttaataaatattaatattcgggagcaaaagttagtatatagaaaatagctataataacaaaattgatgaaattagacaaaactccttaaatttaacaatcttaatatttcaaagaaaatttttaacaatctgaaaattcaaaaaatataatttagtgtatatcaaaattgaaaagataaaaattttaattaaccatttatattataacggcaactaattttatttaagtcttagtattgattttcctccaaaaaaaaaaaaaaa

SEQ ID NO: 91496 - DNA, 1344 bp, Cannabis sativa
gttgaaataatattaaaaaaacaattttagtgaaattacattgctatatatatatttaaatatatatgtaaagtaaaaaatatatatatttttaagaaaacaactccatgctctaattcatgtgtggatctacctatgtgtagcacgggtttcacttagttttagagagtcccacattgttaatgtgtagaaagataatagaatatataagaggaaggagctactcctccgattgccaatttatttaaagatcgaacctaattcatcttatccccaaattttaacatggtatcagagcagaaaaataaacaaacaaaaaaatctctagcaactatgcaacccaaaaaaaaaaatcgatcgaaatagggccaaaaaaagccaccaaaaattcaaaaaaactgatctaagaaccaaaagtctaaaaataattctacttgtgattcggtgatagtgagtcaaaaaaataaaaaaaagagccaccaaaaatctaaaaataccgatccaaaaagtagagcaaaagagccacttgtgatcagagatagtgaaccaaaaaagagccgcttatgatcgagttgtccaaaatggtgagcataaaataggcgccatcttgagggggggtgttagagagtcccacaatgctaatgcgtggaaagataatagaatatataagaggaatgggctactcctcccattgccaattgattttgagatagaaccctcattcatcttatccccaaattttaacacttaatttatcgataaagaacatattatttttgtagtgataatgtatttcctatcgtagtaaattgtactgagatttgttttaattacaatattaattaattaagttaacgtgtgaatatatagtgtgatgaaaaatttagacatcatcatactaaaaaattttatggacaaagttcacataaagatatttaatctagaataattctaagaaaacactgaaattagatgtataattatgtgaatttaattttagccttattatattttaaagttggaattacatcacttttaatttttaaagttatgagcaatcactactacaatttatacatttagtaacactctttagtgacatgcataaaaagtgcatgtcattaaatgttttaagtaatttttagtgacacatattcttagacagtaaaaattttacatttgtgtttcataatgtgtgtcactaaaaatttatttatttatttatatttaaaaaaaatatatgtgtatatagtgacgcgtagtgcgtaactctaaaagtgttcagagtcacacaatgtatgtcactaaaggttcaataaaaaagtaataaaaatgaaaaaaaaa

SEQ ID NO: 91497 - DNA, 507 bp, Cannabis sativa
aattacaacttctttcaaaactttcacgtctgaaaatacataccggaatatttttttgtggcagtgttcgttatagttacaatatcctccctttaaatttttaaaaatttagaatagttttcaatgttaacaagtttgaaattttttaaacacgaagggactaaaataccaagaactctgctgtcaatactgcaatgtaaattattcaaaaaatctaaaatttttacagaaatgatgttttaactataacgaacattgtcatcaaaaaaataaaacaaaaatacttccacatgtttgtttttagatgtgacagttaataaagagtttgtaattggcattttttgtattctttagaataccatgtgctataaataccacatgtttcccacaatatagaaaacagttaacttaatattgatcattctaatttagcattttgtgtcaaatataattttattttatttttttttgccaaatttaactttatatttaaaatatgaactacta

SEQ ID NO: 91498 - DNA, 719 bp, Cannabis sativa
aaaaaaaaaaaaaaagattttttattcattaatgtttttaattatttttaaaaatttctttaaatattaattcttttaaaaaaaaatccagtgctaatttttaatatatatatatatatatatatatcatactactactaatatacatatattcttttgttttaaaaaaatacatggacagttgataaatattaatttgattatgccacaaaagaaaattttaattagagtaattagtggagaaaaaattatgtaccaattttgaaaaaaaaatatatatttttacaactactaatcactctatgtattcttatttcttcttttttttattattttattttaaaaaaagaaaatcattacaaaccaaaacatctttttctttacccttacaaaatcttctttgattaaatgattttaaaaaactacaaattaaataaattatttaaaaatatttttaaaaaatataatttaaatttaaatttgatggatataattctatttatttttttattactaattaatcaaatattaactagttaatgtataaaagtgaataattaatttatttttttttatttaaagagaaaatttattaagaataatagggacaattataatttaatttattcaaacgatatatattttaaaaactaaccgtataacaatatatatctatagtaaattaattaattaaaattatctaattgagttaaaaataa

SEQ ID NO: 91499 - DNA, 966 bp, Cannabis sativa
tttaagtggtagagcgagcgtctcccaagcaccgcattgaaagctttcgaactttccaccacaatgaaagtggccatcacagtcacctgttcgggccgctcccccatggtgaggggaagctcaatcattcctaggggatggattgaggcccctgtgaacccatatatgggtgttgcgcatggcttcaaatccttcatgcccaaccccatttgttttagggcgctccggtagagtaggtccatcgagcttctattgtctacgagtactcgatggaccctagcattagccaattggacagccaacaagagtgggtcattgtgggcaaagtgaactcctcgtgcatcttctttggtgaacgttataaagtacctctcctctttcgaattcttgggtggtctttgttccaagttcatcactataggtggttgtctggcttccctgacgtacctgtctctccccttgtgagtgtctccacctattccaagtcctctgcagatagttctaacatctcttatcaccttaggggcctatgggtgttctcgcctttgctcctcctgccctctctccttaaggcgtctttcttctctccggtagccccccaagtaccctctttggatgaggtcctcaaattccattctgaggtgggtacactcttccgtggtgtacctaatatctttatgaaatttgcagaatttattgggatctctcttgaacggcacctggtgttcgtttcccataaagatgtgttccctggaacatgtgagcccaatgtaatacgtgaactccctacgtaggggctcctttttccttctaactctcttattttggtcgtttttacctctatcaaacttcctcttccttcgtgactcttcatgcgtgccagggttggccaacccaccgggctcgctctttcccttggtgagattttttgtgcccatccttgacctggatgtattttttggccct

SEQ ID NO: 91500 - DNA, 813 bp, Cannabis sativa
atacggagaattttttagtttaattatttttatagcagtttacattatagttattaaaatattttgtataatttaaaaaatttttaaaataatttaacatgtcaaaaatttaaatatgataaaaaaattagattaatttttttttttttctaaatgccaaaacaataaagtcagtgcaccattttttagtgcaggtagaagctcccaatttatttattagtaaaataatttgaaacagtaaaagttaagttattaataaatgacatcaaaattgtgtttaaaaaaatgacatcaaaattatgattacatacaaaattaatattacagtaaaaattttaataataattaataacttaaattttcacctaaaaatatattggtgaattaatattacttgaattataaaaaaaagtttttaattatacttaaaattaatatttagtaaaaataattgttgggacttaggctaagaaatataaaaaaaaatattatggattttaaatgaattttttaaaaataaacattgcaagctacataattgttttttacataaataaatacttagaacaaagagacagaataaattgagaaaatttatttacaccttaaaaatttctaatacatcccatttcaaaacttttattttatataaaatttaatttttttttgacatgatataaaatttaaatttttaattgtgctaaattaatttttttttctaattcatattcttaaaaaatatatctattaaataaaaataattatattttaaatattataataaaaaaattaaaataaaaattatatgaaatt

SEQ ID NO: 91501 - DNA, 530 bp, Cannabis sativa
tttctcgagatatgaaacacattatatattatgatcaatgcatgagtaaaggctagctaataggctacctgacctacttactctagtatcaaaaagcctaataaatttatgtttaacatccctctctatgtatctctttcataggcaatacttggagaaaaaaacaaaatttcctatttagaattcgatactcctacgctttaaatcagtgtaactttttcagtttattcaatgaagcgagcatacaactcgaattcactctatgattttataagttttgtggatttttttcggtccattgatattcttttctcacctgtattactccagtcaacatgtgtttaatatttctctcgtaccacacttattaaagtacccaattaatgatacatttaattatcatctttaaacaaacactccttcagtggaagagattattccatgataatctattctttatcaattatattcacaacctatttctaatattctattgatcctctcaaattatccatctttcaaaaatagaa

SEQ ID NO: 91502 - DNA, 502 bp, Cannabis sativa
taattattaaacggagtcaaaaaattatttaaaaatcatagaaaaatcagaaattaaattctaagcatgctggaaaaaagaaacgtcgaaaatcgatgtcggatggcagcgcacgtgcccccacgcgccgctaccgagagtgggcttcgttgacaggatggttgtcttcaaccttgaaccgggtctgaaagtgggtcgcgcgaggttctctccagtcgggtcgagacgaagaaaccgaccaaaaacacgacgaaaacgacgggaaaactaggggttttgttcggataagaatttctactctatttatgggttcaatttgggatgaaacaagtaaaataatgctagatcttattgaaattaatccgaaaattgaggaacataaaaaaaattgattgtgatatcaatctcgttcgaaacacgaaataaattgtgtaagaagattgataaacaattaataatgagatatctataatcaattttagatcaaaaacaataaaatcaa

SEQ ID NO: 91503 - DNA, 551 bp, Cannabis sativa
accttccgcacaaaaaagaaaaaggtatggtgaaagaggatctccttggcgtaaacttcgagtcggaaccaccttccctttaacttcaccatttatattaaaagattagtgaaccgttcgaacacccttcatgagtagactaacccatggagttgcaaagccaagttgaagcataattgattctagaaaattccacttcactctatcataagctttactcatgtccaatttcatcaccgagtaacatcgccttccacttgtaacgcctcgtagattatgtaataactcataagctaccattgcattatctgtaattcggcgacctccaatgaaagcactttgagaagagtatattatagagtctaaccatggttggaaacgatgaaccaaaactgtagatacaattttgtatagtacattgcactaactaatcggtctgaaatctttcatattgttggttgctttagttttggggactagagtgacaatcatagatttaatagaagacatatctccttgcccattcaaacattctaggacagctttaataa

SEQ ID NO: 91504 - DNA, 622 bp, Cannabis sativa
gtctagggagatttggttgaaagtaggcgatcgaaactcaaagttcttccatgcgtctacaataattcggaggagaaggaatgaaattctgcggtgaaaaataataggggtggttgggaaacgagtgagaggcagattgggaatgtgtttaatgagttcgttagtgacctttacaattctcaagggacgagtctggatggagatttctatgatcttctttccccaaccatttcagatgaggagaacagaatgatgaaaagtgttcctacgactgaggaaatatggaatgtggtggctaccatgcatcctttgaaggccccgggtcccgatgggatgcccggttttttctatagaagatattggaatgtagtggggagtgaagtgattgaaatggtccaagacttcttccaatctgggcggctggagagacatgtaaattatacctatatttgcttgatcccgaaagatgaaaatgcgagaacggtggataaattcatacccataagtctttgcaattttgcttacaaaattatccctaagatatttgcgactagactgagggaggttatcgacaagttgatatccccgttccaatcgacttttgttccgggaagatggattg

SEQ ID NO: 91505 - DNA, 617 bp, Cannabis sativa
attatgaaaaatacaagattttaaaaaaataagtaaaaacggatgaaaaatgaagaaataaggggaagaaaggggtgattgggcgagggtttcgtgggtttgaaagaaagaaaggctgctacttattttagggtaagaggaagacgatagctggagagagttatataaaaacatatggtgtcgtttattggttattacaaaataaccgatgccatatgtattttttcattaaaattaaaaaaattatcacctacggagttggttattaaaaaataaccgactccataagtgtttttattaaaattttattaatttgctgaaaaaaaatcgcctctaaaggcttattttgtagaagtgtaaactcgtatttcatctcgccaatctaacaagcaggtgttggccaattttctgcatcaacaaattatgatgttgtaatcttttttacctgactttattttaagtgattttgtcaaacgactcgaaaattaggcgacctattggttgacttgtatatttctaattctaattattgttatctctaacgcgtgaaatatcttaattgaatgctattattttaattaattattattgtgatttcttaaaataataataataat

SEQ ID NO: 91506 - DNA, 844 bp, Cannabis sativa
tttttttttttttttgtttttgtacatttgtgaaattatccctttataatttgtcaagaaaatttttacatttatactttctttatctaatttttttctttttttactattttttatcttttttttagttattaattgattctttttattaagtcagttgctaattttttttattattctttctcttctctctctatttcttcttttcattttttccaattttttctcttttttttcttctcaaactatttttttttatctttgtatatacataaaattaaagtctacatttttatatctcgttttttaacacttttgcactctctcccaaattttattttattactttttttaaatactaaaatacaaacacttactctatttctttttctctcgtttttactttttattatcctcactctaactatttcaaactattttttttaattaatcacattttataaaaaaaaatcttaattaatttcttttaacctttactaaaatatgattcttttactttcatcattttctcatatttttttaatactctttctttctcttacaaaataaaaattaagagcactgctcttatatttttctatcttttacttgattaataaaaaatagtatattttggatattttctaatttatttagagttaatttatgaatgatttgcatattttaacatattgatgccttgttatttttctgttgatttagagttgtctttttgttattttataattattttacgtcgttatgttctatagttgttttatagttatttttctattttttcatgtgttttcttttgaagagttgttgtttagtttatgtgcat

SEQ ID NO: 91507 - DNA, 539 bp, Cannabis sativa
tctctaaaatttgaaatgccaatgagtgtgggagtagtgtagggtgatcaaatgctagctcgcgaatgctatcgcatagagctgcagcacaggaaggctggtcaccagctaatggcagtcttgactaaagaaggtgagaagaaggatgaagaacttaatccatggattcaagatgaaagaaatttgttaaaactgttatcccaatttttgcactctgatgtggcatcacacgatggtgacacgtggaatcaactccatgtacctgctcccaagaaatatgtcgagcaaggcaccacatacattcgatcggacaaagccctcttagccaggtagtgagcactccgcgtagcacgccaacacttatcaaattcagctttcgcagcgtgagtcatcgaagaaattcctataactttgggatcagatcacagagataaggcacgttgtccgaatcccttgattagtgtattttgtatttacaatgcaatctttccacttatatcaattgtaataagaagggaaatacttccctcccaagctta

SEQ ID NO: 91508 - DNA, 1053 bp, Cannabis sativa
ttttgtgcggaaaaagcttttgcggatcaggaacagaaaagaaagaagagtaataagtgagagaaatattggtaagtcttgccatggcagatagacgtagttatccctttccatttttgtaggttaggcagaaggtatcatttgatatatggcctgaatttcaagtatatttatgggaaaaagttgaagtgagtaaatgaaccatctttactaatcttttatatcattatcccactgtacttgataagattgcatttgtatacattagtgatgtacatttttctttaaaaaaataatacctgaaattgaaatacacgcacatacatacaatttaacttcttcacatacaaattaaaagaataataattaatgtattaaaattctgatattactagatttttaatttttgtcatgatggcctcatgagaaccttacaatataaagtctacacatatggacatgaaatatttcctgtatgcaccacttggaatcgatatctgatttgtgtggctctctttagactagcggtttttggattttggctctgttactttttttctaaaataaaagtaaaatatccaacccgaatttgaactttttctatagttaaagatttttttttttattattattaatatatatatgtatatatataaactgaatcattggaacaagcacgtaactgataggagatatcttgacagtcactaggataaaactgaataatgtcaactgttgttgtaaatactgctgctactaaaaataagagaagaacaatattaccgaatgaaaatttttggttgagtcgtgaactagatcgctctctttaagacgtgtactttaagacgtgtacgatattacttagaaatttgcaaatagttgaaaattagtgatttcccaaaataaaacaatccatgtcgtactctgtatcggaaacactgttgcgaatcgtcgaatacactctatatatgatatcgcaaatagagtttttagagaaagctatattttatttttttgggtatgaaaaaattgtattctcctatcacttcaatc

SEQ ID NO: 91509 - DNA, 615 bp, Cannabis sativa
atccacataattattaatatttataacactcatgacaattttgatttatgttttaaaagctttgtatctaacaaaacctaaaagtagataattttgccttccatataatgcattatctttacatcttggctattaaaaatcagtgtggtgatcatatctcatttgttgtgagcaataaattaaacagcaagttaattagttgttgtaaatgataaaactaaaacaaatataggataatgcttgagtacatgtattaaaaacgattttatgtaaagtctttttacttttaaatatgtgtcattattttattttatttttattaaatattatttccttatttaattttttttacatatataattatttgttaaaatactatcattttcttaaaaaaaaaaaaaaaactatcattcacttctctcttcttctccttcatcttttctctaaaagttcttaaatcaaagaacctaagctataactaaaactaagaattttgatattttttttataaaaaaaatagaggctggaactcaaaaattttctaatggcgaaattaaagaacaaaaaaaaaaaaaattgtacatatctctcctctcaaattatatctaccaaaaa

SEQ ID NO: 91510 - DNA, 668 bp, Cannabis sativa
ttctgttaaacttaacgtagaaaatcaaaaaatcctgttaaaccaagaatttcgttacatagccacattttatataaaatagatataaatttattattattattattagagtaatttgtggcataaatagttaagtttaactcctagttgtaaataaatatctaggtttaatttttggtgttaataatatttaagttatatttttagaactctaaaggtacctggccgttaaatgtcatgtcattatccacgtgtcattttcttattggtatatataaattaattttttttaaaaaaaaattaaaaactcatgacttggaccaattagagattgttatgtgtcaatttacttaatatttaacaatcaggtacctacaaagttccagaaatataagttaggtattattaccgccaaaaattaaacttaggtatttatttacaactaggagttaaacgtagatatttatgccgtaaattactcttattattattattaacaaatgatattcatacatataaagccatcatatttatagatgcatatatatatatatataacatttcttaataccaattgtcacatgctcaccttttcctcgtgcggtaccttgatttctttaagccaaggtcagccttccaaccatccgagtaacaatgggctcattttt

SEQ ID NO: 91511 - DNA, 829 bp, Cannabis sativa
atagaagtcgagcttaaggttttgcccgttagtctgccaggccataaagacgcaatcatcgaagcgtttggtgcagtgctgacagataacgggagccaggagctcgtctcttttcgctttcttttgagtctgatccttggaatcacgaagctccttcacctcaacggttaggttggctgtcatcttcaagtcagcctggttcaactcctccatggacttcagcttggcagtcagatcttcaactgcctccttggcctccctaagctcatgcctggccttagtcacggcctcgtccaaggccttcagggcatcatccttagctcttaactcctcagacttggacttcagtgcttcctgatgcctccgctccgcctgagcctccttctcctgggcctcctcctgaaaagccttcctctcagccgccaagtctctcagactcttcatggcctcatccatgaccccaaattcggacatgatgtacccatgatcaattaaagtcttcgagaagtgaccggtctctgcagtaatttggcaatacaagaaaaaggagtaagtacgagggatcaggtgccataaagtaaggcccaagaacactaacagagacttacatcggtcatagcagcgctgatatctttgatctgatagatcgagttcgtggaagtgcaggctgcgtatgtcttggctaggagttgggtcaagttggagacaaagtggcttgtcaactcagaggcaaaaggagcgagggtcggcccgacgaagcggttgaaccagtccgtcaggcggtccatgttcaggctcccaggcgttcctaaaagcctcatcacgcaag

SEQ ID NO: 91512 - DNA, 737 bp, Cannabis sativa
ctttagtacccttgtatgttattttagtgtggaggggcaaaatggtcatttcgccccaatgatattttgtcctttagtggactaagtataatgtgattatgtgatttatgtaataccttttttggctgaaataaggattagctttatgcatttactcttcattttattcaaagataaaatattggaaaattgaagacattcaagctctctctctctttctctctctcggcttggtgtgggctgctagggctgggagtttttcttagtttttcaagcacttttcagccattttaagtgtaattcaaattgttggtaaggttctttcaactttttctatgttcttgaagatttttaaggaaaaatagtaggttgcatgcttagttttggttagttgttgctgctgtgattttatgttgttttctgaaggtaaagcatgcttgactgaatacatttgaactgattatgttgttagttgttggtctatgcatgtgtgaagcttttaaactcaaaatcttgtatttttcaatggtgaaatgttgattaagctactgtagttgttgattatgtttgggttcgttttctggagtaattttatggtgaaacatgatgatttgagcaggttgtgttgcatgcaggtgagctttagccaagcttgagttttgaactcaaagcttggagctcacatggtgatttgtgtatttttgcatgaagctcggttttgatgctttgaaaatgtt

SEQ ID NO: 91513 - DNA, 703 bp, Cannabis sativa
tggtgtgatgcattcataacagcagtttatttaataaactgattgcccacaccagtgttaaacaatatttcaccatttgaaatgctgcaaaaaagaaaaccagattacaagtttttaaaaacatttggtgtagcctgttatccttgtcttagagcctatcaatcccataagtttcaataccattcaactaagtgtgtcaacttagggtatagtgaaagttttaagagctacaagtgtctaagtagtacaagaagaatttacatttcaaggaatgtagttttcaatgaagttgagtttccctttaaatttggttttctaaatacacacaaagctgaacagagtgttaatgttcaatttccctcctggtcgacattcacaaatgtctcctctagtgtctctcatactcaaccacaaaacaatgccaatcctcaaactgatgaagaacctgaattaagtgcacctggaacatcacctacttctcaatccaaaactaaattgacagatcagggatatgaacatgatctcattcaagatgatgtacatgttagtgttgaacattcagaagtacatcacactgatgatcaaattactaaagagcagtctgatgcagcagctaacaatcagtcagtaacaaaatcagttcctactcacccgatgataaccagggaaaaagcaagaattttcaaacccaaaacctacatga

SEQ ID NO: 91514 - DNA, 592 bp, Cannabis sativa
atattgctattggtctaactaattgtcgggttccatataatttaattttatagcttttaagaagtattgctagctaattacaacgcaacatgtcgcaaaaatattaggcaccactagtgcctaatagcaatgctcttaatgagaaatggtaacttaatatatgtataatattacttgccttgaattgtggtttgtgagattggtaggatatgaagtggatgagagagaatatatatttttttaaaagaaaacatggtatagtgttactctatctaaatagataccctattaaaaaataatctctaatttattacaaaaatatgaagtctcaatttagactaattatacataagaataatctttaaattgtaattagttatacattttgaaaccctatattaataaagtatacctctatatattcttggatagaggttctactatattattaacgaactaaatcaattgttataggaacactaataaatctaggagaagcatcagtccaagtacaaactcttaacgcatacgtaatagactttgccagtgcatgggtcacactatttgcagcatgtgaaatggcttgacacga

SEQ ID NO: 91515 - DNA, 662 bp, Cannabis sativa
  modified_base (27)..(29): a, c, t, g, unknown or other
actaatcagattgtaaagagttttatnnngggcataaaacccaacacatttcttcttttaccgacgcatatgtgcgccggcaaaagactaaaaaaaattggagggaaaattccctcttgggttttatgtggtaggtggggccacttttgccggcgcaattatgcgccggcaaaggtgttaagtgaaacgctcgtttttgtataggtttacaattaattttttaaacacttttaccagcgcaattggatgcgacggtaaaagttcttatatgtatcagggggcacgaagccccctttcttcctcgacttcatttctgcaaacatagtccccccccgcctctcgttctctctcaagccctctctcgttctctctcgttttccctctcaatctctttcaatctctctcaatctctctaaatttctctcaaaatctctctttcccactcaatccctctttgtttatctattttttcccaaaaaaaaaaatctgatcaccactctgacctcaccatcaccggctgcaccaccgccgtccgcaccaccgcaccgcccaaaatgcacacctgaaggtatttttaatttttaatgtattgtttaaatatttagatttgtatatatgtgtatgtgtatggtagatatgtatgtatatgtgtatgtgtatgt

SEQ ID NO: 91516 - DNA, 1372 bp, Cannabis sativa
  modified_base (442)..(446): a, c, t, g, unknown or other
ttttttatgccgtgttaattaaaaaaaaatgatcttatagttaaagaaatttaataaaataaataagcattacatgtgtagtagattctcccttaaaaagtgtggaaaaatatatgaaagtgtaaatataagtagtgaaaatttaaaatatagctcatttaagagcatttttgtaaataagtggtgaaaagttaaaatataactcatttaacaaaaagtgtactctaatggtgtgccaaaaaatgatataaatttggcacatagcaaattttttgtcaaatttgacacaacatttactatagtgtaaaatttacactacaataaatgcactattttttatttatatttatgttatttctattattttattagtatatttaactatcacattaaattatgaaatatttatattattttttattgtcttacatattaaaataannnnnaaattgattataaagttattagattttattttttttttaaataaaacattaattagataataaattttacattaaattttgcaattgtgcattggagcacaaaattaaaatttggtataaatttaccacaaaattactttttgtgccaaatatagtacaatttttacatcttctattggagatggtctaataaaaagtgtgctccaataatgtgccaaaaagttatataaatttggcacatagcaaattttgtgccaaatttggcacaacatttgctaatgtaaaatttacaccacaataaatacactactttttcatttacatttatatcatttctattattttattagtataaattatcacattaaattatgaaacatttatattatttttttattgtcttacatattaaaataataatcaaattgattataaagttattagattttttttttttgataaaacattaattagatattaaattttacatcaaaattttacaattgtgcattggaccattggagatggtctaaatgtataattaaaacttaatcaacaaataattaacaatgacaatattaactattcacaaataataattggagataaaaacaaagatgaatagggcaatcacaaccagaaacgataaagcaatacaacaataaaatcaacaccaatatatatattggttcaagtcctatatatcgatgtgatttatggctctactctatttctggaacaccactgaaatcttctttattgattgagcgagaacaaggtacaatactgtcgagatcgattctctgttagattctctcaaagtgtttatccctcatacactcttacccaagaatctttttcatctacagatgattcttcatgcaaatctcaaacccaatctcgttcttctctctctctctctctct

SEQ ID NO: 91517 - DNA, 601 bp, Cannabis sativa
gcggcggactattccgctggtaattaataatgagattccgccgctaataataaaattgtctgatttctcattattagcggcgggtgtccggcgctaataacaaaaaaaagtctgctggtaaaaagttttgaaaatatttaagagggaaatttctcgcactttttctactctagtattagcggcagacccccgccgctaatactacataggtccgccgctaatatatttttctacaaaaaaaaaataaaaaatatttaataacagaagttcgtcggtattagtgccattagtagcggcggatttgctccgctgctaataactaaaattcttgtagtgaaattagtttaattttttttataagtagttattcaagacattttataaaattaataaattaaaaataatttataatataaaaaataaaattaaaacaatatatttcataagtctataaaattgaaaaaaaaaaatacacttgtaaaaaaaaaaaaaactttatttttagtatatcttaaataaccacaatatacaagtccattaaaaaaaaaataataaactaaaaaattcttcaatacatataaaggtatatcaatttttaagg

SEQ ID NO: 91518 - DNA, 1058 bp, Cannabis sativa
aatttaaggtgaatatgcgattagcttttgtattttgttaaatgaaaattaatatcacatgttttgaatcaaattaatatcatatataagttttactttgatcaaacaattaattcttcaataaattgataatccctagctcaatttcccaaccataactttggatatagatctagccatacctttagatttaattatatatataaaaaaaaatagcaaaaatataaaattaatttattttaataaaagtatggccaaaaaattatcatttaaatgcaggactaattatatattcgtgctaaatggggcatgttttcttttttctgaaagaatttttttataaatttaatatatatattttgcagaaatgaatttaatattcttagtgagcttgtaataagctatacatgcttcttcaaaatattattattattattataaaaacttcaaatatataaatatactgtaaataacattttagctagattttgtgtttttaaatttttccaattagtagagtccttctattttattaaaggtcaaattcaaccattttatgttttataaaatggaaagtaaataatggtacttttagttaaatcattttaatcttaaccttgaaactttctttttctacctctaaaattttctcttccactactgtgacatgacttttaataaattcgaaccttaattttttttttttttttatgggtattaggttcatgggccaaattgttatttgactgagaaaacggatacattgataggtaaatttggacaatatttattacattaagataacgctctacaagactaaccaaattatttacaataaaaagaaaaaaaaactgtttttagtgatttagtatgttcgagagtcaattattattattataatattttatagtttttttaacaagtcaattattatatcaaggtgtggaagaaaagaaatctaattgcagcaaaataggttttactcgtacgtttctttgttcttctttcttaggtatacttgccatacttgccaaatcgatgtatagaaacaggtaaca

SEQ ID NO: 91519 - DNA, 980 bp, Cannabis sativa
ggaaaactagccaatattatgttatagtttgatttgttagaaagaatcaagacagcgcagcaaagtgatttagaattacaagagtatgaagaaaagcttgaacctaggtcaacatagagcttctcaatttcataagatgaattagtatgatgtagaaacaagttttgtttataagttgatgatggtattagacagaaggttttggatgagcttcataccatgccatatttactacatccggggatagctaagatgtatcacaatgtaaaagcctgtactagtggtcaggtataagaagtgacattgttgagtatgtgtcaattgttgaattttccagcaggtcaaggtaaagcatcagagaccagcgggcatacttcaacctctaatggttcctaagtggaaatgggaagaaagaaccatggacttagtggttgaattatcaagaacaatagagttctaaaatcctatgtaagtaattattgatggatatacaaagatagagcaattcttaccagtattgactatgtatacagtggaccaatatggtgatcttttgtcaatgagatagttctacttcatggtgcacaaagacgatcattttggatcaagattcaaagtttacatccaagtactaggagagtctccaatgagcaatggataccaaattagagttctgtttgagagaacaatttagggtactgttggcatggtaccgtacgagatgctttatggttgaaagtgtcgttcacccattcattgggatgaagctggtggaaaaagataccttggacatgaggcattctaaatattagcaatattaaattctatgttgggaattttatctttcttcagtagttgtttccaatgaagtgtactactcagaaattggaaagaaaggaaagttaagtcccagatttatcaaactgtttgagtttctggaaaagggaggttaggtagcttatcatctaaccatgctccct

SEQ ID NO: 91520 - DNA, 549 bp, Cannabis sativa
acgtgttatgatactaatagagaatcccacaactttctcagtacatatggaacgtcatcaccattaatggagcaatgatactcctcaaattccgagagaaatatatgattgcaatatttatcacataattttggtaagttaacgatagagtcaactacgctaaacactgaaataaaatatcgcaattgtgatatacaatcaatatcttcgtaacacaccacacactctacctttacaaatgaggatgttgtaaatgtccataaaatacctaatcacatataactccccataccattacactcgctttgtatataagagaggaaattgtacatgtttatatggcacttaattacaaaatagctcctcctaaaatcatgaattcttatgagtggatttgacaatccatgcagcctgtctaatcggtatcaataaaaccaactattatatgtcacaatattagtttatcgattgttaacacatccttggtaccataaggatgacagctcaagtaccaatctagcatgcctacaacatatatcacaataggaa

SEQ ID NO: 91521 - DNA, 557 bp, Cannabis sativa
gcatgtcactaaaaatcactcctatctatttagtgacacgcacttttgtgcgtgtcactaaatagtgtcactaaaaggccaaattgtagtagtggtttttaccgtcaacagaaatactaaaattcaataaaaggtctttagaatattcaattattctcaaagttatcaaaacacaatttttctttcttgacaaaaaataataaaaatttattattattactttttgtcaaaagaaaataaataaactaagaaattgaacagatagattgatcaaaccaacttaccataaatcatagataagtatcgtatcttaacaaataacgatacacgatcactccgattattttatttattatttatttatgttgaaacaaccactccgattattatactgcaaataatagcacacacatcaatatatctatataggcaaacattaaatcggaaatgcctcaatgacacagtacatagcgttgatggttctgatattgtatcgattgaaaccggcctggccgaggacataggcccactcctccaaggtcctctctttgcctttg

SEQ ID NO: 91522 - DNA, 573 bp, Cannabis sativa
ctaccaacacgagtacagagttggtacttagtgcatttggtacagtggtcgtacttcccttaagaacgttcttaaccatttggtgagctcgtttgttgagcccagggcggcttaagtataaagtcggtctagcattgcttttatatatgttatgcatatcttattgagtctgttgactcatcagtttgctaccttgtgtaggtaaaggaaaatctaagctcgaggaacagtgaaatggagctcggtagtgattgtacatatcgtggcagtgcaacctggggagtttcggtctttcaatattttgagttatattttagttgcctgttgtttgtaaaaaaaaatattactagtagactttgtattagtaaaatacttttatggatgttttgaaattcaggatcccgacccatataattataaagttataatattataaatttatcttttgagtttagtaaatttcaaatacgggcattacaaaaagaaaccagaaaaataaatagtgcagaaaaataaaaacacacaaggtttttgtacgtgaacaatcctttcaaattgttactagtccacggg

SEQ ID NO: 91523 - DNA, 921 bp, Cannabis sativa
  modified_base (749)..(755): a, c, t, g, unknown or other
aaaaaattgaaaaaaaaaatatttggcgcggatggtatgattgcataccatccgcgcgcgcaccaagcaagagctggccgagaaacctcggcgctggaggctgcatgcagcctttccgcgcgcggaatggagaaatcaaacaacctcgtgcgtgtttcttcggacattcagtgtccgaacacgcacctaaccgagtgaaacttggagtccgcacgcgtgtgtgatgggcacccaatttaagatttttttcaaatttttgaaaaatcttaactaattcaaataaaatcgaaattgagttttgtaaaaaaacaaaattgcttaatgtttttcatactatccaataaaaatagttccagaatgaaaatccaattattttttataaaaattttgcaaacatcagtcaatcaccaataaacacatagatgaacatgaatcacatccaaatcagacatacatcgttttaaatccacattacttgaaagtaaatcaattaccatggctttgaggctagttgttagaatatattttaccaagatctaaatttactaacaagtctgtttttaacatcctaatatgaatttctaaaacgatgaaaataaacacataacaggtatgagaaaccttacagtggttgcaacagaattaaatgactcctccctctcagatctctaacccttgtatgctttctgtagcagagtatcaccaaggtctgagcccgattctccttattgtttggattcttcacagtnnnnnnnactatgattgaggaccaacttcttatgtgtgggcatgtactcaatcactaatggctgaatttcggtttgtgaagattatgctatggtattttcgaaaattcaagagaaagaagaaggaagaggtctcatcaaacctagagagaaaaactaagtttttagctttgga

SEQ ID NO: 91524 - DNA, 841 bp, Cannabis sativa
  modified_base (815)..(816): a, c, t, g, unknown or other
atatatatttatatatattcttcaattggttgctagactttaaacaaactcagagcaaaagaatcatttcaaatgttaaactttttcattagtcataacaccttaataagtaaatgcaggttataatcaccacattaaggtgtaatttttgtattgactcttttttcagtttaaagttcaactttcatgtacctaatcatttttgtagtatacttttaattgtaaattgcaatcccacaactcttttgttgatcagctaattgtggttatagtcatgtttgttctaataaatgataacaccacagtgaggtgttatgactaatgaaaaagttaacattttaaatgatttttttgatctgaatttgttgtaagtctaacaacgaatggaataagtaaaagttatatagtacggaatatattcacatcttaaaaacaaaaaattcaggttctgtgaaaagaataacttctattgatattttgaaatccaaaaagagatggtccgactatggtcagcccagtgaaccatgatgggcccaggtagcaccggcccgttatccttccactgccgagagcgggaggtgttcgctgctctgtgaagccagcctcacgcattaccctccactctaggagcccagtgggccagagtttcgtccaaaccacaaggcccaactctcagcttggaacgggcaggccagtaaacagctaacactgaatccagcccacgaaaccaacctaatgtcccatttcccacatgcctccacttggattacaggcccacgctactagacccggcattgtgacagtcagtagtcccnngatccgtaaggggaaacaccgggta

SEQ ID NO: 91525 - DNA, 912 bp, Cannabis sativa
cgacacgacacgaacatgacccgcaaacacgaattgctacccctagttcatgtctagggaaagaacattggaaagcatataccaagcacaccaggcgcatcagaacattgaaggatttatggaagcagactatgcaagggatagagacactataagatctacatcaacctatttttttcataactactagaggtaattttactagctagaagagctaaacctagctaagaaagtacctactatctactcagacacccagagtagtatctatttatgcaagaattctatgttaaattcatgatagaatgaaacagatagagattaaataccatttcatcatggataaaattactttagggaaaattgagattgacaaggtacctacagtagtaaaccctgtagtaatgggaactaaggtggtttccctaaataagtttaagctttggttaagcttattagggattaacacatgttggtaaaacccttagaatatctaagtctagcaactatgagtgcatatggtgattcaggtagaaattgttggaaaaaaatctccatatacactaccgatcaacataacaatttattacaacttgcatggaaaataaaaggaaaattgcaataggtggccttcgaccttaacaaactctccctgaacgaaggttagttgcaatcttagttaaacttttgcaactaacttcaacatacactctcagctcactacaaatataaataatagtagactaaacaaaaacaaaagaccaaatcgaagtaaaaggaagagacttgaagagctaagtcttggagccctagggatagggctaggaggtccatttctaggaggttacatacacaaagaaaagaagagagttagaaaaagagagaagagaggaaataaatgtaaaagattaa

SEQ ID NO: 91526 - DNA, 754 bp, Cannabis sativa
aataatatatcttgataatggaatgataaaaaagtttactgtgtgttgtgaagtcgatcaactacgcagtaagaaaaatatcaatgacctatgactaattgattctttggcgtttgaggattacaaaatatatctatgcaaatattgtgattgcatgatatgtataattcaagagatacatatatgtgaacaaacatatacacctacatagccatagaaaagtgtaaaaaaaaaaatgaagtaaatgcatgaatatacatgggtacaaataatgatcattctacatatatatacgtatatgcgttcatacgcataaggaaaaaaagagaaataattgtcacactgtaaaccaatattatatatatgtatgtgtatatacttgtcgttgtcagttgttacacaaatcaaatctctttaaaaaaaatagcatatatatattacgccatagatataaaatctaagaggtatatatatatatggcttgatctggaagaatagaaaagtggatttcgtatgctgccttcaacatatacgaatcaaatagtctctccaggctttaatttgtgcaacacaatttgagcaattatttgtgtatctcatatttaaggaagtaggaaaaaaagatatcgtggtaattcaaattctagttaaaatcgaattataagatattttaaattcttcctattttgataattattctcagaaattaattgagagatattatccgatttaaagataaataattattattccc

SEQ ID NO: 91527 - DNA, 1263 bp, Cannabis sativa
gaatcatggggtttcatctcaaaatcaattggtgatgagtgaaatgtttacatttgatcaatgtgagacaatattgtccaataagttttgattaagcactggtcaataattttgattttattggagtggcactggttttcagcacaacattaaagatattctctaccacaacactcttttagtttctcatttacagtttagctttatatgttgtgaattcctgaactgttctttttctttgataaatttaggattagattaccatttgaaattagcatttaaaagatttgacaatttttttgctcttaaaatgtataggtaggctcctcctaagtttgagatatttgtgagaacaactgttttctgatagaaactgaaacacagatacacaaattgatacaacagagaaagatagaagaaacgttgctactatttaatacgatagaaaatcattataagaccccaggatgttgttatgtgatacttcaaattgatccattttttgttctaatgttttactgctctgaaacttaattcactttttattttcttttctcactcgtgtgcacacaattcatacatgaattttttatctttgttgttgttgcaaattttcagggctctcgtgctttaatcgacttcattgttgaggatttacgttccctgtttggtatttcttcacaagcagaattatattttttgttaccttttactgttactaaactttataagaaaacatattagattgaattttcttttatgtaatatacttgaagactttatgctgtatttacacatttttacatcttagcaaaaataataaagggaaagatatatagtacaccaattataggcacatgttatcatattactagtaatgtgtttgttttttgttttgttaccagctctaaattgggacccaataactagtcatttttagttaatattggttactttctgcattctggtttgaaaagcacatgatgttatatttatcaaactgtcaaaaaatttaagaattagtggaggaatttagattgctgtcggattttttttgtgttaatcattttcttaatgaaaaatttgaattgctattatttatatatggtgtatttttttaacatctatttatatataatatcaatattatataactataaatatttaattttaaaaatatcaaactatcaaattttgatctaataacgaataatgaaatcacaaatttaaatttctatgctcaatttaactacttaattaaaa

SEQ ID NO: 91528 - DNA, 2874 bp, Cannabis sativa
tgggtgaagggagaagcaggggtagctgccattagtgtcaatttgatgtccggctgctggtttgttaagtcccaaaggattcagtcaagttcagccttagaaggagaattaagagccattctccaggctttggaatgggcaatcgagtcaggttgggaagaggtaatcatcctttctgactcgaaattagctgttcatgctttgaattctgcaagagttagtcctgattggaggatttcaaacgtttttttctctattattaatgtctctaaacagtttctagtctgtaattttcattttattagtcgtactttaaacgcttttgcggatggtgttgccaaaaatgctagaattactagcaactcggccattttgtatcaaggggagggaagtccccctgtgattcccgttcactttcttaattaatgaactagtagttctttcaaaaaaaaaaataccatgtgatgatattaataattaaagcaaaagagatttcgatttttattgggtaaaatttctctctttttttttcatagtaattacaacactgtacagttataaacattacccaaaagaaagttacagaagaagaagaaaaaaaaaaaggtttaagcccttcaaagaaaaatgtaaaaggcttaaatattcagtcactcactcaaacccaaaattagaagtgaaaactattaattaagaagtaattaattaattaattaataatcccataacaaaccctcaaagccattgcttgaagttgaaaccatacaactattttccggcacggcggcgccaccatatgcaccgccgaagtaatcattttccggccgttgaaaatacccaaaattctccacgttctgaagccacggcggtggataaacccaaccctcttccgagtcaacaaacacgaactcgttccccaactcggccgagtcataactcgttccgagtcgaggcaactcaacaatttctccgagttcgtcggactggtactcggtgccggagatttccatccctgaaacgagagaagaaagggaagaggttgaagaagaagacaccaatgccgcggctgacgattctgttacggcgacggttgaagacggcggcgcgtggtggtcgaaattatgcatttgagcggctttagcggcggcggcttgaacgtcacgcgccgagagagaaactgggcgtggaagagagtgagcgagttcgggaaagttgagaatggctgagtttccctttatgcttaaggcggcgacgtcgtgtgctctggcggccatttccggcgtcggaaaagttccgagccaaatgcgagatttctttctcggctcacggatttcggatacccatttgccccaatttctcattcggacccctctataaacggggtgtttgctagagtcacggacccgtttaaccgactttttcgggtcaagccccatctgggtcgggtgggttgacccgggagatgacggcgatagtggcggtgatgtagaagagaacgagttagagctagactcggtctctgaactcagttgaaactcagtagtagtaatagtactattactactcattgggatataactaataaactaaaaatgagatctttgttattgggtttatggtaatttaggtaaagttttgaactttattattacacaataacatacatatatataatatatctatatataagaacatgcaaatgagtagtggtagtaatggatattggtatttatggtatttttcttaggagaggtttgaagttgaagatgatgagagaacaagccaaataaacaagaaaaaaaggaaaaaggttttttcttgtgtttcccattattttgcaatgagagtcatatataagggttttataaagattgagagtgagagaaagagaaagtgtatatgtgtatgtgtgtgggacccaagagagaaatgggtcgaacttgctagtccctatggtgcaattggggtccccatcttcttgtacgtacgcaacctcaattaattatttttttgagatataacttatttaactaaaataggtaatagttataaattatttaactaagaagtaaaaaataatcaaaaaaaaaataatattactccattaaatttaagttatggatagggtttacctacgtagagagagaagcattactatttactattcacagggtcacttctaaattgagacgagtaagacagctacgtaccttaagttttcgaccgctagtctcatgccaaaattactaaatatatgttgtaactttttggtaagcactattgtgacagtcagtattcttaggattcgtaagggaaaatactgagtaaattgtgcaatcccacattggctggaaaatgtcaagtgtgatgattttgagactgtgtagtgtaggtatgagactacatagttaaggagagcttaaatagattgattggtactacctatatattaacaaggtacatcttattttttagtagtccatcacgaaagaattctacgattaagcgtgcttaatttgagataatttcaggataggtgacctcttgggaaatttttatagaaagcgtgcgagtgaaagtacgctggaaacactcgtgttggtttgtagggtcagtcatcaactcatgtataagagccatcatttcatatgtataagagcctaataaaaacttaaagcgggacgttacactacgatatttccactttttactataatattaatattatataactttatatataatagtattaaaattaatattttattttactataaacaatattgaaaagtaaaattttattaagtttttagtgttatggttggaattaaaaataatataatgccaatttttgtattagtgcaatactaaata

SEQ ID NO: 91529 - DNA, 575 bp, Cannabis sativa
ttatttatttatttatttcagctgagttgttatttggtttctatatttttgtattgattaaattatgtatggaaggaaatatgtctaatttttctatttatgaaaaataaggtgtaaatggtaagttggatgactcatcattttctatctatccacctgtatgtatttatctgaacttgtgtaaattttctaatatgtttgatcagatttcttgtgaagaaaaccgaagcaagatttttcttttctataaaaagaaagttgtgcttactgctcacgattctataggtacagaaacaaaaattcaagggttgattgaatatcttttttagggaattgtctagtgagttgttgtcttattcaggccgtatatgagctgtcaataaggtgtatattgattataaatacaccttatagtagcttggtcatgcatctcttttaggggtgagcatgggttggaaatgggtcgaccaacccggccaacccaacccgaaatgagctgaaacatggtcacatttagtgggccgaacctcacatgggttgaaaagagaccaacccgcactgaatgggttgatcat

SEQ ID NO: 91530 - DNA, 509 bp, Cannabis sativa
tagtgaaagctgtccgtagtgggaataagatgtgctcttcttttgatctcttaattgatgattgtaaatatcttttggcttcccttaacaatgttgctttattttttgtcgagtcgtttgtaatttgagctgcgcactttgttgctagattttcttcttttttcttatttgctagctgatcatatgttttcagagtcttttgctccgtctgagttattatcaattttagagagcaatcgattgctcttactaatgaagatacaagatttgattaaaaaaaatcatatatataaaggactaagaaaatatcttcgtactaacaaaatatgtgtaccaattattcaatataaataatgattccagttctatcttattcctgtttattttttcattaaattattccaattttaattatgtttaacaacgtaccttccaaaactaattattctcgtggttaataatgagatagaagagtataaacgaaaaaaaaacaactcgtgttgcttttc

SEQ ID NO: 91531 - DNA, 522 bp, Cannabis sativa
taaaattatgatattaaaaaaataaaaactaaaataaaattaacatacgtgacttgacacgtaacatctatctatctagtatatgtgaaataattctatggatattatccactaatggttactaaataatttaactataaatattaattttaaaaatattagattatttcgtctgtttgttttttaccgtcacttaccaatagacgcaaattatatattatttgtggcgcttttaaatagacgggcactataagaaatgtcacttttaccagcacagttcgctactgcgctgataaaaatgtgagtacgtgtgatgtaacatgtgagtacgttatttcatatctttatgttcatattacttaactctatatacactatactacaaaatttactgttagttttgcatgccaacatacataatttatttcttaattctatttacaaaatttatgatatttctatatgccaaagatactcacttttgtaacatgtgagtaggttatttcatatctttatgttcat

SEQ ID NO: 91532 - DNA, 723 bp, Cannabis sativa
taaacaacatacatgtgagtagatctaagttcctggtaaaataaattctaacaatagcttgtaggtgtctgattctggacagcgtaatgcacagacgtgatatctcaatatgtcctctaagatatgttaccacgtaagaagatgaacaactattgataggagtgcataaaggctctacgagaatcatgccggggggcaaagccaattgagtgtagatgggatccaactgcagcacgacttagcctccaaaaggttgtcaaactatggcttcagtaggcttgttgtccatggaatcaacaacctagttgaccactacgtccacaggctgggcggccatagtctcatccaactggccaggcaatgctcacttaacgtggttggccacctagcctgtaccctggctagcccgattcgccactctactctcgtacttttggtctactatgaccaagaagtaaaccacatcttgctagaagaattccttgacaaaagggaaaaaagaaaagacgaaactaacttaaagtggcatgtctaccaacaaaaatttgtcaggtgcttcaacaaacaagtcaaagagaggaaattattcgtgagagactcagtgctctaaagaatattccttagtaccaaagatcctgcagcaagcatgtttggacccaactgaaaatgtccacaccgagttataagataacaagaagaggtgcatacaagcttggcaagtac

SEQ ID NO: 91533 - DNA, 820 bp, Cannabis sativa
  modified_base (363)..(364): a, c, t, g, unknown or other
ctttggaagagttatagaagatattttaaaagtgataacaataatcttatgaaatatattatcaccaaaagaattatggatcatatgtgcatgagggggagacatattcatattgcactctttctcccttagtttaagttttgtcccactgagtttttttggcaaaatttttaacgaagcaatttgcaaatagttatgaatatgaaatatatattgtgctctttttcttttgctcaggttttgtcccactggattttcttgataatatttttaacgagtcaacttcaaatcatgttaacatacttgcattttatgaaacaagtagagaatgtgtgggagtgagatcattgacatagtatattnnggaaacatatggattgcactctataaagaagtatcaacacaacacaagcatttctctatgaagataatactgcttgcatcgctcaactaaaaggaaggtaaattgaaggagatagaattagaacatacatttcactaaattattctttatacatttcaagaaaatgcatattggtgttcaacaaattcaatcaagtgtcaatcttgcaaatttattcacaaagttattttcaacatcaatatttgagaagatagcagacaagatcgaaattcgtcgattagaagatctccacgaatacctaaatgaggaaaaattaatttacattcaaattaaagaaagtattataaatattaataattatgtggatgtccaaatcttttatttactaccattaattgtaatcaacattccttttttcttagtttcttaatatatattttactcttgtatttgtat

SEQ ID NO: 91534 - DNA, 793 bp, Cannabis sativa
  modified_base (43)..(50): a, c, t, g, unknown or other
ctataaataatttcataatttaaacataaacaactgctaattnnnnnnnnaactaagcgggctttacaccaacggttaataagagggtcaattataataaccgttcgaaaaggtaagcggaggtctttcccaacggtttagaactgaagcaaaaaaaccgttggaaaaaactaatgccaacggtggagaaccgtgggcaataacatatagaattttttaaaagaaaataatgaatgccaacaatttacaactgttgggaatactatacaattataaactgttggaaatactatgtgttccccacagttgtaaactgttggcatgttattttattttattttatattagattttatttattttatttaattttaaataaataaataataaaataattaattgaaaaatataaaatagagtgtaaccttaaaaaaatataatttttaatggaatttactaatattactgtaaataaattataattttttacatattaaaataaaaataaaatgtctaaattttattaatgtaatattctatcattattattatgactaagttttatgcctccagcttatttcctccgacggttcctgcaacaacttcggtttggacccctccgccggaggactggatcaaaatcaactgcgatgtcaaagttggtggagactccatgcgcatggcgaccctatcgagagatcacattgggacggtggtttgggccgttatttccagactcaacttcagagacccgttgattggtgaggcggcggcgtgtcatcttgctcttgatt

SEQ ID NO: 91535 - DNA, 510 bp, Cannabis sativa
tgttaatctactctggtgtgcctagaaacttttgggctgaagctgttgtgactgcctgttacttgattaataggtgtccctcagctgcaatccaagccaacacaccagtagaactatggtctggacaccctgcaaactatgggaatctaaagacatttggctgcatagcctatgcacatgtcaaacaagggaaacttgatcccagggcaaagaagtgtatttttttagggtattccaagggtgtgaaagggtacaaattatggtgcattgaaactgggaatcaggacaggcacatcatcagcagggatgttgtgtttaaggaggacaaggtgtgcaaagatgtcatgaatactcaaacaaaatctaccagtgacaagtctgaggatggattggagttcgaggtggagcctgctggaaaatttcagggagataatcaggcaccagtaacaccagaaggaacttttgatgaagaaagtgaggaagaacaacaagaagtaactgaagaaaggg

SEQ ID NO: 91536 - DNA, 864 bp, Cannabis sativa
ccaaaattaatatataaaatatttcatgttccttccccgtaccgtactgtattactataaagagaagtttttatccttttgggagcttcagtcacataatataatcacatatacatacatgtatataaatatatattggtgtagagaggtcataagtggttctcattctctggttttctcatcttttttgggttgaaaatggcgaagttgttaccctttgtagtgatgtttagtctctgctttcttccactcattcatggaggaagaaagattccaacaagaacccaagatgggtctgaggaatggggttatgttgaagtcagacccagtaagccattcttccaaagttgatcacttttttcaaattttcatcattttcttttctgggtaagaaaaaagatggattttttattttgagaagtgaatattgtttgttaatttctcagaagcccacatgttctggtggctttacaagagtccttatagagttgaagatccctctaagccttggcctattgtactctggcttcaaggaggacctgtaagtttaataactcttaaagaaaaagttagaataatttgtgtacgtttgtgtatagtggcataattgtaataatattataatattataactaattatcatgtaaaaataagtattgtttagatagttacacttgtcaaaattaggatcatagtgagtaatgtgtttgtaagtattataatattcatgacccttttagcaaatatatatggtgtgtatgacagtgttgtgtttgtatatatgtttgtgtgtattaaatgcttcatttataatatctttctctaagccatatcagttactttctcgagaaaagagtttcattg

SEQ ID NO: 91537 - DNA, 694 bp, Cannabis sativa
caagcttctatattatttcctgttgttattttggtatggaatctgttcctaccgatttgttacattgtttggtaacagattttattagttaataaaattattattttccattcaaaaaaaataattaattaaactaattgtgaaaaaaaaatatacttggataaatatataattgtataatttactcacaatttattgcacaaagatattctcaaaaaattgaaaaaaaaaatgtaattatgtaatttgcttctaaattaacactcttcattttggtattgtggctaattaagatttttgacccccgaactttaatatatatcaaatcatgtcccttgaacttttcaggtcgttaaaaattttcctagaacaattgaaattgtaggatttaaagatttttttctaattttactaacgaaaatctgacgtgtatgaattgataacagacgtgtatgaaagttaagggacacgatttggtggatattaatgtttggagggcacaatttagtacatagacaatcaacatattagtaaaatataatgaaatgggatagaagtcattgaattcaacaatcttcatagtaaaaggagaatttttaacagtctgaaaagttcgggggcatgatttgatacatgtcaaagtttagcggacaaaaatcctaactagccctatatattttactcggtttttatt

SEQ ID NO: 91538 - DNA, 668 bp, Cannabis sativa
tggcgaaaggcatattcatcatcaggttccagaatctagagcaaagagacaaagtgatgcagcaagggtatgtgtttttcgatcgcaaaccaatggttatgaagccctagaatcctattgaagattttactatggaagaggttactaatgttccaacttgggtacaactaaaagacccggacatcaagtactagggagagacttctctgttcaaaatcgtaggccagctggatgaacctctgcaagttgataatgtgactaagaatcgggataggctgcagtaccccagaattcttattcaggtaagcttagcgcaagaatttcctgagaaaatttcttttattgatgagtttgatcatgaagtggcattagatgttaaatatgaatgactgccattagtatgctataattgttctggaattggacataaaacatcagagtgcaggaagaaagaagaaaaaaaagaacctgtcaaacaggtatggatgccaaagaaaccaacaaaagaagaagagaaccttatagatgtagagggttttcagaaagtcaataagggcaagaaaatcaatacaaggaaggaatccgaacagacaacagtcaggaatatgtttgaatcccttagtgctgaatctgtgaatgttgaagaagttgggattgagatgggaata

SEQ ID NO: 91539 - DNA, 509 bp, Cannabis sativa
agaatcatcacacttgacataacccaagcgatgtgggattgcaatttgtcacgcacccccgcttcagctatgtagtcctatgtacacgactacgtcactttggttgattccttgaatgatgacttgccctgaaaaccaacatgagtttacaacgtgctttgtcctcactcatacgctttttgggaaaactttttaggaggtcacccattctaagattatttcaggtcaagtacgtttaactttggagtgcttaagggatgaactaccgagaaggtgtattttgttggtataggtagtactcattaatctatttaaaccctcttcatacctacacaatcttagaattattacacttgatattttccaagcaatatgaaattgtacaacttactcaatctttttccttacagatcacagaatccttataatgtcgtcaagcttcattgttggtctttagcatttttgtattataattaatgtctactatataaaaagaataacaatatata

SEQ ID NO: 91540 - DNA, 685 bp, Cannabis sativa
tttctaaatccaagattttcttctctaaaaatttctcacctgattatcgtgcggatatttgggatcttttgggttttgaagagatgaaagcgatggagaagttcttagggatgttggtttttatggtccatataagagttagaaaagagcggaagcggatttgattaaaaaataatttaatccaatatgaaccataagtccaaggatctcaacataatgtatgtagattaaatctagactaatgaaaagagagacaatatctcttgtagcctataaggggatcctcgctatctttttgtattttatcgaacatccaatccaagagcttgttgaagagttcacaccataatcttccaagccaacctcaacactcaggaataaagtgggctattagattcaattggatgagtataattatgttatcacagtatattctcaactcatgagatactgtgaagagatagggaagaacataaaatttacaccacactgtggcgtgtgaattgaggagagagagagagagagagagagtcatgcaagttagagagagataagtgaaaaatcaatcatattttttctttaaaaagtatcgctatattctcttatttttccaagttgtttgttatactaatatatatatatatatatcatatatatactgtgttatctcaaattttgtccacct

SEQ ID NO: 91541 - DNA, 934 bp, Cannabis sativa
gtgtggaagatacctttgtctgatgttgaaagtgatggttggttttggaggaaggaggcttcgggtttgttcactgtgcgaagtgcatatgcaattctgcagcagcaaaatataaacatggagcagtcgactttttctggtgcatggacaaagttatggcagctcaaaattcctccaaaagtcaaagatttcctatggcgtgtgtgcacaaatagtcttcctacccgatttcaacttactactaaacatgtccctataaactctgactgtcctatgtgttcggttgccccagaaacatctttacatgtccttgttcgttgccattttgctcaaagctgctggaggcaggctcagatccctgctgttggaacgagtgcaatgatgttttgcagctggtgggaagaaggattaagagaatggaatgaggccgagtgcttggaggcatgtatgatcttatggttgatttggaagattagaaatgaggtagtttggaatgagaaacagcctaaatctgaggaagtgttacttttggcaaaactaaactttgttgattggtataatgctcaaaaccaagagttaggatctcctaatgaacccaatcaggttcgaactgagcattggacccccccaattttcctaaaatcaaagttaatgtcgatggtgcacttttttcaaatgagaagagctatggtattggcttggtagctagagatagtaatggtatggttattcaagcaagatcattaaagaaggctggtgatttacaacctcatgaagttgaagccattggaataaaagaggctctgagttggattaaagacaacgaatgggctagtgtgatagtggagtcggattgccttagagttgtgttggatcttcaaggaaataaaaatatggcctctccttatggtcatataattctagattgtaaggc

SEQ ID NO: 91542 - DNA, 553 bp, Cannabis sativa
  modified_base (382)..(395): a, c, t, g, unknown or other
acaattaccataaggccttgaccatcacaccaccactatcattatcacattcacaccataactaacacctttaacaaatatgatataaataataaaaaaaaaatattggctggtaaaccacatgaacattaaattttttaacacttaactacaaaaatagaatttttgagggtaaaactacctaaaaattcccagtctattttgttctgtacctctccgtccaaaaatcacagttaagtgccacagtggactgtccacgtgtacacatttgtacacgtggcaaatttttagtggcgcacgtaatattaattataaaaaaatgattataaataataatttaagattataaaaataaaaaaatttcttttcttttctttttttnnnnnnnnnnnnnnttttccttttcctttttcttttcttcttcttctgaattaaaaaaaccctagcaaaccctaacacttgacccccctctcacacactctctctcacggtgcacaacaccaactttcttcaaccaaccccgacgaccaccacaaagagagagagagagaga

SEQ ID NO: 91543 - DNA, 994 bp, Cannabis sativa
ataataatcttttcttaaataaataaatcaattcttgatttcagtaatataaattatttaaattttctataaataaaaatataagatataataaataactgcgttattttataattttttttgtaaatttttatatattcatatactgaaaaataaaaacaaatttgttatgaaatcttatactcactactaaaagtgataattttttagttataatattgattttttatgattaaatattattttttgtcacaacaaaaattacttccctaaaatttagtattttagatataagtaatcactaatttagttttagtcacaataagtgttgcggttaaaattatatttagcaacaacaaattataatttttgtgactaatacttttatgcacagagttttcagcaataacatataaataatgatttatctttaatcgtaatttttttaatttcagtcacaaattttactgtgactaaaaataataaaaaaaaattagcgactcacgtgaaaatgatttttttttacgtttaattttggtattacaacttatttataattttataaaatttagtggaaagtgctaaataacactaatatatacgtttgtataaaaatatttaattaggagtgttcgcggtgcgggtggtataggtttagtctattttttcaaatcaaaccgcacggtggcggaactccatatatgtatggagtggccatggcccaccctaacttttagaaaaaaaaattatacataatatataaattaaattaggataattagattttacttattaaaaaaatgtgataattatcttattattaagcctaataataaattgtgaagttgaaattgaaaaaaagaaaaaaaaaaaaaagcccacccaatagtccatttaaattaatgatctattttatggtaaaaagtgacaaaaaaatgtttaatataatttatttttgaagagtacttttacatgagatatatatatatatata

SEQ ID NO: 91544 - DNA, 954 bp, Cannabis sativa
  modified_base (139)..(139): a, c, t, g, unknown or other
aaatacattcaacctattttaacattcaacctattttactttttaaatatttaaataaaaaaataaataattaagtgtaacaattttaaattaaagctataagtataataaaattttaattatgaaattatatgtgtanaattttaaattataaagaattttgctataaaaattttaataatttaaaggcaaaaaaattgctaaaatatttttatttaataataaattataaaaattaattaatacttataattaaatttattttaaaatataattaatcttcattaaaaatttataagaaaataaattattaggtgacttttaggttataagttaattattatttatttttatttaatttttaaattaattacaatcattcaatagtaatttaataactaaaaaaatgtaactattaatgtaacattgaaaccttctccataaataatatattttattttattatatcctattttatatgataaaagtcttgctttcaaaaaagatatatatataataaaattttaaaataaattattaaataaagaaaaactcaaacaactgtaaactatcatcctccattcaaataaaaaaaatcttattaatatataaaaaaatatcgtatatcatacatattatatatcccaatattaatactatatatattcaaaatactaatcattcgataacaacaaatttcctatcgtaaaaagaaatatgttcttaaacttattttttttctttctaattttatgtatagaaataataattactaaattacttgatttattttaaataataataataacattatttttttgataccacattgtttactttgaagtttgaacactttttttataaacattgcattaataaaaaaaaatacaataatataaatataataattattaataatactctatatataatcacaactataactctagaaat

SEQ ID NO: 91545 - DNA, 594 bp, Cannabis sativa
tgtacattatttgctaagtgtttttacagtcgatattcatcgcttttgtcttcccaggtgaaacgaagtcgatgtctcgctttatgcatcaaatggcgtatggtttctcgttaatacacgaaacaaacagtttgcatatcttttcttcgcataagaccttatggtcaacgagttgcaagtacactctgtcacttacgcaattaataagttattaaaagtgattccatcgatccatattctatttatcttgacacgtgtcctccattgaaatggtagccgaatttcgggaataacaattgccccttaaaaagttcttttttaataaaaagtgccttttaataattacggagggcattttcatcataatccctttttggaaaaatgcatcctttgattttggcagttgtatggtttcgagggtcattatgaaccgtcttttcatcttttgccttactccccaccgttagatttcccaacctttggccttcttgttactggactttgtatggtcgcaaatgttccatgtgttggaaatattttaccaggatctagatttaataccaagtatgtttaattaacatcctaatatgaatt

SEQ ID NO: 91546 - DNA, 587 bp, Cannabis sativa
ttttgtctttgtttgaacagaaaagtcgaatgtcctcttcatttcatttacataacacgtttttgctgactaataactggtagttagtgaaaaatatatatacatttcttatacttggagaattcccaagagtttcttttttatacattactaaaattttactttccctagggggaaattgaattttcatacttacaataccctaaaattatttcgctaaatgaatagttattaaaattggtcatatatgaccacattgttaatttgccaaaaatacctctcacatttgaaatctctaaactcaagcctctcttcctctctctaaacccacactctcggtcagcctcctcaacccaccaaaaacccgaacctgttgttcacgatgacggcgcacggcgcaggcgactttgacccagccattaaaaaaaaaaaaagggcatcgggtccgatgggtccgattagtccgattggtactcatcggacccacatgaaaatcggaccccaaaagaaactaaacaccatcggaccccatagcatcggaccatcggattagacccatcgggaccatcagaccgaacccatcgaga

SEQ ID NO: 91547 - DNA, 513 bp, Cannabis sativa
catggcgtgggaggggtaagctggtgcttttacgatcattataacgtaaataatcattgaaatcacctaagataatccaaggggagaggggactagaatcaaaaagacgatccattaaaatccaagagtgatttttatcattaacatatggagaaccatagacataagaaagatgataattaatatgggagttaacatgcaccatacagtcaatatgattagaggaatacgacaaaatattaatatttacaatatcattccacaaaagtaataaaccacccctaaaccttgcctatgaacctcaaaaaccttatcaaaaaacaaattagctctaagagaagaaccagaattggccgccagctatatttcgatcacaaaaagaacatgagattgatgttgcttgaccaaaaggaagaggttttggaatgctcgggaactccctaatccagaagcattccaactagggatgcacattttccccatggggatgggccccgcggggacctgccccta

SEQ ID NO: 91548 - DNA, 985 bp, Cannabis sativa
aatgaaaatacaaaagttcaccgactgaagataatcttaccaaaaactacaaaattttcaatcaaaatttgtattgaaatatccatttatattaggagtgttaccgttccatcatatacgtccagaactatttgtttttttgctatcttttctcttttaggtggaaaactgtgtgtgtctaaagtccaaaacacaggtctataaacttgtgcaagacaaaacaagaaacaagaaaggatattccaataagttcctaaccttgtttttttacaatataataatatgcctccacatccactgttatcataaatatacacataaatatatagttataaattattttatagttatagtataagttacaaagtcggttcatcgtccaatctccacactcacacgatcagaagatcaagagatttgcctgtataaggctatgactagccccaatccacacacgacttgcctcactgtccctaacttccaccgcatcttcacaacatcccttctacatagacacgtgctttacacgtgttctttcattctttaccaaagcttttacaccacttactaacatactacacctaaaatcaaactattatgagcaaattactattaattaatttaaaatcaaaagaaaaagaaatctcagcggactaattgatttactagcagtttcatatggtttggatcctttccaatattacttaaaaaaactacatattttgtctatcattttctatatctgaaactcaaaaggcccaccataaaagaaaagggagaaaaggaagatgaagataaggatatcctcgaccaatattcctaagacaatttcaacatttccacccataattttttaccatatctgtacgcctttagttttaccaatgaaattaaaatgacctcatttcgtcaacatataattaagctgtaattatcagtataagtctcaccgccaccataatttttttcttctctctccacatat

SEQ ID NO: 91549 - DNA, 2772 bp, Cannabis sativa
aaaaaaaaaatacaaaaaaatcagtgttattgtgtggtatagtagtatagatatttgctgacattcttatttacttcgactaataattcaaatcttacaataacctatataaacgcttaaatcaaaaaaaaaaaaaaaatacaaaaaaatcatgtattattgtgtggtatagtagtatagatatatttgctgacattcttatttacttcgaccaataattcaaatctcacaataacctatttcgaaagtttatgcttgattttttaggagattagactgttctaggagtctgtttttaatgggataagaattatagaggcataactactaataacttaatcaataaagatgaagcaagagtttcctataattagtaagtagtcttcaaaattatctaaagaggaagaagtaaaaaagatattagcaccaaatgatttttttttttttttagaaaaaaaaatatatattaccaaataataatgagaacaatgatgttacattcaatgacaaatatatcacttttaacaagttgttgaaaaggatagatctcacatgtttgaggctaagaaatgctttcattggcttattagcaacaaattttggttcatttattcaacatattgatattatacagaaacacatgaacatggcttcattgtatatataaacaagttaatgaagtatttaaatataaataaataattaaataaaattgactaattctttttattttcttctttggatggtgttagtcaacacgtatgaaaatagtttatattttaatcatttctacaataagaaatgctaaaaggcaccagtggtgccaaacaccctcttatgtgtcaatattgctattggtttaatttagtatcgggttccatatagtttaatataatagtttttagggagtatcgttaaaaatcgtaagacgacacgtcttaagggtggtgggcaccaccgaatgctctttctacaattgcataattttaaagcaataattaaataagcaaagctccttagatgcatgtttaacaatttaaaagaatgagaaaaagtagaatctcaacctaccgaatatataatgaatcttaattattgcacaagttttgttactacatatgattgccattaattttaagaattatgggattgtcttatgtatttatgtttggttgagtaataaaatatgagagagaaaagtgatggaaaattgggaaaatggatgatttggtattaaggtgaataataattatattgagttttacaaaaatattactagatattactatgagaaatggttagtttttacaatatgttgctctaggtacatttttttgttacacagtttatttagaattaaatttagagaaatgttagtattcctcaaggtgtcatatcgttattaatgagtatcatatctcatatgatataataatttaataatttttatagaatatttataattatttgtaaattttttctcatagagattacaagactactaatacttaatagcaatacaattaaatgtgacttttactaagtagtaattaatgcactcaacgaaaaatatatttagtcacaatcattactcaaatttaaaaccacacgacctcttgtgatatataatagaatgtgttatggtaagccatcaaactcttatgacaaaatgttaagaggaaaatcggttgctttgtagatgtccttattaccccttagctaaaatcacaaaagcatgtggtgatgtatgtgggtgttgtagggcacaatatagtatatatatatatttatagatcttgttagcaagtcacactcactattaggatcattgagcttacaataatatcatcatttttttaatttcaaataatttgtctaggactctactcaccaaaggcaaaaacacttgagagttgtacatgtcaatttggtggccttaaaggaaagtgagatgaaattgagtagtgtagtgatagttttacaaaattaggtgtaatagtggagtggagagagtgagaacttgcttcaaaggttgctaaacttgatttcaactttttgggaacttaaattttactcaaaaattcataccaaacaaacacactacaatactactatgcatgcttgctttgtaaaatggtataatatcataacacatttcacttataaattcatgtaatgaaaaatacaaagagataaagcttcaatactcatttttctcattctcacttctcagacatggcatgctttgagagagggtctccagctctaaaggaaatcctgcttaaactataccggtaagtttttgtccaatcacataacgacacgtaattgattatatatcactactaaatcttactttattatgtagcaatgtatgattggaaacattaggatttctcttttagcaaatggggtcaaagaaataagatgtcaagaaaagttaatacacacagagacatgaacatacataggggcaaaaatggagtcttatacaatgatattttgtagcatgaggttaagaagtaaagtcaaatgaatgaatattgaaaaaatctagatgttattgaagaatacatagaagcacttaggcagacaggaaaatatgctttccagatggatgagcaatgtcctcagaagaaatttatggtcagagtgaaacttgtatagaatgggaccaattgaaatagtggaaattccatcatctttcactaaaaaataaaatgtgttgtcacatctaatttcagaattcatatttcaaacttgggataatga

SEQ ID NO: 91550 - DNA, 876 bp, Cannabis sativa
cttcttcttcttcttctctgctaagacaaacatacccactaccaagaatattaagaacaatgagctccacctttcattttccttttctacgttacaacctttcagccaagttccagcttttcaagatgagagcctttcactcttcggtcaatacttgcgttcgcccaactttccagaaatatctccgttacgccgttcgaatactctttgctcgattgaggtcctccattgctcccgactcggctgccattgctgagtccatcaagagccgactcgctaatcaaggtaagtcttcccaggccctcactttttttgagctttacaacaaattcgaatctaaaaccggtcctggaagtgttaataacaagtgggcagttcttcatttgcttaatattatatctgaggatagaaagaacactacgacccagttggattcttcgtcagttttactacccaatctggcgtttaacgatgccgaattgggtaacgatttaagggtttctcgtaaaagaggcagtaaggaaaagggttggaataatggggttttgttggtctcaaaggacccgaagaatctaagagagattgcgtttaaggagtttgtgaatttgttgaaagaagagaatgaaatttccgatgaggtttcagcttgcgttcgcccctttgatgaagatcaaacaaaacccttatgccattaaagagaacgaagataagttgggtaaggttctacaagtttacgataagagactcggggagattcgtttcttgggtggggatgaattttctctggccgatctttctcacttgccaaacattaatattctgggtatgtttgtcttagcagagaagaagaagaagaaggaggaggaggagggcgtg

SEQ ID NO: 91551 - DNA, 742 bp, Cannabis sativa
ataatatattttaaattttatagatgctagagcttaccaccgatacttgagactttcgaatgtagtcaccactaatgtttttttttagcatttctccaatttaaaatctttagatgaccacaagattactcagagagtgaggagcaaccataataatacaatggagactataaaatttaaacttggtgtttaggaaagtggaacctttttgtgtagttttacaagtatgcaaaagacacggtgataattattgtttttgaagcaatcaataatgcctaggcactaaaaactaaaaatgaaaacgacacccattgaaaaccaaaaagtcaattacttagcttaggtactataaatgaaaaccacattcattgaaaacaaatgcatcacggatcttctttcatttcaattaatataataaaactacacaaaatatgtaatattttacagttgaattatacaattctagattgatttgatctacattgtatttaatcttcgcttagtactatattaagcaaatggagaaaataatttgcctccataccatttttataccaatatgaagctgttggataaatttacgaagatttgagagcaataacaagtatataaataaatttatttaatagtttctttctttgttagagtaccacatttataatgtgtgaaagttaatttcatatataaaaaaatgagttatttttcttattcttattattttttagatagaatctcatacatt

SEQ ID NO: 91552 - DNA, 939 bp, Cannabis sativa
ggtggtgtggggcttgtaaacattggtcactttcatggtcctttctcatggttggattcttgcccagtgattactgtaaggtgatatttgcccctcttgtcaacatgtgggtccgccattgctacaccacttgcatgtttctgtgactttgtttttatcatactcacatgtatttaatttcatggtggattctttcagaaaataaaataggaacgaatttcattatgaaccaaatgaaatccatgcccatatctcaaggtactcttttatatacatttataagaaagtgttcctattccatgtgagactctttgtactatcacagcttcacttatctagattcattataatgttatatttcatgatataaattcactcaaacttgtatcctataaacactttgttttccagaaaacaatgatttctttttattacttatattaaatctttctatatttctatttggattttgaaattcatgttcttgttcttactcaggttgaagttattcccctcctcttctttgatgttgttagccattatgatcataaactaataataaatggagttcccatcttttctggttaccttattagttgttttgagtcttttttctctgtgtagaacaactttttctgtggttgataccattagaccatcagaaattctgagagataataacaacacagctatattggtatccaaacaaggaacttttggactgggattctttactctaacagctacttcatcaaagaatcgttacctgggaatttggtataacaacattacaggtgaccaaacagttgtttgggttgcaaaccgatgtgaaccggtgaaggactcatctggctcattgactataaacgacaaaggaaatcttgtgcttttttctggacagagtaataacagagtggttgtttggtctacaaactcgtc

SEQ ID NO: 91553 - DNA, 990 bp, Cannabis sativa
agtttagtatatagtttgttttaaggtctgatcggttctgaatattgtaatattaagagaaccttgtttcgaaaacaaaaatgctaatatattttattttgattcatttgtaaggttatatgaaataatttaataaaaaagatttgccaatcatgaaaaataggagtacctaatattattattagatgcaatgaatagacaagtagcccataatattgtgacataagtttctattcagataatttttttttaaaaaaaattatatctatcttcttcaaagttataataagttaaggaataatgaaagtgatctttgcatagatttttctagtgtttttttagattagtatttttaaattttattcaagggggattttagaaaataatcattgttaaatgaaaagaagttgactggctaagcaatatgataattttataatgaaatgcatgtgattgatttgattatgtacaaccaatggtaatgagcctatattttcctttctaaatggggacaaagtgccataagcttataatcatagaaagcattgcacttgttgctaacattaatgcattgaatcacttgattataataattgatttttattaaaatatgtccaaataaatataataacatctgttaatcttttaatttgttgtcaacatacacaagctatatacattattttaatatagagtcattaaatattggatagcaatttgagctcttccttttggaaaccactaataaggtaatttacaagctaaaatcaaaggaggggagtcactaaaaaaaataataataaaaatagaagagatgataaaactagaaaaactacagtatatacctatctaggcacttaagaaaaaacttaataagctaccaaatgcattagagagttgaaagtttaagagattcagatattctttccttagaacataaacttttagataaaaataatttctctttatttttatttttttttaaattaa

SEQ ID NO: 91554 - DNA, 545 bp, Cannabis sativa
atatcatccatatccattattaatattttcatatatgagatctagtccaatgtattattatataactatcactgtcgaattcgatatcaaaaacttttgaagaagagaaaaagtgtaagccaaacttatggtcgtctaactcatctttgccactaattgcaaattaaggctgtaatgcacttacaaacccactaaattatcacctcatgtcggcttatacttcaacatatcataaattaattaatgatatcataaactaattaattaattaattaaaactactcctatttctatacaagtatagctacatatatatatatacatagatatagatagagtttatttataatttcattataattaattaatttaatccttatctttttttctttgatgatcaccattttcaccactcatcaattaatttatctatataataattttaagtagagactatatatagagtgccttgttcaagccaagtactttctctttactttgacccacatatatccaaacacctttctgtgctaactttttgaccc

SEQ ID NO: 91555 - DNA, 717 bp, Cannabis sativa
tgatttttgtccttgttttacttcctgtctttacaaagcttcatattcagatgtatatttttattctttttagattgcatttcacagtagcctttgactccgaagttggaggaagaaaattaatttttacaattccttgtcatccaaggagttacaggtggcccatattgtaaccaccaagagtctccgtgagcttggccttatttctccccaccaaagcatcgatgcaatttcaatgaaggataacatccaagagttgatttgaggagactatgatgatgtgaaagaggagattacagccataactgtagcgaaggccttgaaggctatgaaggttgacgagcaatggttggctgactggaggagcaaatttttagaagagataagtgaggctaagagctcactatccattttggagatgtagttcggaatgagggtactctaggagcgagtaccttcaaaagtggtgagacactctttcatgtaattagagttccatccttggaaaatttaagtaacattgaccagcgtggattcgaccaatatttcttagatttataccatgataagtaccctaacactgattacatagataaggcagtttgcatagtgagaagtccaaaccacttcattcctccaatacaccaccatgttagagtgaatgtaattagaaaaatttactttctagggttcttccaatatgagactaatttaggt

SEQ ID NO: 91556 - DNA, 2640 bp, Cannabis sativa
  modified_base (45)..(71): a, c, t, g, unknown or other
caggcaacattaaatgttatttcttatctatattaataagtaaannnnnnnnnnnnnnnnnnnnnnnnnnntagggcataaaacccaacagaggttgcaataattatagaagaacgagtcaaccccgatgtaccaccgggcgaagctttgactttgtatgttgatggggcatcaaatagtgagggatcaagaggtggaataattctcataagccccaacaaattcaaagtacacgttgccctgaggtttgaatttcccacattgaataacgaagctgaatatgaagccttaattgtagggttaaagctcgctctcgaaatgaaagtcgaatacctcgaagcagtcagcgacttgaaaatcgtattttgccaagtcaacggagaatatttggctagaggagggcgcttggccaattatctttcctacacttgtgagtattactaaaatttaaaaagataattgttaatagaatacatcgtgcttacgattctcatgcagatgccttggcccgactggcctcgacgagagaagcagaattactcaacataattcatgttgatattttaacccatctgactattcatctttatgaaatgatggaggtcgatgcgatcaaaaaggtcacctggatgaccccaatcattaactacttaaaaacaggagtactccctggcgacaagaccaaagcccaaaacttcgagatcgagcctcccgatatgtcatttacgacaaaaagctctatcgcagaagttttagccagtcgttgcttaaatgcatcgacaggaatgaatgccactacatactccgagtagtacatggtgggatttgtggcaaccatgccgaaggtaattcccttgctttaaaaattttgagacaaggatattactggccgacattccgggcatatgcaactagcttcgccaagagatgcgagaagtgttagcaaataacgacctatgtaaataggccacccagccaattgaattctatcactagtccatggcaatttgcggtctggggcataaatttaattggtgaactgccaaaaggaaaaggaggagtaaaatatgttgtagtcattgtggactacttcacaaaatgggttgaatttaagcctctcgcaaccataacagcctcaaaattacgcaagtttgtctacagtgctatcatctgtaggtttggcattccttacaaactgatttctgacaatggtaagcaatatgattgtaaggagatgcgtcaactatgtgattacttggggattcaaaaagctttttcagcaatcgcatatcctcaaagtaatggacaaacagaagcaattaacaaaatcatcaagcatatcataaaaggtaggcttgaggaaaagaaaggtacatggctagaagaacttccacaaattttatggtcatataatacaactcctcacttaacgactggtgaaaccctctactcgctttcttatggatgcaaagccatagttccagtcgaagttggagcaagatctttgagaagagatgtctttaatatcaacaacaatacagaaagtcagttgctacaactcgattttttggaggaaaaatgagatcaggctcatttgaaaaatgcaacctatcaactgggaacaacttgctactttaactcaaaggttaaaaaaacaaaacctacaagtatgagatctagtgctgcgcaaagttatgcctaacatgcgtaacttagcacacggcgtatttggcgataacggggaagggctacctaatcgctcaaaaaaatcaggaatacgacttatcaattattcgatctcgacggtacaaccatcaaaagagcttggaatggaaaaaatttaaagtattactatcaatagtactcacatgtatttatacatagtccatttattttgttaaatgtactaagtatagggggtataaccattaatattgtactattgattatttaacaaaatccatcggctatttcaaccacctctgctccaagaattttgaagtcaaagttaggcagcttggacaaggttgtatatatgtaattagagatggtttgaccatactgcttcttcctgacctccttttcattttcaaggtcgtgaacgagtttgccaactcgtgattctaagagtttgaccttttcctctaccttctccttggctttcccaagatcctcgatgtctttatccttcaaggtcacatcgagctttagcttctttatgccatcttgaagaagtgtgttctgcgtcctcaggaggtcctgctacttagaacctacaacaaaggcttggaagaacatggtcatgaattgtgccaccaattctgcagagcgtggcatcaagtcatcagtaggaaccccctcaaccttaaagacaaactcatcgctcacaaatttgtcctgaagagctatgaagttgtgggccataacagcaggatcgatcacaaccttcttccccttgtcttgagcagatttatgttgtttctttgacgagtcagccacttatgtaggggcagcatcgcttttcctcttctgcgcaatgactggagaagtcgttgtagtaccaaccttaggctttcaattgagagtgggagcttgctttaggaaagtcatttctgcgagaagaccataggataagaatat

SEQ ID NO: 91557 - DNA, 846 bp, Cannabis sativa
agtaaaatatatcatctccttcttcgcaattgaggggtgagggatttttttttttttcttttttgtgtgattgagtaatcccaatagaattgaatgtgattgatagaggtagaaacaaagtatataattgaaattatcaatcccaatttctacgattgaattgagggaggaagaaaaataattgctatttgtaaaagaatttattggcatatttgataaaatagataaaaataatatttgtggtatttttaaaattatttttattttttattaattattttcgaaaatatagtttcattttcttgtgtgaaaagactttcaaaataagattttattcccttttgactttgtgttaattaaataggagtttttcttatttagaatatttgattttatctattcttaatcatactttattcctttttatttaatttcttgactaagaaattgtatatagctatgtgtgttaatgtagtcaaagttgtcttatttatttatggaaactttgttgaaaaactgtctaagttcaatgtacctatttgaacgtgactatctgtttaaatagattttcattttcctattttggaaaaaatttcatttattgacttgattatttcttggttatttgaccacgatctagagggtttccaaagtctataagtgtcagtttggtatagctgtgctggggaaaaaatagttgtagctgtgctgtaagaaaaagcagttgtaacagaactgtaaaaaaattgagttgagtatttagtaaattataaattgcaaagtactgtgagttgttaagatctattataatgataatgataatattataatctagtttattataat

SEQ ID NO: 91558 - DNA, 748 bp, Cannabis sativa
aaaaaaaaaaaaaactttattagaaattttgtctctaatttattattaacactaaatcatgcatgtccacagaattatgtaggtttgttaaaaattcctgtcaactatccaatcaaatttttttggttagtcaatcaacaacgtggggagtagtcgttattatcaattgattaatgaaattcttaattaattttgtcttgtttctttgagaacaataagaagaaatcaaggtcccaatttgcattgactttctttgttttcaattggtaattgactttttatatgtttcaaggtaatagcaaaagattggcaattaactaaacatgacatgatgacatcaattattgtttatttttgctttaaaaacagaaattaagaaacaaaaaaaaaaaaatcactaattaaaaaaaaagtgactaagaagtctgttaatttttctttgataacaaagaagtcttccttagttgttacttaagacccaagctagcacaagattgaagagaaacaatcatggctaccaaagatgttgatgatgttattcatgatttaacggctctcttctcttctgatgagagggattttctcgtccgcaacaatggtgaccaggtttaaattgatgttcttaagcaattttattcttgtattagttaattaagaatttttctatattaataataatgttctttggttatgaaataaattggaattatcctaattgattagatatctttgttttagtatctgttgt

SEQ ID NO: 91559 - DNA, 799 bp, Cannabis sativa
attagggtttatggggctctaattagtttctatataaagaacataagggtttggtccccaggactaatctcaaccactctttttctccattcccatcaattgagtgagaaatcatagagagaagattagtttgtggaagaccatatatcatcttatctcatatacaatattttctacaagttttaattataatctattttctaaaaattattttattaggtatgtaatttttcatgtctttcttaaaattttgttactaatttattttaatttataaatatttttttggtgcgatgacaaaaagaaaatgaatgtttttataattataaactctaaagttttattatctaatttaactagagcacatttttgagccatatcataaacaaaaaagttttattgtttgaaagagagatatccttcttccttcctgttttggtaccccttaattttttcaatccactatggtgaaactgacaaaaaacaataatattaggatgatcactacttaaattacataggataatttatttatatataaaataatacttcaattaaataataaaaaatttatagtccatagagttttattataccttaacaaaatcattccttgctaattaagttataggggtgtttttcgagcaaagtttacaaaattgtggttgttttttaaaataattattttatagaaaaaataattaaaaattaaaaaatataggaaaaataatttagaataattagttattgttatagtaactaaataaggataaccagttacttaaagtaactagttacc

SEQ ID NO: 91560 - DNA, 500 bp, Cannabis sativa
ataactcaaatgaaacgcatgatttttctgcaaaagatgatcaccatcaccatcatcatcatggtcatcatcactcaaagaattctgaccattctgttttggcagagagtgaaaaactctcaaccactgaccaaagcaacacaagcaaccatggtaagagccacatcagcaacgtatcatttcaaaaggcagatattgagccaatttgtggtcagcagcatcatcttgaggttcattcttgttctaagaaacatgataaagaccacagcagcattgacgtaataatacatggtggaagccatgctgagtcaaagactgttcatcaggcttgtttgatgacaatggagaagagcgaatctaaaggatgttgtggaagtcatgaggaggagatgccaaactctgcaaccacgaaagcttgcatgagcttggagaaaagagaatttggaggctgttgcaagagttacatgaaggaatgttgtaataataaacatggacatttt

SEQ ID NO: 91561 - DNA, 578 bp, Cannabis sativa
ccaattggaatctatacacgttttattgcttctgtcactatatcactgcctatcttatttttatctaaagaggagtactactgttaaccttctaatacgacttcttagttaactttcatgtccaaaaatataagttaattttttttttcatagcagtattctttataattacaacattattcatgttagtttttgaataatttacactactgaaaatagatttgaaattttttgaacacgtatggtagactcaaatatcaagaattttgttttcagtactgtaaattattcaaaacatttcaaaaatttaaagggatgatatcgtaactataactaatattgctatgaaaaaaaattaaaaaataagtatttcagtatttaatttcgaacttgaaaattaactaagaagttgtaattagcacttcttgatatgttaaccaaaatccatttctatctcttttatatgatattttatgatatgaaaaagagtaactaattgagtctatatatagccttgtatatttgagagaaaagaaagaaaaagagtaacctactatgtaatgcaaatttgaataatg

SEQ ID NO: 91562 - DNA, 558 bp, Cannabis sativa
ctaagaccccattttagtaataggttggggtgtatttataaaaagtaaaagtttaaaaataaagtgggatatatatattttataatggggagtatttatatattttcgatgtactttatttcttttttaccaatcaaatcatgaaaaataagagttagttccggtttattatcttcaattgcagacaacacctatatttgttaaattacatatattattctaaaatattaacttttattttctctttcatacataaaattaatttttttttaaaaattacaaactcgagaaattatctactatggtctcacataccactttttgattaaattttataatttattatattctttcaaaaaaaataatcggtaataaagtaattttttttttgaaaaaaattaaataatgccacatggtcattatttattttagataattatgttcataaaattaatttgaaatgttgaccaaaatatacatgtgtcaaagatcagattattggagatgcttattaactgttcttttttcaataagaattagattaatttgttatatata

SEQ ID NO: 91563 - DNA, 989 bp, Cannabis sativa
aacatgcctgtttctaaatgttcctccttaaaccaaagtgagatcaaactaaaacaaacaaaatagagtgaatggactgaaaactttatttttgatcaaaaaaataacaaaatacataaatgtcttaaacaaacataaagcaaagaaaatacaaactcccactaaatcatgatatcttcaagcaatactacacacatatgagcagtgtgcccatgaaagaccttgggttgtaatccttttctgagcggatccgctatcatggagtttgtcccaatgtgctctatggatatctttccactctgcactctttctttcacaactaggaactttacaccaatatgctttgacttggatgagctccctttgttattggaatatagccctactgatttattgtcacaaaatatcttgagtggtctttctacattctccaaaatacacagcctagtgacaaagtttctctgccatattccctgatttgatgcctcataacatgctacgaattctgttgccatagtggaagaagctataagtgcatgtttgacacttttccaggttatagctcctccagctaacaggaaaatgtagcttgttgtagatgttctgctatcttgccatccagcgaaattacaatcagaataccctacgacctccaaataatttgacttcctgtatgtgagcatgtaatcttttgttctctgaagagacctcataaccctcttggttaatatccaatggttcataccagggttgcttaaatatctgcctaacatcccaataatgtacgtaacatctggacgcgtacatacttgtagatacattagactcccaacaactgatgcattgggaatctttctcatttcttaaatttcaaggctgcttttagggcattgattaagactgaatttgtctcctttagaaataggggtatcacttggtctacagtcttgcatgccaaaccttttaagtactttatcgatatagctctt

SEQ ID NO: 91564 - DNA, 525 bp, Cannabis sativa
ttgcactttgtattgatttataaacattcttgttttgggttgccaggcctatgtgattcgcgttaaacctcttgtattttattgctataaggtttttcacatgtaaaagaagccaactaggtcaggtttttttcctccaaaagctttggatgaaatttactttctaatgatcttggcacacttactaattgatgccctaaaaatttcgatattagatcccaggttcgaacctggtcccacttctttcccaaacccccctcaccactagaccccatttatacatgtcttaagtagccttataccatctccaatctaaaaaatctgctaaattaacagaaaaaaagagtagtaaatgataaacatttctattatttactcttcagggacattagacacaaataatccagaaacgattcgtgtatatatttcacaaaaatgtgaaatcaaagtgggtgataaggcaaagattgtaatggaacttagaaactaaatcattgttaccttatgatgatccagttcttcgtt

SEQ ID NO: 91565 - DNA, 1753 bp, Cannabis sativa
agtacagtgcccaattgtgttttccgtatataatctttttagagcttcaccaatacaaacaatttaataagttgccaaaagtctccaaatcatcttatttgtcctataaagaatactcaaataggtagtagttttcaaaattaccatatcatggtcccacatcttaattactttttatatataatttaattatataatttatattttttttttaaatataaatttaattcaattacactaactcgatgctctagctatattagcaacatcagggagattatattttaagaaaatacgatcagcatataaataagatgcattagctatacaaattgtttacatataagagtttacatattaacaataccacataaattaatatagttcagatttggtaacacttttattttaattttttaacaacaaaattatttttaaaaaataaaatgggttaattatttaactatttttatttgaaaatgttaaaaataaacaacaaaaaggatgtttcataactataattttttaattttaaaaataaaaataatgtgtttttataactatgttttaagaaaaatggtgtaggcaaggtctagaccaggggactagggccacggtccgggccattaaaggttggggtccggcttgggtatgtgtccgtgtttgggtcaaaggcggggcttggacaaggagactagggccattcaatgtcgaagtttggcctagtttgattttgggtctgagtcccgggatcaagggcagggtttggatcggggtcgaggtcgaagttagggttcaggccattccgaggtcgaggtccagctagcttcagttcgggtctggggcacgctagggtcaaggctgagctcggtccgaggtcagggtctgggatccaggtttagagatgggtttggctccatggatggggtccggaaccatgtgcatatatagctggggccgaagtcccaagtccaattccaaaacatgttatttgaacatattttcgcttttattaaaaaaacaaaaacctaataaaaaaaagtgttacgaaattcacccacagtttaaaaaaatcaaagtattagacaataaaatgtttgaatcgtagactatattttataatcgactatattgttccacatagatatggaacccataattcttctagtgacaatgaggagtcatatccctagtaagtatttgatccactcctcctatgaattttttaggggacaaccacaatacatgtggtgagatagagagatagtaatgaaaatcaattaatgatatcgatcgtcacagccgaccaatacgtataatatgaaaaaataaatatatcatgatcgacaagctgcaataatctatcaataaaatacaaaataaactaatttaatcccaatattaatatatcagtctaatattgtttgttaatgaagtaggtttttctcatcgatcccttgcaaatattatattgcttggattttaacaactacttttttactcaaaagttaattaatatccaaagtatagtctaattaactgtacttttagtaataagtatagtaataagcatgtgacaccattagaaatttttattatataatatatcgatcaatagatttagagtttaattagacaatattatatatgaaaagttgttatataatatatgtaaaatagtaggtacctttacgatctctatttaagtccgttgtacaaattttgttgagcaccaaaataatatatattctga

SEQ ID NO: 91566 - DNA, 1407 bp, Cannabis sativa
ttcccgagcccacgacagttctaagatagtattttcatggcgactgtggagacttttttgggcaagtctccatagccccgaaacaaaaatccttctgtctgttgtcatctttaacttggttcgttgtagtgtctgtgatttcagtgatgatacaactcgtactaggccttgcattcttttcaattactacaaagtgattatcaagattcacagttagatcaaaagaactaccttcccattggcttaatattgttgatcgtttccccgctcttgatttcgattgtttctttcctttgaaggattttggcgttgctgcaagcttcgctttgttcttcggtggtctacctctcctctttggggtactggattcctcaatgccctgtggggttctcatagcgatcctatgacctctactattcgtgccttgttctgactgagtcacaggagaaaattgcaagggtaggggtttggcattttgagcttccaattccacctgagacgcatcgatttcattgtttgttcgttgcagtgtgttttgctgggcattttcgagtgattcaactagattcacgaaatccttggacgttgcagaggttttagacggggtgaatatcaaaccatctgaagcttttctttttcttgggccttgaagatgctcctggaccctgaagtcttctatgtccaaaattgggttgagaagtgttggctctctataatacttatcaacagtgagtgagcccatcattaattctctagcctttgggtcagcccaacaattcgaagtgggccaattcaccaattgggcttgggttcccagtagtgagttgtaatgtggtttagctgggcttcgagagtgggccctattactacccaggttgatgggttgtcgatcctcttcttgcagagttccttttgtattcaaattacccttctcaaaatggctaggatccaaatcatgaattttttcatccctttctgtctgcttcgaaaggggatgtgcttcatctgtctcgatcagcgtcccttgtgcctccaatgttggtctgacctccacgataccgttgctcactgtctgtggcgtgccatctgtgcgtcgagctagttgtagctccaggattgaaacaacttttgtattgtttccaaagggagcaacttctccaatacctggcaggtaaaccatggggagttgggtaataaccatcccgtcattctccgcctcatcgtcggcgactattctctttttcgtggggagttgtctccggcattctcgtagttcatcagcgtcaccatttttcaatgccttctgcactttcagctggtttcgcaaggttgggtcattgattattctcttctgcaacgcccagtcttgaaaccatttggctaggggagttgagaacgtcgatttta

SEQ ID NO: 91567 - DNA, 629 bp, Cannabis sativa
ataacctagatggacagttctacttttagtaggacgtacagaagagttgactctcaaggtcacagacagaagttgtaacatccgagtagagtacatgaagacatccgaccaacttctatcatgtattctcaagcttgcgagtcatgatactatccctaaattcattagatagattcgtatctctagagaagaaaggaaatctgccaagcttctattttgcttattgtaattatggaaattaaaccagtttcccattttatttctgattagttttaggaaaccaatttgatgtaattcatccctataaatagtggattcatctcactatccagggacacaaattattttcaaagaaagaacactcaagagagaaactttgatctaagagccaaatactcagagatcgttgtaagagcttaagagagagatcaaggcttccttgttcatcttctcataagtcaatacaactaaaggggattaggctattaccatcaataagggatcgaacctctataaatctagtattttcttttctttatattatttatgttcaattattcaattaatcttaattgctttaatttgactcactgtcattgattaacagtgaggtcaatattttagtgctt

SEQ ID NO: 91568 - DNA, 648 bp, Cannabis sativa
  modified_base (495)..(495): a, c, t, g, unknown or other
  modified_base (602)..(604): a, c, t, g, unknown or other
gcgatgtgggattacacagcttactcggtaattccacttacgaatcacgagactactgactgtcataccgatacaccatggattacaaaggtaataactatatatagattttcatagttgctaaaatttgctccaattctatcgtggctaattaatattgtcttaaattctccaagtcagcgccagcaacgtattccacgtcagcttcagaaatgcgcttttcctacgaacaatctgaaagacaatcacatgttccagatatgagttcaaggttgacataagctatctagaaggatgtctctgaatgtatgacaagctatctgaaagactctacttacggaagacaagctatctagaagaaccattaggactggccaaaactttacgaataaagctttcccaatgaacaccaagcttttcgtaacttcttttcggagtaacaactaggggtgttcgcggtgcgggtggtgcgatttttgactattttttcaaacnaacccgcacatgcggtttttttaatttcttaaaccgcacccgcgccgagaaactaaaaaactgcaaaaaatagtgtggtgtgttgcagtttggactatcactaaatnnntaaactatcacaaatacaacaaagcttgagcaacacttgtcaaa

SEQ ID NO: 91569 - DNA, 1146 bp, Cannabis sativa
atttttcaaaaattatcatcgatcccaactgtatttctctccccctgagccagagaatcctataaaatttgtgatatctaataatattattacacctgtagggatttcaatatatcacaatagatcaataattgtttaaacccatatatattatatgaacattgaacttcaggttcaggttcaatagttatgaacttaattcattcctaagaaagagtcatatgtgtataattagaaatacataaatttataaattttgtaaatccatgatcatatgatcttattaccttgataaaaaactatacaataaaaatttaataatggctcaagattgctaaagaaatataattcaaatattttcttcaaaaataatttaggatatatttattttctagataaataaataacttcacatatattaaaataaattatatttgaaaaaaattatcaataaaaatataactatatcttataaattagtataaaagaaaaattaaataaaattataaatagagtacttataaaattaaaagaaaatattaaaatatactttcactttttctatgtgcaaaatatatgaactttcttctattaagcattataaattaacaataagaataatcttcaagttcttcaacaaaacttagtcaaagcatttatttattgagtatgattaatcatgtcaaaataagtcaagtcataatcttcagattcagtataacttgtatttcaataaaactttcgtaggataatttgtaaaatcactacaacatataagtaatattacaagttttatttttatagacacgaataaaataattatattattctccaaaacgtataaactcttcaatgatcactattatgtttatcaaactttatatttcttcatcatcaattcaacgatgtgtacatttaaaaggtacaggacaacttcatcatgttgttgtaatggtcaaataaatataaccataatatagcattcatttttcctcacatctttctaacaagtcgtctaatttattaatagactactaagcagtctaattatcatgtagcaattgtacatctaggtacatacaaagatatttaactacttcaagtagcaactgtatttaaaacttcttcaaaaagctttttcaaata

SEQ ID NO: 91570 - DNA, 2883 bp, Cannabis sativa
tccatccattctacttccccatcacatccctatctaaagattttttcaaataaatccctttgatggaatgtgaacaaagaaaaaaattaagttgatatgttctaattgtttcggggtttagagtggaatgtgaacaaataaatctctcataaattttttcaccaccacatcttcttttcttgttacttaagattacaagtacatttcatatacctaaacaacacagagagaagaaagaaattactacaagaattaatgaacaagggtattgaaaaaggtactagatagagtatgttattactaataaaacaaagaaggtgatcatcaatatataaatgtccacttaacaaccaattaaatcagactctttcataataagacattaggcccaacactaatatacacacttatatatacacaatattctatgtgaaatttgcatttctcatttattgcttaaaaatattaaggaacttttaacttgatttaacttatatattaattccttacaaaaaaaaattatattaattaatcaaaagtgatgaagattattggaaactaaaatttgattaaggaaaaatgattgagcttgtagtatagttcctatccaaataaaaatgtctctaaaagttattcttgaaaaattatctgtctctcaaaagtatgttcccggacaactaatctgtcattagggctgttcacgggttgggttggccgggttaagcctattctaatgggccaacccaatgagatcggcctattaaatttgaacccattcatattgaattttatttgtaacccaacccaacccaacccattatgggttgggttgggttgggtcgggttgggttacaaccctcattttgttccaattaaaatgtaaaactaaatattattggagtcatcaaaaattaaaaaaatcaaataccaactataatacagtcatccaattccaaaatacaaataaatattacacattacaacttaaaaaaaaactatgtttacacattggcaaaagtcttctcctcacctttgatatcaatacaagtaaatatagttcataattatactataattaaaattggaagtcaaaagaaataaaagtatgatatagaagaagtaataacaacaaaaacccacaaacgagcaggagcaacatatgatgatggtgatactgttgatgttgttgttattattgtagccctgaataatatggtgaccaaattcatccatatatacaaatacatcactacatggagagattttcaaaatatccatcttataacaattttcaaatatatatgaagagattttttctccttttacctctttctctatttttttttactttttcacctcttcttcaacttttttttatctgaaattcggcctacaattaaaaagcaaacaatctgagaaaaaaaatatatttgatttctactatataaaaatatcatatggagagagaaaaaaacattatagaaaaataatcagtagcatgaatttaaaaataacaataaatcaagttaaaaaaataatacagatctcatttctatgtattccataaaaaaataatttctatataacaaatgcataaaagtaacaaaaaattactcaaaaatattataaaacaaaaaacaaaaactacaaatatcacaacgaaattacagttgcaaaaaattaaaactaaatcacactagaaattttgctcacaaattaaaactaaatcacactaaaaattttgctaacaaataatttataacagattatcatagcatatacatcactcataatatacactatctgattattcatcactcaaacacaaagaaacatcaatgatagaaaaaaaaatcattatcatgcacatattataatcataaaaaatatcattatctctaaatattaataactgtaaaggaaaataatggagtaaagattacattaccttcagcaaatacaacggcgtgtacgactatgcggagcaataatccttgtttcattttcctctgccattaataagaataagaaaaaatatcagtaatggaacctctgagttttgcaagcaaagaaaaaatcaaagaataagaaataaaataggtaatctgaagagcttacctagccattcaaccgtgtgtgccgtcgccgattgtgtgtcatcgtcaaccatatttggcagaactggaagagatcagtcgatctctcgaccatggctcaagctcaaacctcaaacgagagagaaagggaaggatcactcggacgttgctgagacctcagacgaaagagatgaggaaggatcgagatcaaatgagaaagagagggaacaatcgtgtttgtggcttagacaagaaagaagggtgaggaccgaaggaggcggatgagaatatgagattgagatgtgtgtgtgagagactttagggttgcttagggattttgtttgatttcctttgtataaaatattatatatatatgataagctatagtacacgggttgggttgggttcattgggccaaaaaaagcccaacccatttccgacccatatcatgcggcctggttatttttcaacccaatatcatttcggcccagaaataaataggttgatcggcccattttcgggttgggttggccgggttgatcggcccatcgggttaaatgctcagccctatctgtcattctagaagaagtcttgtggaatgttaatattgccattcagaagaaaattcctggatgactatcatgtctactccgagcgtagtcttcaaaaaaaaaaactagtttaaagggagtttcagatacttagttgttcctcttaaaagggagtcccgaatagtcgactccaactgtctctttcctatctgaatgctcttttagcaagtaactct

SEQ ID NO: 91571 - DNA, 596 bp, Cannabis sativa
gttatattagtgcagtggcacgctaatctatgcaatgacgtactaagtgtatgatatgtatgttatatgtttatagtttgattatatttttttgctgggctttcactcatgggtgctttattttgcaggaaaggataaagcagtaccaggcaagccatgggttcaaaagtattgatggtgaattgtacaagttctggccaaactagctagacgacgagagttgggtccaacatggagattgtatagaaatcttagcttttccggttaggtcggcttgtatgtaaacaacttgtaatattttgaaatgaattttacagcatcctgaatatgtaactatattatttttattttgaattaaaggtatattactattattagaagttgttttgttgtttaagttaaattttattcacttagtttattagatcccgattaatatgattagcacaatgcaatcaagatatgtgacttttgtttttaattaggacgttacaataacctaattaaaatacttctaatgttctactttgaaaaaaaaaaaagctcagattaatattttataaatcattttgaaaaatattatctgaaatgttatt

SEQ ID NO: 91572 - DNA, 657 bp, Cannabis sativa
ttttgagaaggtctcgaatacgttctagtgagaccaaacatggacactaaccctcatgggtgaatgcaaatgtcaaccttttccatataacatgtcatcaagtgatggttacactttttctgacataatttgatctcgttccccacgatcaagcatggtagtgcgcgcatcactaccatctctttaccaggtgaacaatacagacttctatgtaaaaaaggaaccaactttgatagacatgtgtcctttcattttaaaggttaaacctttgagagacacgtgtctgaagcggtacaaggtggtgtccattatctagttgctacacgcacaggcatgatgctacccacgagatcaaccagttagctctacattatatataatttaccccaatagtgggatcgaagcagaaactctaggtgggtttaaggcgacccacacccatcacttaagcctataatacctcattccttttaatgcaaaggggcaagccaaccaaacacatagtaaaaactctgcaaaaaatcatcattgatcttctttttcttcttagaaaataaattaagtgaaaagagttaaggtttcctgcataatattaaattcatcaaattgctgaacgaggctaatagactgacttatcactactacaatattagcctt

SEQ ID NO: 91573 - DNA, 727 bp, Cannabis sativa
agattaaaaaaatatcaaattattcagagattaaacataaatttagtaattaatcctctaaaatattttacaacagcactcaaatttttaaatttttttaaatttaaaatatagtgtgtgagaatatataagttttaggatgatattggtatggttaaataacattaaatatagaatttatcaaaataataataataataataataatcgggttttttttttcataaatatacccttttcatgttttatttacaatttatgacctaaaacttttatttacaattttataaatttattttttaaaaatacgattttaaaatttaaaaattataaaaatacgactttttcattagaaacaaaaaatagtatgataaaacaactaaaaaaataacgagaaattaatctcacaacaattgttaataaactataaaacaataaaaagtaacaaaacaaccaaacttataataacaataaataaattataaaacaatcaaaaaataatatcgaacaatttattatttttattcaagagcgtatttttgtaaataaaaaaattaaaaaattaatttttttctgtattaacatatttttgtaattttttttaaatttttagtgtattatgtaaaaaaaatttaattatacgtacccactattagaaaaaaaaaaatgagtttctaaacttaaatgtggttccaataataaaacaatcatctactaataaacatta

SEQ ID NO: 91574 - DNA, 762 bp, Cannabis sativa
gagaagtatgaggcggtgacatgacactttaaaatctctctaattaactctttctatcctctccttgattttcttaatttataattttttactaagtttataaaattacttcaaatttatttatctattttctatttttttttaaataaaaatataaatttcattatttttaaaatttgaacatatttacgataaattatttttaaaaaattcattccagtaacgagtatatcctttcattcatattttatattaaataatcaaataaaaccttgatactctcaatttataattttttcttagatttataaaatcacttatttatttttaatttttttttaaaaaaaatatatataaatttttcctactctaaaattataattatcataattattaatactatacaattcaaaatcttgaatatatattaaatgtatatatcaactaaaatatctctaatatttaaaaaaaacaaataataataactaaaatatctttcatatttttttttaagattcttttcatatatattgtcaatattttttactatataaaatattatatattcggaatgaaatataagattaagattgaaatttaaaaaaagacaacagtggcaactataaataaaatacaataataacaacgggtaaaatacggtaataacaacacaaaaagttatggaaaccagtgtttacttaaatattaataataataataacaacaacaacaacaacaacaacactaatttttatgtaattt

SEQ ID NO: 91575 - DNA, 619 bp, Cannabis sativa
tccatacatcaaaaggatcaccttgaataatagatcgtaataatactattcttgagtccaaaataaccatcaatgtagctatataaaagtttttaaagttactaagaacaaagcagattactttcactttgggtgcacacataaaaaaaaaaaatacgataaatgtcagtatattttaaaattaaataaagttttgtatttttgtaaataaaatcaaaagtacaattgcaggtgaaatctttagttaatagttggcatggttcatgagcctatcttagagtgaaagacacataaagcctcttcgtctcctcctcatatgattacgtatgggccagataaggtatttgacatgttatcttatagaatagcctctttatctcttcctcgagtgtttaagggccagaagatgcatttgatatgttcttttatgggaaaaattgtagaaaacaagttagatagtaaaatcaaattaccttatgattatcttactttttgtgaagaatttaaattaccatgtgtacgaactcaacatcacatctctagtagctcccattttggtcaatgctatgggtaaaatagcttgtgttgtcaggagcttaagagcaatatacttgacaag

SEQ ID NO: 91576 - DNA, 578 bp, Cannabis sativa
ttttatattttaattaataaagttcttctttttgataaaacaaaaatattattctttaatatagtttaaatttaaagttattatctcatcatataaatatttaatttaaacttaaataatacctcaatatttaaacttttatctcctttttcccatcttatggggatagcatatagaaccctaaacacatatatcacattactatttttaaatattgaaagtttgctgttaaaaaattaacaaaaaattaataaaaaaattattaaagtaacaattttctttaaaacaataatttttggtttaactaattaataattaatatataatcatctgatctagaatatttcaactatttcatggagtgaacaaaacacatatttaatcccaaaatatataatatataatatagtttgtgacgtgatcaatatacttaagtataattttcgataataaatcagaaaatttaaagggcagttgaaaggtattatcatatctagggtttgtatttcacatctaataaataatttaatttgttcagatatgcattgcaatatatcatatatagccaaaaatggctc

SEQ ID NO: 91577 - DNA, 681 bp, Cannabis sativa
ccattggagaccataatagagagccttggcctccatttcataaggctgcagattcccaagcataggcttagatagagcagctttaacatgaccacaagaatctcttataatagctccaagtcccattttattgctggccgaatcaatagcaccatcaacattcattttcaactttgttagaggaggtgctatccatagatgatgagtcgcagcagaggaagattgcagaccagattttgaagccttcatagtctgctgaaaattgcagaaataagccagagcctttgccgcaattacctctggtttttggggatctttaccatgaataatgttgttcctatcataccaaatataccacataatgcataaaatcttttctaagtcagatttggtgtaagtttgtgatagcaacaacataaaatttgcattggttaatcggctggcagcttgaaaatcaagaacgaaatctgttgaacgccagactgctttagcatgcttgcagctaaataaagcatgccccaccgattcccaagcattggaacataagctacaagccgcagatgtaatgatttttcgttgaaataaagcagcagccactggtatggattgttgatgagctctccatccaaagattttaatttttgatggaatgtttaggccccaaaatgatttccaccatga

SEQ ID NO: 91578 - DNA, 637 bp, Cannabis sativa
gtttcggtagtttctatgtagattgttattacaaaatttatgaacaattacgcatgtgtacgtaatcgtttgtagttataaactcacacaagtgagtatgatccagagggaattgttatcaagtaccacaaaattagatttgtgtttctatttggcaaatcgatttgaaagattgaagaattaaatgactagaaattcaagaaacaataaaatagtaataacgagtgtaataaattatggatgagtgtttaggaatacaaatcatgttagtttagtttctcaattgctaatgttaattattaattctctccatattggcgatcacagattatcaatttaaccctaactcttctcagatcattaagatcctaaatcatatatcatctactcgcatctctgcagtaaaataacatacaacttgcattaagaatagaatctacaaatcacataagctatataaatactctcgttttacattaatttatgtttgtccaattagagcattcctaatattcacttctcaaatttcacattaggatcataataagtcacatctaagatagccagcctagaatatgtaattaaagcaaataagaacaaatcacacaatcaaggaggaaaactaataatcacatta

SEQ ID NO: 91579 - DNA, 1149 bp, Cannabis sativa
taatgggataaataataatttgaataaaatagtttaaattttttggtgtttaattttgtaaattatataatcgtaatataataatatttgaaaatattattagtttcttattgcacttttttaagggaccaaattttaagattagaacagggcctcaaaaatacttaagacggccatagtgctaagagtatgacttacaaagtatgaaactatagtagaagctcatgaaataagaatgaccttgactctcgactaaaacgaaacaacgtcggattctcttttcgatcgaataaaaagttgctaaaatggtttcattttagatgagtcgactactctattcaatagacgacatctttgactctcgcctaatacgggacgctgtatcagtttgttggaaaccttagaaattacttaggattgtttgtttttgtatttttacttgtcattcctacttgctaagtgcttaataatttttgagtgtgtatgattttgtattgacccttatttgatttttatttattgatatttgtagtacccaatatgactatgaataaccccattgtgtcactgttgactgacaacaagctctctggagctaactttgtcaaatggaaagagaacattaatattgctctcataggtgaatatgccttctttgtgttaactgaagaagctcctgagtagccaggtgagaatgcaaccaaggtagttaaagaaaagtatgagtgtcggtagaatgctaacaacaaagctcgatactttatgctatctagcatggttaacaccttgaaaacaaggtttgccaacactctcacgattgcagataccatgaaccagttaacggaactgttcgggatgatgtcagaccaagctcgttttgagacgaccaagaattttataaatgcacggatgaagcctcatcagaacgtgcgtgatcacctgctccagatggcaagttacttctaggaagctaagaattataaagctataatagatcaagaaactcaagtgagtttgatcttaaatagtttgactctagcttttctacccttcacctcaaattatgtcatgaacaagttgacttttgacttccacgagttaatcaacaaccttcagacatttcagaatttgattggaggtccgcataaa

SEQ ID NO: 91580 - DNA, 800 bp, Cannabis sativa
cctaacaagaaattccaaggtaattaaggtttctaacaaggtggaaacgaaaattggagaacctatccagagtgcccaaggtgtaagagacgccatcatggcaaatgtcaagctcgagcctgcttcagtgtgggatggcaggtcatctaaaaagaaattcccacaattaaagatattagaacaaaagaaaaatgatacactagttccccctcgggtattcactttgacccaggcaaaagctgatgttagtccttcaactgtgacatgttagatttttcttgatggtattatgttgactgctttaattgattctggtgctacgtattcacatatgtcgagtagagtgattggaaatctacataaacctagtaatgttttaccaagttgttttggtaccttactacgtactagagagttagttatctacagtaggtgggttaggtcccttccagtgtatgtagaaggtatattgtcagtcaatttgattgaattgaatatagaagattttgatgttatactgagaatggactggctagcaaagtataacgcaaccatagtttgtaagagaatctttcttggaccacaaaattaaaaaaaatgaaaaacatcataaattaaagaaagctctctggaagcaggacgctgcatccagaagatattttctaattgattgaagaaatcctgtgggagtgggacgctgcccccaattgtggtattcttttagtggctaaactcctcctaagtatgggacgctgtacttagcacgagtttaatccaatctatcttttttctttttcctc

SEQ ID NO: 91581 - DNA, 840 bp, Cannabis sativa
attccctcgtacagaaatttgagccatttagtaatggccaactttgtgaaacgaacattcatacccctatgaagtggtttagtggtgtcgaagaggagtctaattctcataataggagtaatcgagtcatagagggacgagagatggacttcaataagttcacctatggcatcgacaataaactggggaagaccatatgagcgattcctgaatgggacaaaattgacttgcatctagaggggaatgtatcggagttgagaggggagaatagtgtcaaacccatcagggatggcgaagagcttgagagatctgccaaagtgccagggttgaccctcgacaaccctccacctatctccttcacacccaaactaaattagaaaaacactagaatggtaatttgaaacagtgaaaggaaagcgagttatccaagcctctttcatagttttactaatccatttaggtttgatagttttggatgagagaatcttgacaatggagtcagaatggggttcagggcagatggaaacatgatcgaactcatgaacaagggcttcctcttctgtgaggtggatggtgaggttagggttttcagaagtggcagacatttttgaatgtttgcacaataaaataccagaaagaagtgaatataacaggcaaacagggagatggaatttgaagaaaaaccacaacattatgtatagagaaaataataagtagtaccttgaacaccttggccacgaagaaaggaggtggagagatgccatttcagtcgtagcataccgtagcccaactctattccaggctacaatcatgatgacttgaatctgcatgaggaaatgg

SEQ ID NO: 91582 - DNA, 2331 bp, Cannabis sativa
gtgttgaatcttaggccaatcttctcctttctctttctcacaccgttgctttaccaaaggacatccagctatccacaaacgagaaaggtaagtaggcagtccttttggcaagcactgcagcctttcacaatagtaaatatacaatttctgaagagatgttagttgttgaaaggccttgccgtttaaggtttcaagcttactactctccctaatatgaagtgtcttcagagtggtcggaagcagcccttcgtcttcgggaaaacaatcatcttcccaatctacgatttttaaggattctaaagatgagagtgtatgcagatcaaagacccttttggagtggcataatgtaatcttcttcacattgggaagcgttatgcttgtgatagtctgttgtgattctgttatcgggaccaaactcaccatttgttcacaattccatacagtgagttcttccaaggatggaagataacaacttggtaatccaactctaagctttttacaatacgacagctcaagtcttttgagaagagggaatgatatttgaccttgttgaatagcttcactattaattgaccaatctttccattctggcatataggaaatctgtaacgattctagacatctgaatagaggaagacccttgtaactatcatcacctattgagatcacactatcacattcctcgattctaagatctttgagaaaaggtagctgcccaagtggcggtaaaatacaacaattcttacaattgataatgctcattgatactaacttacaaaatgaagagtctccaatccactctgataatgttgagcctctgtaaccgtgaatcacaagatgctccaagtttgtatttggtcgaagtgcatcaagtatatccctttctttccctttctcttcttctttttgtgaattagttgtcacaccaccattaagttcccactccaaagtcaatttagaaagacatttcttatccttcaaattagccttcaaagcttctcttacatctttaatattttccaacccagatattctgtgaaagttatcaagctgtcctaccttttccatattaaatcctccaatactatttccatcactactcaaaatcacatcagataagaaatacaagtgttttatagcactaagttcttggggaagctctttcagaagaaatacaccctcaatatttagatatcgtaagttgattaaccttcccatcttctttggtaattcacgaatcttccaacaaaaaactaataataaagtctgtaaattgtacaaattacaaactgaatcaggcaactttgtaatatcagtgtgagacaaatccaggtacctcaaatgcttatgattggcaattgaatgaggcagcttcttcatacgtcgacaatgacttaaagaaagtaactcttaaaccaacttccacttgtaagcaacatatcatactccatgttcgatgtgaaatcccttttgaatggcaatgctagaaaggtacgcaagctcttggcttcacacaagcccttaactttgtccatgttgtattttcccttcatatatgacaagtgacgtgtcttcgttgaaaggttaagtagatcattacccaaatccaacctaaagcaaaaatcatttgatacaaatatggccagatcatgtaccaagtcatgcatttggagcaatgatttttctttatttgaatattgaaacaatgaccttgacaaaagatcttcaaggtactcctccccatgttcctccatctttttgctgcttttatcaagtggcggaaaaccttgtgccatccacaacaaaatcaattcttccctttcaaattgataatctttgggaaatatggaacaataagcaaaacattgcttgagacgtgtaggtaagtgacggtagctcaaccataaagctggaagaatggaaccctctttcttgtacaactcctcccatgtgtcactagtgagtatgtccttccatttttcagcatttcgttcagagcgcaataatccaccaagcgattttattgctagcggaagtcctttgcacttgtggactatttttctacccaattcttccaaatctttgtacttagtactaaggtcatcgttgggcccaaaagcatgtttgacaaataattgccaacaatcatcatccaataaagttgttaggtgatgaacatgtccactggccatagtagaggccacagcttcactccgggtagtgaccacaattttacttccatttgctccagaatcgaaacagctcttcaaagagtcccacaaagtataagactcgttccaaacatcatcatgaacaaacataaacttcttc

SEQ ID NO: 91583 - DNA, 552 bp, Cannabis sativa
ggttcaagcaattaatagttcaatccaaatgccatcccaatttggtttattggttgaggattgtcgttttattttatctagtttgaataatgtccttgtgtcatttgttaatcgatctgcaaaaagggttgtccattgtgttgctagggagtcttatttattgtcaggttgtacgtataatgagcttaatgttccgtctttcttgtgtgacattgttaaggctggggcctattaattttaatgaatcctatctttattcaaaaaataaaaaagaattatacccattatcactatatgtgtgtgtgataagataatgagtggataatatacatggaaaaaaatcgttggaatatatataagtaataaaaataaattgataatccgtataaaaaacaaattattagtatgaataggctaaataaataatggtaatgaattcagtaacattttatgtatttattatttatatatataaatgtatagaaaaaaaaaacgtttctgtctattgattttcattattaactgtaataatattattagattaaataataa

SEQ ID NO: 91584 - DNA, 623 bp, Cannabis sativa
tctctctctctctctccctcttgtactaatcctcgtctatttttctcttttttatttaggcggctctaaaggcaagcgttggcttctaatctcaccaacagaataccactcgtcttacccttgaacttaacgaggctcttaagacatgtgaagctttatcgtctgaaagggattctacagttggggagaaagataaatttaaaactcaagtcaacgatctttagactgaaatccaaaaaaaaattcaaggattaaaaatttggaacggagcttgaaggaagttactgagaaagtcaagaaagacctggctgataaagcacaagatgccaagaggagagttaaggatatgacccaaaaatctctttttaaagtttggcaaagcaaacaaaaacgttagccttagattcttaaagccaaatgtagcaaagagtgtggccatttttaagaatatggaaaaggaagaaattgctaaggagaagattcgacaagctgtagaagagattggggagaccgagaatgaagctgaacaagtggtggctgaggctaataaggaagaagaagaagaagaagaaaaagaagaagaagatatttactataagtctcatgcgaatgaggcttagttt

SEQ ID NO: 91585 - DNA, 1329 bp, Cannabis sativa
ccattagcttttgctcattatgccaaccaccctgccaagggtgtggccccaaacattatggtttgcccttatgacttcccattgacggaagaggacatgcgagtttatataccgaatgttgcatttaggaatttagaagactcaaagttgaaggggttaggcagttcttggttaaaaaatgggagctttagaaataccggatctgaggtgcctcttttgaagacattagtgttggtgtctacacgagctctctgcaacgaagagttactattgaactacaggtggagcaactcggagcatcgacctgaatggtatactctagtggatgaagaggaagatacaattagatgaagctaaattttggaagtatggcattgtttggccctttacagcattgtctctttgaaagaaaaatatttaccagttttgaaggctcaaaactcccaatattgttggagcataattttttcacaaatagtcagatgtgtaccttgtgattgattacttgaataaaataaatagaaacgcggctattgtttagagaatgcattcaatgaaagataaaatattttcagactttctgttagctttgtttttatattatacaaagttacttctttattcaagtggaatgttgttttaatatagttagacataactggcattcacaggaggtgggtggtggttgaatcaatgccattgtatgcggcttaggggtgttcatccaatccaatccgtattaagtgcggattttactttttggatccaatccaatctgcacaatatcacaaattccattgaagttaaaatgtgacaactcttagctgatattaagatatagagtagaccacatcaaagaaatactaaaagcctactaattacacacatggtaatgccaaaaaaagagttctgttcactcaccatgcctattgaacaagagaccatgccaaaaaaagagttctgttcactccatgaaacaaatcaagataagattcaatcaatgcttttagtataaagtagtcaacatgagatgaaacttagcaatttcatgatcaactcaaaagataacctgaaaaaaattggaagcagagaaactaagttcatgatcaactcaagcaaattcttcttattagctccattcttaccttaccttgaccttccaatatcaccatctttccaattcgttgttgttcaaaattacaagaatagcggcaaaataaataaaaaagacatgcatttgtaatagggatattggcggctaaaccccccaaacttttgggtttgtgacagttaaccaccaaaactcaaattttggcggctaaactacct

SEQ ID NO: 91586 - DNA, 1637 bp, Cannabis sativa
aacacgtcaaactatgtaattacctccaattacatccaattctaattcccaggtggctttccaaacgcgccctaatagattcaatatttcccagatccaccataataccgtctttgctaacaacgcgacccaaaaaagatacttatgataaccagaactcacactttttgaacttagcataaaacttatgctcccttaatttctataagaccattcgtaaatgttgctcatgttctgtttcggattgagagtatccaaggatatcgtcaataaaaactataatacagatatcaaggaggtccttatatacctgattcatgagatccatgaaatctgtagaagcattggttagcccgaaggatataaccaagaattcatagtgaccgacctagtacaaaatgtagtcttcagaatatcttactctcagattctcaactgatgataacccgattgaagatctaatttggagaaaactattttcccttgaagttgatcaaacaaatcgtcaattttaggtagtggatacttattctaaaatgtcagttaattcaattctcagtaattaatacacatgcgaaacaatccatctttttttttcatgaacaatattggagcttctcagggtgatacactgggtcaggtaaaccctaaatcttgcatcccttgaagctatagtttcaactcttcaagttttgctaaagccatcttatagggtgccttagaaactggctttgctcctgaagctaaattaataatgaaatctatttcttgctgtgtgtgtaaactaggttattctttgagaaatacatccaggaattctttcactaccttgatcattttaggcctgactatatctggtcttctagtatctattactactgctaagaatcctatgcatccaccatgcaataggtatctagctttcaaaactgaaatgatcaggatttgagaaccctaaatgatcccacaaaaataaatggttcccttccctcaagcaaaaatgtcaccaccttcctcttattatcaatagtggttgcatacttagataagaaattcattcctaaaatgatgtcaaaattctctatggctagttcaactagattagtgctaaatttcctaccctccactctaacctacataagcctaatccaccttctagagataactaattctccattaggtagtagggttctaaaccttaattcataattattatagggcctatccaatttatccatcactctagtagcaacataagaatgtgtagctcccgaatcaaacaatactaaataacaagagttgttaatagagagctgacctatcaccaatgatgggctagcctcagcatcaacctgagtgatagtaaaaactcgagctagaataggttttacttctttcttaggttcttctttcttcaactgcggataatctctcttgaaatgtcccatgacaccgcactggaagcaagccttgcctttacactcacgcagatgatgcttcttccagaatgagcattctagatatgtgtaacgaccttcaggaccaccttgattatggttccttcggaacctcttattctgactcgagccaccagatgtcgctggagccttcctcttctgatcataaaatgaatcacc

SEQ ID NO: 91587 - DNA, 602 bp, Cannabis sativa
ttaaataattaattcaaaagataatatatttgaatattaatttgaaaaatagttagaaatatttctagttgttgagatattatattctctcaacttgttgagagattccatcaatcagttttaagaaagaaatatctataacatattcgatcataaatcttcattcaaataattcaatattattattttataatttttgattcatggcttgatattttttcaatttctatatgacaagcataacataatgatattacctgaaaaaaacaataacataaaaatataagaattaacattagaaaggcaaaagaaaatgagagagaatttacttatgaggagaaagaagagtttagtattactatgcaaatggatgcaactactatgttgaagcctttgcagttgaaaggtgtatcttcaggtaagaaccatgctgatatttgattaatttcccacaaatcaataaaagaactaaaatctaaatttttgaaagtaaaacattaatattgaaaagagaaaaacaattaaaaaatttcacaagtaagtggactcatagtgagtggcgatagcaagctcgctatggattgtacaccagcaacaaatcc

SEQ ID NO: 91588 - DNA, 528 bp, Cannabis sativa
tatttttgtataaatattttatgagtttaattaaaaagcaaaatttttaattaatcacgatttccagaaaccccgttgattagcaatgagctgcacagtatgtttaaaaatcacgtaatacacctatgtagttagggtgttacataagtggttaccacactcaccttcatgtaattcggtaagaacataatgagcctctgttggattgagacacctgagtaagggcctggaatatgactgtttgtacaacttgtcgccataaagagtgaaccttactgctttggctctgatctttcgagattgactcctatcttatgggagtgtgccatcagccagatgctgacttatgggtgtcatccagctaatgttctctgacagattcttgacttcttcttgaggcttccaaactgttggccattgcatgtagatgactggaactgtgtctccactctttgtttgaatttttgaccctaggttcgcaagtgcatctgcatgactattgtcgatccttggtacttgattgattga

SEQ ID NO: 91589 - DNA, 936 bp, Cannabis sativa
ccataatcaaggatttaatttttgaaaataaaatgaagaggcaattgtgtgattcgaaaacaaaaatttcacacagaagaacatttcatgactttgcatgcttgcaaaggctcattcttctatttttaaactcctcacgtaaaagaatccataatacccaattccaaacagcctaaactgaataattgaaagccaaaggcataaagtattaacccagagaacaaatgaaatcaaaccactaaacaatatctaccattgatgcgaattaaattgaataaagcttcagactttaactgacagagaatatttaacgaaaaccataggcaaagcttaatccctcaccatatttttccaaaagagcaaaaatgcaagtcttgccttcaatcaatccccaaacaagaaattgtcaaaatgcaatcaaattcctgcagaggccattacagatacactaaatcaaagaaacccagttgatgaaactcgattatttacgattcaggggtaacttacctagattttgactctgcaatgaataagcgagtagaggttctatttttggtgggatggaagagtgtttggagagtgaaaaagagagaaaattgagagcaagaaccaacctaatattggtaagaggagggaccaaagcaaaccctgatcttctaatgcgacagggcaaaatttgagagtgattttcctctcattaatggacgcccgcgatgtcccaccataaaagtccacaacgaaacatgcccttgttaatggtctgggcctgaaagagagaagaggacaactattattaaaagaaaagggaaatttgaaattgtatgcttaataaataataaaattggatacctaatacaatagtagatataatttgtaaagtgagatacattttattaaaatccaattttatctccctcatttgaaaagtcactctct

SEQ ID NO: 91590 - DNA, 3882 bp, Cannabis sativa
taaaccgtaaatttgaaaaaaaaaaaataaaaaataataaatgggataaatccctttattcttttaataaaaaattaaaactaaaaagttattgtaattaaaaattacaatacatgttaaaaaaatatttttagagagttatatatattaaaatacttttagaactgttaaaaataatgtaaaaaaaataaaataaaatattatattttaaaataatattttcttattaaaaaaaaagaataaataaaaaaaaaagtggtccgaatcctaagtaataatgaaatgaataaataaataagaagtaatggtggtttgacaatattgtctttccaaagtcaaagaacggcaacgcagtgcgtcatgtatgaatgagacgacgaagaaggtgttgcactgttaagagctttgcctctttttcttttatttgttttctattttttttttatatatttgtagttggaatttgaaatatcaatttcttttattcccaattaatagtatattatattactagtcatacagatacactcatatctcgtagtcaagaaactacgcaccatcatcatcattaccagtaccaaaccatctgcatctttgttattgttcatcaaactctgctcttattccattatcagatcctaatatttatcaggtggatttttttttttaagattattaattcagactctctgctccctttttttgttgttgagattttgtggatttattcattctttttattttaggtaattagtttttctgtacatgttgaagatcttcttattatctttttaagtttttcgtacaagtctttaaacaatattgtataatatatattgattcgaattgagccttaccatagagctaagacttaagacttttgctctgtttaatgtttggttgctatgtactgtaatgaaaatataattatatatataaatatttttcttgccaatgattttgatttttaaatttctcttgattttgtggatcgtatatatactttcagcatctgttgtttaatggtttctcaagatttgattattttttccttccctgttatttgttacttgaaagttcatattcaaaaatgactatagaatattaatcccaaatcgaagaaatttgtcctcatatgctaattgaattgaatttggtgttgtttttacagaatattttgcaggattatcacaagtgtaaattcaacaaaagagagatgacttcaaatggaaaagtacgttctgattgctattatgcacctaatccttatcatgaatgcactgaagcttgcttgaagagaatagcagaaggaaaggtccgcacggaaaaaaagaaatcaggttattttccattttcaattttttcttctctctcatgtactctcttcatatttgctatacaaacaaaccaaaatgttattgttctccctgattttcatggctctagcacaatgctttttcacttagttattaacatgtattgctttagcttttgtttttgtacaacaattcttggttattggtcaattggttaaaaatgttattgagttttaaaagaatatgttttattcctatcagagtttgttgctgtgatatttttcttaaaccatttctgaacatgggacaacaatattggatttccttttttctttttgtctgttaaagataatggcagtgttataaaagatggtggtctgaacaaaagatatgaagataaaattgttggccgagcatgccctaaggcatctaatccttaccatgagtgtaatgaaaattgcctcaaaaaagctggaggaaaagaagatataaaccaaccaggttttaacccctttttctatctcctttttttgaaccccataaactttctttaaataaatttcccaaatgactagatagagagcaaaagttgagtgaagagaactaagtaatactaacctttgcatgttgattgatctcttttccttgtgaaattatagtcctctgattatgtaacaattgacaaatgcaatgggttaacacaaataacataccattggcttccattcaacaaatgattgttttatgttccatttaattgcaggctccattcttgatcttcccatgaagttgggaaagaaaaagatgcaagaatctcgatcaatgccaccgcctcgagagcctgacagtgcacccgcaagagatagagctttcaacaacagtgcttcattgcctccaaaacgcatatattctacagaaaagcttgtatcacaaaatggggagaactactcttcttcggagacgtattctggagaaattcatgctgaagattctccttatgatgagaagcacgtcaactcttatccaatatccatgactgaaattctcaagatggtaagctgaaattcatattgaacacacacacacacccacacactcacatttcttaccaattctctttctaatcatgtacctctcattggcagcctgattatcccaaagatcctccgaaacaagatgtcaactccattgccattgaacaaccaatacatcagaaagaggagaaaaaccatcagccaatgacagaggcagtttcatctcctgtcgtgaatgagaaaagagaaggaactactggttcaccctctgaatccagctttactttcactggtgtacctcatggtttccaagagagtgatgatgaagaagctcaatcagtaatttctgatgctagtgtgtcagtgggaaaatatcgagttaagggaaggttatcttccattttgcagtcgatttttgacaagtatggtgacatagcagcaagttgccaactagaatcaattgctatgcgttcttattatttggaatgtgtgtgctttgtggttcaagaactggagtccactcaaattatgcagctgacaaagtccaaagtcaaagaaatgttggccattctgaaggatgttgagtcatcagggatcgatgttgcttggctacgccgtgtgctgagtgaaggcgcagaaaccattgagttgattagtcagcatcatgcaattgcagtggcaaagacaaactgtgagcaggacttggaaacgactaggaaacaagtagaatctcagatggcggatttgactttgaaagaaaaggaggttcttgaagccaagaagcgaattgcagagaccagagcttatctgagggaattggagctgaaatcttctgttctgaatgagactgttagctctatcaagtctaaggttgaaactctcaatagcaaatctttgttggatggagttttgtaagagagactacaagtgaattttaggttttgactttgttaaaggttaaggtcattctatattttgttattttattttagttgggtacctaataagctatataggttcaaagtttataagtttattttgtacaagaatgcaatgaactgtttgggattgaaagaatgtctttgatgagttactcaccagtcatcccaatttaaacaattgaagattgatacaaacattacaaatatttgatactataaacattaaagaggaagctcttttcacacatgatcattgttctttgagcaattgtttggtaaagttttcaatataaatgcttgagttagtcaataaaaatactggattcatatagctccaacaacagccgtcagtaattcagtattgaacaacagattgtattatgtccataaatgctttgagtgatcataaacagagtaagtggaggccctttctgcaaatggagattagagacttatcactctaaagtttctcagctaaagtcactctttttaagggagctataagggaaatttacatggtataccaacttttgctatttttttacaaaaatactgtcagacggtatttttgttacttttttactgtgtttt

SEQ ID NO: 91591 - DNA, 573 bp, Cannabis sativa
atagaaaaattaagcataaaaacttaaaattttctaattttaaccattcatgagtaatacccattaaaagtgcacccacatatatatatacattagagttatttatatagacataatttaaaaaatttataaacacctccaagagtgaaactagtatatatagggaaatttgaatatttatgcatttattgaactaaaattggtccattaaatcaaaactattcaacgtttgtagaataggttaatttttactaaaacccatttttacccctctcattccaaaaagtggctctctctctcttctttccctctctcttctttccctctctctttctttctctcgaagtctctcgaacccactgaacccaccaccacgacaaaaatctccaccgaaccaaccatttgagcatcactcgacccaccatctgaggacgaagacccattccatccaccacccagtcgacccaccacgaagacgaacaaccaccaaggtaagatttccccctgtggtatttttgaatatttttcttattgatttagggttaaaatattatttattgaaagatttagggt

SEQ ID NO: 91592 - DNA, 820 bp, Cannabis sativa
taaactcaaatccatgttcaaagtggaaacaaaaattaacataaaaaatttaaaaagggagaagaaagaactagatggtgaacttgatctggattgccacgctcgcttcctcaatctccttctttgtttctagggttctctttctaaataattggcataaaaatttaaaactctttaatagaaatcaattttacacttccgaatggacaaattacaaaattgcccaaatttggcgtacagagcatcttgtcgtgaccatgaaaggttcggttgcaactatattgtgaagccaaaataccttgattctgccaaattagctagtcgtgacccccattcatctcatagtgacaataattggtctcgatgagaatatggtctagtcgcgaccagcttaagaaatttcatttctacttttctttgctttcaactcgtcccgtcctttcgccacttgacataatttacactttaaaaccccgggagcctgaaatcaagaaaaacaagcataaaaccgttccaaaagtaataacaaataagaaaacaactgtaaaaagtgacccaaaacttaagctaaaaatagtctaacaaattctcccaaactaaatctttactcgccatcaagtaagactaaaaactaagacaccaacataaactaacacataattaactaagccttcaaacaatcaaactgttgctgccacctgtgaaacttcaatcaattaatttaactagaatttcaatccaaaaaactttaataattaattcagatgcttattttgaaaaagagtgtattgatgtaaatttacttcaacatttgaaaaaa

SEQ ID NO: 91593 - DNA, 769 bp, Cannabis sativa
tacccaacgacacctatagaacacacttccacttaagccaagtccttctagataagtcccttcaaaaacttcacatgctaactccatggcgcaccatcctcctgatggcaatcgaccaagacactcttatcgaggacaaaatttgatgcgtctttcctagatgaggctcgtaagtcaaccacatccaatatagcaccaagtgcactctttccagcaatctcttcccgaagtactcaatattggcccccgaccctaccacacacccacaacttcatgcaaaaggcctctttgagccaatgcataagtgctcttatgagcttctttcatgcagtcaatgatctatcaatcacccaaaaccatgaattcgccctctggcttctgctcgtgtcgactcttcgacactgtgtcacaagtccatctcctaaaatcaactctgcatcctctgacgactcactaaatttttacaaacttgataacacgaagtcttactcttaagacttgaagtaatcctaatccgctatctcccatcggtatatgctctctgaaccatttatcttacagtgtcccatacaacaccagtattcccataaacacaaaacacgcccataacatgccacaaactagctcagtcttgatctcagcctatgcctatgcatattatctatatgcagcttccaggaaacatgtaagttgttatcccgaaattggcactctgacgtggcatcacaagaatggtgacacgtggcatcaacttagagcacctggtcgg

SEQ ID NO: 91594 - DNA, 616 bp, Cannabis sativa
acaacaactaaagcatcagactcaacaaccaccgtttcccaacctttgcgctttatccaacttagggcctccttaatgccaatgacctcagctatttctacagatacacagccccgtctactttcagaaatagcttcaagaaacttaccatgattgttgcgtgcaacacaaccaaaaccaaatttttggtgagcctcgaaagtcgcaccatcgacattcaccttgaccgtaaaacatcaggtttacgccaacaattactttttgaaatatctcctatagcaaataaagcattaggagactcaaacttagtaattttccattggcaaaggacattttgtgccgactttaccacctccaaaggagaccgagactttttttgccatgcacttcgttgcgagtattccaaataatccaacatatcatagtagcttcaacaacctgcacctcacgacagtcagctagaagctcaaaaaaccagctgctgaagtcggcatttgcaccaacagccaactggtttgcagcagtaagtgcccagcaggattgagaaaaagggcagtccaacaaaacatgaactattgtctccacatgcatattacataaaggacacaagagatca

SEQ ID NO: 91595 - DNA, 866 bp, Cannabis sativa
atcccacattgtttaaaaagtattatgattttctatatctaaactataaataaacttttctttgccactttcattagtctaatcattatcttttgctttttataatcaatcattaatatttatatattaatattaaggaaagcaaaggatataggtagctttctataatttttttttttcatatttttttaatatttttttaaagtatcatgttaatatattaaaatattggaatgcccttttttacagttattatcttatgaaacaaaatataaaaactttcatactattaaagaaataataggtctaaatagttttttttaaaagaactacatcatcagtccaatttattaaatctaaaagtagttttttttttcatttattcttttataataatacatgcaatttctttattaattctactatttttaacatctatcacgaatctttttacatatttaaaaataatatgtttctaatttcaatactattacttacacatattaaaatactatattttaaattaatcattcaacaagtgcaatatatgtatatataataaaaaattataaaagttcaacatcgcgcggcttagttccttaatatatataaaggagggttttgaagagatgatgtgacattctcttattttaatgttctactttttctaatttctattttttttttttatttttctattgttttgtatttaacattattaattacaacaaataattaatagaaaagaagaattctaataggcattatcaaatgatgaatgtgttttctcatttttataacttacactatatttattcttattattaagtcaaattcaagtgtagttaaagtgtaatctttttaag

SEQ ID NO: 91596 - DNA, 660 bp, Cannabis sativa
atgattggaccaactaactaacaaatctccacattacttcagtatcgagtctagtgtggcaatactttttgagcagtgagatcaatcttaatctccatgcagatggatcaagttcaagcagtggaaaaacttactgtttggcactacttcggtgatatatcaaaaggattatgatcagttgaaaccttcttaatgatcgttgatccatttgaaattatttctcgaacaaagtgcagcttgatgtcttacatattttgtcctttcataatagacatggtttttagaaagatggattgtactctggctatcacaattgatagtggtgacatcctcttgcaccttaaactttcaagctatctcttctaattataaagcttcttttgcagcttctgtcagtgcaatgtactctgcttcaattgttgacaagactacaaccttctaaaagttagctttccaactgatagtagtttcaaaagcagtgaacactagagttggaaatttataccacagggatgggtaattgcggggacccgcccctaatgggggtggggattccctgtcttgatggttaatggggtgatagtgggggacaatttcaatacccgaagcggggatggggcgggggcggggataatattatccgcaccatatccgaccccg

SEQ ID NO: 91597 - DNA, 651 bp, Cannabis sativa
aataccttatgacccaaatggtgttgtttaaacttggtgatgaaggattctccctcttcttttccgttgccgacactgcggtgtagtgaaccaatcgcaccaccctcttgtaataccccaagggtggagacgtactgctcctaggatcccaaaccataaacaattgacctaattgaattattgggccttgagtaatatttaatgggccttccttcttactcgaatcccatataacctaatgaccaaaagcataaaatgggtcatctccttgggttgatttgggccttaggtaaggttttaacaatccaaatgcaaacgtctctgtaatgaatgaccgtagccccccatgacctgaaacgaaatcaaagcacacgagtgacagcgacttctctggttcttccgtcgatgatcgccaaccaaagttttctagcgaggcacaagtcttctccgatactggagagcggcccatttcatagtgtaaggccggtaacgtactcgacccaaaatcgacattagaattcgttgttgtttcgtcattaacggcatcgaaggattgctggttgtgctttccacgatcaaaaagcttgtgagcctccattgccataggcaaaagatggcgttcaagctgcgtcgccttcccttgccaagctt

SEQ ID NO: 91598 - DNA, 564 bp, Cannabis sativa
  modified_base (65)..(66): a, c, t, g, unknown or other
tacagtattagagcatggccattaagtacgggcgttacagtttggtatcaaagccacagttatannggtcccaaacgttctcacgagttacacacatctgtaaaaagtctccgcttgccaccaagtaagtctcattatatatgcttgcattttatgtgtatttgtgtaatttctaaatttgtattttacttcaaaaaaaaaaaatccttagtacaaatagccaagtttaggtactacccggccatatgattttttttttctaatatatatgtataaatatatttctagatattattttttttttaaaaaaaaaaatcattactagaaagcctaggaattttcttttctttaagtaacaatattgaaagaaaaatgttttattattttatttatttagtgttacagttattttatcttagtataaatataaattatttggtaaactattatgttatgttaatatggagaaacttttcctttatggaaaaataattagttgattttatctactaggaatattataaattattcaaatagttaggttgatttcttaagaattttatt

SEQ ID NO: 91599 - DNA, 901 bp, Cannabis sativa
gctttaatgaatgaaccaaaaacacaataaacacaaacataattcgaatcaaagtcacacagactactaaatagtgcttagtaaaccatattagtaatattatattaaatattacatacatttatgcattactaactaattttatttatatgttatgaacctaattctcttgtaatcttacaagatcatacatacactcttatatgagtaaagaattttttaatattgattaattataacaagtaattaacatattcttatataatatatttatgtttcatatatttataaatatattatccttaattcactttcttttaaggcataaaccctaacatatggagacctagagaagcatgagcctcaacaagggaataaagttgcaagaccccatcttgccaagggtagcatcttgccaggttcatgtggtgagcctcgtctcaccatagcacattctcttctttacttatcctctcctcttctcaccctctattctcttctccatttcactttatctattttcttatctttttgctctttctttgttagttttatggtactaaatcaggtacgcaacggaagaattatttttcattatcattataccatatgcctaagatcgctatatgtatatttattaaactaaaagtaaaaatattaaaataatatttacctcttgatgcctatcggtgtatccttgaatctttttgtatgtttcatcatttcaggttaattagaaattcacacagtagtcttccaaatcgctccaccatacacaagaagtaatgtgggctactaggacaaagtgtatgtgaagttcttgttttaatctcaacacataagcaagaataatttcttttgtgataaatagaaaagtttttatgataaaaacctttttagg

SEQ ID NO: 91600 - DNA, 506 bp, Cannabis sativa
taaaatgtataaaaaaaaaattataaaagaataattaatttttttttttttttttatatatattacattagaatagtcttggtagaaaaattaatctaatactttaaaatgcaatcaaacaaaaaaatagaatgaaaattatttatttctatttcattctattaattttattaccttcaaccaaacgtcacattattttcttttcattctattccattatattacctctaaccaaacgccaagttgaaatagttgatttttttccctaaccgttgatttaaaacgagaatcacaatagtataatcattagcaattaaggcgtgtttatggaaagctacgcttccaagctacataataattagatttgtgtgtaattaattatagaagtaaggataaaatacaccggtttgatatatttatgtgaccatataattacattttaagtgacatttggttggaaagaatgaaaatataaaagtagcaatgagaatgagaataggaatatg

SEQ ID NO: 91601 - DNA, 532 bp, Cannabis sativa
gttattaatatatctcctttcccactataaatatagagttgctttagctttgtgtgaagcatccactttctaacaagagttccaaatggttgcttttatgaataatgcaactgttaaccctctttttaataccatctaatgttacagggtgaatggtccagcatttaattggtgatgtcataaaatctgtttgggtttaacattaaattgacaaattaaaacataaaatcaattgctacgtgggatggtattaaaagggtgggacaagaggtgagatctctagcataaattattagcaaaatgtacatttttctttaataattagtgctactatggatattttcttgttgatagtgctgtgtattaaaagatttctgtagccgctctttatttattccttttttcttcatttgaataattagaacattgtttctgttttggtcgtcactaatgttatgagctccggaagggtggattagacgtcatcagtacgtcgtgttgccatgggaggagaagggcatgaacaatggat

SEQ ID NO: 91602 - DNA, 536 bp, Cannabis sativa
tttgtaacagttaaccacaaaacctgaaattttggcgacataactctctgaaccctggttccgttttgctctgtatccctccgtctaaaaatcacagttaagtgccacagtgaactgcctacgagtacacaagggtacacgtggcaaatttttagtggtctacgtaattttaatattaaatatactaaaaataatttaaaaattaaagaaaaaacaatttaaaaaattttttataaaaaaatttcttcttttttttttctctttttcattttctttttctttctctttcttctcgacagaaccccctaacccttcttcttcttcttctgccattcttcttctttttcttctcaacagaaccccccaacccttcttcttcttcttctgccattactaccataccccgagagaagagtcagcgcttgggagttctaaggagattcaactacagagggacaccgtggagccccatgccgaaggagatcgtcaaaatctttagaggaccgcaatcgaagtgggtgattcctctgaagctt

SEQ ID NO: 91603 - DNA, 1614 bp, Cannabis sativa
aaggtgctaggcaccactgatacctaatagcaatgctctttttattttaacacacgaaaaactagtattttttttaagggaaaaactaattattttaatcaaggctcttatataatcctcctgttctccttccccaatgtttttgcttgaaaaaagttcctcaaaaccataataatcattgaaagcggtttcctctttttgtattatatagtttttctttaatgtaaaagtctcttttataggtttcatatgatgtgaatatcaagtatttacacaagtgaattaatgttaaaagtcccaccaaactaataaaatttatcaattataatattcaccataatttttgatattaatgagaatatttactattattatggtaattgtattcttgaccaaatttacatttattaacaattatcaatgaaccatgatttagtcataaaattttgattggtattagtggtgtcttgcacctctagatatgttgcttcactagcgatattttgtaaaaatgtttacattaaactatatgagagttgatacttaattggactaatagcgataatagcacataggagagtattaaacaccaatagtaccttttagcatttctctaaaaaaattattcacccattagtttcgaagataaaagtaaaaaagttgttaggacaactcttagatcactcacaactcatcaaagacctcacttttgttacctcaagtttgtacattatgcatcgatttttttatttattttcatatccaataaatattaaaagcactcacaaaaaaaaaaaaaaagtagagaagctttgaaaaatttaaagaaccctactaaaaacacgctacaacagatgttctaaatttcttcttcattttaaagattttttaaaatacactattcatgttttacatttataaaatactgttcattactctaaatatattttattaattattttagtttttaattattatttttgcatgtagatatgtgcatatattaattatatatatatttgaaatgaataaaatataataattttttttaaaaaagtaaacttttggtgatatattttaagaaagttaatgtatggtataatataaattataaaagtttcttctaaaataaataaatagaatttcggtgatgtattttaaaagatagagtagagaagttgttaagagtactctaataatattctcaacagaaaaaaaaaagctcttttattaaaattttaaagaattggataaaattatacttctatcaattaaagtaaatggtgagctaaaataattattattttaattgtttttttattctttcattacttttttttgaactcataaaatatatgtaaagagagaaaatatatagagtaaatgatgcatgatattatgtaaagggattattttagaaaaacacaaaaacaataaaatattacaagaatatgattatacactacagaatttaaatataaaattttatttgcataaaatacaatttttttgatgtatatttatattatacccgtttgttttactgttaattttttgttactttaatatgattttgttgtgtctttctataacattacaaaataaataaaaaaa

SEQ ID NO: 91604 - DNA, 557 bp, Cannabis sativa
aactttttcctttctatcaaggatttaaattggttgttcttcgtaggacaagtctgactgtagttcaagggcttcgtaactcaagagatgagtcaggtctgaagcatatttccttaacaatgaaatacgaaaaacattatggacaactgataacgctggtggtaaggctagctgatacgctacctgcccgaccttcttgagtatcagaaatggcccactaaaccagggcttaacttacccctcttcccgaagcgtttaatacccttcaccggagaaactcgcaggaaaacatgttccctagcctgaaatgtaatatttatgcacttcggatcagtataacttttttgcttgctttgcgaagcaagcatccgagccttgatcttgtgtatagcttcattggtcttttgaattaattccagacccaagtacttcctttctctatttttgtcccaatgaattggggaacgacatttcctaccatacagaatctcagaaggagccatccttattatactttggtagctgttgttgtaggagaactcaatcaaaggcaagta

SEQ ID NO: 91605 - DNA, 1409 bp, Cannabis sativa
tgtgtccctcaagactcttaaatacactctactgcgccctaagctcccagtgctttctctaccatagtagcataagtagtgtcatccgtggtaatcatcaaaacatgcttaattttgggattcaacccaaccagatacttttcctccttactgaaattggttggcactattcttgaggctaatcaggccaatctatcaaaccgggtcgtgtactctataacttacatattctccccttgagtcaactgggtgaattctttcctctttgtattacaaactatcttattgtagtacttagcgttgaacaaatcctagaactcttcccaagtaattctggtaatctcaagtgagggacaccatctcccaccaaaccagggcatcctcttagaattgaaaggtggcacaagacaccctatcattgccagtaacaccaatgaaattcaatattttgtgaatgactattagccatcgctcgactttcataacatacgggcctcccaaaataatcggaggtacttgattataaaacctttcatatagcggttccatacgattaccaacagtaatcagctccactagcacaataggagcaagagttatcaatactttagaagcaggcatcgcaggaacaccttgttgccttaagcgttaaatttcttcatcttgttcattaattatggcttgcatttctttaaacctctgttcctaatcttagacagcctgtagtggattaacattaccccgaccacgagctatacctcttcagcctctaccccaaccacatagattagggggattctcctccctgacaaccactagatctgactaaatttccttggcttctcgtgtttttcctggcatccattctgttggactagcctattaaatcataagataacctagttagaccgtgatcaaggttaaaatttaattatcgcttacttgggaatttaaaacatgcacttattcagctatcgagctactaatatgctttctaacaagcttttcttatttcatactaataaattaaactactaaagcatttaaaagcttactaaaccatgagccgagcttatctctcatgatgattgtacatatcatgacgatcttcgaaagataacttggcagctctgataccaaattgtaatgccttactaaattaggcacgttatcgtgattttaaattattgtgccctcttttgctaattaaggcgtttactgaaaatgtgaataattaaaattttcatgaataaacttaaacttaaatacctaattataatacacatttcaggatcctgtttcaaaagttacaaaagtttacaaaatacctatactacaaaagttattgctcaatgactatcaaaataaagcctaaatatcccaaatatttgaacactccaagtctaatt

SEQ ID NO: 91606 - DNA, 598 bp, Cannabis sativa
aattatattttgaaactagaggattattcttattttattttttttggtaaaattttcatatttataccttatttttgtgaattattttgtttaaattttgttctcgctcgatgaacaaaattgataagttagtcacaatatatatatttgtatattagatatattatgtctaatttatatattttgttgagagagagattgatcaattgagtttgtgttaaagattaaaatttgaatgtaaatgtatgtaattggttatgtcatgattatgatttgtttgattaaatactaaggtcagtttgaattttgatgatttttacgtgaatgcatgtacatattgttgtcatataaaatgagtttttcctttcctttgttttttgacatattgattaaaattactaaaaaatttataatgttgactgttatcggcgcaggaatcacttcaaattaggatagttaattatttaattgaaaaattaaatatgttttgccaaactaacaagctgcaagggacaaaattgttactgaaaatttagacaataaaactataacgtacgtcgtcaaagagcacattaaaaaagctaaaacttcaacttat

SEQ ID NO: 91607 - DNA, 649 bp, Cannabis sativa
atataattaaaagaaaatgatatatatatatatatatttatatatattcatatcactctccatgtagttataattaggttctaattacattataaggaaaagaatatatgagattatatatatatacaccaacacgtagtacatttatactatagaccaccaagcatatatatttttgaccttatatatcgttttattcactaacgttaactgtaacctgtaactgtcaatttacaaaggaatattaaccaaagcttttattcttcttttttaaagtaaaataaaaaaagaaattattatttttctcgatcttgtagggcatgcatccttaaaaattaatagatcggccgaacatgtaaccataatattaaaacttgttttttaaagagataaaatataaattaaaaaacaccatgcctaatttagtagctgacaaaattaattactgttaaaatttagcaaaaatctgccagacttaagtactaaatgattaattaatgcagatcagcttgtaaattaattagtactgaagtaaaaagcagctttaagaaagaataagtcattttgtcgttcaacattgtccttataattgacttattgaagaaaaaaaaaatagtagaagaaagaaactcttttttttttttttttt

SEQ ID NO: 91608 - DNA, 537 bp, Cannabis sativa
ctactagttacaatgaattcttactattatgacgtggatatgaagattggtttcatgttaaatttggttaaaatggcatgaccccttaattcaaaaattgaaaatgttcttctttccagtgtaaattttaacaatttttacattactcttagactcattagtgttctctaataaaatctcaccttataatacatctcgaaaaatcgtaaaatttcacggcaaggaagccaagttgttgcccatcacttttctatttgacacgttgagagaaaacctaatttccatcactaataatcatttgtatcgaaatagtaaaaatctcacatttctgataatgatacttttttgtgaaatgtggcccggactcattttagaatattttcttcactagtcacaataaattcgtactactaacacgtgaataagtatataggtttcacgttaaagttggttaaaatatccccctaattgaaaaattgaatgtatccttctttttaaagttttttcttactcttacactcgttagttttctcttaa

SEQ ID NO: 91609 - DNA, 520 bp, Cannabis sativa
ggagatgtgccgagaggttgggggcgtggaataaggataagtttggttcgattccgagaagggtgagagaaactcagaaacagttggatgatcttcttagtgtggccgctccgttggtccgaatggatgaggttaaaaggcttgaaactactcttaatgatcttttgtctcgggaggagtgctattggaagttgcggtcgagggcggattggttggctctgggtgataggaatactaaatattttcacaataaggcgacgggcagaaagaaaaagaatgcaattgtggaaatgatgactgaggatggccaaaaattgactctcgaggaggacattgtcaatgagattgaacggtattttggtacaattttctcttcggcttctccttctgcgcaacaagttgagagtgggatcacttgtattgaagctagagtatcttcagaggaatgcgacatgcttgtagctcctttcacgaatgaggatgtgttggctgcggttcgggctataggtgctacaaaggc

SEQ ID NO: 91610 - DNA, 1403 bp, Cannabis sativa
gtatcttgcgtagcgtttataaaatatagaaacacaaggcatttgttcactttgactcaggctgatgttgatggtagtccatcagtggcaacaagtcaattgtctataaacggttgttcttattcagtattatttgattcgggagctactcattcttatgtatcaagtagagtaatagagagtttcataaaccgtttgatgtgtatgctttagggtttggaaccttgttaccctccggagacctaattgtatctacaattatttgattttgatataatcttgggaatggatttcttgtccaagtaccgagcaaagattgattgcaagtggaagatggtagtgtttgaacctgatggtgccaacccagcggtgtttgtgggtaaggtacaaggatcacacatacccaaaattacaatcttgaaagctagagaacttatgcacagaggttgcataggattcttagttacaacagtggatactagtcagcctatttcaactagacctgaaaatacgagattggtgtgtgaatttctagatgtatttccaaaagatctattggattaccaccttctcgagagatttaatttgttataaaattggttccaggagcgaaaccaatattaaaagcaccttatcaaatggctcaagtggagtaaagggaattaaagattcaacttcaagaattacttaagtacttgggattcaccataccgagtttttctctatggggagctccagtgttatttgtgaaaaagaaagatgggtcgcttcgcatgtgtagcgattacaaggaattttataagttcactattaagaagaaatatcctctatctcaaattgatgacctatttgaccagttgaagggtaagacagtcttttttaagattgaccttcgttctgattaccatcagttaagaattcgagaagaggatatcccgaagattgcattctgtactaggtatgtacattacgagatactggtgatgtcttttggactcaccaatgccccagctgcattcatggatcttacgaaccgagtaattaaagattttttggagaagcatgtgatagtgttcattgacgatattctggtttattccgaattagaaaaagagcatgaattacatctcagattagtacttcagcgattatgggatcacaagctttatgctaaattcaagaagtgtaagttctggttatcacatgtctctttattagggcacatagtggataaagatgggatcatggttgatcatgccaaaatcaaagctgttcgggattggccaacaccaaaattaactactgaggttagatgctttttgggtctagttggttattatcgtcggttcattgaaggtttttcaaagatagagagacctttaacggaattgacccgaaagaat

SEQ ID NO: 91611 - DNA, 759 bp, Cannabis sativa
cttaattatactgtatttgattccaaaaaatattcatgacaatgactacttcaaattattagaagatgttagctgagatgaagaaaaaattatatacacttgttaggttaggaggaaacataagtcgatcgatgatgagactgaattattatacatatatattgtatatgcatgtatatatattgagtgaaattgataattaaattgctatatgaaccccaagctcttaaatttgaaaagattgaaaaataaaaaagaaaaagaaaaagaaaaagatcagaaagaaaagcatgcatagccgtccacgccttacaagacaataatagtggacagattttattgaaataattggcaaagcagtacatattattccaataatagtggtagctaaaatccaaaagcataatgtttattatatagactttaattattttgagaaatatatattaatggttttgtatacttttccacttaatattaagccgtcaaataaataatctcagcaatttatccaacgacccactatacatacaccggcaaaaattatattatccaagaattctgcaatggtctcctgtaaagagaccatttttctttttttacctataaattctttatttaatcaattttattagcaaatgcttattaatttattatactaaaaataaattttaatcagcctacatgcatagaaattattaagaaactcttctcaaaaaaaaaaaaaaaaaaaaaaaaaataaaaaaactttttttttt

SEQ ID NO: 91612 - DNA, 506 bp, Cannabis sativa
  modified_base (297)..(298): a, c, t, g, unknown or other
tcaagatctcaaggccatgttctggtggccaggtatgaagaatgatattgatgattatgttgtgaggtgtttaacttgtgggaaagtgaaagttgaacaccagaggtctacagggttgctgcagccactgaatcttcaagaatggaaacaggaagacattgccatggactttgtggttggattgcctaggaccacaggatagtacgactatgtgtgggtaatagtggacaggtttacaaagtaagcgcacttcttacatattcggacaaacttctccattgatcagtatgctgagtnntatgttagagaaattgttcgtctccatggtgtcccaaagtccattttttctgagagggatccatgggtactcagttgaaattcaacacacctttttgttgggattttgtaacgccctaaaataattaggcacgctacccaaaaatgattatgaaaccctaatcccctaatcgggattactaaccaaactagcgcagaatttaaacttt

SEQ ID NO: 91613 - DNA, 628 bp, Cannabis sativa
ttccaagtgttttctcaaaaaagtattttgggtatcatttcagtttttagaaataacaaagatacaagtgatctcaaggagcaaacaagatcatttgggagccaaaacagggccccaacacctaggttaacatgggtgctgggccctacgccaaggttgacgtatggcctgcttcacaagttttcactcctaaaaaaattgctttggccgttattcttattttggtcaaaatcggggtaggagaccccgtttacaatctcaaatgccttagaagtatcaaaacaagcctcacaaattttcctgaggagcacctaacgcctaggttgacatatagcctgatccactggattctgcttatctgattctggttttgtctcaagcatctaactatttttttttgtagtaaacaagagctacgacttgtgacaatttaaattcacactttgatatttcacatttttggtaaagtagaatcgacaaattactcacagatcgggaagttttaagtctacctgattttgcaaaaaattgacatctccgagaactcgtgaaaaatttcaccaaaactaagaaattggctaagtgatgacaaaatatcacttagtcattaaaaaatacaagtctaggt

SEQ ID NO: 91614 - DNA, 1095 bp, Cannabis sativa
taactatttgatgtctcctaaattggtggttaattgggttcgtaatttattgagtgattactagaagcctcttttgagttccaatgagattaatcgtcgaagatctcttgggaatgtcgtgcctatttcatctcatccaattgagcattattaggccttcgtttgtgggctgtttcaaggttaatattaatccagctttagatttgaaaggtggtttttgtagtatgggcatggttatctgtgacgtttatgaagttatctatgcatcgactatctggcacatgattggtttttttcaagctgaagtatctgaagctcttgctcttcgccatgtaggaatacaatgtcatcttttttattgggatactatccaatttgaatttgattgtttgaatgtggttaaactgcttgcaccgcactacatcgcataaaaaatgcagtttgaaatcttttgcggtgcggttgcagtttgcatttttgttaaaccgctgtgcggtgcgtttgcagttttgaattcaataattgttgttcaaattgcactgcactatatattacaaagttaccaatttttacaatatgatttttattttatttttcatataataacaaatatatataatgtatgtgtatattatacaatataatgacttgatgaataatatacatgttatgatgttaaaactttactaaaatatttttgttttgtattgttaaaacattattagtttgatttttaaactttcattataatgtttgataatgataatagtgtaaactactcaaatcgcatcgcaccacaccgcaccgtatttttgtgatacggtttttataattttaagatctcgcggtacgattgcagtttgagaaatcataaaaattacatatatggtttggttagaaaaaaagattataactcgcatcgtgaatactcctaatgattaataagattaacaacaatgtttctttggagtcctcactaggcttagttcttcaaggcattcactataatttgactctctttcataatacgagtctttctcattgctctaagacggttaatattgttgctattaactttgctaagtatattttatc

SEQ ID NO: 91615 - DNA, 1114 bp, Cannabis sativa
attaggagccattacacctaactggatccctccccgcatcctacaccgtactgagtaaagcacgttcaaacatcagcactattaaccataatatttgcctatagtcgatacgctagtcatactctagtcgtatcaatgtgatactctcaagtactacggtactatcaaccataatattagcctatactaggtacactagtcgtattctagtcgtaccgatgtgatactatcgagtagtacataagacaacatatatttatcgatatccaatataatactaaatataatgatacgactattatattgtaatctaacaggcttaactaacatgtacgctaaacatgtaaacacatatgcatatcattatactaatcataccttgtttctgaattcaagtgtgccgccaacctgagtggaatagctgctcgatgatttacagccccctaaatcacattatttgtaatactagtgagtgacacgctaagtcactttttggggacttaaacttgaaactaaaagtgttcctatcaatgaagaatatgacaataccctaaatattgaaaaaatgggaaaaactagggttccctaaaatgccccaaccggtttcctaactagagttttgattctgtagggtttcctggggaccaaccagttgaccgtttcttataggtcccattgaactggttgaccggttcaatattaaaaacacaaaatttcttctaaatcaagaatcatatttacaccataataagaagaattcatacaaaaaaaaatcaagaatcaaccataaaaacataaatcgccattagagagcaaagtttaagctctaatattcataccttcctgaaccacaaaactaagcactaaatccaacacaaatcagctctataagcactaaatccaatactaaatccaaaaccaatttgcacctatagtagctgaacctcaaaagtacatgaatttctaaacttaaaaaccataaaattccaaggagaagaggtagagcaagcatcccttggcatagctcactaagattctgtcaaaaccatctcgaataaacaagaaaataggttgaagccctaatttcttttggcttcctaagggatcgagagag

SEQ ID NO: 91616 - DNA, 562 bp, Cannabis sativa
ttaaaaaatttattatttattgggagttaaaatttaacttacttttaacaaatacatcacttttatagcactaaattggagatgcacttatagttaaacataaaattttcatagcaataaatacataaaatttttcatttacttatatatatttatagaacatttaacataatcatttctaaaaaaaaagtttttaacaaagtaatatctttaccaatttttgagaagggatatgacaagttcatatttctttgtatatataaaatatgttatctaacgaaaattgttgattcgatatttttttgaaattactttgttaaagttagtggttaaatttaatattgttacatttttttacaaaaaatatatgataaaatttaaatttaaatattatacgagtctaaatttaacttttatttattaaaaaatatatgatagaattaaattatatttacttttttattgttattatcatttaaattaataatttttatctcttcatatatatatctttatatattaaaagcgtctatctaacggcaattcttggtttaacagaata

SEQ ID NO: 91617 - DNA, 662 bp, Cannabis sativa
tttttatacgtggatgttgcgggtcgatccatgcaaatgatttttgctttaatttggataatatttataataaataaataaataaataattagggtttaaggttcaaagtctaagtagctagtgttttatagggtggctttatagccataattaatttagtttcgaaagcaatatttgaactaattaatttaattatatatagctctttttaaccgccacttcttacggtaccatgctccctgtgattaattaactaataattactatattaggaattaattaataaataattaaattaattggttagttaattaacgtccaataattagttttaatttccattttctttatatatatatatgtgtacatatattgcaatgacgatagaaagatcaatattggacaaaacagttactatcaaaaaataattataattaagtgtatctttgatatgctttaagctaaaagacattacacattaatgtgtatatatatatatatgaaatatatattatattaatagtatttcagagacactcgacactcactcagaaattctccacactgatctatctatggtaccaaacacatgttttttttatatatttaaaaacgttatattaatttttttccctctaaaattacattataaaaatgctct

SEQ ID NO: 91618 - DNA, 500 bp, Cannabis sativa
ttataacatatgattttcacttatgtatataaaaatgagtagttaactcattattgtctcatttattttatgtgcagagtaaatttattgtgaatgatagtaatgactacacaaataagatacaatgatgacaacaattttaaaataatgataattacaagtaagatacggtaattatagattcacgacaactttaaattcgtagttatattgaaatgtgctagaaaacaaagttaaattggcttatattttttttattctaaaagctatattcttatgtaattaattttgttcgatttgcaaactctcttgcatactatcacaaccatagatttcccacaatatagtaacatgtcttagtttattaatatttacatcatttgattaaatgattgtaaaaaattaaaaattaaattttgattaaaaaatatctataacataccatataaaatcaaatttgtttagaaatataattatatttattttctcactataattaa

SEQ ID NO: 91619 - DNA, 597 bp, Cannabis sativa
aactggtttggttttacttgctcaatctggtctttctttgtcttactggtggtatgctttccaatgtgctgtatttaccattaatagacttcctacagctgacatcttggcttcaagagcccctatgaaagtttgtttggcagcctacccgattacaagattctcaaaccttttgggtgtttgttttccacatttgagaccttacaacaatcacaaacttgagttcagatcagatcaatgtatctttcttggatactcttctcatcataaagggtacttgtgtgaacattctaaaggccggctctatattgcaagaaatgtggtgttcaatgaacgaacttttcctgcctttgaagcctcctctaacactcaggtactgtcttctccatctttacctactgctgcatttacttttcccactgctacttctaatactgctccaatttttggttgtgctgctgttccttcttacaacctgactacacaagtgtcttcatctccaattcaacaccagcaacccgccattaccaaccatcgccctgctcttaccactcaacaaccagaaatacacaatccccaacccccatctcaaaccca

SEQ ID NO: 91620 - DNA, 552 bp, Cannabis sativa
ttcaggggaatattgatatattttaataaaatacaaaaagaaagaatctttccaatgaagcagacctcatggacgcaatgctcaactgctagacgtgccagcagatccttggaagtggaagtggcagagtcccaaaggccatcatgagctggtaaagctccataatgagatcccagttccttgagtcttgccgcaagaagagtaaagtggcgaccttcatcctgagccacctttacaaaatccgtgaagaactctctcggcattgcctcttgcttaccaaaacgggcaataatatcctaccaaacaaacactaacattcaaaattcatactatagagtatagacacatgaaaacaacaaaaataaaacggtgcatccaaaggatacaatttaaatcaagtaacaagacttaaacatatgcaaaagtctcctacatgggtgctcttattaactttcagtttcagagaacccaacaaaaaataaaaaagaaaactctgcaatcaagtttcccatttttacagtgtaaaataagctcaagaaactaaaaacaaaa

SEQ ID NO: 91621 - DNA, 5406 bp, Cannabis sativa
aaaataattccaacactaacttcatagccacataacatcgcctaccatctttccttgcttttaggttgtgaaggccttcataagcaatgagaacactagcgataatgagtctactaggaacgaaggcactttggtgcccacttattactaatggtaacagaatcttgaacctattaattagtattttagcaattattttgtataaaacattacataaactaatcggtctaaaatcactaatcaaatcgggattcttaactttaggaataagagtaatcaaagaatcattaataagagtcatatcagctacccccgttaaacaatcaagaattgttttagatactaaaggtccaacaatgtcccaatgcttttgataaaacattatactcatcccatctggccccgggcttttatctgctggcatactaaacactgcttcttcaatttcctttaaagaaaaaggttttacaaattgttttatttattttttaaaaaaatatgaaaaactacatgtattttgagctcaaacgacatgtagtttgatagatactacatgtagtttggctgaaacctgatgtgtagtttataaacaaaataacatgtagtttattgaaaaatgacatgtagtttatcaacaattctcaaatgacaatatatatataaaaaaaaatgacaacaacttagctaaaagcatacataaaaatgacacatcatttttgggttgtcttcaacctacaaatgggacattaaaacttgaatcgatccatttcagatgctatcactgacccggttgtatttcaacctccggtacactatttttgatgtcatttgggatattttttttaccattttccttcctctttccaattcttatacccatttaagcttaaaatcattttaaatataaaaaaataaactatttttggccatgaaagaaaacacctaaaagctttgaaacatttgaagaaaataaaatttatggccgagaaaatgaagtttccaacaactcctaccatcaaaaatctttacttctaccattaaacacaatttcgaagaattattgtatcaaacaaatttagatttacaaaaaaaagtttgaactcaaaagtaagctctaaatcaaatgaaatggctctgataccatttgttaaaaataactatacattgagcataaattcatgctcatattagccaatatcaaacatttaactttagagcaaacatttagaattagtaaacatacctcatttaagctttgatgttgaatctttaagagctatgaatcattgttgatttcataaacctctttgatctacacatggaagaagaccaaaaaacttgagtgtaatgaacactactcttgatacaactctcaacaccatagccacacccctctcatgccctaaccacaaaataaatagcacgccctttataagaagttataggccaatttggcttacatgcccaatgtgtgagagcaaattgtgttggctcaataggttaaccaaagacgtttttagagcgtgtctataggtcccgggtccgagcgtgttagtacattatgtctgtcttattatgacctaatagtaatgtcatgcattatctattatatagttattattatatgttaacacctacactaaatgaacaattcttaattatattagtccacataaaacattctaacaaatatatctcacaaaatcattttttatgattttttttacataaaaatgttgtaaggatgatttttttttgggaccaatttggtagattttttcgtttaaaaaaaggtataatttaaggaaaaataaagtggaagagagcccttcataatatttaaacataaaatattttgatgtgacctttaaacatgattaaagaaaaaaaaaacgtgatgatctccccttcctagttgtatattagttatatcatggtttgcgtccccacctgaaaggaagagttaccaactctccattaaaatcaatcaccaataacaatactcagagcctactagccaagccaagtcaagccaattctttttatctgtggtgtgtgaggcacatatcataataataaaaaaaaaaaaggaaatgagtctcataggaaagggacctaccattttgttttgtcccatacaagtacaatcaaatataaattggcctggcctaatcttacccgatctgctttcaaatattcctctcctctcatcactctagctagttctagcaagacaagcagaaaaattataataattgaagtgaaaaattgtaccatgattttcatgtgacaaattttgaaattaatattccattttaaagaaagaagaagataattattgtacttctaacacaaactcatttagtcctatttatgggatatgagttgcgcttgcgtgaaagtttttttatttttcttttatttttttaagcttaagcttacgtataataaatggtcactattttattaaattaatctggctgaaattaaaaattaaatttggctaaatgattaaaattcagatcggatattactaatatatttgttttatggcgacaacatgtcaaatttcatgactctcaatctagaccattttcgactattattagttcaaagaaccacaaaagccaatttatcgtccagattcagctttagcttctactccgagtttttgcacaaaattcccctttcccctaataataacatctcaacccaacctgtccaaaaaaaactgttccgtttttccaatctcaccctttacattattaggctaaacttactttcacaatggatagtttagtaaattcactgttcttaatgtagccaatccgattaatatataagacgacaatagaattaatagcgtacaacgaaggacaagtgttacaacagcgcttctgatccgacccaggaaaatcaaccaaataaaattgttcgtcgccgccgggaatatgtcgccggcgagtgacgtacacgctccacttctctcgccacacggacatcctggggtgaatcctgcgtcggtatctggggccgtgttcaacatcgccactagtataatcggcgccgggataatgtctattccggcgacccttaaagtgctgggaattataccagcttttgctcttattgtcatagttggtgtgttagttgaaatgtcggtggagttcttgatgaggtttacacattccggtgagtccattacctatgcgggggttatgaaagagtcatttggtcgggtcgggtcagtggcaacccaagtttgtgtgatgatcactaatctcgggtgtttgatcatgtacctcattataattggtaaaagtttaatattttctttactttcacgaaattttctgtgtttttgtttattttggttgacatatcccgatagtgtttgatttatttgatgattaagctgatcccgtatttagttttagttaataaataaaagggcagttctttatttccatagcaaacacattcagacaaagatctaatagtctctctctggttcatatataaatttaaagaaataaatgtctcgcgttaatttcagcggatgttctttccggaagtcaacatggggaaactatacactttggcgttttgcaagaatggttcggaagccactggtggaactcgcgtgaatttgccctcttggttactgtcatcgttgttctgtttcctttggttttacttaaacgtgttggtaagtcagtaataaaaaagaactctacacaattacatgctcttcttttgatgaaattttctgatttgatcatctggggttgttgcgttttttcagaatcattgaagttcagctcgttcatatcagttcttctagctgtgatttttgttggcatatgttctgtaatggcaataattgcactcgtccaaggcaaaaccaagaatccaaggattagtacctcaattggacgaactaacatccttctttgaccttttcactgctgtccccgttattgtaacagccttcacatttcattttaatggtaaacataatcaactaacaaagaatttaatgaccaacagtgtatgcaatagctaagccaattcttgtactaacggtttcttctaccaaccaatttctacagttcacccaatcggtttcgagcttggtaagccatccgacatgatctcagctgttcgagtctcattagttctttgtgccgccatctattttgcaattggcttgtccggttaccttcttttcggagactcgatcatgtcagacatacttgtgaattttgacaagagttctgacactgcaacaggagcattgctaaatgatgtagttaggttaagctatgcacttcatctgatgctagttttccctcttttgaacttctcattaagatcaaatattgatgaattcctcttcccaaagaagccccttttggcctcggacaccaaaagatttgtggctctcacaattttactcttggtcttctcatacttggcagccattgccttcccaaacatttggtacctctttcagtttgtggggtcaacttctgcagtttgccttgccttcatttttcctggtgctattgctttgaggtgaatacactttctctttttatgtatctgttttgaaaacaacatgattaatcaatctgtttttttttttttttttttaaatttgttctgtttggaatctttacagggatgttaatggtatatctactaagaaagataggctattggcaagaataatgatagtcttggctgtagttacgagcgttattgctatctctacgaatctatataatctgcttggaaacaagaaggaatagagattggttcccatatttttttggtattgagttgacaagattttgtatttgtaatatatgtttttttttctttgacatctttgtttcggtgtagagtgattgtaatccacgggcttaatttatatgtatttatatcattatttagatagtcaagcaatatttagtatttacacattagaccacaacatcattacgatgcaaaacaagttatggcatgtttggtttgttgtaatcggaattgtaatagaatcaaattatccattataatgtttgctttgcttttaaaaatgatgtaatgggattacattgtaatcccgaaaagctatataatgaggattacattgcaaaagactaaataaagtaaagctaaaatgactctaatatcctttttcatataaatataaaaattaaagtaagggataattttgtcaatttatcacttattccaatattcattccaataacaaaccaaacattttaatcaattctcattactattcttattccattacattactattacattccaccaaatcaaacatcaccttagttcatattaactgtagtgagtgaagccttaggaggctctcaa

SEQ ID NO: 91622 - DNA, 1008 bp, Cannabis sativa
tttttccattgttctttcaagtgttgttggtgtcacgcctgtttatagtgtttttgccactagaagtctgagcataattacttgtgtctgcctatgcacctaatgattcatgaggctgctcgatacctcgtgactgtctgttgttaacaagcccgcctgggctttttgtatggcttcctaaagtttgataaagccatcaactctattaaggaactccttcatgttattggtagagatcctccaaatatctttccagaattcacataagtgaagtttaacccccaatatggccgcatatcagccttcttctataaggcctttgactttagtacccttagccataaacctctagatgtaatcctttagaggtttgccttgtctttttttgacttccacaaggtcttcaaactgtgatggtacaagtgtctaggacgagaattgtgcagaacttggcctaagagttgaatctttctatgttatgttgaaaatggctgggaatatgcggcatcgcacatcactagtaaccttctagagatcgagttgcatcttgaaatacttgatgtgagccagtgggtcctctcgattggtatacatcatctataccagtattttgaactttggtaagggcaaggcatttatgtatgccgagaatggtgatccccacgactgatcaagttcaaggtttgtgggcttcgggccagctatgcctgtgatcatgtccttgagttagttcaactgtgcttgcacaaaaggatttgttgctttggggacttagtttactgacccttcttggggaggctgcagattctaaagaggtgagggctggctggccataccttgggagagtgaagatcagccagtcccgtgttgaactacagaccctggtcggccattcccaggtacaggacctagccttggccagccagacctacacctggctattgtgtttggccagccagacctgcattgggcagggtttggctgcccaatgctcctcaatggccgacc

SEQ ID NO: 91623 - DNA, 674 bp, Cannabis sativa
attgactgttagcaaaactaaaaataaactacaatgccactattatgcaacttgtcatgtaatgaactcttacattttctgtcgatgagtccataaagttgttgattaactttttctcagcactaggcgttaaaattgttgttttttctgtgttttttttttcctatttgtgtatgtcaattgttgtatcaaagctctcaatgactccattagtgtagcgattggtaattctctagctactaagtttgctgagtttaaagattcatcaatattagaagtcatagttgtatacatattgtgtttgatatgataccttgactatttgtggtatctaacttgttgaagatagggtctaacatgcttggccaatctatcaagctcaatcatatggtattcaaatttcctctctgtgtatgcttttgcggatgcaaagaatgatttatcgagtttgcttgcattcttcttgaaggttgctttaaggttgcttaataggtggtatacacagtagccgtgagtggtgtctggaaatacatgagccgcaacattaattatgctctcatgtctgtctgagatcaagcacttttattctctgaccccatatgcttcccttaattttgtaaaaaactattcccatgagttgttattttttaaatccacaacagagaatgctaggg

SEQ ID NO: 91624 - DNA, 769 bp, Cannabis sativa
  modified_base (728)..(743): a, c, t, g, unknown or other
ctttgctcgggtgatgtcttgttcaagtttgataaagccatctactttatctaagaagtcattagtgtatactgccttgagaaaaaagtcagaccatagaagaatcatctccttaagcctgggtacaagtgccataacccttgcatccacactaagacttttggtcttagcggctgcctcaaagaaccgctagatgtagtcttttaggggctcatcttccaattgcttaacatctaccaaatcattgggtgtcgggaaggagaaaattggttgccaaaagcatccactagatctttccatgagtcgattgatttggggaagcataaggtacaatcgttgagctaagcctataagcatggcaagaaagattttgcacctgacgtcatctctcactccgtgcagattggtctgcacttcaaatagtgcatgtgagatagtggatcttccttccccgtgtattgatgccaggaaggtttcttgaactttgaaggaatgggaagagctttgattcttttagagagtggtgagggtcgttctcttttgagctaaaattcgaaccacttaggtgtcgtgatccccttcattaaagcagctaaggtgttgaatttggcctgattcaccccatgagttgtggtttttatcctagatgaaacttttattatatggatatgatcttctctagaagttcaggttgggaatatttcaccaggatctagatttactaacannnnnnnnnnnnnnnnatcctaaatatgaattctctaaaaga

SEQ ID NO: 91625 - DNA, 646 bp, Cannabis sativa
tatttaataaaacattcaccaacatcattaaaaataacaaaataaatccctatgtacactgtccaagtcaagagtatcttttacaactataaaaacaaaaaataaagtggccttaacagtttgctggctctcggaaccaaagttagttgcaaggttggaaatttttgcaaataacttcagctcacttataaattctcaactcctatatatactgaaaggaaaaactagaagaagagagatcgagaaggagaaggaagaagcttacagtgctgagctttggagccctaagactagagatcggaggtccatttccagaagtgtacatacaaaagaaaagaaagaaagttagagagtgagatgttagactataatatagtatatgaaatacagcatataaataaacgatatgtaatgcagaaaaactataaccatatcgataatatatgcaatgaaagatcgatatacctccagctattgatcttagagcttcaatcccacaaaagctttgatctgtgaagaaaactgattgatgtgggcaatcgaacttcctcgctctctcaactctctttagatagaatttgctgaatgaaatcagaatgagtgaggagttcacggggactgagaccctatatttataggtgagata

SEQ ID NO: 91626 - DNA, 691 bp, Cannabis sativa
agagggtacaaatgtatgtaatatctatctctgtagtaatttcattctttgtaagactagaagttttttgaagctccaagattgattagttatctccatcccattttgtgtctttcttgaagaatctctgtagaaaaatgaaaatggtataaataatatattaacatctaaaagaatgatatatatatatatgcaaagtttcatacctatatatatactgtggaatgtatgtgcataaatcaataaatgaatatataataatttcaacagaatccaaataaactaataatgtgttaagaagaagatgaaaaagaaaaggaaaaattttgataaaaaataattaaaaaaataaactgttaataaaataaattaccttcattgaaaaaaaatacctacgccataattaaatttgacaagcattctcacataaaaatgatgaataatgttgatgatcataagtgatgatgttccactattataaaatatatagcgtggagtactattggaggctttgcacaatttgtaaaaaaaattaattgatattaattgtgattaagagagagatagtgggtagttttattttttacatagtggatcatcttaaaattaaaagaagttacactccactaacattaatgtctattataaatttaaattaagtatatgacaacacttattagaaagtgtcacc

SEQ ID NO: 91627 - DNA, 2794 bp, Cannabis sativa
aatttggtcccgcatcaagcccactgtctctctcctccaaatgttgtatttcccaagaactgcagtgtcaatagatttcgaccgttcagtggctgcattttcaagttttactattgcctcatcttcctgttgtaccaactcagacgcacgtttttcacgtcttttctccctcaattgctacaaaaattcacagattagggaatgaaataagattcaaggtaatgcaaacaaatagaattaaaatcaacgcgcatataatagcaagtacatcaaattattagttacattgcaatgaaaaacaagctactttcacctcaaaaatacctgccttaaaaaaattaaagaatccaagttgaataattaccattcgggctagttttgcaggtgagtcagtagattgactgtgatgatctgcattacacaacgagatcagaaacatgcccaacaaaaaaagaagaagaagaagaagctttgcaaagataaaacaacatatttccacctgtcgaattgccccctttgagttttggcggttcttgtctaaattctggagctgtttggtttacctttgagcacaaatagcaatgaaattcacatcaggaactaagcatgtataaaatggatagctttctgagcacggcttttataatgtcacctttgttaaaaagtcaagcagagcattctcacctcagaattagtaacaattgaagtatctacaccaacaaatttccatgaagcagacaaattattttttctaaatgaatcaaggctgtaaggtcctgtgtcctttgtgctgttaatgattacatcgatgacctgaatattaagcaatttactaaataagataatgaataaaaatacagctactaccaatctcatatgaaataaaacatgcatgcacttgcctctttggagaaaagggattttaggtgctgcgtagccagcctttctctccaacccacaccctgcaaacatgtttaaaataaacatcaaaatacataacaaagtagttatacatataaatataaaaactgcatatataaattctataaatacataatacaaagtgagtgtgcttggtaagccacttatatcaggatgataaatgcaagcaaaataatacctgttttccggggacagatataatatcattgtcatctgcattaataacaataatcagttctataaactgcatcacaatgcatacataatactggcaaacaacagattttcagaatgacaagaatatcaacacctgattgaatttctggaaaatgtcaaatcaggactcaagtaacagaaaaccgtgtcagctctttcttactgacactttctttttgctatagcctaaaagcaaatgaggagctaacatctctggttcagtttgccagaaactttaccactacaagttttcctaagagacaatgaaaagtaatcatatatctcaacaagataaactaatctggttctcaaccgttaacctttaaaattctcattgcctggaagttaatgtatgcaccatggcaagcttctaagatgtatccaaaatgaaatcctgtctgtgaacagctatacaatcctaaaaggttcttttgttaatcttaaaaagcacaggtaagagtacacaatacagtttttgttgttaataatacttttaaaaaagtcgaaccccagatgactcacgcactaacccaaatcggctagcctcaagtggacaaagcacacaatatacttaaactaagattgacattgctacgaaagtaaagaatcattgggagtctagtcaagccagaaacacaaattgcaaatcaaagactacaatatagaactttcaccatgttcttcaaacaattgttaattaaaatatcaacttcacatggtaatcaaagataagcctaaatacatcctcatcaatgatctacgcatgcatagaagtagaaacaataccataactaagatcctagcaaggttcaccacagtttcggctgaaatattcttttgacgatgtctaagacaaattagtaactctacatcttttgaagtatttaatttaaggctgtcttaaaaaatacaacaaaaatttgatcactgtttaatgacatgcacaatcagcattccaccaaacattgaaattacactcgcaaattctcattatcatatcaacactactgattaggggaacaaaagtagcttgttccaggtgcaatgcggaagtcattaaaatccacctaaaaacttcaaacccaataatcccaaaatgaactcaatgccaccagggcagccaatccaggttacccagaacaaacaaggcaatcaatctctttcgaaaaagccccacctaaacactttccaagttgagtatttctcagcttagtcccaaatcaaacccagcacgcgtaaaattcaaattagtctaatattcaattcttacttccgaagaaaatcgttaatgcttccttaagcaaaatgagattgcaactgagaccaggaatcactacccgcattcaaatccaaaaaacgtaatttcaagaaggacaataggaaacacagacaccaaatagagcaacataattggatctacaaatctcatcaacctaaatcaaaatattaggcagaacaaaaaaaaaaaggaagtcgagaactgacaagaagaggcgtggagcccacggccgaagaaaaaaatcaagggcgcgagaagcatcgcgaagaacacaagaatgacaaaaggaaatcgagatccagcaccgcctcggcccctcagggcggcagccgcaagcgtttgccgcctcgaacccat

SEQ ID NO: 91628 - DNA, 1247 bp, Cannabis sativa
aaaaaaaaaaaaactatcaaatgaaactttctgtcttgtatttttcaaaatagtttcttgaattcagtttttgataatttatttttaataaaatttagcaagaaaatatacacagaatttatccaatcttgtcataatacctttagattgagttatcattaaatttattttaacaacaaataaacctagtactattttttgatattttaaaaaagtacaagatcttatttatcatttaataaaataaataatctaatcaataattattacaaaacacgatatctaaaatagtattttttatcgaaacacctctgtttttttttttttcaatttcaaaagctaaaattttccttatagaaactataccaaactaggccacgccttatttttcttttgagagatatcatacatacaccaagtttgataaattagaaaattaatataaatgttaagcttaattttgtccaaaattatattttttttttttagaaaacttactgcttccttgctaattacctaagataatgaaagtttaaaaacaataaatccatttacctttaggttactttcagtttctcctagtacgagaaaagttaattttattgaaaattttaagattcctaaatttgtgtcatatatttcaatggtttaaaaagaattttaatgtttacaacttatttgttttcttattgttggtgaatgattaacgtattcattgtgtcccttttttcaatccaaatacatatttctttccaaatgtaggctaaggacattgatcagatcgaaagtgcatatggcaaattggagagtgatcaaagtggaaaagtagggcatatagaaaacaaattggagaacaatcatgacagaaacgcaagaagcatagataacacgttggagaacgagcataatagagataatagcaatgtagacgacgaattggaggacaaccataacagagatgaaagtacttcagggtgcgaatcggagaaccatgacctgcataacagagatgaaagaattgaagttgatgaaatggatatttggaaaagtgaaagagaaaatgaaaatgtcaaactagacaatgttgaagatgaaatgagaaaggggttagtccaaattgataaatggacgttggtaaaattgaagagaggaaaggattacaagagttccttttagtttgaatgtttagtgggtaataaagattggattagttggagggaattacattttatcgggagagttcctat

SEQ ID NO: 91629 - DNA, 792 bp, Cannabis sativa
tgggtcaggtgggtaaactctttcatcttggcacttctgatggcctcattgtaatactttgcattgaaaagttcctggaaattttcccaggtcatagttttgacatcctgtatcatagacaccatgtcccactagactagaccgtcctcttgaaactgaaatgtggcacacaccactctgtcattctcggtaatgcccatgaaattcaatatcttcgtaatcatcgttagccactgctcggctttcatgacgtccggacctcccagaaaaacaagaggtgcctgcttgaggaatctctcatacagaggttccattctatttaccgctactactggtttggcctagacaacagggccaggtgccactggaacttcaggaacaggcactgcaggagcaccctactgtcttaaccactggatctcattatcttgttcttcaattctggctggcatttttgaaaacctattttccaatttctgggcttcctgagtggcttgggcagcctgtggcgggttaacatcactccgaccacgagccctacccctgggacctctacctcggccccgagcatttaggggaaactgagccccctgaccttgatttgacacaaccaagttgccctgactcctggtatttcgcatggcgtccatctagtctgaacagcctacgaaaccaagagttggcatatcaggtcatgatcaacgagagcttactaatgccgcttaatttgaaaattaaaatcattcgcctaatctactatcaggctactaacatgcttcctaacaggctttt

SEQ ID NO: 91630 - DNA, 636 bp, Cannabis sativa
ggtgtatgacacattatgcaatgtcatgggtttgaatcttataaaactttttttcaatatattttttagggccccgaaataaaatttcactgtatacctattttattttatttcttttaatttttacctttatttttatattctgtaaaatatacccacttttatagatatgatgttctcattaaatttagaccgtgtaaattatatgttaaatttaagtagaaagtataagtagattgggcaactcactcaaaaagtaagtatattttaatattatatgctaaaatataatataaatgtatatttgattaatagatataaaaagaatgcacttttcaataatttgtcttaggcctatatctcatggccagtccagcatagtgttgttcattgtcaagatgttccatgactaagctagtaccaaaatcaaatcattacacaagaaatagcttgaacatatatattattattattgtaactatacaaattcttttggataccatggaatataaataacagtagaagtaaggtggcatttggttggtggtaatgaaatggaaaggaatggaaatgaaacaatttttatttcatttctttgtttggttgcattttaaagtattagaatagcattccaat

SEQ ID NO: 91631 - DNA, 1063 bp, Cannabis sativa
  modified_base (806)..(809): a, c, t, g, unknown or other
tgagttcagagcgaaaagagaggttcttggcttcaagtttgctgaagttccttcatcaacactgcttgttggattgacattgctcgaacccagatatccgactcttgagtaagttttcgatttcctttatgcttatttttcatgtttacatttcgaatgcaccttcgactttgctgtagaaaatatttaggaaaccctaggtctagaaactctgcggttcttctttgtcatggcttcatgagattttacagtccataatgtttgctttttgaactgcgtaacgtctgtcttacatcttgcttattctaagcttcatgaatttttttgccctaactcgactctttgaacattcttgttcttgaatctgttgagtactcctggtcggcatatttgcttgtttatcgttcgaaatttgaaccaaacactcatcttgtgtgttgtcttttgtagatgaacttaggtgagttttgggagaatgaacgtcggatcgaccaggacctgcttcaacttttccacgaggatcatcctcgtcttagttctagccctccttcttctagtgaaggacattctccaaaccttgtacccagccatagaatgatggctcgtacaaagaaacaacacgtctggctgacgcatctgatcctcaagtggctcagtgcgccactttgcccagcatcgaacatgatccagccgtccaggtggagggggatcatgaaggggacgctgaggtccaggagatcgaggagcaggacgatgtacgtcctggcagttcctccgaggtggaggaagaggcagaggttgaaccnnnnaactacggggagtacaacgaggctagggagctagtcgatgctgacggagacgtcctggttaagggcatggactacgtcagtgaggaacttactgctgcggttccccatagaggcaaggtgccttgggcgccaggtgggtaagccctctatcatggttactgaggcgcgccttcggactctcgaccagggcgaactggattgctacattcccgcccacaacaatcgtgccacaaaccctaaaagggggatgtgcg

SEQ ID NO: 91632 - DNA, 671 bp, Cannabis sativa
attttatatatttttaattttttttaaatacaaatttatatgtatttgataaaaataatttatcgtatttttttattatgtcttatcaaatgtaaaaaaaaattacaaacccaagaacataagaaaaagttgatgttgtttattaataataaaataaaatataaattatttttttttcaaaaaaaaaaagagagatttaataattatctattgtattataattatttattttaattttttatttgtttaatatgtaataaatgagtaaatatggttttaatacaaaagaaaaaattattagtcttttaatcaaaacagttttttctaaaacttggattgaagcagcttcagcttttagttgtagcttttttaaaaattcttcaaaaagctgttttttcactgtttaccaaacatatttttatcacaacttttttaaaaagtaacttttaacttttctaaaagatgtgccaaacgggccccaactcctctaatgggtaggtaataatagtaaacatgctttgaaatggacacaattgtaacatcacacaataatgaaagggaaatttgctaaaacatacttaaaaatttaaactatttttttagtttttttgagagagagaaactattcttttaatctaccacctttagacaaatattctaaatattctcta

SEQ ID NO: 91633 - DNA, 744 bp, Cannabis sativa
agcagcagaccacctcaatcatctcgaacagtcattccaggtacttgaaaaatataatatgaaactcaaccctgccaagtgttcttttagtgtttcctcaggtaaatttctaagatacttggtgacaaagcgaggagttgaagcaaacccatatcaaatacgttccatacaaaacattcaatcactaaaatcaatcaaggacgtccaacgctttacagggaggatagcagttttatttcaaaatcttttgaacgttgtcacttgttcttctcaacactaagaaaagcgaaggactttgagtggacaaaagaatgtgaagatgcacttagacaacttaaagaatatctcgcctcacctttgctcttagcgaaacctgaagatggagaagcactctacatatacctagcagtctttgaaacaacaatcagcgctgtgctaatcatagaagaggaaggaaggcaacaacatgtctactatgtctcaaagactcttctagaaacaaaaacaagatatagccaacttgagaaactgcactagcacttatcacagcaggacacaaactcagaccatattttcaatgccactctattattgtgttgacacaatatccacttcatagcatcctacacaagctagatctttcaagaagactcaccaagtgggcagtagaactcagtgattacgacatcacattccaaccaaggacagcgatcaaatctcaggtattagctgactttattgctg

SEQ ID NO: 91634 - DNA, 1846 bp, Cannabis sativa
ttgtttcggtttcccccaaaaattttgcagttgggtcgctcagtgtatttccactgcctcccttaacatttgtctcaatggagggccggtaggaaagatcgcgccctcgtgcggtattcgccagggcgacccgttatccccctacctcttcatctgtgcagcggaagtgctctctagacttttagaagatgagattggaaagggggttattcatgggattaagctaagcaggggggggccggtgttatcccatattttctttgctgatgacctcattttggtgggccgggctaacataaatgaagctaaatccttttgggattgtctggacaagttttgttcgtggtctgggcagaaggttaacaaacttaagacttcaattttctttagtaaaaataccccgattggtatgaggagaggaatcaaggaagctttgggtattggcactcctgagggggttcttaagtatttgggcttgccgctattcagatcaaggcaaaaagatgctgattttaatttcatccttgaccatctcacatccaaacttcaggggtggaaggctaaaacattatcgaaagcgggaagggctactctaatcaaatctgtgggtctgtcgatgcccatctatgccatgcagaccaccaaattgtctaatcgacttgtgaataggatcgatggtttggttcgcgatttctggtggggctttgagaaagggaaccagggcctttatctcaaagcttgggataaactatgtctcccaaagtcgttagggggactgggatttcggaaaaccaaagaaatgaaccttgcttttctggctaagtggggttggaatttactgacagggagccagtccttatgttgtaagatcctcaaagccaaatacctaaggggtaaggactttctccaatgcaagtacaaagattcagattcctggttctggaagaacgtcgtcaaagctagtgaaatcatccggaatggggcctgcaagagggtggctgatggaagagacactagcatatggagggacccgtggatccctcacttgaaaggtttcgtcccgaaaccaaatggatgtgttgatacggataatatttgtgtcgctgaacttcttttgccttcgggagggtgggacatcgttaagctaaaaagtctgttcgatcaggagacggttttagcgattcagaaaaatggaaccccccctggatcgggaaaggatagttgggtgtggactttggaaagtaatgggcgtttctctagtaaatcggcttatctagcccaggctatggagagagctccccagtgtaatgttgcccctgctctttggaataagctttggaatagtaacatcatggaacgtcaaaaggttctctggtggtgcatcctttcccaagctctccctattcgagcagtgattaaaagaagatttcagattgataatacaagctgtccgatgtgtggtatgggtgaggaaactatggaacatctttttcttacctgcgatgtagcgatgcacttatggcgttcttctccgtgggggatcttccctgttggtgataccggtattcgggtttgggattgggtaaagttcatttggagccttaatgggcggggcatccgagtggaggaggtttttctttatgcctcgctggtggtggacaatatatggagaatgcgcaacgacgtgatacataataattgtgctcctaatgttttaaaatgtattgaccatattcgttcttcttttgcagaggcacatacttctctcttgcctagtccttcgccgccggtgaaggatagatggatgcctccacctctggactggataaaattaaattgtgatgtt

SEQ ID NO: 91635 - DNA, 674 bp, Cannabis sativa
aatttacatgaccataagatacatgaccataagaaaaaaaccataagaaaaaatttgactaaaaaattatttcggatattaaaaaagatagagatgtatcagtgtatccctctttttaaagggatacattatagaatttgcctaataaaaatattaaaaattccgtatcataatatttttataaaaattttctaagtgtaagttctccaaatatatttgcatgtaatagagtcttattaatctagaattaatttttagttttattaaaattaattttgattgattaaaatggaaattaacgaaatattaaaagaaggaaaaatcgctagaaggagggttcgaacctccgaccttgtggttaacagccacacgctctaaccagctgagctattccagcttcttgttctgagttttctttaaaaaaatataaaaatactaataatttgaatcattaagactagtcaacttaggatttttgacctgtcaaaatcatgatccttgaaattttctagtcattacaaattttccctgagctattgacttcattcaattttactaattcgataattatttttggccccttcattcagtttaagattcaacttttgtctaattttattcagtttatagactaaatcttgacatgtaccaaattatgactcctaaattttttt

SEQ ID NO: 91636 - DNA, 2457 bp, Cannabis sativa
  modified_base (1769)..(1783): a, c, t, g, unknown or other
agagagagagagagaattagaaaaaatgaaagaaagacatagagatagaagtgaatgaaagaaagaataaaaaaaagtcacacaatgaataaagaaaagatatatagaagaactttttttaaaaaactttaataagtaaagataaaaatgaaaaagaaattaagtataaaaagtataaatttaaaaattctttcttaaaaatataaagtttaaccaaaagttaacatctagtgtaaataacacattattttattaaatgtctgtaaaattcgactccttatattttgtattaagtttggcataattatgttaaatttttttaaaaaaaattatagcagtttgaatagcacttattctaggaaatgtgataaaatataataatacatcacttatttgacattattaaaaatctttttagtattggcattattatgtgataaaatgattgcctaaataaatggaataattttatgagaagcaaccaataaaaactaattcacaataaaaaaattttaattaattaattataaacttggagtttatattagtgtagtgagtactaaacattgggatataaattaattattaataagaaaaaaaaagaaatagtagttaaaacttgtgggcctgatgaagataggcaggtccagttccaaagttggttaagttaggagaactaaaatgaagagttacctttcaccaatttagtcccaaaaaaccatcagacatattttatctacttaccttatctttctaaacatcaccaaaatttggacacgtagtttgagttgtcacagcacccagaaatatataaataaaaataataaaacataggaaaatattatgttatggagacaaagacatcttacctagactaatgttacattttggtatgtgtattgtgtcactcttgtttgaaaattttgtaaagttaaaagtgacatgaaatgaaacagtggtcatttttctttatggttttggcttgtagtttatggattcaaagtttccaacttcttttttatcttcactcattcaaatgatttttcaaatgtatcactttggatagatatataaatgttatcttatcttgaaaaggttattattattattattatataaatgtctttttctttttctttccaaaaaaaaaaaaaaaaactaaaagtttgatagttcatctttcgggtaaggaaaaactcttaacttttaaaacatctgatgatgtcggtcaagacatttcagttttgaattattaaagagatagagtatgttatggtcacttgtcacataattgttttatttagttttttatttttcatttaaatatttacattactctctaccgaaattggttaacatattaagaaatgttatctactaaattagaaagaaaatcccttttaaaaaaaaaacattagaatgaaaatttgatgagtgatgggataaagagtggagaaagaactgtttcctttgtttagttacacacgcaatttaaagttatgaagagttgtaataatgattttgctggatattttatgaagtattaattgtttattacttcaatagaggagaaatttgaagttcaaacttcaaatagataagatcaattgccaagtagaaaccctcctctattttttgtagatcactatttacatcctacacatgatcaaatctagatacatgccaaaactaaaaatatacatcctagtaaatactaaatacaccctatttcataagttaaaacttaactttattattattattattannnnnnnnnnnnnnnttattattattattttgaaatgaaacttaactttattattaattacattttatacctacacacttattgatatgtgtttggtaaaaattaagggtgggtaatgaaataaaaatgaatttatttttttgattgtattttaaagtatggaaattttattctaattaattagtatttttacttttttagtagaataactattctattgaaaaattaataaaggaaaatatgttaataattatttttagaataaatagatatttcactctttgaactttggcaagaaaaaaaaattatgtccctgaattattagttacattaaatattgctcctcaactttgaacattagtaaaatatgatattttcataaaataattagcactttactctccaaattatagtaatgttgtctctcgaacttttactattgccaaatcatactacttttatttaacaaaaaattgaatggtactatgataatgataaaaatttaagaaaaaaatattaaattagttattcttaagagttaaaattgttaattatttaataaaagtctaataaaatctaacaaaaatatcttaatcattaacgtttaaaattgaaagaaaatatttaatattgttaataattggaagagtacgatcttcaatgaaaaagtttaggattcaaaatactaa

SEQ ID NO: 91637 - DNA, 1873 bp, Cannabis sativa
gcataaaacccaacagtaagtcccatctcgacaatgtgacggtgcttgcgttcaccacgtccattgggctgaggtgtgtggacagggctattgaaactcaatatcgtgagtttgcaccagatcgacaaatggcttgtattcacccccacagtctgatctaaggctctttattttcttgtcaaattggttctcaactaaagccttaaattgtataaatgcagtaagggcatcggactttagtttgagaggatgcagccaggtataatggctataatcatccataaagtggatgtggtaatggtgatttatgttagaagcaatgggtgcaaggctccataagtcggtatggataagatccaacacagatttagcacgagtattagatgaacggaaaggaagagcgtgtgctttaccatattgacaagcatcgcaaaaggttttcatttcatttttggcacacttacattaacagactctagaacatggtttaaaatcttgattggaagggtgacctaatcttctatgcgacacatccatttgggaaattaaaagactatcagcctgagactgagttacatttgagtcgacagaaatggtaaaagctgaaataaggttagacttctggtgtgaatgacttgatttagtgaagggtgaatccaactgatacaatccatccttaagcactccatgaagcagcacgttctttgttaccttgtccttcaacaaacaaaaatttgagtaaaattcaatcagcacattgttatcagtggcaagtttagatacactaacaaggtttttagcaattttaggaacaagtagcatatctttaagaagtagatagttcccaaatttagtattcaatttaccactaccaatgtgtgagatttgaagcttactaccattgccgaatacaacagactccttaccattgcaatcttatttctaagttagatttgaaggatcagatgttatgtggttgcttgctccgttatcggcaaaccaagtatctgactcgagaatttcaggggtggcaatgaaggcactgtgattgttgtttgtttgccctgctttattctggctgtgtgggttgttcgggccagaccccatgtagctttcgtcgaacctgttgtagcaaacagcgcctgtatgaccatacttgccacagacttggcaagtaggtctcgaaccagaaccaaggccacgtcattttcctctaaatttgcaagaggttcctcgactgttggagaaacggccaccactggtagttgcagcgttttgtgactgaaaacctcgatcccgaccattgttgttggtcttagctgccatattagctgttggcaaagaacttgtagtcttgttgttgttaaggataaggttttggagcctttcaatcttactgtcgaagcttagcagtaagtcttggagttcctgccaggttgtgttagatctagcctcaatttgcacaacaatgaaaaagatattcaacatcaagtacgaatagaacatttgcgacaaggtgagcctctggataagggtctccagccaaggccaacatgtctgaccaattctttttctgcctcaagtactcgctcatcggtgttgaccctttcctagtggtttggatcaaagtgtgagtgtcgtccatcttcgattttgagtaggctccgcataggctctcaagatttctccattgatttgctgcagagtgtgaccccatgacttctgttgcgattccttcggtcatggagatgtatagccagcccatgagtaactggtcacttattatatcaagttctcatattcaaggttagtaaccttagtatctcctgttgggttttatgccttaaataaaactctttacaatctgattagt

SEQ ID NO: 91638 - DNA, 655 bp, Cannabis sativa
aagaaatatacaactcgacctattataaattctctataactctatgagaaatttaaacagtaggaagcaatgaactcaactctaaatcatatagatcgatttgatactctcgttctaaatagaaatctatatcaaagtttttttaacatatttaaatctaatttctcaggttctgaatcaaattaaatagcatgtaagaggtgagttgttaatcacattcacaataaacacaaattgaataaatcttagatgaagatgaaacagaaaacttgcattaattcataatgaaatttcaagagattcaattaaatatactaaaaagaatttatttcatgttaatcattaagaaattcataaacatgaaatttacataaattataagtaaaaaagaaagaaaagaactataaacgctaaattcaatcttcatctaaaagcactctccaacaattctttccagttatagttgtcaaaaaattaagtctcccctctaaaaattgcaattaagatctaagctccacgttttccccaagcgaacactacaacaaatgttacttctgccagcacacttttgtgctggcaaaagttggtattgcgctgttaaaatagaaattacttgtgatgtgttggcaaaagggggttggcaaatcaatgttgg

SEQ ID NO: 91639 - DNA, 648 bp, Cannabis sativa
ttttagtcaatgggggacaaaatgtaaaatttatattattcacattttttcaatattgttgagaaaaggtagtaattacataatttggtaacttcactctattttaaaatgaaaggtgtatttttttagatacaggatagtaattatatattaatttcttatatcttacttggcgaaatagctattaattatataataaaaatattttttaataggtaatatttaaaatggcatgtttttaataattacacagtgcaattacactaaattatcgtagaggccatgagaattgaaaagtataatggaacccttctattacctctaattacatagttacagtataattatatggtcagaaaaatatatttaattgtataattacctcaaattataccgtgtcttttcaaataatccctagttaatttttattaattctttaaaagatatcctaattaaacataatcacatatgtattaatatttttatatttaaagtatcatatattaaatactagtgtactattattgcaattttttaaatttcgttatacattaataaaatctataacctctataaaaatgagaataattgtaagcttttactatgtaaaatacacaattaactttcattaaatattaaattacaaac

SEQ ID NO: 91640 - DNA, 516 bp, Cannabis sativa
cccaatcacctttcctccagagtctttgaatctttcgaaggcagcggcatcaaaatcatccatgacggtttgctcaacttcctcttttacagtagctgggagttcttctccccagaagttcatatcttcaaacgactcatcagaaacaaccttctcaattagaacaacgacattgtcttatgatagattaagtgaagggacactcagtacatcatcgacatcctcctcgaatttatccttcgtcccttcaccatcctcctcggatttatccttcgtcccttcaccatccttttgctccacacccacgtcatccttcttctcgatctcccccttgaaagaaagcgagcgctaaactttgctcgtctcatgtatctccaacacttcattcatagtacccttgccaaggtaacttgaaaataccttcagtaacagctctttagtgttgttcaccttcaaatcaaggcggaagacctcatctttcaactcacacacagctttgtatattgcgtcatttgt

SEQ ID NO: 91641 - DNA, 1115 bp, Cannabis sativa
agtttgagtatgggtttgagttcgaattttggtctaggattgaatcatgctctaggtgttggttcgggtgctgggtctgggtccaagtttgggctcgtgttccaagttctgatcccaattagtgtccaggttcagttctgggtctatgtcttgggtttcgatcccgatcaatgttcgagtttgtgtttgggtccaggtctaggtttgggtctgattctaggtttgggtttgagtttaggtcccaagttcgggtgcaattttcggttcgtgttcaagttcgggtttggtcattgtctgtgtctaggttcctgtcctggtttgggtctgaggcaggtttcgggtccgagtctaggtctgactttggattcctgggtctaggtgaggtcctagttaaggtttgaatccatgttccgatttgggtcatgtttctgggatctaggtcttccatccaagttcgattcctaggtcttggtctgggtctaggttcaggtttgtgtcctgagtcttggtttgagtctaggactcggtctgagttcaggtccatgtctcggtccctgtcttggtcttggttcgggtttgggcccctgttagggttttgatcctgttttgggtcccagcaaaggtttaggaccagctcaagtccaggtcctggtcaaggttcaggtcccaagtctcaggtccgagtcctagtcaaggtctcagtctaggttctagtccgagtttgggttatggtttaggttaggttcatgtctcaggttcaggtcctaatcatagttctagttctaattctgggtccgagtttggttctaggtcagggtctgggtctaggttggggtcggggtccgagtcttagttcgagtcctggtacaagtttttcagatcctgggatgggtccaggtctacattcaggtgctaggttcgggtttgggtctacgtctaggtccgagtctaggtcccgtgtttcgatcctggtccaggtctaggtgggtattcgattttgggtctccgttcgtgtccatgtccatgtctaagtccgaatcccagtctcaaatacgggcttggtctgggtctaggatcgagtcccaagttcaggttcgggttcgggtttgattctc

SEQ ID NO: 91642 - DNA, 930 bp, Cannabis sativa
atcgatggattctttacgtgaaagaaaaagcaaagcgacaacgacttccatgttgatcagtgtatatatctcaatatattgttattatatagatttataaataagtttagataattattagtactagtttattgattgttactagataaatttgtaaaaaaaaaatagattatattagtgttagtttaattattattactatataaattgtaaataaatttatattattagtattagtttaattatttttattatatagatttgtaaaaaatttaaaaattaatgtagggaaaaaatggtagaaaatttgtatttctccctattttctaatgtaatgactaaaaaaccgttgctaaaaataccttttaaattaaaaatcgtcagatgtactatatgttggaatttattttaccaagatctagatttactaatatgcagggccggccctgaaacaaagtgggccacatgaattttttttttgggcccttatgttagaaaaatatggtatttttcaaaatcagtaaaaaaaatatgtataattttaaaagaaaaaaaaatttgggcccctgggctgggtgggccctaggcacaagcctagcccgcctatgcccagggccgagcatgctaatatgtatgctgattataattttataatctaacaccttaaatattaatttttttaatacgataattttttttgacgcagtgattagaatcactcatgaatttacgatgcagatatccacaaaccgcgcaagaaactcctcgaaccaagatagctcatcgtctaactgaagggcatacttaaccatgaaactgcagcgagcaacatgagacaaactgtccctgaaaatttagacaataacgttataacgtccacaaacagcacaccaaaatggctagatcttcaacttgtaacatcgaaaacta

SEQ ID NO: 91643 - DNA, 666 bp, Cannabis sativa
gggatattgttatgttttatgttatgcttttcttactgagtctgttaactcacagatgctatttccatgtgtaggtaagggcaaggctaaggcttaaaagtcgcgagagtgagcagatggagattgtacatgtcggggcagttaggcttggagcgtaggatctttgggacatcagggcttttgttgtatagtcgttaggtgacaagctattatatatgcatggttaaacttttgtaaatgtttttgtaaatgggatccaagaattttatatgtatgttactttatgtttttaattaaataagcaaagttttaaataatcacaattttcgataacctagttggttagcaacgagctgcacagtatgttaaaaattaaattaacatacctaaaatagttagggtgttacactcttcagagatgttcccaaaattgaatacgatctcccttccccaccttgaaatgtaccagctcaaaataatcaccataaagatctaaaatatctctccacgtcccttttaaagacatacgagcacccacctttgagtctcaaaaattgttcgatttcccatgcctacttactatcactttgtgcaacaatgagctttcttctaatggaaatctccacaaccatttccttagcattcctttatttctcagctcaaaac

SEQ ID NO: 91644 - DNA, 539 bp, Cannabis sativa
gttacaatcaagaatcaagagtcggttaaaacagttacaactgttaaaacaaaaactaacagatataactaattcatttgtcattatcatccccctcaaacaaaaaggggttgaagccatttgaagtttgccttggagatatagaaatcgatctgttgacaaaggtttagtaagaagatcgaccacctgatccactgcaggaacgtatcgaacagatagagtatgagctaaaatctgatctcttacaaagtgcaaatcaatttctatatgctttcatcgcgcgtggaagacaggatttgcagtaatggcggctgcactctggttgtccacccaaataactggttgctgagacaatggaacatgtaattcagtcaagagattggtaatccatttgatctcggcagctgtgttggctaaggcccgaaattcactttcggagctggatctggccacgacttgctgctttttggctgaccaggatatgaggttccctcccaggaaaacaacatagccactggttgatcttcgatcatcaacgc

SEQ ID NO: 91645 - DNA, 544 bp, Cannabis sativa
tcttacaatgatctctaaatgtttcactcttgaatcagaatttttctcttgagtgttctctctgaatgaatttcatgtccttaaatagtgagatgaatccactatttatagagattaattacatcaatttaattttccaaaatcaatgagaaatacatttggaaaatagtttattttcttctctaatgatatgaatctgtcccacgaatttaaggattgtgtcgtgactcgcaagctttaaagacatacaagatatatttctaaaattgccaactcgcattttttggtcagtgcatacgagccacctgtttgatggaagctggtcagctgtctatgtatactatgctcagatgtcacaatttctatctgtgactttgagagtcatttcttcctgtacgatccactaagagcagaattgtctgttcaggttatgaaatgtgttccacgagtcacttaaataaatattatgttactgtgtatgaatttaaataactgttagtatttagtgtaaattttctaaaaaaaattagggtcctatttgtac

SEQ ID NO: 91646 - DNA, 1001 bp, Cannabis sativa
  modified_base (944)..(944): a, c, t, g, unknown or other
ttattattattacttaactaaaatgtatcctactatacaattatttttctatttttcgtaaaatttcttaaattatatttttttttaaaataaattaatatttatttatttttttaacataataataaattaatatttatattcattactttttgtcttttcctaaaaaattacttttaaaattttattatttcaataatataagaaatattatattattttttttactcattttgatttccgttaatttagaaattatatcaatttaatgaattatattttggacagttttatttttcttatagtttctcttcttaacaatttgtgttttttcaaaactttctttttcattatattttattttattttatttcgtactaaaagagagtgatatagtattctcacaagttctcagtttgtcagtgtatttttgttgtgttatttattttttaagtgtatagatataaactttaaagcttattggaggatcaatgaatattgaaacattggtttttaaatttagttttttttataagttaaatccttacctcatttatcttttttggtgttttgtaggttgtttatttatacttcaaaggtggaaaattcatacattgcggaagatctaaacttgttggttacttcttagtcaatcaagcaggagcattagccttagtggttgtgctatagattggtttcacacgttgctcttccttttagttatgtggagtctgattgtttagctttggtttctgctgttcaaaaatgctctttcttttgtaatgagctaggtttttcagttttttgctagtttgttttccaattttcttgaggcatccctagttcatgtctgtttctcatgaattagttgtgcatgcacttagggtggatgacgaattagcttattaaactctaattcttgttaataagagtttaatttcaanaaaaaaaaaaaaaagttgaaaatgtaaaataatttttttttttcatgttgaagtatt

SEQ ID NO: 91647 - DNA, 501 bp, Cannabis sativa
gctggtttttggtgtttccagcagggatgaaaggatctcttaacaaagctaaaccctagaagctttttttttattgaattccttaagtttttacttagtttgagtagtgattttgtgaattgatggttgttaggtttagaaatgtttagggtttgaattttaaggttcatttgagttggtttaagcttcttgcagctggttttagtgtatgaaattggctttatgcaagtttggttttgaaaacctaaactttgatctttaatggcatgttttagttcaatgagtttttttgtgatatattggcttgaatatgttgtgtgtaccttttaggtactctggaaggtttggttacgttggtggagttttgagcaaaaaatgagattttttgggtgaactggtgcaaatcgggtaaccggttttacttgtacgtgtaaaattggttagccggttttggcagggttccccgagtctttcatttcctcaattctcgtccattccgtg

SEQ ID NO: 91648 - DNA, 750 bp, Cannabis sativa
agagagggcatcaagtttcaaatgggggggtattgtgagaattaagaaaaatattatcccattttaccaatatctcctattttaagtttagggaaaaaaattatcccctaatgcaagcatagaaattcaactttccctttgatttttaatagttgacaataaatgggaatagaggaaagacaaggtataattagacaaaaaaaaaaaaaaacagaaaagagaagcaaaacaaatagagaaacaaagtcatatttttgtaaggttttatcataaaagccataaaaattacttataccaccaaaaataaaattagctatgcttagactactgttttatagttgggatttttataaaaatattggattttaaataaaagtttacaattttactggcacatgaaattttttaataaaattatgtcttcttataaacaaccgtaaaacaataaaatagaacaattaaaacaacagtggaacaactaaaaaacaatcgtggaacaacagtaaaaacttaacacagtacactatataaaacttacacaatatttttgaagaaaatcccgtcccacaataaaaaaaaattaaaaaattaaaaatttcaatatgtggtgtaaaattccttttatagtatatggtattgttgaccgaagttttcggcaaccaatataataataataattaagaaagctataaggaattaatgagagagatttttacgtggttggggcataatgagccttagtccacgagt

SEQ ID NO: 91649 - DNA, 699 bp, Cannabis sativa
caaaactggaggtgttgataaatgcttctttatgcctttaaaagctttctcgcattcttctgctcattcaaatctcttactacctcgtaaaattattttgggatcacatatatataattaccttagtattttttctcttcatagtgccttgccataaccttataatttattggaggaattcaagtactctctttagattttctttctactgccaatatgccattttgtttgtttatgccttcaaataaaaggttgaatggattgttattgttattatttgaattttaaataataattagtattttattttttaaaattttaggcagtgtttcttttaattttcttttatattattaatatattttttttataaaattttaaacagtaacttttatattttttttaattactattatagtttctacttttacaataatattttttttactatatgtgactatttattataattaataaaaataataatgtattatatttgaaaataaattaactaagtctacgtgcatataacttcaatctagtaatacatatacatataaaatttagtatatgaatgtttggaatattatctttcacctatttatttgaattttttttaaaaaaaaaacagaaaaaaaaaaattaagtgttaaaaattcgaacattaacattaaagagagatattgagaaaacttcccg

SEQ ID NO: 91650 - DNA, 825 bp, Cannabis sativa
aatatgaagaaaggggaagttgctctggtgacgattcatcctgagtatgcttttggctcatctgattcgtcacaggatttggctgttgttccagctaattctgttgtttattatgaagttgagctcgtctccttcgttaaggtgggtgtcatatgctctctcttcattgtccaaaccaatgtttctgcttgccttcacaatgacacttaaaagagatttgcttaatgtgtgcagggaaaggaatcttgggatatgaacacacaggagaagatcgaagccgcggggaagaaaaaggaagaaggcaatgccttgttcaaggctggaaaatatgaaagagcctcaaaaagatatgagaaggtatatttcagtataactaaatatattttttctacaaacccctttaattaggccctaatgataacacctctttcggttaacaggctgtgagtttcgtcgaatatgattctaccttcactgatgaagagaagcaacaagcaaaggtgctgaaaatcacatgtaatcttaataatgctgcctgtaaactaaaactcaaagattataagcaagcagagaaactttgcacaaaggttttggatcttgatagtaagaatgtgaaagctctgtatagaagagctcaagcatatattcaactggttgatttggatttggcagagattgatatcaagaaagctcttgagattgacccagacaataggtgaattctcttcctccatggaaatctttcactaattatatgctgtgattttgtttttgattacttatttgagtctttttgtttgtacattatatatcagagatgtgaaa

SEQ ID NO: 91651 - DNA, 624 bp, Cannabis sativa
ttccactgtgttgacattactgtaattgtgaataactatatgtactggacttaacagattttgtgcatatttaaccataaacttgaaaattacatgtaaacataaatgacttctaatcttttattgataacaaatcagattagattgaaatagattttattaagggcataaaatcccaacatgcaatctctttggccctctactgtgtgggggataaaccgaattgattaactccgcaaggaaaaagaaatacaatatgtcgtagtcgcaattgactatttcactaagtagacagaaaataaactactaacgacaaaaaattctcgactttgttatggataatagtatcaaacatatttattgataatatatatactcaaaataataatataaatatatttatttatatatatgttggaaaatgtactcaaatagaacactcaattgccttctcttggagtatacatccacactgatcttccatccaattgctgagttggccttgcatttacttcaaatccctaaaataaaacaaaccaacaaaaaccgattttaatttttccttagtaaccatttgaaatctctctatatgcatatatgtatatatgggtatgctcttaatgg

SEQ ID NO: 91652 - DNA, 814 bp, Cannabis sativa
ctggtaaaataatatccaatagtaacttatatttattgaattataaaagctattacatgatctaactgatctttagctaattaaaacattaagcaattgaacgatatactccgttcaaaagacattgataaagagcaataattttgaacaatttttactttgaaagtggtcatccgatctgagtaccagttgtttttcaaaccttttagcgaggtctgctcagaagaacaccacgtaagagtaggtgttcgagcattgtgcaacttgtgtggtccccagaccttttgcacttattggtagtatatttcttaagtgttcaccattccagtaccttggtacaaaaatccatgttttcaataccgaccaagtttgtatgctctaaattttttaacttcggttaatttatatggtccttccaaattatgctgagcacacctgttgcattgtcctttgtgttcaagaacactcttctgagttatatatctcctgtaaaaaaaaatttctttcacttgtttgttgaagtaccgagccactttttgttgatgagccagtagctttaggtttgttgaatttcttttttcttcaacttcatcaagtgattcttctagaaaggcatgattattctcatagtctttgttttctcattttaaaaatattggtgtacattaggattaattatagaatttaaatctttcaataagtttattttattaaaaaaaatatttaatatttacttaatttaatgaatattttattttattaaattagtttaaagttttaaattcttattataattatagggtgattctacaat

SEQ ID NO: 91653 - DNA, 1191 bp, Cannabis sativa
ttttagaagttcatatttacggtgttaattaacatacttgtcagtagatctaagatcttggtaaaataatttccaacacttccttcttcttttccacaaaccttcttcctgactgtcttgcgtcggtaaccgccatgcatatctctttcttcagctctcaatgaaagcaccaaaatatttatcgagttttttggcaaccgaataattttagatcttaagaaagtaatgaaggtataaataatgcaataacaaacaatagattttttcttggttcaggcgttaactatccttagtttacgagtctattttattaggctctttggccaatgattgtttatacaaataaaaaacaatggacttttactcctttccaccgtgttcctcttgaagaagaggaagcttagtaagaatattttggagttaataatgggattacaataatgtgtttgatgaggaataagtcttcaactttgagatggaggtctaaaaaaagattgaaagcctccaccaaatcccaggaaaaagatcccccctttgtgcttcttcagaggtatttataggccgactccatagcatgagctatcttggatggattttcatagagatgaatttccatcgtaggataggtaggtggcataattctcatgtggcttttatggaaatcagattgtactagctgggtttttgatgcgtgtcacctcagagcgactctcatttgaatttccctcgttcctaggcattggattttttggttcagtacacaagaacatgcatgttctgcatggtagcgtggcgtgggagacaacctgatctaacattgtacacgaaaatgccctatcattgggtttgtagcctgtggcgtgtgggctaagcttccgcgggtcaaagacatccctcggactggtgcatcctgatagaatatccgtactcctcgcgggagcaaagggtcccgtcttctggagtggagagagacattagctcacggacatcttttgcgtttcccgtgctcggggagacttcttttgcagagacctttcccgcgcgaggttagtgcctttattatccaagagcgtgaagtgaagcacttgggtgtcttaatgactccttgatcttctttaattagtgtccacatgtcatcttttgaaaatacggttaacactatatttgagtgtaattatttgggtataattt

SEQ ID NO: 91654 - DNA, 724 bp, Cannabis sativa
atctatatctatatataatcctattgttaggcctaatgatgtggcatcttctccttttagtgtttgattttctctaatttgtagtttactttaattttatcatattattttattacatatatataataatccctatagaaaattgaatgttcagttattaaaaacactacgtaactgttatagaagaccccattaaacctaaatttacgtgtaataataataatattagtaactgtaattgttcagttaaaaaaattgaaaagacaataattaattcattgttaactgtaattgttgttcaattaaaaaattgaaaagacaataattaattcattgttaataataaaattcaaaagacaatatatatatagacatgtgtgtattagaacttttattgttctttccccttcctttcaaccttcaatatatatttttttttctttttttttttgctctcaaacactttttatgtgattgttcttacctatctcatttatggacaaaactttacaattttatataacaagaggatcttcccttttgtcattaattatcatgtaagttaaaattttcaattttcgatagaactaaattttaattatcatatacaaattataaaagaggaatatcaatttttattgtgagttatattgtaaagcgttaactaatatatatgcttattttataattagattttttgcttttttcaatttatatatttaag

SEQ ID NO: 91655 - DNA, 1092 bp, Cannabis sativa
aaaaaaaaaaaaaaaaaggattacaagttataggtagcaggtctacaaccaatcatatgattagtcttcccaacattgctaaccacctccacagatccatggttcctaaacccgtgaactctgagttatgaaagattttaaggacaattgaccatgttcaggtacatcaaacagatttgtttatcgtgattatgtaggacacacaatatatacaaaattatgtaccatacaccaaaaaccaatataaaattgaatcctgatgaaatacactggcccaacttataagcatattacaaataaatgtatataattgttgaaaaccatatttccacttctttcatctctctaaaaactaaaaaaaatccatttctattcataattcattccaacaaaacaggcatagcaaattgaaagggaccaaatccccattcgtaaattacaaacaatatcaatataaatgtttcctttacccaaaatcatacattattctcacatattacgccaattttaggatttgtgaaaacaaaagaaaagctgtttgttacaaaggcaaacattaacaaaatatgattcaattgtgttgcattaataaatgaaaatctcattaccaagagtaaatgttccacagaaataacaatattaataataaagagtttcaataaagcatatgttctgaagatagcatcttttaagtgattctaaagtgttgaaaattttcttactcactgtttatagctaaaatctccatcactcaaatatctaagatttttcttatgtaaaattataattcaactactactgcagaaacaaattaagatggaagattctaaaagatttccagccaaatcctaaaatctctatcactcaaatatctaaggttgtttctacatacccgagccactgggcctcgaagattcaagctccgaaatcgtagaatgtagaaaaatttaaaatatggaatttttatttttattttttaagaaaaatgtaacattaaaaaggactgtgatgcaagatgatcttcaattttgaaaactaagttagtaaatatttcatttttaaaaaaaattaataaaatggtcaaatataata

SEQ ID NO: 91656 - DNA, 622 bp, Cannabis sativa
  modified_base (564)..(576): a, c, t, g, unknown or other
tttccccagagcataggactcattggagatatcacacaacttggcatgaaattcaactactgactcgtcttgctccatggtcagattttcaaaagccttgaccaaggcacgcaaccttgatttcttgacagcatatgttccctcgtttttaattttcagcttctcccatgattcctttacaatttcacagttagcaatgacatttaactggttcgtggagacagcattaaacaaagcatgtaaggcctttgagttgaagttagccctttctatttcgtttgtggtccattggctcatgggcttagggataactatttcattctccattaacgttggttttgaccacccttcttcaatggacatccagactctttcatcaacagctctcaagaaagcccgcatcttcgtcttctagtttggatagttagcaccttccaacatcggaggttttgaggttgatcctccttccctaaacatttccattttgcatagaagaaaaaaaaaagcacactcttgtactgtagttcttcgagaaggaactcagtgttggaaattattttaccnnnnnnnnnnnnntactcacaagtatgttgattagcaccctaaatatgaactttctaaa

SEQ ID NO: 91657 - DNA, 704 bp, Cannabis sativa
attttgaaatttctgtaagtacatgtttaagtcaattatggtgtgataatttttaattggtctaagttattaaatttttatttttgaaaagaaatagtttaaatataccaataaaaaaaataatagtgtataatgacttcatatttaacaaacaggtatacagaattccagaaatataacttaatgttttattaccgttaaaaattataattaagtaattatttacaattgagagttgaatttaagtatttatagtacaaattacttatttttattatatataaaggtagacgacaaacatagatatttgtgataattgaagatatttattaaagatatatttatgagattttttttattgcatatatatatttattaaattttttaataaattatatagggtaattttataatatattttcttattttaatgtattgataccctcttcacttgttttggcatctaaaaataatataaaaaataatgttcgaaaagtctattttgcacccgtataaaataaaatagtcacgcgtgtaatgcagtatttgaacgcaattttcggcatgttaaacttttctaaattttttaaaattttgcagggtgtcttaaataactacaatttcatgattatgagaaaaaatttgattaaaaaattatttcgaatacaaaaacagataaaaatatattgatgcatcccttttaa

SEQ ID NO: 91658 - DNA, 669 bp, Cannabis sativa
ttatacattccattagataaattaataataaagctacgatcagtttgtatataatatataacagaataataatatataggtatatgcttacttgattgatagtacaatactatcaattaagtcttcttctttaaatttctaaataagaagcaatttatttatctgattatcaaaaagtatacaattgtgatgagagaatatgtatttatagagttaggaatggaacttaactacataaccctagttaggccgaaggcttcagtcaactagaaaagtctacccttctacttcacataggctttacacatgtagatgttaagcccattaactattgatcaccaacaatataggctaacacagcaaaaaaaaagaatactatctaatcaaccaagttttaataaaaccaataaatgttaatgtaagcccaaataaaagtctaacattctcccacttgggctacattaattttaatacatatattctatatccaaaaaaaaatttgtttgaaaatgactcaagggttgaacaacagaaaaaaatttgtggctactttaaaaatgatagttctttcatatagcatctcaacataccagttcaatttaatctttgatattgaactatgacaatcatattatttttaaatcaacaagacattcataatcacaaata

SEQ ID NO: 91659 - DNA, 641 bp, Cannabis sativa
tttggcacaaaaattataagagatttgagaaaactaatataaataaaaataacaccaggtttttacgtgattttgcagttaactctgcatagtccacgagtctatcttattccgatatttctgatacagaactaggatttttataatcagtatactcatttttctctataagatttcttgtctcttttttcgtataatctgcccctaattatagtaatataggttgggagttaattacatttaacttcaaatctcataacaatatttcccaaaattatggactttaattatgctttatgtaaataaatgcagttaatatttgaaaatcacatagttgtgatttaaatcatttttaagggagtcaacgctgacgtggattaggacacgctggcaaatgtatctcgatgaggcatctcgcctagtacaggaacaacttggtttattcataagccttccagcaatggcatgagtaccagtgtagtgagcaaacttaagaactgctctttgaccataaggccttgtagactggacaatcatgtccatcaagtcattacacttacttattataacgtatataatacgctaagtaatctaataaccagtttatctcgtcaatacctctttacatacaacgaggtaga

SEQ ID NO: 91660 - DNA, 1018 bp, Cannabis sativa
gcaatcattcaactccaacatagctcctatgagtacataaacatgtattgaatctattctttttaatgaatagatccgatcgcaacttcgaatatgtaattcaaagggatcaaataagaaatgatactgtggatcatagaactataatgaaatatcaaaatttatcaaatttgaaaaagaggtcttggtacggcctatacatgattgggccatgatagttttggcaaggttcaaaatggaaggtacctctaaccagacccaactgttgtagtacctgaaaagaaagaaaaaatgagttttataagcaatttcaatgataactttgtgggatacttcatgccactgctgtatcaatgttgcagtaatattgcaatgtttaagaaaaatgaatgtccaattgtggtttctccaggaggagaagttaccttatgcattttatatatctgatcaagagcttcttgtgccgcttggaacgtatttggagaagcacaaaggttcctcatcactatgactcttgtatttagttatttattgtgtgcatgctagctctaaaagattgttgttttaaatttatttgatattggattttgcagtttctgtggagaaggtactctcaatagtctatcaacctcaagctattttccggatccgcccagttagtcgttgctcagcaacaattgctggtatagaatttatgccttcaactatatcattgtgtttataaatatcttagctacaatacttactattattactgcttaattgtttatatttgataacaaaactatataatatcacaaaaacgataacattacaaaactatgtcggggagggagttagaaaaggcgaactttttacttaatttattcttttcaaagggttaagtttccaccatatttctctcaattttgtaaatgctttgtgcgtacttgaatttctttgtttcttgttcattgacgtggtttggattaagtcttattgtctacttaaataaggagagcgctttgatattacttga

SEQ ID NO: 91661 - DNA, 615 bp, Cannabis sativa
  modified_base (216)..(218): a, c, t, g, unknown or other
tggccgaggccaaaatcagtgacataagtttgaagttttctcggtttagcagggtattatcgacatttggtcaagggattctctaaaatctctatgccattgacagagttgactatgaaaaatcaacgattcgtgttgtcaaacaaatgtgaagcaagttttctagagttgaaacaacatataataacaactccagtgttagctttgccatcagannnagagaaatttgttgtttattatgacgcatccagacagggtttgggatgtgttctgatgcaagctgaaaaagtcatagcctatgcctctcgtcaactgaaggataatgagcagcgctacctaactcatgacctagagcttgctgctgtggtttttgctctaaagatatggcgacactatctttatggtgaaaaatacaagatttatactgatcataagagtctcaagtacttttttacccagaaagactcaaacatgaggcagagaaggtgactagaactgattaaagattatgactgtgtgatcctgtatcaccctgagaaagccaatgttgtggttgatgcactaagtagaagaggtcccgggcaggttttcagcacggttttgatagcccctcaa

SEQ ID NO: 91662 - DNA, 997 bp, Cannabis sativa
  modified_base (36)..(46): a, c, t, g, unknown or other
  modified_base (927)..(947): a, c, t, g, unknown or other
aaatatcattccctaaagagaatgaatagacatgannnnnnnnnnnaaagaatatagattttacatatattggtaattgttatagtgagatttttctcacctaaaaactcaagactagactcctattaaaaaagacatgtgtattcactttccttgaggagagctgagatgtcaatgagagacacctcgagtacaaacctcgcctgaaccaggctcagcgagatgatgcgaatatgaccgagtctaatcgcaatcgtatgactcgcattatgtaggaccaagaaacggctttaaactcacatatttcaggatatatgcgagtatccccatgatcctcctgcaaacacataaaagatcgattctctatgttgtgagctagtcctgttgacccaacagccttgataaaccaatatagactcgcatgtcttggctctatcagcttgttatatgatgtccgtataagcgactttaaaaggacgcagacatcctagattcgactagtctcgaatgcatcctaagcttgggagcttatgcaagaatatgaacagccaactcgcgttataaaagtcgcatacattgatgtacttagtgaattaagctggaaactgttcttcatttattatgtttacgttttttagtttaattattgtaattcaatgtatgaacggattgataatgaatgcaatccttgtgtaaatgataggacacttgctttgtatataaaggagtgatctgccgtgaaatggacaagaaagaatccttgcaacaatggactaagcagaccgtgatctgactgaaccactatactgccttgtgttcattgtatttccagtttttgctaagtatttttgttctcttaatttgaatactcgccattatgggtcgagtactcgcatatattcttcatatcttattattattattatnnnnnnnnnnnnnnnnnnnnntattattattattatttatttttgttgttgtaaaaattcctttaacagca

SEQ ID NO: 91663 - DNA, 520 bp, Cannabis sativa
acagaagatgggtatagatgccaaggtcatccaagccggtttattcaatacaacatcgacaggtttgttatacactctactcatgttattcaatacatgcctgctatgccaatgatgtcttaaaatacgtattcatcggtgtattcttggataatagagtcagtccaatttttggctcctacatggtctagagctctcagagtttgaggtcacctgatggaacattttaattttcatgctttccttttctctttttctttgtttttgaaaaaaaaaaaaaagttaacccactctccaattatcataccctctatgccaatgtggtcttaaaatacatgttcattggtgtattcttggatattagagtcaatccctggtgatccattttaattttcatgatttccttttctctctttataatttgtttttaaaaagaaaagaaaaattaacagggctctccaagtatcttatacccaatgcacatttcttattggaagtaacaatcatcatgtacttttta

SEQ ID NO: 91664 - DNA, 862 bp, Cannabis sativa
  modified_base (622)..(624): a, c, t, g, unknown or other
gaaacttcagaactccatggcacaccatcctcctaatgacaatcgagcaagacactctcattgcaggataaattttgttgcgtcccacctggacgaggctcgtaagccaactgcacccaatgcagcaccaagtgcactcttgcacaaaatctcttcatgaagttctcaacattggcccttcggccctaccgaatctccacgacttcatgcaaaaggcccctctaacccactgcatacttgctcttctaagctactttcacgtggttaatgatcaaacaatcgcccaaaaccacaaatttttcctctggttgctgcttgtgtcggctctcaatctatgccacaagtttatctcccaaaatgaaccctgcatcctctgatgactcgctaacttttaacaaactcgataacacgaagtcttactcttaagacttgaagtcatcccaatccgctatctcccatcggcatatgctctctgaactattcggcttacagtgtccgatacagcactagtgtccccataaacacaaaacatgcctataacatgccgcaaactagctcagtcttgatctcagcctacgcccctacatatttgtctatctgcagcttgcagcaatcatgcaannnttcgcactgaacaacccatttgttgtagtgtttccctttaaattcacacaccaaaactgaacaagtaccttgattcttcaaacctataaattagtgggctccccccacttcaacttgggaagaacttctctcttagaggagtatcccttaagatatagctcgcaagctaaccgcatactcgcatacggttcctccattccgcatgtcactttgatgaagatgttgaactcatgcctcg

SEQ ID NO: 91665 - DNA, 509 bp, Cannabis sativa
ttaataataaaaaaataaatttaggtttttaataaaagttaaaaaaattatattaattaaagctgaaaaaaaaattataggaaacccctatgacgacggttatttcatacccctttagcgttacccgaatcagcgtcgatagcgaattttgccaaaaccaactctgaaaggccttaaaaatcgcctctaaagcctatatttgtagtagtgttcaatggctctttctgatttatctgtgtctatttgattgagttttttaatgaaacctttctttcaaaagaaaaaaattgatattttttttaataaaaacatgaaatccattattgtagcatgggtggttttttttttttttaataataaataaataaaacaagcttttaatttagtacgagatacctattaagggtcatatctagccatttgggggcttaggctagttgaataaaaggctttttacaacaatttttttttactacaagtatataaataaaaagtaagaaattgaacga

SEQ ID NO: 91666 - DNA, 547 bp, Cannabis sativa
taagaataagatacagtgaataaacaagatattttctacattttataaaatataaatccttaaaaaacgaatgagtaaaataagatatttgattatatgtaattctatatacctgtgacacagtaaaagcaaaaaatattatatatatatatgtgatttgaatatatagtttatgtgaatattcattttaaagaaagaaaataaaagtaaaaaaaaaatagaaaatagagcttacttgttttcttcaataaaataggagagatccataaaaatatcaaataaaaataataaaaaaaatggggcttacttgttttcttcttcttaaataaagtaggagaaaccaaaaaaaaaaaaaaaaaaatccttctatagtaggagtgttcaataaaatttataaaccgcccaacccgaataaaccgtccaaaccaaaccgaataaaccggtaaaaaatacaacccgaactaatacaatgaaaatccaaaccgcccaatgaatatattgggtggtttacaaattattctaaaccgcccaattaacccgaataaac

SEQ ID NO: 91667 - DNA, 569 bp, Cannabis sativa
  modified_base (26)..(55): a, c, t, g, unknown or other
ttggaatgtcctcctctcggattctnnnnnnnnnnnnnnnnnnnnnnnnnnnnnnctttgaaaagaccgtcttcccctgtatttgattaaaaagatcatcgatcctaggtaaaggatatttattcttgattgtcagcttcttaacctctcgatagtcgatacacattcgtagagacccatctttctttttgacaaacagtactggagctccccagggtgacacactaggccgtgtaaatcctatgtcaagcaacccctggagttgaattctcaattctttaagttcagctgcatccattttataaggggctttggaaaccggttctgctccaggtgccaaatcagtaacaaaatctatttcccactgaggtggtaaactggtctagcttttcttgatgagattggaggatgtactcctggttattcatccatctaaaaaatttgcgtctctattgtgcaaatgcatcacagccaacaatgcgtagttctttagtttggccgacttggcagacaacctctctaagtttggccaattcgagatcttgtcctaaatccacatgaggctcacc

SEQ ID NO: 91668 - DNA, 1243 bp, Cannabis sativa
tggttggcgagggttttttcgtgggtttgaggctgttgtggtggctgttcttcggtgggtttgagggtgtgaaatgaagaagacgacgtacagggtggtcttataattaaccctatggcgtcagttattttgtattaaccgacgccatacgtgtcgcacctatggcgtcggttaatacaaaataatcgacgccaagggttataaaaaaatcctaattttccccaactccaactgacgacatagatatatatattttatacctacggtttttaccaaaaaactacctctaaatttcaatgcggatattttcacaccctttagcttccctttttataaaatgtgttgaaaaaagggaagctaaaggcctacattgtagtagtgttaaatgtgttggtaaaagttagattttagccactgcaaatgtacgctggtaaaactttgacctttttgccagcgcagtttgcgaaatgcactggtaaaggttaatttaccagcgcagtagtgaactgtgctggtaaaagtgacatttcttgtagtgtcataattagatttttaggatattacattaagattgattgattttaatctatttatggatgcgggtatgagaaccacggttgtatgggtctcgaggcacgataaacagtgacagaatggttttgtgttcttcgagtgatctagttgcaacctcctttcatccttatgtggcggaggcaacaactctcttaaacggtttgctgcatgtcgtcgtttggggtacaactctattactgttttctcagattgtctttgtcttatccaagctattaataataagaataaatatcagactcagtttgatattattgttcatgatacatgtttgatattcttttctcttttagttctcttactcgtaaaagggttcaaaacgttgcgactcatattctcttgcacctttggctttatttcttgactctttttattttttcgggcctaattaatttactgtcttgcctttaatccttgactattttatattgagcttttgttttttcgatttaccttttaatggaattctccttcgatcgaaaataaaattattgtgtactttagaattcatcgctatttatgctacatatcaactaactccaataacactacaacaaatatagctattaccggcgggtttattgctggcgggtggtattaataggggtattatcggcggaaatagccatccgccggtaataactatataatt

SEQ ID NO: 91669 - DNA, 742 bp, Cannabis sativa
  modified_base (688)..(717): a, c, t, g, unknown or other
tcgctcaaccaacaccaatcacaaaagggcttggccaaagagtggcctccagagtcacttggccaacactaattacgaaagttattgggccaaagaaccaccctcagagtcgttcagccaatgtcaagtaaaattgttgcttgacatattggcgcaaagtaaagttcgaccaagggaagccctcaatacaaagggggcactgtctcggagaaaacttaaagggtctcacccctcgacaaggcatattccccaacttattcagtcgaaaagaacacttaaaagaattcttgtagactggggggcaagtgttaaccccaaaaatcgacggagttgattttagagattagtcaacaattagtcctagcggtcaagagacatcaagtgttagagtcgatcgaataatgaccgagtcaatgcatatggcctaaggatcgttaatcttgaaaatccatgcttgcaagtctcgtgatatatccaggcaacttggaggttaatcccgtaacaactcatgagtggagttaatcaacttactaggttacaattgttggaggattttcataatgatatgtttagaattggatctttccatacacataagagtcaaatgtctctttctcatctttccaacgcatcttgaatcgtccaatttcgatacatattgacatagttatgttggaaattattttannnnnnnnnnnnnnnnnnnnnnnnnnnnnnttattaacatcctaaataagaactt

SEQ ID NO: 91670 - DNA, 748 bp, Cannabis sativa
atataagtataaatatatatatatggggtgagggaaatttgaaaaaatatgcataaaatactttaaattttttccttaatttaatacattttaaaatttaaaaaatatgaccactttacaataaacccaaaaatatccctctcattttgaaacctcaactctctctcttcctctatctctctgggttgttctctcaccatctcaccctcaccaaccctctttttttttttttttttttttcgtagaatgtgatttggacaaaatttggatttggggtttgatttcgtcaggcccgatgcagcccgatgcaagcccgatgtcggtccgatggtaacacaaaaaattgaggaagacaaaggcccgatagtgggcccgatggtggacccgatgcatgtgtaaaaaaaaatagaatttgatatggcccgatgggtccgatgggcccgatagtgggcccaatggtgggcccgatgaagcccgattacatgtgtaaaaaatagaatttatagaatttgatatggtctgatgggcccgatagtgggcccgatggtgggcccgatagggcccgatggtctacagtgtagtgaaagagagaagaaaagagaaaggataatgtaaatgggggtattttaggaatattataaaatgtgtctgaatgaaaacagagaacaatggaaaaaggagagagacagagtgaaagatggaaatgaattgtgctgctcaactgaatcagttggctgagaaactttat

SEQ ID NO: 91671 - DNA, 1023 bp, Cannabis sativa
cccaaggtgagtagctcggtctaatgaatcccagattcagcaactcctgcaattgtatcttcaattccttcaactcatctgagccatccgatacggtgccttagatactggatccactctcggagccagttcaataacaaattcaatttcccaaacaggtggcaatcccagtaaatcttcaggaaagacatcaaggaactcgcataccaatctcgtattttcaggccctgatatcacaggttggctggtgtccactgcagtgactatgaaccccagacaacctctacccatcaagtccttagcttttaatagaaatattctcggtatgcgtgccccctgaaccttgcccacgaacattgctgggttagcactatcgggctcaaacaccacaatcttctgtttacagtaaatcatcgctccatacttaaacagaaaatccattcccaggattatgtcaaaatcagataattgcaactcaattagattggcggtcaactcataaccgtcaatccaaaaagacaaggaccgaatccaccttgtggatactattaggtctcccgagggtaacagggttccaaaccccgaagcataaatatcacatggcttatgaaaactttctatcactctactcgatacaattgaatgagtagctcccgaatcaaataacacagtatatgaaaaaccattaatagacaactgacctgtcacaactgacggactagcatcagcgtcagcctgagtcatagtgaaaagtcgccccgggttctgagcagtattcttcttgggctcctctttcttggcctgggggcaatctctgataaagtgacctaccacgccacattggaaacatgccttggcttggcactcaccaggatgattcttcttgcatttagggcactcggaatatgaccaaaatgacgacccgcgaccttgacggacacctctgtttccctgaaactttctatttccccatgaagctccggaagcctcagccttccgtttgtgctcagggttgccactgtc

SEQ ID NO: 91672 - DNA, 510 bp, Cannabis sativa
tttgagttgttctgttttgtgttactggtgttttataaaaatacagtatttttgaaaacttttccttgtgacattatttttgtaaaagtttacccaaattcttgtattttttgttaagcttcccaataaaatatcccaaaatttagtgttgctgatggcggaacataaagattgacattgaaatgcatttcgtattcggtccaaaattacaaagaggcaaatatccatttatggacctgtcattggcatgggccgagaccgtaataaaaccaacaaacttattataggcctcaacaaaatatatcgaagggatcagtttagctaagtattaaatttcacatctttttattaatagctgatataaatataaattattgttaatcattcaacaattattttctagttgttcttttatttatatgtatttttttatagtgtattttttttttttttggttgtatgtgtgttactttaaagtttaaatacttagtttatttttttatacatttt

SEQ ID NO: 91673 - DNA, 575 bp, Cannabis sativa
tattctactaataataacttttttgaatttagataacaactcacaagtataagagaggtactttgcgaagcgtcctcccctagccacatattcaccattgacttggcaaaccattagttgggaatcattgaatacttcaaggtactcgactttcatctgaagatcaagctttaaacatacgattagagcttcgtattcaacttcattgttcgaggtagggaattcaaaccttaaagtagcatgtactttaaacttgttaggacttatcaatatggttccgtcgcctgaacctttactattcgatgccccatcaacatataaaatctatccttctcctgatggcactcgttcttctgtgatgatagccacctcgttatttggaaattcaagaatgaaattggccacggcttggcctttgatagccgatcatggtttatatcttatgttaaattggcttaattcaatcgaccaattgaacagtcatcctaacgcttcaggtttggctaatacttgtcgtaaggcatagtttgtcagtacttcaatgttgtttgcttgaaaatatggttgcaactttc

SEQ ID NO: 91674 - DNA, 1732 bp, Cannabis sativa
ttctcatggagtacctacaaaggctgaagttatccgatttggactcttcaatgaaggaatccaccacagcctggaccctctcgccgtaatgaattatgtagcagcggaggtcagagtcgagagggtcaagaagaccctcccactctccctcaccgctcagaactctccaccttcttccgatgtttccggcggccatttttgtgtagctaaaagataaaataacaataataattatgtggaatatggtgtttttttttgtcggtaatggtgattttaaaccatatcattatctctttatcgataattccttcatgttttcatgaatatatcttagcgagtagcaggtttggctcgttttcaacattaatatttgatagtacgtaataataaaagtaggccctagtccccagtggtggcattaatagatatggaggccttgttagtgaattacaataatatgacctcgtgatcgattttaataggatgtttactcaaaatttgatagaattttatcccctgattatatattgtaaaaaattctcattaaactttgaaaataattataaatttaataattcagtttatctaggaaacaaaccacgcatctggttgtattttatttagtaataaataagtcaataaaattagaaaaaaattgtcgaaaacaaatctgttaaaaaaaaatacaaaaaaaaaaaaattatgttttctttgtttaattttttttagatactaaataaaagtaaaataatattaaaaaataataaattactttattaaatttaatttataagccttatttaatgaatcatcatacaattttttatttaaaaaagaaagatggtatacaatcatcatcatcaaagagaattcttcaaatgttataataaataaaagatggtataccacatatggaggacccgaaatcatatggcccttctctagataatccaaatgcaattatgcagaatgttaaaggaattagtataagcagaatttcatatgtatagccaaaaaaagttactgcaaaagatatagaatggtttaactctttatgttagaatttgagttgatgacatacattgtatagatttttccaaaattgttatgagagatgctgaataggttgtaaattgttaagtgaagtaataaaatacaagcttgttttatataaaaaaaaacatcccacaaaatagaaacctaaaaaaaaagataattgcatataattttaaaattgttatcaacactatatctctcttgtagttaatttttgctatatttaaagtggatgtcactatcgcatctcacttgtgcaattacttcttgccaatatgattgttgcccatatgattgttctgtaaaataaattaaacaatgagataactacacacttttatacataaataaatcattctattacataaagttttttagaagttatagataaaacattaaaaaaatataataaatttaaaatttaaaaatgagataattgaaattaataattaatcaatatttataaacataataaaaaatttaaaaaataaaggaattaaagagagaatagattaaaatatttggaatgatgatgtcactgcattattttgtatgttatatatatatagggatatgattttgtcccgttattgtactttcacggattgtaatccgtgatgtacaacagccgtcagatgagggagttatttgatctgacgtctgagattgatctagg

SEQ ID NO: 91675 - DNA, 504 bp, Cannabis sativa
aaaacataaaataatctcaaaaaaataaaacaaacttaaaagtaattacaaattacttgtacatcaactcaaaaatatatgtatctaagaagaactaaacatatactcttttagtacaatttgatttgatattttatattaataatattttttattcacttgaatttctagggattagcaacatggtagttacaagttgtgttaagtatcaaaaatgtatatttatatgtctaaaattaattctatttataattttaataaaattaatgtgatattttttttctgaaatatttttgtaagaataaataaattcgtagcacatttgaaaaataattagaaaaagaacaaatattattttttaaaagtaaaataaagacacatttttaggggaaagagaataaaatctcaaactaaaagtaatgttattggtgctttcaaaaaaaaaagggagaaattgaggaatacctcttttcttttacaattaaccaaaaatagcagcatatt

SEQ ID NO: 91676 - DNA, 1315 bp, Cannabis sativa
tgagagattaaaaaaagagacaagaaaagacaaatattaataataagtaaaaataaaaacaaaacacataactctaaatatggtaaataaaaaaaaaaaaaattactaagataatcttattaagtttgagaaaatataaaaaagcgtaaggactgttgaaaaataaatataaaatttaaagttatcataatttaaataacaaaatgttttttatgtatcaatacttattttatttcgatgataaaattatatttcttcttaaatttttaaaatatttacaagtaatacatatatatgtgctaaaaagtaatatacatatatacataaaaatttcttttatctttttttcttttcacatttacatagaaaatataaaaaataaacataaaatattttaaaaaaatattattatactcaagtattgtcatataggctcccaaataaatttgattacataaaattacttataattttaaagaaattttaatatgtaattgtctaactaattaaattaattacttaatttatttcacaaaaaataatatatttcattcaacatttaataataaagaatactatatcctatacatgtatatcgtaaaatataaataaactaaataaatttataaaaataaagtactaataaatataattaattatggacaatataaataagacaaaacaaaaatgaactaaaaaaattaaacttacaaagttatatataattaaacaaaaagttaaaattttaattaaagtgaacaaagacatgtatatattaataaataaaatgctaagggaggtgtcaagcaccaaaaaaattgacatactccgttattagtgcattttaatatcaggtctcataaattttgatttaataaataatatgagaagccgctaaaaatatactaacaacaattaattatatatagacattatacataagacaaaaaaaaactaaaaaaaacttacaaatttatgtataattaaaaaaaattaaaattctaattaaaataaataaagatatatacttaataagaaaaatgtcaacgtatctatttttcatgatgttgaaaaggaaaaaaaaaaaaaaacacttataaaaagacaaaaaattatgagcaataaaaatatagtataaaaaatgataaaaatatcatccgtaaaaactaaataataaaataaaaaaatagaaaaaaagatcattaccatcgatgatacataatctttgagattgtcaaaaaaactatagaaaggaattcgcactatatgattccttgtcctgtataaaaagttaaaaaaaaataacaaataaata

SEQ ID NO: 91677 - DNA, 602 bp, Cannabis sativa
aaataataataaaaaaaaattcaacaaaaaaatgataaaaaaaatattgagttttacttaaatatttttcatataaacttattattgatatagtgtaaatattttattttgcaaattataaattacattaagtattatattttttataatattaattgtagataagaacactaaattttacatcaagttttgaaagtataataatgttaaaaattgatgcaaatatatcaaaaattattttttgtgtcaaatgtaatataattttacatctcccattagagatagtctaacactcatttggtaattagtaatataaaaagattacaatttttgtttaacactgtgcaaaatgtgaattagttctctagtatttatataaagaaaaatacaaaaataaaaagattaggctttactaattaataatataaacaactttgatattgtatagtgtctgttttcaaaagaatcacacataatttaggaactatataggtactatagttgtatatataagtaaaatctttctttttctacttttacgtgacaagtatagctaaaatatgtctttctttattatgtatcacaaaattaatattctttat

SEQ ID NO: 91678 - DNA, 536 bp, Cannabis sativa
actccttgacaaacgaaggctttgtgattttcgaaatcaacacaacattggacttgttaaacttcctaaccgattggcaaccatttaatattgcaagacaaacagctgaaaccctaggaccaataatatcccaatatttctggaagaaaatagcatgaaacccatccggcttcggggccttcgtagcaccaatagctcgaaccgcacaccacacatcatcacccgtaaaaggagcttcaagcatggcgcattcctcaggagttattctggcatcatggtaatcccattctccacttgttgcactgtaggagaagccgatgaaaaaattgtgccaaaatattgttcaatctcacatacaatatcctcttccgtactcaattttcggccatcctctgtcataatctccacaattgcattcttcttcttcctacccgtcgctttattgtgaaaatatttagtattcctatcacttagggccatccaatccgcacgagacctcaatttccaaaaacactcctcccgggacaaaagatcat

SEQ ID NO: 91679 - DNA, 669 bp, Cannabis sativa
ttcttttgtaatttttagtacaaaaaaatctctaaaattttaaatttgaagaaataataaatagaaaatatagatttatatatatatataaaaaaacaatctttgatgttactctcataaaatcaaagtggctacttaaatgttgtgtcccccattaagtcaaatcattactcaattctagataatttgttcactaacaacttatctgtccttccaacataactacttatttaaagatgatatagccgtacaaataaccatagttgagtgggtcaatactaaaaaatagttatttactctttcaaaggaaaaacagttaattatattttgtaactgaggttgagaggctttatttggccgttgggaaaatgccaaatgatctagtttggtaccggaagttgtaagaaagtggtactgttggctatgtttagtcttgatcaatgtgtggcaactccacatagtactatcaatcccatgaatggtattctgggcaatattcctgataatattttcattgtaagtgtaactgtcactttacactactatgtacgacaagttgcagcttaaacataacaaaaaaaatggaaatgacacaacaaatggattggctaggatcgttattcttaaattgctgacacgtcaagcattttgatttattatcaattctga

SEQ ID NO: 91680 - DNA, 573 bp, Cannabis sativa
taacatcaacttagtataactaaacatacgtatacattcattgcacataatattaatttattatattttaaaaaaaatgtactctataacaaaattcattttcataaaaaataatgaaattgacattaataacaatattctttttgttttaaattttacacaaaatatctaaaattatttttatttttttgtcgatttcttttttgcaattttttttttacttgtattaaggtgaaaaagaattttcttttttgagaataaattctgtaatacgtgaaaaagaaaatttaaatatatatgtatatatattaaaaatattttataaaaaattatttcttaatttttttttataaaatagtatgtacttataattttggataattttttataaagtgcaaataaaactttccaaaaaataataaaaccaaactgactataatagaaattaaaactgttaataccattcaaaaaggcttaacaactaagtgtaagatttgagaaaaggaaatgatcaaaatagaaaattaacaaaattcttactataactcgcatttttaatatatatatatatat

SEQ ID NO: 91681 - DNA, 665 bp, Cannabis sativa
  modified_base (206)..(206): a, c, t, g, unknown or other
aagaagaggtttggacgaacaatacatccaaccagccactcaacgaggtattcgcatccaggacccagctctaagagatcctgatgtgacacagtcggtcaagaggttgaactggttcatccatctgtgcaagcacagttagatcaactgaaaaatatggttcatggcctgaccgacccaaaactcattgatctcgagctggaccnagcacgcggatcacccttcaccctgagatcaacgtccttgagctacccctaaagttcaagatgccaacctggaaggtgtacataggaaaagaggatcccttgtcacatcttaaatattttgagatgcaaatggatttgcaaggagtacgggctgatgtgcggtgtatggtattccctgccacacttacagaagccgcacaacagtggtatttcaagctaccactagggagatttaattcatggaatgcttgctgccatactaggatacaaaagaccaggagagcccttagagccaacataagtaggttcatatagagcctacataagtcgcaagattaacttaagaggggaggctggtcgccatactgggggcatcgaggtactcggagaactgtagaaggacattaaaagatatgaccctgtggggtctatggcagagtttctagaccgagcagatgg

SEQ ID NO: 91682 - DNA, 674 bp, Cannabis sativa
tgatattttgtttcaattaatttaattaaatattagatatccttaataaattctaaaaccaaaatttgaatttaattgctactgaattattattactatttcattaaaactattatatattttaataataataataataataaatgaattgaatacatcatgcattcttgtctaaccaaaacctttcaaatcgtatatatatacaattcagtcattgactctacaatcttcaaacagcatattacttatttatatatatattttctcatatgtcgatatcaccaaacaaaaccaaaactttcaatatgtgaaagtttctatcgcacatatatgcagctgacgattacaatcgtaaagcaatagataaatgcggcagaatatatattcaatcgtaaagtattataaatgctttgcaaaactttcatttcatatatcatcgcattatatacataaaaaacaacttcaatcgcaatatatattaaccagctattgaaacctagaacaaatttccagcggtggaacatatatatataacatgattaactaaatattccgaatgcaaaaaaaataatttaatggaagatcaatactaccataaattctcaagaactaatttagggatgctcttgataccacatgttagaaacacggtaaatctgtatatagccctaatt

SEQ ID NO: 91683 - DNA, 684 bp, Cannabis sativa
aatatttgaatttgaactgatattaacaatcacctcaattaaatatcctaaaacaattgaatcaacctctgccctcaattaaatattctaacacaaaaatacagaggtatgggtgccctcagtagttgtatacatgagtaatgaattgaaaatccgtacactaataatcaggtatccttcgggagggattcgaagccttgtcgagacaatccaccatgagctcccaaactgaagagttatagtcttgaagaattgctttacatcagcaacagatctgcataatagcaacacatgtatgattaaggaagttacagagagaggttagatggggttacaaaaaggcttattttgtagagggccatttatgtgttgcatggggatgttaatcaatcaagctaagccattctttgtcaaaaaaattaaggatttaccatttaatggaaaggacagtggtttagaatgtgcattctatcaaaaatttaaacttattttagttgtactgcagagcagagcatgtttaatgagcattagcaaaactttcgaaaaaaaactccgtaaatgtaattcgatatacattagcctttgccatacctgagaggcattttagcttgccaacaaataggcaaagaaggatcggaaaaatctcggactatcacaaataggcaaaattggggaagactgtga

SEQ ID NO: 91684 - DNA, 594 bp, Cannabis sativa
tataattgtatatattgtagttattgaaaagcacatgtaaattttcaaaaatttataaataatttatagtgctaaaaataatatttaaataattatttaccacacgaataaaaaaataattacacgtacaataaaatatttaaattttatttccgatgctaagtatttgaaattttcttaaaaaaagaaagagttttttctcggctaaatcctctcaactatcgtttcacttacaaatttaaagtatcatccggttgactgtcaccatgaactgcttatgtgcatacttttgtatacgtggtacgtttatattggtatatcgaatattattattttcaaaattcatttaaaattataaaaataaaaaataaaaaataaaaatattatacattttttatattttttaaataataatattatgtgtactaatataaacgtatcatatatataagagtgtaaacataatcagtctatgttggcagtcaactgtaaaaaatggatgacaccttaaatttacaaattgttaagtaatttggaaacttttaccgttaaaatttaaacttaaatgattaagtgcaagtagagtaataagat

SEQ ID NO: 91685 - DNA, 1091 bp, Cannabis sativa
  modified_base (953)..(954): a, c, t, g, unknown or other
ccatatctctgtgatatgatcctagaattatagggattacttctgttactcatgatgcaagtgttaaagctgctaattaagtgttggaatgctgttcagaccatccactatccggccatgaaggcctcatccgtgcagatatatgcgatgctctgctcagcacatctctttcgagcagatatgtgaagacgattccacatgtcaccaatacgtgatgccacatgagagtgccgaaattgggataacattgcccccaagtctgtacgtgacttcaaaagttgcatgtagcttcatccgagctacctttgcatttgaatgggtgacacgtgtcaggtgcacctgtttgtgattcgatgtgaggctgaccagacgtctcttcagttttcagctaattaatgctgtgacttaattagtgcctcaaaacccagtttttctcatcacgctttgacggttacacttcattaattttgatttcccaatttttgcttttgggagggaatcgaagcatttgaggcattttcaaatgattaactttttttaccatattgcctataaataaggctcggtcttcctcataattttacttttactgatttccctaataaataaacatagagcaaaaaaggatttttacttcaagtctgtcgtgagattcccaccataggcatctgagcagccccgtctggactacacttaggcgtcaaacagtgagtaagttttcaatctccttctcttttttacttttcatgtttaatttctgggtttcaacatgtgttcttgacttgttgtagaagataggtagaatatttagggttaaaactttgtgattttctctgtaatagttcgtacgacttcagggtttacgatgttttcctttaatcacacattgtccgtctttcaccttgatcattcgaagcttcgtggaatttaaccctaaacccaaaaatttcaannttctgggttttgacttattttttgtacatttttcaaccttttaatctattgagtactcctgatcggcatatttgcctgtttactgttcgatatcccggccaaacactcatctcgtgtgttgtcttttgcagatgaac

SEQ ID NO: 91686 - DNA, 928 bp, Cannabis sativa
aacatcaatagaagaattgatgttaactgcatttgttttttctcttttttttttttttagaaaaatgatatttgtaatttttttaataaataattttttgtattattattgctatgtagtaattaaggtgttgaatattatactaatgtggtacctattttcaaatcatttattaaattaaaatttataggagttgatattgaaatgcaccattaataatttttatagtgcttaagaccttaatgtgacccttaatatttttattaacttcaaatcgaatttttttttccttaaggtgctcaataatatatcgatatggtacccgataaatagttgacaatttttcaaatcatttattaaattaaaatttgtaagagctgatatgaaaatacaaaaataacggtatactaccttttgtggtgcttgacatcttaatgtgccccttaatattttagttattaatatatacatttctttattaatttcgattaaaattttaaattttttccttaaggtactcaataccatatcgatgtggtacccaataattgattagcaattttctaaatcatttattaaattaaaacttgtgggagctgatattgaaatacactaatagtggtatgttactttttatggtacttgagaccttaatgtgactcttaatattttcgttattaatatgtacatacctttattaatttctattagatttttttttccctttaagatgctcaatagtataccgatggggtactcaataattaattagcaattttttaaatcatttattaaattaaaatttgtggaaactgatataaaaatatacaaataacggtatgctaccttttgtggtacttgacatcttaatgtgccccttaacattttcgttattaatatatacatttctttattaacttcgattaaa

SEQ ID NO: 91687 - DNA, 631 bp, Cannabis sativa
tacatgtgcgaggtagatttttttccgagttttattaagctcagtatattcagcataaagagggatatacttgttgggcttcttatccttgggtagccttttggaatcgccttttctctttgatcccgaggcctccgaatcaagttctccaacagtatcgtaccctggttgtctcctgggcttcgtgactcgatgccctctgaacttattctacaactttttcatttgcaaatggaatgaatccttttgttttgaaccgagtcgttgacggaggtcagccttcttcaagttcaaatgttctcgtagatctctcttgtcatgactgtggtcggaccttgcctttcctctcaaggtttgattcacctttttctcccccttggtctgtgagtcgcgaggtttgcctagtgaatctatcttcccaaggtcaggttgattttgggtaccatcttcccacaccacctttaccgcagctatttcacgctccaacttggcattacgccggttcacttccttcaatcgacgcctaagatggcgattttctaattccacgattggtgtgtatctagttggatcgtaggcgccatcctcatcaacgtggttagggagtggttgattgttgctcaaccaaggt

SEQ ID NO: 91688 - DNA, 1880 bp, Cannabis sativa
  modified_base (1835)..(1836): a, c, t, g, unknown or other
caaagagggtacaatcaaggtggagggtctggtgcaagtacaagccatcctagtcaaggaaagggaaaggaaaaaacaaattcttctgctcaagcctatgctcttggggttgatgatgtacagggcggtgctgaaaagggagttgttgatggtatggttcttatctcacactcttgggctcatgtgttgtttgatactggtgcagcacattcctttatatctttgatgttttctagtatgttgggattgagttgggaaacttttagtcctgcattacatttgagtgtacctatggggggaaacggtaaggtatccaccatttgtaggtcactttgtattgtgttcgagggacacaagttatctggaaacttattagtggtgcctatggggcaatttgatgtaattcttcgtatggattagttgtctaaataccaagctattgtggattgttcacgcaaaagagtgactcttagtggtgatttgattgtttatcgagccaaaatgagtgcagtgagacaaaatcctatcttaagggcatgcttcggtggaaagagaaacttagagtgttatgggaatttgtttgcgatcgatgatgagtctagggatttagacctgttccattggatatcagtggttagtggtttttcggatgtgtttctagaggatttactagggttaccacctgatagggagatcgagttttgcattaatttgattctcgaaggtcaaccagtttttattgcgccttaccacatggcaccttcagagttggctgaattgaaaaaacaattaggagagttaatggataagggttacatcagacatagtacttctccatggggagctccagtcttgtttgccaagaaagctgatgggactttgcgactttgtgttgactatagaaagttgaatcatatgacaattaaaaacaaatatcctataccaaggattgatgaagtatttgatcagcttggtggttcaaagttcttttcaaagattgactggagatcaggctaccatcaattgaggattagggaagaagatatccctaagactactttcaggacatgttatggacactttgagtttttggtaatgccatttaggttaacaaatgcacctgctgcatttatagatctcacgaatagagtctttagaaatttcttggataagtttgtagtagtattcatttatgatatcttggtgtattctaagatacgtgaggatcatgttaaacacttgacaatagtattacagacattgagagatcatcaattctatgctaagaaacacaagtgtgacttttggatgactgaagtcaagttcttgggccatgtaatttctcaagatggtatcattattgatcctgcgaagatagactctattctaaagtgggaaagaccaaagaatgtcactaaagtttgaagttttcttgggttggcaagctactattgttgctttgtggagaatttctctcagatttctatgcctttgacaaagttaacaagaaaagaagtaaagtttatgtgggatgatagttgtgaagaagcttttagagaattgaagggaagattaacttcggtgcctgttctcactgttcctaatagtgtggaaccatatgaggtatttactgttgctttaggtactagtttgggaggtgtccgcatacaaaatggcaaggtggttgcctatgcttctcgacaattgaaaccacatgagaagaattaccatactcatgacttagaacttgttgcggtaatctttttcttgaaaagctatttgtattgcgtaaagtttgagttatactcagatcataagagcttgaagtatctttnnactcaaagggacttgaacttgaggcaaagaagatgggttgagta

SEQ ID NO: 91689 - DNA, 625 bp, Cannabis sativa
taaacgattatattgtagtgcagaccattctgaaatttgatttggcacaagactaagagagtgaaagatcaaaaactcaaatatcctgcagattcacaagcttggaaaaaagtaaactacataaatccagaatttaaatataaaccaagacatcttcatctcggtcaatttgtggatggagtaaatccacatagatctctaagtagttgtcatagttcatggtctgtctttcttgttatgtacaatcttcctccgtgattagtgatgaaaagaatatttaacatgctttctttaatgatatcagacccacaataatctggacataatgtcgatgtgtatttcgaatcattaattgatgatatgataaaattgtatgcgaatgatgttcagcctatgatggttttaagtaagaattctttaatctaaaggcagtgttattgtggactgttagcgattttccaacttacaataatttatcaggcttaagcacaaaaggttaccaaagttgtctcatttgttgcacacatgggctcgtcacttgccaaatggacacaaaatgtgttatatgggtcatagacggtacttgcctaaagatcattctaatagacggaagaagaaagcattc

SEQ ID NO: 91690 - DNA, 645 bp, Cannabis sativa
ctcatctactgtttccggatgatagactgctttttttccatgctaatgaaagtttctaccttgccattaaacgagttcttgatctttatcatcgagctttaggacaagttctcaactcggaaaaatctgtaatgtctttctcccccaacactactttggctgcccaaatattttttcatcggcatctcaacatgcccattagtgaatgtcatgaaaaatatcttggtttgccatcttattcggggaaggataagaaggaacttttcagccacattaaggaaaagatttggaaactaatgcacaattggaacaaaaagattttttcagcaggaggtcgggaagtgcttctcaaagcggtagttcaatctattcctacttacgctatgagttgctttcatttaccggtttattttcataaacaacttgacacaatgatggcaaacttttggtaaggcatgaatgagaatggtgcaaaaatacattggcgcaattggacttcgctatgcgaaaaaaagtgtgatggtggtatgggtttccgatcttttgtccacttcaaccaagctcttcttgcaaaacaagcttggcgccttattgaaaaatcagactccttgcttggacagtttctaaaaagcaagtacttcccgc

SEQ ID NO: 91691 - DNA, 587 bp, Cannabis sativa
caaaaattcaacaacaaattaatatgaatttaacataaaaagaccggatttttgtaaataaaattaaaaatttataaaaatgtttaaaatcacgtaaaacagtatttttgtaatttttttttattatttttgtgtacttataaaattatacctttatttttttggttgttagccccttgaagagttggattgattaaaaacaacaaaattaagggaaattaaagaaaaaatatattaggctttttttttttttttttagattctgcgcagtagcctagcttgctgggcaatattccaaagaaaggagaaccaaaagcaaaataataaaaataaattatttaattaaaaattatagtttaaacaaaacaagattcttgaacttgaaccggaataagggctgcctgtttattgggtaaacaaaaacaaataaggttacggacgcatgtttactagtttgttaactagtaaacaataattagacagacactagtcactatacaggtatattatataggctaattaggatttttgcatccccttgaacttttaaggtcgttgaaaatactccctgaactattgagattgtt

SEQ ID NO: 91692 - DNA, 653 bp, Cannabis sativa
ctaaagaaaagatgggaaaaagggaggagtataagttccaattcacgactcttactcacgttagtatctctattttattttttaaaatatctaattaatattttattttctttaacttcacacttttatattatattatacattaacttttttatattttatctatatcattaaaatgatacattatatataattataaaaagttattaaaaccatagtaataaagctaataaaaaactaaagaattatttcatacacagtttgggttgctttagtagttgttgcgtgagttgtcgtgttaatttaggtttataaatgtaaaaaaaaaattacttttaaatataaaaataaaaaaattcctaattttttgtaagctaagttataaacacctatggaaaactaatgtaactttttagctattttttttttttttgcttttaaccattataaaaactatgaagggagtgctttaagataaagtacctttgaattatttttttgcttttaactatttaggagagattttagtttattttaccttgtctattttaaattttttaaagcaattattttgttcaaaaggtttaaatattttattgtttataggattgttttttctatacatgtgttaacaactatttgaattttatttt

SEQ ID NO: 91693 - DNA, 1029 bp, Cannabis sativa
  modified_base (46)..(52): a, c, t, g, unknown or other
aaaaaatcgtatagaaacccttgttgcaactagcgctgcaaccacnnnnnnnactcaaccgtaaatttaaaaaaacagtgaagtaatttcccaaaaaataattatagttttttcaaaatttcaaaccacaattaacaaaagtgatgcatcacaacacttagcttgttgtagatggtgttatttgtgtaatgagaatccttgaagtgattatcgatgactcaattaaagaaagctaaagtataagatctctatagctaacacgtggttctcgaaattgttaattaaggccctagagaaaacaattattttgtgccattttataagagtaaatgacatttttaaaaattattaaaaaatatgtatatttattaaaagtttttttttatttggacccctaagataaatgggttttaaaagtgggagaagttgaaaatgcctatttttttatacattaaccaaatttacatccatataaaatgtaattcaaatatgcttttttatgagtattatacataaattatccttataatctcacataattaagacataattttaaaaataatagatttgtgttcattgtagatggatgcgtaggttaaagtttgagtaaaattttgattagaaaagaataaaaattattttgaagtgatacggttaaaattagtagaatgattaaaataaaagataaatataataaattttataaaatatagtaaaaattaaaagatatatataatgtaatttcctcaagtgtgacctgaagtggaaagaaatttacactttttctatttagtaaaaaataaaataataataaatatgtatatgaataaaacaaaaataataataatatttagggacactttctcaaaaatcaaaataacacaatgaggaagaccgaggagcgcaattgacggaaagagtcaacgtttgaaaatgggagctaattaatataattatttaatgaaattgttttttttaaaaaaaaaaaaaaattaaaagaaaaaatatgaatacttttttttttttttt

SEQ ID NO: 91694 - DNA, 725 bp, Cannabis sativa
ctggtttcgatgtgggtttgtgggtttttcaaagggttcgagagagggaggcgcgatgatagagatggccagtattaggggcaacttcgatggaggatggagcaatggttaactggccatgagagagggagggcagagcgatggaggtatgatgttggttcgtgggttttgcaacgggttcgagagagatgatagagagggaggcacgatgtgggtttgtggattttgtaaagggtttgagagaagggggcacgatagagatggtcggtattaggtctatgtgtatatgtgtgtgtatgttaggcattatatgtttttcaaaaaaaaaaaaataaggggcattatacccaatagttaaaagctgtcaggtataggggtacattaatgttcttgttttaaataaaaattttcgcctattattatagtaactattataaaccgtcaggaatacctatttttcttggtggttttaaatagttgcttaattactttagcaacggtcccgtaaaaaatcacttttaggattgtcgcgaataccaataattgtagtagtgataacacagacatatttgaggtattagaattagattcaaagcaagttcatttttgattatccagagcactggtgcccaggcacctagcgcccaagttgacaacttgtctatctgggctcctttcaagtatcaaatcgactatccaaattttacatcttctatgtcttcatt

SEQ ID NO: 91695 - DNA, 1007 bp, Cannabis sativa
  modified_base (30)..(71): a, c, t, g, unknown or other
tgcaacattaaatgttatttctaatctatnnnnnnnnnnnnnnnnnnnnnnnnnnnnnnnnnnnnnnnnnngggcataaaacccaacacgaacctattccctagttattatataaatatcacttttactgctttctgttgttcttcctttccctggtgaactatggagtctttgttaagaatagatcgattactcaatattttgatctttcaagatgtcataaagaactatggtaggatgaatgatttttggtagggaaatgattttcccaaatgtgctaggaagaatggtttgtgtttccctgctaggtttattcattggattatgatttgtgtgaaaggtatttcttacactgtcatgatgaatggttcttacactctcatgataaatggtatgttttaaggtaacttcaaaggggagaaggggctaaggctgggagattctatttcttccaatctcctttgctctttgtgattatcatggaatatcttactagaagacttaagatggaagctcatgaaaacattttcaagtatcatccaatgtgcaaaagtcttcagcttaccaatttgtgctttgctgatgacttaatcttcttttgcaaaggtactcaataggttgttaggcatattaaaattgcttttgacgacttcagctcagtgtcaagtttcaaggccaataatgctaagtcccagatcttttttggtggagtttttgcagctaataagattgatatcattcaggatgtgtcttttaatgaaggtcagtttcttcttaagtatttaggggttcatttacgacctattaaatggcgaaaggaggattgtgatcccattataaagaagatgaagctaaggttgcaaacttgggccacgagacaactttcttttgctggtaggactcaattaatttattcagttttgttgggactttgaaattactggataagtatctttgttataccctaaagtgttgtgaaggaggtaaagaaactttatagagggttt

SEQ ID NO: 91696 - DNA, 898 bp, Cannabis sativa
  modified_base (625)..(626): a, c, t, g, unknown or other
taaatactatgttttagtaacaagtaagtttttgttatgattaaaagtcacatttatttgtaaaaattttatgttgtgactaaaaaattatcactaaaagtaataattttttttatagtgacacttgaaaaataataattttgttcttataaaagtaaataatccaagagttgaaaactcttattgacatgcaatacacactaaacacccacacactttatttttactaactaaaacataatatgaactcactttcgagataatactaaagcttcttaagctacttgaacataatattttgaacactactcaaacataatataaactcacttttgggggataactattaattttcacacacattttaataaatttggagttctaatttatactatgtcagtttgttaaccgactttaagataaaaaaaaaaatatagttttatagagtacaacctctatttaagaatatatttaggactaagtaaattatattttaattaagaggttatataactaaatataattatactagaaaaaaattcaaaacattaaaaaatatcaatgtaaaaataataacaataaataatctttaatactatattataatagaattatttttgagtanntataatatttatacatgtattatatataatttaatataaaattattaattctacataaataaatgtaaaaaaatatatgtatatattttattgagatgtaattattcttatatagaggtatactttgttaatacgggacttagaaaatgtatatctaattacaatttaaaggtcttatttataacttgctcaaattgggacttaatttttttataataaattagacgttattcttgaatagagtattcttagatagaggttttactgtatat

SEQ ID NO: 91697 - DNA, 515 bp, Cannabis sativa
gtggcagttgggtttggaatcctccatcctcccctcatcatttctttgttcagagcattaattgtggaattaatgcttctgatggttattatctcccaaagatcctctctgctgtaactgttcatggtattaattgcaaattactcttcccacaaagccttaagccttgtttgtcaaccctttgtctctccataaccctcatttactctcaccatcaaatcaataatctatctgaagatatcttctctctaatagaagaggcggcgtggaggagaaatggtgatgatgaagcctgggggaatgtaatggcctgcaaaactactcaagaggctaatgctagggatcaaccaagagtcttcttgaaaggtctgatctttttcatctataaatctcgttttcgttatctttatttttccatttctgtttggtttgtgttcttgtctgggttgcctaactttcttgctttcaaaatgaattctctaagtacctcaactgttccccctctaatgcttact

SEQ ID NO: 91698 - DNA, 770 bp, Cannabis sativa
aaaaaaaaaagagatgtgaaatattctcaaaaagcagcttttagaccctaaatccatgacagaataagcttataaaatatcactgcaatatggatggattcattatcatcacagtgatggaaataataaccttaatggtacaaccttcctacaatgaagtcatataagcagctaatatctaactaggagatgtgtaaacaacacattaaagggtgcaaagatccgtatcatgcactatagaaacttgtaactccatcagtataaagcaaggtaacggagaggactaataatcttcattgagggtatggatgtttaaaagttgactagttaaccttattgctcaaaaaagacaaaagcaactaaaacatcataataataaatttaaaacatttggttgctaagcacatgccagcgcattcctgagggttcatcagcaaatggcaagcttagcactgaaacatcacacctttatcttatgaaatactgagtttctatttcttatatagaaattttaacatatttacaggagcataaccaagcaaaggcaattaaacaacagtgtcttaaatgaaggaataagccaaaaattggagggaaatgaaattctctcaatgatataaatcagggaaaaaatattactgtattaccttattactaacaaaaagcaattcctccccatggtcattcttccatgacgtcacatgagctccatacaaatatacctggtatccaaaaaataacaaactataaattaaagaagccactaagat

SEQ ID NO: 91699 - DNA, 543 bp, Cannabis sativa
tctaaagacaagctccataatttggatttgatctcactgggatttacaaaatgagtgttctaataacttgggttcttttgataatgtcgtcaaaagtttttttttaattctcttaaaatgaagatttctatctttcttaactggtattggggttcaaaattggagctatcatttttggttcatatgttcacctagattactctggagagctgtctaagataagaggaccctttaacttattcaaaaaaaaaaagattactctcgagcgaaaagaaagtcgtgtgttgatgactgtctttgctttgctcgagtatgaatttttctgtcattacctattttgtgtaggatgtcaatgtcattacgaaaaaatgttgcataaaacaagcatacccttcacaagcctgtggctatggaaatagttggggataatgaatggggcctgattgattgagatgattttgatgcctttaatttcaatgtataatgcctagacatgccctgctgacttattgcaaatagtttttttgatgagctaaaattact

SEQ ID NO: 91700 - DNA, 674 bp, Cannabis sativa
  modified_base (27)..(38): a, c, t, g, unknown or other
aacataaaatgttatttttgatctttnnnnnnnnnnnnatctgattatattgaaatgtattttatttagggcacaaaatccaacaacaaggtccctagggacattgtcagaactcgtgagatcgaaagttgtgtaaaaatctagaaaatttgagactccctatgtgttcattttctagacatggaaatgtctctatgttcagtatatcattatgaattcctaagttccgaggaaaaaagaaatcgttagccaccctacacggtggagcatacagtgctacatcatcataccaacttagaattccccctaaacatggaaattttaatctatgtcctattaacccatatcacaatcaagtagaacaaaaataaaagatagaaacaacagcaagattgcaagtaagaatgcatttacttgtgatattggagagttgacatgttgaattctggattagtaatgaactgctcgtctaaaagctttgaagtcttctggaaagcttatcaaaatccctctggaaatctattgatgataattctggagcgataacaaatagaacagtgtcataaggagaagtttctaatgtagttgcagtaatccattaatgaaaacgaagcctctgccagacatttagtggtgaaattttttgggttagcagtggtttttctctctctgca

SEQ ID NO: 91701 - DNA, 602 bp, Cannabis sativa
tatagtgctacaaatctatttttgttcgacggtttttaacagtcgataaagtattattgtcatttgttataattgtcgcaaaacgggcaaaataggagaaaacaggcaaaatatgggacagttcgaaatagttcccaatctaaacttctcggcagtttaaatatgctttctatacccaagcatagacggcggttttcaacactgacatatagtacatgtgagaatttcaattttaaaatgtatttttcaacgaacgttttttcagtcgatacattaaaacaatgagggaaaaataacgattttttgccaattttttcgtgcattaattttttaaatatcttacgcgtatatataatataataattaaactaatgaaaatcatataaatttatttaccggatttatataataataataataatgaaactaacgtgaatatcacataaatttatttagtaacaataaatacactaacgttactaattttctaaatgtattttcaaatctatatagtaacaataaattaagataactacactgatcaacaaagaaaccattgttgctctgcttccgctgtaacgtaaagaatccaccaatcatgc

SEQ ID NO: 91702 - DNA, 689 bp, Cannabis sativa
  modified_base (271)..(273): a, c, t, g, unknown or other
gtccaggctgaaccagtggtggcaatgaatcgaatggaacccctatatgaaaggttccgcaagaaagcacctccagtttttctgggaggtctggatgtcatgaaatccgagcaattcctaatagtgattactagaatcttgaactttatgggtgttgccggtaatgacagggtggtctgtgccccctttcagtttcaagaagatgcactggtctggtgggacatggtgcctatgattcacgatgtaacgacaatgacctgggaaaagttcnnngaacttttcaatgctaagtattacaatgaagcagttagaagtgctaagagaaaggaattcactcatttaacttaaaaagaaaatatgagtgttactgagtacacaacgcaatttgaccgtttggcgaggttggccttgggaattgtgccaactgacttcagtaagaaataaaaatatctggatgggttaaatgcgaacattagacacaacttgatgatcaatactgatgacagaaccacctatgctgaaatggtggacaaggcactacgagctgagggcgcagtaggatacatgactccagttgttggcgaggctcctacccctcctgcatcaggttttagcaggggaggtagtggtttggccatggaccagaaaagaaaggcatccattggaaccagtggctcgggtcagaacaa

SEQ ID NO: 91703 - DNA, 576 bp, Cannabis sativa
  modified_base (47)..(55): a, c, t, g, unknown or other
tatgtgtttattttatatcgttctagaagttcatatttaggatgttnnnnnnnnncttgttagtaaatttaggtcctggtaaaatatattccaacattaataacaactttatattttcacttatttgggaaagtgacttacttagaaatcgagagttttgagtctcccgtttctacaaaacaaaatctttgagaactggtaaccggtttcaccaaaacgcaaaaatttgctaagtgatgttaaaatatcactcaggcataaaaaattacattgccgacacgttttccaacttaaccaacttctaggttaatgtcacatgccaacttgggcactggatgtcaacatgggcgttgggccctcaacagtctttagtaaaatggccataactcactcaatattaatctgattaacgcgattcaacttggagttttaagtatttcattgctctatcaagttaggtctcatactacaatctcaattctgaagttattgactcaaaatcttaccctcaagaaagttataagtgtaaactgcagcttacccgaagtgggtcctacgaacgcgactcaagctcca

SEQ ID NO: 91704 - DNA, 582 bp, Cannabis sativa
ggttgaaaaatgttaacctaggcactgggcccatcgccaatgtcaacctgggcactgggtccagcttttgacaccaaatgatttagtttgattctcgaaaatactcgtatctcagttatttgtgaaaacaaagaatatgtcgacaatacttctaaaaaaaactaattggaaatagccaaggctgacaaaatgtgaacttgggtgctgggcccaacgccgatgtcaaaatagcttaggttgaaacttccttgttttggctcccagatgacttcatttattttcaaaaagcacccgaatattaattattgacgaaaataaagaatatgataagaagacttcttctgatctgattttggaaatagccctggatgacaatatgtcaactaggccgtttggacctagcattaggtcatcttaggtattgggtccaagtttgtgctcaaggtcaatctatttctttttcgaaaacacttgcttaatcattttggatggagacaaagaacatgctttggatatttcttcaatattgtggtttcaagtgccccaagttgacaatattgcatgtcaacctaggcgctaggt

SEQ ID NO: 91705 - DNA, 807 bp, Cannabis sativa
gagtcaaatacacaaacagcctctagatcctaagcttcatctacaagaaaaagcactcagagaaaagctaaccaaggtgcagggagacagcatgtccttacaacagaaagctaaagcggattggattcagcaaggggactgtaattcagcactttttcatgcttgcattaaacagaggttgaggcaaaaccgtatcctatctattgaaagacaagatggaagcagagtacatgacccggatcagattacagaggcctttcttgaattttataaaggattactgggttccaagttagaaaagagaaggaaagttaaggcaagtgttttggctagaggacctgtactaactccagaagttgcaagtgtcctaacacagaagtttacgtatgaagaagtgaagaaagctgcattcagcatccctggaactaaatcccctggtcctgatggcttctcgagtagcttctatcaagacaattgggatattataggtgaagacattagtggtccagtgctggcttttctggaaacatgtaacattcttaaagagatcaattctacaataattacgctggttccaaaatgcaaatgccctaattctattaaggattttaggccaatagcttgttgtaatgttatttataagatcgcaaccaagattttgggctctagaatcagtaacattcttcttgaaataatatcccaatcacaagggggttttattaaaggaagattcatagggcataacattatgatttgtcaagacttggttagacattattataggaaagcaaacaagccaagttgtat

SEQ ID NO: 91706 - DNA, 2172 bp, Cannabis sativa
caaggcttgcgcaagaaaatacctctttgtagagtgaatgaatgtaacttctcttctgaagatgtgtgcatgggcacgaccaatgtccttgtttgttgtgaagaggtgtgcatgggcacgaccaatgtctataattgttatgaagaggaatccatgggtacgaccaatgtccgtaattgttgtgaagaggtgtgcatgggcacgaccaatgttcttggacttgtatgtgtggagtttttaaagcacgtggattctccttagaatgtgagctgggttatatctcatatctcatttggtagtcgagtggagttatttctcttgctcgattttgggacttttgtaaggtttaaaagtttttgcttaagttttttaattttaagtagagttatatctcttgcttaaatttaaaacttttatggagttttaaaatctcttgcttaagttttgagcgttgagtagagttgtatccctttcttaaactcatccttgagtagaattaaatctcttgctcaagttggttggcaagtaaggtttgccgtgaacagagttaaattctcttgttcttattatacactttttcgttgtgcatttatgttgtcacccacatatgtgggtttgtatatgtccacttgtcgtggagtgcttattagttaggactaacaagtctgtttcacatctttagaactttttaagcatatataacttagtttattccatatcttggtgactttagaattttaagtataatatacttttttgtgcttattttattccgatactcattatctttgtaacacgaggttttaaaaataacattaattgttgccaatggtggcttgcattttgctagtccgagcaagttatcggcatgggccttaactctttgggtactctattttctatcctagtctcttcaatgttgatgtatttttgtgcccgcttcatgaatccgtcaatggtgcgcgcgctcttgccttgaaagttgttccaaaatacggaaccatgggcaatacctgccaccagtgccatcagtcttgcactatcatcaacaccatgagttttagtaacttcgatgttgaagcgctaaatgtatgccttcaaactttctcctggtgattgtctcccgttggccaaggaggaactttaaagcttgcaggttctcacagcccgaaactcctttttgaaagcatctgagagttggtcccatgacactatggagtcttttaaattttttgaaccacaagaatgcggctccagataatgtagcagggaataacacacatttcaaatctccaaccacttagtgtgctttcatgagagtattgaattcgcttatgtggaccccagggtcagcagtcccatcatacttggttgtagttggcatttaaaactctggagggtaaggtaatgcaaagatataaggcacgaaatactctgtctcttcatcagattcatactccttcattttttgtattcaaaagttgttggagttgttcctcaagcattgttatgcgaggattgtcatttagtataccataatcaactcttgtagggagaggaagatttttggaatggttaccaccatgtggattagttctttaatgaggaggaatgttgacgtcattaccaacacgaggatcggctccttaaaaaggaggaatatttgtgcggttaccaacatgaggatcgactccttaaaaaggaaggatgttagcatggttaccaagataaggatgtgttaaatggggatcttctctttggagatgccccctgtatatattttcacttgatccttccccatggtattgaggctgtgcttgatgggaccaaggttgaatgtcgtcataaatacttatagagcaatttagcgaatcggtgttgtcgctacttcgatgaaggtttgttgatgatttccttgtgccccagttgggaacatgtcgtggtatcttgtaaccttgaagggtaactcgcctcttgggtaggttgttgcctttctcagtgagggttctctcttttttcctcgacgtcgacccctttattacttggaacatgaggtggtcacggagatgggtcatggctaccatgtgtggcgcagttttgattaccaaatgcatgatttgcatcattgttgacacaaactcccatgtcacctctacggaggttgttactcaa

SEQ ID NO: 91707 - DNA, 656 bp, Cannabis sativa
cgtcaactttggcaaaggcttcctaagtcaaatcgaagaaatgcagagttggaagcgaggttgctacagaaaaagcatcccagaatgttgcatctccaacataggcgtccatgaggaaggcctctcggatcaagaataaaaaggacacaaaatgtttctgtcgaagagaacaatacagataacccatcacgtctcaggaaccacaactagggaggactagggaagttcatgttgacagggaaaatccacaaaatccaaacagtgcaaatgcaaggcaaaggcgacccgatgccttagagccttctcatataaatacgagacctccaccagagcaacctactattagacccttgaaacattctcggccaccacgagacccacaaagagctggaggaagttatatgacacatctgtttgtgcgacgtcaactagtgcgaaaaactgcttctcaaaggatcgagtcaaacactatgatgagtgagttaaggaggagtcgagaacacaaccaaccatcattgtcacaaacaaggggaatttcttgtcaaagctagggaaggtaacacatgtcgtaattctcataatgaacaagttagtgtgagtaatttgcaaagttaccaatcagagagtgtctcaccaacaaggtccattagtaacta

SEQ ID NO: 91708 - DNA, 1077 bp, Cannabis sativa
  modified_base (132)..(134): a, c, t, g, unknown or other
gtatcggaaatttgatcttaaaatttttcttttaaacttataatacccaataaataagttttatttgtagcttatacaatagtaaatacattttattattagaaaatatataaatttaaataatttttaaannntactcttaatattttttaaaattttttttcatcacattattttagattaatttcaatacttattttaatttcatttttataattttttttaactcaaatgtacattttttattttttttttaatttttttttaagaaaatttaatataaatttttattttaataattttgtcataatatttaaaatataatttatttttatttgatgtgtatattttttaagaatatgaattagaaaaaaaaaagtttaaaaaaatttagtacaattaaaaatataattttttaaaataaaaattattaaaatggagtgtttttaaaaaattttggggtgtaataagatttccctatccaatatttgtaggataggccaacatttgtgttaactgcaaaatgtcctccccatttatatcacctccctctctcttctctctttccctctttctgtctactactcgagcaccgctccaccaccacaaagaaacacaattttctcttctcttaacgtattttcttcactacactacaagctacactacatattttttttttatttttagacggagcatcataaacgaagttgatgggtaattattattattttgtataatcttgttagttgttgttatatttagtttagaatattattttaaaaaaattaaacaaaatcaaataaaattttaataaagaacactacttattctaatttcaattcttgcaagtcaagtaaataacttatttgattcttaatcaatctgactttaaacatttcaatcacttgtaagtaatggcacaaaattggaagagttttgtaacttttaatttttttcataagataaaatcatatctttaaaataatatgattctggttttctttccggacagtttagtaaacatcataataaaatattgtttccgattattttctattttaaactgatacattt

SEQ ID NO: 91709 - DNA, 1410 bp, Cannabis sativa
tcccccgaataatattaactattatgttaccttattaatatataaatatacatgacaaattcctatacctatatttatattatatatatatatatatgacccctgtcccactcgccactcggtactgagtcaactcagccaagtccaattaccaaatttttttttaaaaaaaagaagaaaacatgcgaaaagtagactgagtggatttacctaattaactccttctgaagggcaccgccatttttggttctcctgtgggaggtggcaccgaacccggtggtgacaccatagctgtcggtacctttgttcatactctccataacccagtcactactagctttaacacccgccctggaagactcagacagctccaccttcaccccatcggcagcggcgatggcagccacctgagatatcgtcaaagtctcaccacctagcctgactaccggttttcggtattcagcaaccattctcttgacctcgtccaagtgactcccactcatcgactcagctgccaaaccccagttgaggggatcacctttcacacagaaactctccaacgacacgtcgtttttctgctccatatcaatatttgtatttgtgtatagtacttctaagtaatacaaaaacaagaactagctagtaatatgtatgtaaataatgctatatatgataaagtaatatatgaaacgggatttcgtttctgaagcgtaaagagatggtatgagggtgttatataggttttgaagaatgaggatttgaagagagaaagtggggttgtcaaagttgatggctgaaggagacagagagagagaaagaggtggtaggtgattaaaagttggtgagccttacaagagaggagagctgattaaaagagcaccaaatgaagaagggagttggttgaaatgaattgtggacgttggatcttcactggagttaatcaaaaggtcgacattagtctacattgttagtagactttagaaataaaaagtttttagtcgttggtgggtggtcgcgtgggcatatgttgtagtaggaaaatgttgattttttttaatacttaaatatatcttataatttttgaaggatttttttttttaaaaaaagaactttttaggttttaatatgtattattattactttatattttataatctaaccattcacaaattgtagattaaaggctaagccattaattatcattcgtattggattctacgtgccatcatttcatgaggccctcacatacaacaactaacaaagttttacatcaataaaaatgataggaaaatttcattctcttaaaaagtatatacccaaatattattattcgttttagtatttaaaataattttttagttaatttttttttctcataatcatgtaaattatagttatttaacatattct

SEQ ID NO: 91710 - DNA, 688 bp, Cannabis sativa
catttttgtacagacaagtttgtaaaccaacttatcttaaatgccttgtacttctttattcgaacttaatatatttgtgtttgcttgcgttttcattcacaatgtaaacaattatattttgatcaaatgcagagtacttttggtattttcattgctcgtaattttcctatttaagtagttagtaatctatcagacttttgatttttgagcagttaccgattctgcctcgcaatgatagttataatctgtcttaagcaaacttgaatatacgtttaatgattttatcactttgtacatttttgattgcttgtacgaatagttagattatctatccatacactaggtttaagtacttttatcaagacatctcgatgtctcgtttaatactttcctatcttgcgcgaaccgttaatattcagctttgtatgcaatttatgagttatatctcatttataacttttgattttcctttctcatcagacaggtttaaatcaaaaagttatgatggtttgattcccttcttgtcagaaaggtttgatcaaaaaccttaaataaatataaagttatgggtttgcattatatcatgtatctccaaatgaatcccgattaatcatacacaaatgccccttaagtaattttaaagagtaaggctttgtaattacttaaataaaagaaatgattctcttta

SEQ ID NO: 91711 - DNA, 558 bp, Cannabis sativa
gtttgaccaaaaaagtgcggattgaatcggatgaacacccctaatatgcacattattattaatattaaatagtatgttaatctcaatatattcatattcatacaataattattcttaatgtgagaaaataatttgtgataaatcataacaacatatgactttaatatttattctttgttttagaataattagaagaatcaatatatgtattttgtaaaatttaaaagaaacattatttagggaaaatgtcagctcagcagtttaaatggtgaactgattgtacatgacaatatactttcttcaacatatccaaacattacagcatctagtattttgttatcatcgtcgagttagacatatatctttgtactaataatatatacaaaatatattgacattggtataaattaaattaagttcaaatctcaataaaagagttacatcaagttcctctacatatagctggtgattatccaaacatgccaaagttttataaacctattatgaataaagtaaattttaatcacataacacatagaaagttgaatcataaacatg

SEQ ID NO: 91712 - DNA, 958 bp, Cannabis sativa
tataaaagttcacaaggagccatcgcgattgttgtctaatagttattattatacgagaactcaatcaggggaaggtactttacccatgatcccttagaattgaacacacatgcccgtaacatgtcttttaaaatctgaatggtcctctcggactgtccatctatctaaggatgaaatgctgtgctaaatttcaattgagtacccatatgtaggctctcccaaaatcttgaggtgaacttcggatccttatcagaaataatggactttggaacaccatggagacaaactatttctctaacatacagttcagcatactgatcaagggagaaattcatccggacaggtaaaaagtgagctgatttcgtatacctatcaacaatgatccacatagagtcatactgtcccgtagtcttaggtaatccaaccacaaagtccatggcaatgtcttgccatttccattccgaaagattcagtggctgcagcaaccctgtagggctttaatgttcaaccttcacttgctgacaagttaaacacttcgccacatattcagctatttcattcttcatgcctggccaccaaaacatggccttgagatcttggtacatcttcgttgttcccgggtgaactgaataaggagtcgtatgagactcatttaagatttctctcttaatgttatcatcaataggcacacaaacacgattcataaaccgtagcattcccgtgtcatccactgtaaaatcactagtcttttcagccgaacccttatctcgggatttcactaactctagatcttgcaatttttcttatttgattcgttttagaagagtagattgtagggtgatattagccaacttccccataacaaactcaatcttagctcgggtcatctcatctgctaactgcttggagatttgcttcacaatattcatctgactctggcctttcctactcagggcat

SEQ ID NO: 91713 - DNA, 665 bp, Cannabis sativa
ggagaaactacatccaatgcattaaaaacccggtcgatggtgagtagattagagaccaagccgacattgcaaaatgcttcctcaactactataatgatcttttctcgaagcaagtctcgctccaaatgcctagtccgaatgtaatcttcccttcccaggatctgaatgatggggataatttgctccttaatgccatacccagttctgaggaaatcaccgcggccatcttagaaatggggaaggataaggcaccgggaccggatggattccccacgagcttttactcgcatcattggaataccgttagtgagaacgtttttgaaatggttacccactttttcactcattcggagctgccgggcttcatcaatgatacctcccttgtattaatcccaaagaatgaagctcctttatccaccaaagactatcgtccaattgctctctgcaatgtctcctacaaaataatctcgaaaatcattgcttcgagactacgtgggatactcccaagaattattttcccgaacctagcggccttcttcaaaggcagaagcattgctgagaactcgatgattgcaagagagatagtccatcctatgaaaaagagtaatggtaatagaggctttatgatgatcaagcttgacttagagaaagcctatgacaaaatg

SEQ ID NO: 91714 - DNA, 504 bp, Cannabis sativa
  modified_base (425)..(468): a, c, t, g, unknown or other
taggtttctttttcttcaaccaggtctgattgatgttctttgatgttaatatatgatttaaaatttgtggaggaagaatgttaattgtttgtgaccttcgatttatctttgtttgagtctggatacattcgttgttattgtttagatttagtattgttcatgttcttcaatggctgatgttcttaattctgatttatgataattttttctctgatggttttaattaaaatcttttacacctttaaaatttagttaaattttttactagttatattgtccaaaaataagtaaattacatataatccttaaatcttgaacatgtaacatagttcaagaaatcaaaaaggaaaaaatttacctaacgatgaattgggcaataattctagattcgagtagaaatatggtgtaacaccctaactatcttnnnnnnnnnnnnnnnnnnnnnnnnnnnnnnnnnnnnnnnnnnnnaatcaacgaggtttatggaaaaagatcggaagagcg

SEQ ID NO: 91715 - DNA, 729 bp, Cannabis sativa
tcccaatcttcaaattctgggttgactgtgcgatttctttcatcagtggcagagagatactttggtggagctttattaggatcgaggtacaagaaatgccacttttaccagcacagttcgctactgcgctggtaaaaataacttttaccagcgcatttcgtaaactacgctggcaaaaaagtcaaagttttaccagcacacatttgtagtggctaaaatctaacttttacaagcgtatttatgcgctagaaaaagttatttttaccaaggctttcattttatgctgacaaaagctctaatacaaacgttgatttgccacacatcagaagtaaattatattttaccagataacttttgccagcacattttaaaagtgacatttcttgtagtgtatttttgaagtcaactccctttgatcgagaccaagacttgatgtcgccatggaaggtagttgtgctcatcgagcttgattgaaagagaatgagtgaatgaaactgggtaagatttaggcagtaaggcttgatgattgttctctgtttgagcattgtttaatcttgatgttccaccattggaagtacgagtatgtaccagtaattgagatttgctgttaatggatgaaattattaccttaaaatagttcaagataaaaatcatattacaaattcatatacatatttacaaggttaattaggatttttgcccctgaatttgacatataccaaatcatgc

SEQ ID NO: 91716 - DNA, 777 bp, Cannabis sativa
tcatcaagagttctaatacaacttgcattacctactttcaaatgatccccgaagccattaagtctcttccccataaaatgcttctccaagagtaagaaatgttatgactagggacaacctcaaggatagaaaaatgaggaaaataacgagctttaagaaccgaacaaaaaagggaattgggatttttaaggattctccaagcctgctaagccagtatggctttattgaaatgaacaagagaacaaaatcccagaccaccatgaaattttgattgacaaagaaccttctagaatttccaatgaattttcctagacaccccagtggaaccccaccagaattttcccatcctagcttcaatacccttacaaatcttaatgggtaacctgaaagaagccatatcataagttgggatagcttgaatgacaactttcaaaagaacctctttaccagccctagaaaaacacttggaagaccaagatctaagaacagaagcaaccttatcttgaaggaaagcaaaagagtgatatttagatctagagagacattgaggaaggcctaagtatttacaaacaatggcctatcttctaggttaaaagttcgaaaaaataaattacgaatctcttgcaaagtattgggagaaaagagaattgaggatttcgaaaaattaatagcctaaccttaagccctagaatagatattaaagatctcctggagagctaaacaagagcttctatcaccagaacaaaaaagaaggctatcatcagcaaaaaagagatg

SEQ ID NO: 91717 - DNA, 908 bp, Cannabis sativa
ttgttcggtaattattaaaaaattaattttttaattaattaattaaaaatcatgaaaaaactacaagattttgttaagtaaaattttaaaaaacaaaaaaaaaaaaaaatgattcccgaacaggccgtaaatataatgatacactaagttcgttttttggtcaaatattttaagccaaacccaaaaaattctctacctatacttctttagcaaccaatttttgatataatctaactataatttttttgaccaatatcaaacttaggatataactatgttacattttgtaaaatataaggtataaattgttatttaacagtagttttaaacaaaacctaatcatcctacatttctctttctaaaaaatactagtgaggctttacgtgctccgcacgtggatagcatataagatgtaaaatattgacattataataatttacttcatagttatttaaggtgacaaaatttttaatgttgcaacatgattcatgtcaagttgtaatagaactcaaaagattgttaaggtgttcctaagttgtagcctatttatttacatattcattccatctagtagtgatggagctttcaagagtggaagcctataatatagttccaacaaggcctatttagtatttacatatgtattccatcatggaactttcaaaataattttcaaaagagtaacaaaagagcaatcttatttagaagagatgcacacccaagctttccactgcatctgatcttcattagaagccttgtggttgtttccaacttcatgagtagcttcatgtttcttctcttcatcgtgagctgtaactttgtgtttcttttcaggaagagtcacaagtggagttggattaggatgggaagttgaagcattagagattaattcttcatttgagagtgga

SEQ ID NO: 91718 - DNA, 511 bp, Cannabis sativa
ataaattatgctttatttattcatatttccctaatcaactcgtaattagtttaagtagggttataatcctactctaatacccacataatcacatatgaataaaatatgtccacttaaaatatcaatatattttttgggatattacaactatcccctctttatagaaattttattctaaaatttattcaaataactcgggatacagctcccgcaactgcgactttaactctcaaattgactttcaatcttgttgttctttcacggcactataactagcgatattgtctttatttcgcaacactttctcttttctgttcaaaaaaatttgtaccgattgttcctcatataacaagtctgtttgaaattcaatattctcttaactctgtatatggattgcttctacttcataattttgaaactttgaagtatatgttgtaaactctagataaaacagggagtatggctagctgataagctacccgacctaccctttccaaaaactcaaacggac

SEQ ID NO: 91719 - DNA, 744 bp, Cannabis sativa
gggacctagaaccgcaccccagccctgaacttgatttgggactcagaccaggacccaaacccggcgcctgacccaaacctaggacccgagaatagagcctaaacaagaaccgtaagaccaagaccatcgaacaagactaggaccgtgactaggacgtggacccaaacctagaaccaaactcagacctggccccaaacccaaaccgtgacctaaagtcgagccttgacaagtcgtgtacccagacaaagactgacacccggaccaaaacccggacccagaccaggatcgaaactgggaagctagatctgtaacgagaccctgacctagacccagacctggaaccgcacctgggacacgaactcgaacctggacctaaacccagacccagaccaggatccggacctggacccagactcagacccagactcagaccaggaatcagacctaaacccaaacccagacccaaatcgaaacacggcactccgacccgaacctggacaccggggccgaacccaagactcaagaaccagactcaaacctaggactcgaaactcagaccaagactaggattgggatgcgaactcggaccctaaccaaaaccacgaactaaactcggaccgaaccgaaacacgaacttggacccagaacgggacctaggacctaaaaatagatgggggacacagacctgggaatcgggcccctgaactaggacaagaaattggtctcagaactttgatcgggatc

SEQ ID NO: 91720 - DNA, 635 bp, Cannabis sativa
tattggggcgggtatgggggtgaatttaagaagcgggtatgaggatatgggggagcaatccccgcacccgtcccgccccgtttacatccctaactaaaagttgacatcaaacatgtcaatatttttacatatatgcatatagcccaacttgattaagaatttaaatttaaaatcaaataaattaatcaataatgtctcaacatattttgattaaatttgtggctcacccccacatttctagcataaaatgaaatttttataaaaatcacttttaaccaatattagttatctaaataatctccacattatttaaacaactttaattatttttctaaaatgcctcttagagatcattattagaaaaatgtcatttgtcattcttagttttctcagcaaaactaaaatatcaaactcacatcattacttacaaaataatatggttattttatctattattttaaaattatctccacaatgagattaatcccaaaattataccaaagttaacagaattctcatcaattttgttgattatttaagattcaaaattgattatccaattttgttattttttcacaatttttgaatccacattgattcatttactttgagtccaaaattgctcttccaattta

SEQ ID NO: 91721 - DNA, 622 bp, Cannabis sativa
tgattagctgtccagttctatacatatataataagcttggaagaaaaaataaaataaaagataaaagacttccttaaaggaccgcccacgtgtacatttccattgtcaactttgttttttacttcaaaaaaaaaaaaaaaaagtttgggcatggggctatgatatatgtttttgtttttgttgttactaaagttaattaaaagtgaaacaaaattccgcacgttgctgttatatttgataattatttattcactattgtctaatgttatccgttggggtcatcaaatggatcatgaattttctaattgaggaaaaaaatttcaagttcaaacctccctctctaatattaaaataattactatatattatacgatttgaaatgttaaaaaatagataattattttggtgtaatatatagtttagaatccctaaaataaatacaattaggaaacatattcaagaacttgctgatataataattttcttttacctgaataccgtaaaatattcaataaaatttgtaagatgtataaatttaacggaaaaaaatagaaaaatacaaaaaaagaaaaaaaaattacaaaaatactatgggctagtccattaaacatttatacagtct

SEQ ID NO: 91722 - DNA, 1183 bp, Cannabis sativa
tatttttctgtttttttctcttaaataattaacaaatttaaatatttagttttatttagtgaaactatttattggctaaataaaatattatttaattagtaaaataatttaatgagagacaagacattaatttattaaaaataatatttatttcatctaatcataaataagataataattattattaataatttattatttatgagaaaattataattaatctttgttaaggtacggttaaaaaatcaattttggacattaaaacaaatgccacagcataataattgtacaatcatagcgtgtagggcaattataaattacttaggatttatttttgttatttatttttttaattattttaaactaaataattatttaataaaatattttgtaggataaaatatttattattaaatgattaaaataaaaaaaagataaaccttttatataataatttatttgaattaaaatttaaataaatgacttatttaactttatttattgagattaaatagaagttataaatatctttataggcttgacttgatcgattgtaatttttcattagagaaaaaccatataggtcgaaaactgtctctttttctcacacacaactatactagtgagcctcactccccctctctcatcatcatagtgtctcataaactgtgtataactatatacaaaataatcattaacttttcttaccagccctcacttgttttgagttttgagatggatctgaaaaacctgtggtataccctaatagttaataaatatgtctaatagtgtaatatttgtaaatatgttgtatacctcaggcttatggttcacattatcagcaactaaaatatatttttttcaattgaaacaacttttgtactctaattcgaaccctaaaaatcaactaaacaaactctagaataattcaaatctcgaggtgcttagacacccaatgtctaggttgactattttagtcatcttaggggcacgacaattagggcttagctttatgggaacttctttggactccaatttcttaaatccaacatggaacgatgctaggacttgagtttttgcaaactgtgccacgaggaagggcaaactctagatcatgcgcccaggttgactgtgtgtatcatttgggtgtcgcgtcattaactcaagtttatcgagtgataca

SEQ ID NO: 91723 - DNA, 828 bp, Cannabis sativa
aaatactcttctccctccaacttccttcttctactctcttttcatttatttgaagactgtaaaagaccttcggccatccataacaacaccatctccccttttctgaaatgataatcttttggaaatagggagcagtaagcgaaacattgctttaattctgggcgtagattaaaataactcaaccacaaagctggaagaatatcaactgtttttctatcatacaactcccataaatcactgtttaggatgttgatccattcctccttcttctgcttccctcgtaacagaagacccattgactttactgccaaaggaagacccttacacttgtcaactattttttctccaacttgcttgagatctaagtaatcatttgagtccacaacaagtgaagcatgctttgcaaataatcgccagccagcagcctcatttattcctcttagttgataagttgacccagttttcataatcgatgcaacaactgtgctccgtgttgtcacaataatcttgcttccatgttttcccgatttgaaacaattgtttaggacatcccacttggcacggtcctcatcccaaacatcatcaacaacaaacagaaacttcttcacactcagagccttctttactttcttgaagatcatatggatcctgaatttcacatttttccaaagtgatcttctccacaattagtttcatcactttcatgcagtccactttgtcatcacccaccgtaatccatactttcgtattgaacatggtgttgactctttcgtccttgaaaacaagttgagcaagagtagtctttccaatcccgcccatccccactat

SEQ ID NO: 91724 - DNA, 1122 bp, Cannabis sativa
  modified_base (506)..(513): a, c, t, g, unknown or other
attattttaagaaattcatatttaggatgttagattatagaattataatcaatcatacatgttagtaaatctagatactggtaaaataatttctaacatgttgggctgtcttggacaacgttgctgggaagatttggcatcgtacatctctagttcgagatctgtttgcatctcaaagtattttatgtgcaccaggggatcttccttcccggtgtacattttccaaactggcatcttgaacttaggtaggggtagtgcattaacgtatgctgagaaaggtgatcccattaacttttcaagttatagatctgatagctttgggccggatagacatttgaataatgcacatggtacttttttcaacgaaaaaaaccagttctcaccatgttccacatactgcactggttcactcagctatggtaagctagtattgcatctttcttatttttttttttgaaacaaatagtatttagtttctaatattaaaaatattaaattttaaaatnnnnnnnntaaatgtaatgcatttgagccctccacgtgtcaatatttatgaattaacagaagtagtagaatgggtgtaagaaaattataatattaagtaattattttcaaaaaaaaataatattaagtatttttacctaaaaaataaaaataaggtatttaagtgtataaaatttgaaatattatgtatttaaagaattttatcttaaattaaatttagatatttaaaattattttttttttaaaaaaaataattaattaattgatttgataatattaattttaacaattaactttaacgaaaaaataaaacaatttgttaaactaataattttcgttaaatagtgacatttagagatatctacttagttttattaatactttagtcatctatacacgtgacaccattgttattcaatgaattaatttaagagaaatattatatacgaaataattttttagtcaaattgtttctcatagtcatataaattataattatttaagacaccctgtaaaattttaagaaattcaaaaaagtttaacatgacaaaaattacgattgcacgcatgactattttattttatacgcgtgtaaaataaactgtttaaatattattt

SEQ ID NO: 91725 - DNA, 574 bp, Cannabis sativa
tgatcatcgtcaggatcggccttcaacaaaagtgaaatccgttcctggaggagattcatctcttggatacttatttggagataagtgatcatcgctactgttttctcccattgtatatagtcaacaactcttactatcattatataaaatatatatatagagaaataaagagtttaagtatttgtcagtttattctagaatagctaggggaactgaatttcccatatcaatggattaattaatttagagtaatttttaaagtgtgtttgcttgggttgcatattctgatatatgaacactaattataattagtaagcaccctttatatgtataatctggtttgctaagtttactttccaatttcttataataatcagtttgtgaatgcttatataaattaagttaattatatatatcacatcgaatgtatattaatgatggtgtctctgttcaatgttgattaatcttgttttccatccagattgggaatgtggagattatttctttttctagtacacaataatgttaaaagtcaattgaaaaaaaatactattaaaagtgatatgtcgatctc

SEQ ID NO: 91726 - DNA, 515 bp, Cannabis sativa
tctttgaaggaagtaaaacaagaaaaattagaacacatgtggtgtgtagcaccactatcaagaacccattgaaaagagttagaagagatattaccagcctggtttgaagctgcagcaggttcagcacgggtggattgactaagttgttggcttagtagagaaattaggtgctggcactgggaagtaagatctggaacagtaggtgcagtagcagtgttctcaggttgtttgcgattgctggtggtagcttgattcacttgagctttacccttatcagttcttttcttgtctccataacccggtggaaatccatggataaagaagcatttgtcaactaagtgaccgggcttaccacaatgagaacaagagggtctcggatttttatttcttgaaggattggtagatggtggtcgaaccgatgaagcaagaggatggttttcaaatgaaccaagagtgcgttggcgttcttcttgaacgatcatggcaaagactcgcgagaggttcggtataggttc

SEQ ID NO: 91727 - DNA, 533 bp, Cannabis sativa
aatgagtgctcaagttgtgtttgtactactactttttgctctgacgaatatttacacgaaagatatccatattggttcagtgaatccctcttctcaaaaagcaatgtgaacacagcaatggcatcagatatatatataaatatatatattccctaatagtaattagagcttattattttcttctgtttgagaggtttagacgaatgggattttccagtttcccaattttctgtaaatttttggcacacatttcttactcgtaggattggacagtctttactttacaggtagtagtatcacatcatcacgtgtattttcaaattatgaattttgctctcataattttaatttgattttacattatttattttttatgtttgtaaaattaaaattatatttgtagagaagaaaataaagaagagtaataatgcaaacaaatttgttgtaaaataaaaaaaaaaaaagtaaagttaccataaatatatataaaacataaataagtgaaattgctaggaatgttgtaactataaatc

SEQ ID NO: 91728 - DNA, 523 bp, Cannabis sativa
ttcttgggatatagccttaatcacaaaggctataaatgtttagactcaaatggtcgattatacatctcgagagatgttatttttgatgagtctaattttccttatacctcagtttcaacagatgcatctgaaagtgtatctgagtctcaaattcctagtgctattccactcaatcattttccatatactgttgagtctctcttttctcttccttctgcatctgttgcaaatcatgttcctgatgctgctgttgtggcttcttctggtatggttaatcatgagaattctaccacttctcagtctcttatcgatacaccagtcccaacaaatgtttccactggtaacctgcctcaaccacaaccaccagtatctacaagtcccactgaaaccattgtccccagtcaaaatatttccttgcaacaccctccacctagccctcctattaacaatcatagcatgaaaactcgagcaaagtctgggatatataagcccaaagcactcttagtttctcaagaacctagta

SEQ ID NO: 91729 - DNA, 952 bp, Cannabis sativa
  modified_base (183)..(193): a, c, t, g, unknown or other
tatcagttttttttttttatatatcatcttcttcttctccatttccattgccaaaaaaagattcaaaaatgggtcataaatcagttgctaataaggctaaagggaaacatctagttattgacgatgatgactccaatttcgcttctcccgtggctaaaggtggttgtcgtctagtgaagaagnnnnnnnnnnngtctttgcctgaaaaaaatttcaacttcgttggccagaatgaaaagaagaagtcaacttcaaggcagttgtggcgaaactgtaatgcaacagttatatctattgcgagccaactaacataaaaccacaaaacaactaataattctacatatttaatacaaataaatattacaataatggtgttttatctgttcaggacgtgtatttgacaatttcgagccctgttttattaatactttgatattgtagtagcaaaactattattcaaccaacgtgaaacttaattgcaactaaaatattaaatgtgaatgtgtatttgtaagaaactatttgttagtatttttttgggcttttttttagttttaataaaaaaaaagtaacaatattataaaaatacttcacgttggccaaataaataaatatacagctcaaataaaaaaaaaattacacaaatacatcttacacacactttcaacctaggatccatgcttcatgggcaacctttgggcaaccacgcaacaaccaatgcaaccgaaacgaaaatccaaccagaaagagaaccaccattaattctggcgacttcacctgagaagatgaccagaatcaattaaaacatgggctgtttcgaattcatgaaaaaaaaagtgcagaaaaactactaggaaactaaaatttaactagaaattcagtttaattcgcataaaactaatgtcctgactttattttttagatccatgaaatgcagatctcaaaaagctga

SEQ ID NO: 91730 - DNA, 641 bp, Cannabis sativa
cattcgtaaaatcatacttttagatagaatctaaataaaaaaaaaaaaaaacctaaatcttaaataaaattaatatttacgtgccgaggcacgtaccttatacctagtatatatatatatatatatcatggaatacacatgagacattgagatttaattagagttgaatgcacacattctcccattattttgttgcccacgtgaagccatgagtgaatgtatatatcatccatttgtatgggcctatatctcatgatacacattaagcatagagaaattatgtggctcgtataaatatatattatatatataataacgcatgaccaaaccttattgtatacatattttacgccttttaccagtttggtatatatttcattattacttcataatatgtataggcatattgagcgataataatttgatcataacatttagggtgcgtttagaaagccataatgtaattagatttatatataattaaatgtaattagatttatatataattaaatgtaattacataatttgatatatttgtctgaccatgtaattgtaattggaagtaattgaagggttccaattacagtctataattctcatggccccccatgagaattgaatgtaattacactgtgtaatta

SEQ ID NO: 91731 - DNA, 1227 bp, Cannabis sativa
caaattcacatacggtggatcctgcattgcagaacctaggaaacacaagggttttaccggctgttaatcctggacagccgacgaacatggggaacagtgtaacaaatattatagatgaaatcgcgcctggtgttcaagagactaggaataacagttccgcacccaactagggcatcataacacaactgtgccgcctggaaccaacacccgtacaaccatcggagatgccactgagttacaaaatctccgtgacgctctcggactcatgcagggtcataacaataccctacatcatgatcaagttgaactccgcactgcggtaaatctcgtgttcgacgaacaaagccgtatgttcgctgaaaggagggatagagagatggaggcattaagggctcaccatgtagagatcgaaaatcgtagtccgcaagctaccgtgctaatacaaaaagcctactgaactgtaggtgagcaacagtcgaacgtcattcccctgggtgagacgaacgaagaaccagcgatgaatacttctcagactacaaatggtcagttgcccaatctccggtcacgagttccactcgtgggccaagcggtaagcggacagaccttgtctagtaattcatcaagaaaagtcatacctgatggttccgaccagataaatggtgccattccacccgtcaaccaagagaatcaatcgctgaggcagcctgcagacacttctgtattcgaaaggttgggagcaacccatgacataaggaatgatctaaatagaaggaggggagtagacaatcagaatgttacgacaatcttgcagcccagaacccgtactcaaattcccgctcagaaagatgctgatataattcaaattgaccagaatgccgaacaggttagcccagtcgtagagtctcagctagacgaactaaaaaatatgtttcacggcatggctggacaaagaaacaatgatcttgagctggaccgagcacgcgcaactcctttctcacctgagatcaatctcctgatgttgtcgcacaagttcaaaatgcaacgtggaagatatacaacaggagagaagatctcctttcccatctcaagtacttcgaaatggaaatggattcgcacggggtaggaggagatgtatgctgcagaatcttccctgccgctatgtcggaagccgctcagaaatggtatttcaaattggctcttggaaagtttagttcatggaaaaccttc

SEQ ID NO: 91732 - DNA, 510 bp, Cannabis sativa
atctatttctaaacataaactattatgcaatttaaatcacaaatattatacacatttatatgttgctcgatggaaaaaagtgttatctgaaattacagaagcgttgtcttattgcagtaaattcacaaagaataatatactttcagaattttattagttattcttttgagagattgttcttaagtaatgaagttaatttttattaaaagaaaaatacattgacttaaggtgattttttgtaaattaataatttttttaatataaaaactctaagggctcagtgttgggatgaaaatatatagaatgagattacaccattaacaatatctttatatctaacagaaatttttggtttaacagagtttttaatttttattcctttaaatttaacgctattgttaactctcccgttaactattaaaaaatataaataaagctcctaaaatataaattaaaccctaactcaactcttcaaccgtgaactacaatattcttggcttcattctcgct

SEQ ID NO: 91733 - DNA, 632 bp, Cannabis sativa
gctttttgcagacaacgatttgtttcctatccatttaatgatacggcgcattaaatgggtgttagtcgagtactcaaacgttttctaccaccttgatcaaagcttgtcccaaccgttggatctatagaatgcgaatcaattgctattctgaccgtacgatgatggtcgatcacagctgtctcacacccattttggcttataaaagccagccttcttcatttcatttagttactttcactatttcaccaaattttctcagagctttcacagagagaaaagagacttcaggcaccatagattatttgcttctctttcttcgccgtttctggtcatccctctaccggcgatcaacaccaacccccagccttcaaacttcatgtaagtcctcagtaccctttacacttgcttactgtttgttaatgttacatgtttacagtttctgggttgaatgttgaaattctggggataattttgcctgagttttctgtgtgacgcattaaattcctctttttgtgtcttaattgctcttttttactacgtttcttttgaggaatcgcctttacctttcgtaataacgcctttagggcttagagtggttcgtgctttcacggctttgcccttttttccctttt

SEQ ID NO: 91734 - DNA, 643 bp, Cannabis sativa
tttgtacatgtagagtatcaaactcgaggaaccgaaagcatgaaagagaattcatggttggtaataaggcacagattgattgaaaccccagaattagacatatctttagaagaagaagcatggtcgattcttcttctatggcgattgtgagaaacttctgcagcttttcactttgtgtaaactttgaagattaagtaagaaacagatgtttgaaaggcgagtggggcaagtcatgggaaaaattgattgagatctggttggcattgtagttgagaggtcattcagtgtcttgtatattcttcttcttgtcataaatggcatttgtatatattttgttggcaaataagatacttttgttaaaacaaaaatttcacattttaagtattagaattaattaatattaatgcacaacgtaattttataccaggcataacataaaagtttattatgaattcaaaattattgaaatacataaaactaaaaatgaaataatttcttacaagcaaatagaagaaaaaaaaacttagtgtatattgctccaaagcaaatatttcacatttttttaaaatattaagtaatacacattcttttaattaaaataaacattttttattccaattataattatattaatcatttgagg

SEQ ID NO: 91735 - DNA, 507 bp, Cannabis sativa
atttgtaacaggtaaatttttgtaatttctttcatctgtgataaacctagaaacataatagggcccatccaaatcaatttgtataagtgagcctatatgtttgctattgggtttagatgcatgtaggaagcccatttaattttagatttataaatagactagtttgctaaaataaaatatcaccttgatagtttttttttaataaaatcataagctttattaattaataatttcatttaaaataatggaacgtacttcagtggaacaatcctccaactgaagcacacaacctgtagagaaacaagagtctcttgccaagcaatgagccaacttatttgcagatcgtttaataaaatacaactcaatatatggtaaaactaaaagcaaattatggacattttgaacaagtagaccaaattgggaagccatagaaaaattacttttgatagcttggacacagaccaagctatccatttccaaaataacatggtgttgggttttatgccc

SEQ ID NO: 91736 - DNA, 760 bp, Cannabis sativa
accaacatattgtcgacgtaaacctccatgttccttcctatcggtctcgcgaacatttcatttactagtcgttgatacgttgccccagcattttttaaaccaaaacgcgtgaccttataacaataaagacccatgttggttacgaaacttgtatgttcttaatcaaggacatgcattttaatctggttatatctagaatatgcatccatgaacgacaagaatagggttagatatccacgagggatagaatgccttgcgtaaaaagtcattaaccaagaacatatccacttcatgcttaagcgccccttgtcttttggagtctaggggtcgtcttttctgcctcttcgctaggtaattcggttcgatatttaggtggtgataaataattttagggtcaatccctatcatatctgaatgggcccaagcgaactgatcctggtttgccctcaaaaaacttattagttgctattttaatttttcatctaggcaacaagaaattcgactggaggacacatgtcaagataaagataatgtgaatcggtgtcatatctttctaaggaataactcattaattgtgtgagtactagagtatattttcaacctgctgcttgtaaagtcttaggcgaggaattaatgtatgaactggtacttaaggtattaacgagaaatcaaatgttgctaaaaaagaatagcgaggcaccagagaagaataacacatacctcggctcacaaataagcagactaagtataaaagtcgaac

SEQ ID NO: 91737 - DNA, 1171 bp, Cannabis sativa
ccccgacccgctgccaaaaaaaccaaaaaactaataacatgtatggtcgggtcaggtctaacccgaaaatgctctattcgggtatcaggttcgggttttaaagaaacacacattaacttttaggttttaatctaaaacccgacaactaaaattagaaactttttgaattattattattacatttacttactgtactgaactaaaaactaaaaagcaaaaactctaaaaagtgaatatctcatttttatcatctccactatttattgtattcaatcgtatttttccaacaatttaactctcctagaagttatcttatctctggcgcccattatctcatctctactcttcaatgtgcaaatcaattcaatgtatgcccaaaaaaatgttaaaaataaataaaaaaaaaatatgtcatttttaaaaacaaaatatcatttaggcccaaaaatatttcattcaaaaatggcccattaaacccgaacctgacaacacaaaacccgccatacctgacctgaaacctgccacacccggccacccaaaaatcgggttcgatttcacctttaaaacacctgaaatttgaaaacccaaacccgaccacccgaaaacccaaaaattcgacccgtgtatggccctagttggcagatgagatgacaaaggctaatattaagttagttgtgggacaactagcaattattaccctacaacctacgttactagaaagaattatagaagctgagtatgaagatccaaatttgattaagattcaggacaaagtactagttgctaaagttaaagatttcactatggatgacagtggtatgttacggtgtacggaccgtgtatgtgttcctgaggatgctgatattagaaaagagactctagatgaatcctataccactccttattctgttcacctcggtatgacgaagatatatcaggatttgaagaccatgtattggtggccgggtatgaagaacgatatagtgggatatgtttcaacatgtttgacatgtcagcaagtaaaggcagagaattagaggcctgaacagttcttacaaccattgaacttaccaaaatggaaatgggaagatattacaaggactttgtggttggattacctaagattacaaggcaatatgattctgtgtgggtaattgttgacatgtataca

SEQ ID NO: 91738 - DNA, 872 bp, Cannabis sativa
cacgtacatctcatagaaggataacaatgttttccagttcttcaagactcttacaaaacacatcagatattttcaatctcattcactggtttttgatgtttagctaaactgctatgctttcccattgataagtttctttatccattgattcctcattcatgttttgtgttagagactcctcatatattttgtctgttaacaatttaaataacacaaattattctagaatgtatgttagataataaatattaaaatttggaagtagtgccttctttgaaaaaaaatacattatctgttttatgtcgaatacattataattaaaggtctagtaacattacaacgctagtgatcatgatattaataatgcattacaaacaaaattgaaaaataagagattaaaaatggtattagaaaaagataaataaaaggatgtcataagataaataaaagataaaaaaatttaaaatataaatattttaagtattaaaacactcaaagatcaagaaatatccaaatatgtctttcatatgtaatgatgcaatcaaactaatatgcaactgaagaagactactttttctagagccactttggacacttatgagaatacatgtggaaacatcaattattttaaaaaaaatgagagaagatacattcttagatattgtgccccacaccattcaataaaaaattaaaaatacttcaaaactaccatcaatttccaataaaaaatacatattttggacagtaaatgtgtacaaatgagagtggtattgtatggtgcactttactcagagcaatttcaatagtaaaaattacactaaaaatatcttctttattattatcctattttagtaatataataatattattta

SEQ ID NO: 91739 - DNA, 532 bp, Cannabis sativa
aatataggcctttagactctcactaggttgttgttttacgttggttaaggaagagcattcaagtttttgagacttggcagcacaaaattcttttttaaaatcacttgacgatttgtcccaataggtgatttgaatgcttcttgaatttattgtgaaccatgttttggctgctcctgtcaaggtcaccgcgaataacatgcacttcaaatctccacttacttggcttctcctcattaatgtgttgaaatcactaatgtgggctcctgggtcagtacttccatcataatcagcaacttacccgctatttttgttccttttttgtcatggtgggcatcttgaacccttgggggtatggcaatgccaagatgtgtggagcaaaaggttcaggttcctcatcagtacccctcgactcttccttgggtatttaaaaactgctaaatttattgttctaatgctgtaattcgtggggcatttatcacatgagcaggagtattcagactgtctagtggaggatcgttcacattaagttagg

SEQ ID NO: 91740 - DNA, 582 bp, Cannabis sativa
ggaactccccatgcccgaccccatataggaaagcttgttaagtcatgcctccaagattcgtttgaattctccattttgcccaagattaacaccccattagataaataccatggcattctatttaaaattctgctttgaatagattcagatgcaaatgtaaaagttaagaaaagacctgattcaaacttttctttgattttgatgttccattccgcatctttcaatctccatattcctcccagcactttcttgagaaatccccgactatgttctgagttagtacagaggcggcctctcaaattgaattttgagattgtgattgacaagcttttatccacttcccattcttcatcttcatccgtgacctgaagattatgggttttcttcaatatttcatccattgtagagttgaacacctcaatcccagaacctgggaacccttcgaaaatgagggaagactatgggtcagaaacgagccctagcagagcagagcagagcgcgcctaattctattaaaagtttgaatttatttggctatatttgtaaaatatctttttgtgattgatctatattttgttaagga

SEQ ID NO: 91741 - DNA, 617 bp, Cannabis sativa
gatgaatctgtcactgcatatttcaccaagcttcgggctatatgggatgagatcaatgagcttcggcctcgtcttccatgcacttgtcaagcgtctgctgataacacaaaacttcaaaatcaagagaaggtccttcggtttcttactggcctcaacgaatcatatcaagcggttcgggatcaagtgttaatcaccgaaccatttccatctctttcaaaggtgttctctactatcattcaacatgagcgtcaacggaaactccgtgtcctcccgaacatcattgctgccacttcttctcagcccataaattcttctcgcaacaagaagatgcgccctttctgcactcactgccagaaaccagggcatttaaaggagaaatgctatgttctccatggttttcctcctggttattttgacaagcgcaaatctgattctactcagcgctccacttcagatcggggttctcaagtcaaaggacccgctgctcatcaagcttctgcttcaccctctgtctcggataaacttgcctcgctgcaagaaatgatttctcaactcactgaacagattcaacatgctcaacaaagccaagcaatggttgatgtcaacactcctatggc

SEQ ID NO: 91742 - DNA, 562 bp, Cannabis sativa
tgcagctgaaaattatacccagaaaactccgacttctctaccgtgagacccatttcggtggaatccactgccaccgccgccgccgcagcatgtgggtcgggatcctccgtagccagattttctgtggggtgccaaggtggcagctcagcgagcttgtcgatggagttcttggctttcttaatgagccaatcgacggctttgctaggccggtcgtagcccaagtgttcttctctccatttatgcagaaacacaaactctttccaatgctcttaatcggtgtgttgcagtgaagttttatttagctttaatcatgtcagagtgctaagtcttagtcaacaaaattaattttaagtggaaaaacaaatcttctctttcaaatttgattcacaatattgtattctttatatcaaattttcctaatactaggatctgttttattcctagagaccaaaataagatcgtgtactttttcacatatacattttagtgagctcacgtgattgattcacatgactagcacatggtattttttgttctttgtttttatatcattaatgggtaa

SEQ ID NO: 91743 - DNA, 657 bp, Cannabis sativa
aattagtttatggatccaaagaagagaacaatgaagggcccaaatctacttgagggctttcgtacagagaaggggttttttttttttcttttcataaatgtgggaaaatgtagtaaagtttacttttatatcacataaataaataatgtaaaaaatatgagattaaaagaataattaaagtttaacatatgcaaaaaaaaaacaataaataaacttaataaaatttgtaataataagtttgtcgaaaaagttattggtgctggaaaagtcttcggaaaagttacaggtgttagaaaagtcgtcagaaaagttattgttgttggaaaagttgctggaaaagtcattgttttcggaaaattcactgctatcagaaaaatcagtggaaaggttaccaaatgtagatgtctcacatataaataaaaatggaatcgattctataacataataaataaaaataaataactcaaatagcggttataattgaaatataaccggttctgtaacataaagaataaaaacaaataacacaaaataactcaaattagttataattaaaatagaactgattctataacagtgttatgataaataaaaacaaataacacgaaataattaaaacaggttataactaatatagaattagttatataacataat

SEQ ID NO: 91744 - DNA, 756 bp, Cannabis sativa
gaatcccaaaaacttttctgaggagactccaaaggaacatttttttgggtttagcttcatgttatacttttttaatattttaaagcattccatgaggtctgaggtatgatccctattttttattgatttcacaaacatatcatcgacgtaaacctccatgtttcaccctatttggcttgcaaacatttcgtttactagtcgctgatacgttgccccagagttctttagtctgaatggcatgactttataataatagagtcccatgttggttacaaagcttttatgttcttgatcttggacgtacatttttatttggttatatccagaatatgcgtccataaacaacataagctcgtgcccagcagtttcatccactaaccggtcgatcttgggaagtggaaaacagtcttttgggcatgcgttattcagatcagagaaatcaatacaagttctccaagttttgttaggtttcgggacgagaacaagattggctatccacgagggataaaatacctcgcatataaaatcgttgactaattgtcaacttcctgttttagtgccccttgcctctcggaatccaagggcctctttttttgtctcttcgccgggtagtttggattaacagttaagtgatggcggataatcttaaggtcgatccttatcatttcaccatgactccaggcgaattgatcttggtttgccttcaaaaagcttattaattgctatttgagttgctcgcccaggttcttcccaatg

SEQ ID NO: 91745 - DNA, 609 bp, Cannabis sativa
cctcgttatttgtattgacttaagaataaggaaaatggttccttttcttagagctcttacaacagtatctacgaatatgaattattagaaaaaatctttcgaccctttgcccagtgaatatgagtcactagttatggggctataaccttggagaggaagtatttcccttttagttacaattgatataagcagaaaaattgcataataattactgaatatgctaatcatgggatttggacagcttgcgatatctctgtaatctgatcccaaagttatagggatttctttgatgactcacgatgcaaaagctgaatttgttaagtgttggcattctgagcggattgctcactgctcggtctagaggacttcgtctgagaaattgtatgagatgccatgttcggtctgtgtcttgcgagcaggtacccagagtcgatgccacgtcagagtgcaaaaattgtgataacaataattttgtttaccttggagataccaaagcggcatatcttaattatttaacagactaggaagccaaagaaaaccttaaggtaaccaatcccagaaccccaactgactagagcactgagacctcgaccccttctgtctagaata

SEQ ID NO: 91746 - DNA, 821 bp, Cannabis sativa
aataaactcagtagtgtacattttggcttgtgttcaagctaagaatcacaaaaactatagactcattttttaaacttcactattactaaatattgttggcactactgcccaaccaaaaggttagttctaagttttttacattcaataacttttctcaaccaaaagcagttgagaaagctatgttgctctcccagtagatatcaggacatttctaaaaaaaattgctgaaatatcaaaatagcacatagtctcatagactagattattacaaacaagacacaaatttcaactagtaaagcaatattaaatgttataaataaactagaagtgagaacgcatttgtttgtatataacagagtcaagaattccacgtgaattggttcaaacttaatcttgaccaagaccaagtaatagtatttgtcaatgtcgatcccctttacacaattacttatcattttcacaatttccttataccttacaaaacttgcccctagtcctccacccgaactcccataattacacttcaatctcaaatttatgcacttatttatagcctacacttccatatactaagtactataaaaaaagtacagtacatttaatcaaaaataagtaaagaaataagaaatggaggagattaccaattttttaaggctcctttggcaaggcagctcccaactctttagactaatccctcacctgtaaatgagaattcaatataaaagtagaagttgaatcagaattagttatatcaaacagctcctcaaagtaatgaggatataaaccacatggtcatgactaataaatccttcatgaagatt

SEQ ID NO: 91747 - DNA, 1530 bp, Cannabis sativa
ataaattgtatacttattattattatttctatttcaatttaaagttgtctacctagttgcttaatttattgtttttagaaagagaaaaaaaataattaacaaaaagatgacaaattaaatttgcagagaacatatatatgcttatatttgttttttatagtgacaacatagtgcaatgttcacatattcaaatgtctttagtttgtcaagttgctttattatttttctctttcctaaatgaagacaaaaaatttgtaatctcatatgaatcgtttgttatatatatacatatttgattttatttttcatatatatgactttattaatttctaatatgggatacattttgtatgtacatattaacaggctgtaccagtgttcctttctgagattgcacccacaagaattcgtggtggactaaacatattgttccaacttaatgtcaccattggaattctcttcgcaaatcttgtaaattacggcactgccaagtatgtcaaacttactccccactttaattatattgtgcatcaataatattaagtcagttcgcacagaaaattaatattactattcaaattgtgggactaattaataataatattactacaaatatgcacacgtgcccatttgttatactgtgtcttgcaaattattattggtcaatatttgttttgaaaatgaattgtttgactcttttattaattgtatcatagtccccaaaatcatgcttgattgttgactttttttgtaattataatggatataatattgattccactttggagactgtgctatataagacttagtttggatttaacattaataatgttactaaactaacacctgggctataatatgatgtaacgttcaagaatcttaactgaaccatgtgcattggaaaaaccaattggaatcatcatgtgaaaccccccagtttgacctttaaaactaaagttattatacaatttgattgttgaaatttattaacatttgtttttattcatattggtttgattactttgctcaccaactgtttgatcatttgtctgaatgaaacagaatcaaaggaggttggggatggagattgtcattgggtttggccggtatccctgcatgtctactaaccattggagctctcttagttgtggacactcccaacagtcttattgaacgtggtcacttagagaaaggtaaagaagtactcagaaagatcagaggcactgacaatgtcgagcccgaattcaacgaactcgtcgaggctagccgaatagctaaagaagtaaaacatccttttagaaatctcctcaagcgcaagaaccgtccccaactcatcatcgctgtagcccttcaggtaagaacaattaatatcaacatgacattcataacataacattaatgtatgtaagttagtatgagatagatatcatatattttacttttgttatttgttcagatcttccaacaattcactggtatcaacgcaatcatgttctacgcgccagtactgttcaacacactaggcttcgc

SEQ ID NO: 91748 - DNA, 535 bp, Cannabis sativa
gactttcgtagtttaccttttatgggatttgaataagtatcatcggttactttcatatgtgtttctggtttaggcgtttagcttcacttcattcctaagtcagtctaccttaccaaaaaaaggggaaaagcctagcattcattaataattgcctctggctgtccataaataacatagaaatgctaattaaagagtacctagcattttcaagaggtattatatctttactaacagacctcacttagagtttaagcgggctagtcccatacttaaagtccacccaaattttgggaataaggcgaggaatacttctttttttgtatccattaatcaaaaatactcttatattagatttcattaaaatccacttttatgagtaggttgtctaatatactctcacccttccatttaagtaaagcacatgatttatattaatctaagggatataattgaaacatcatatataaaagtgggtatatctcaatgaatataaaaatgaaggtaaaaattaaatagataaagtaaagtgggtata

SEQ ID NO: 91749 - DNA, 668 bp, Cannabis sativa
catgtcattagtgatgtctaccgggaggaggaaaacgctcatagcgtagctaggtaatgactgtgcaactgtcttgataagaacttccttacccgcccttgaaagaaacttcgattcccacccttgaatacgcttgcgaactctttcctttaggaaacctagcacgaccgttttgttacgagacatggtgctgggcaagcctaaatacaagctgttctctccagcgatggtcattcccaggaagttacttatgtcgtttcggattgccaaagtagtattcgcactaaaaaagatggatgacttggagaaatttaccttctgacccgaagccgcttcaaatttctgcaacacttcttggattctagtagcctctgcgttagttgctttgcagtagaggtaactgtcatctgcaaataacatatgggatattcggggtgcaccgtaagcaactttacaaccatgaagcaatcctcttgattcaaagtgatgaattaaggcagtcaatccttcagcacacaaaatgaataagtatggagaaagggggtccccttgtcggatacctcgtgaaggtaaaatgggtcccatctcacgcccaccatgagtcacagtataacgagctgaagacacacatttcatcagtaaagggatccaccagttctcaaagccta

SEQ ID NO: 91750 - DNA, 856 bp, Cannabis sativa
agacaaagtgtatgagtaggacgcgatctgttagtaagacgaggtctatcagcaaatactcccaaccagatctacaagagcacttgaatcagaagaaacctgaccttcctcaacagctcgctccaaagtaagaggatcccatccaattgcggataaacgagctggaggacaagttcatgagatatcaagtgggggaactagggagacaatctcaatacgactctgacgaggagcttcagcggtaccatccaaatatcatgagtaacgcttttcctttgggattaaaaacccgcatgtctcgtcatatgacggaaccactgatccagtctcgcatttgaataactttaatacaataatatgagcgagtaatgtgacgaacaatctacgttgtattttgttccccacctcgcttgttagagcggcgagcagctggtttaacaagtttactactcaacattcgataacttcctgggagcaactgtcgagggatttcaagaatcaattccaggctgctagggatagatgaccggaagcggcctcattaaccaatataaagcagcaacccggtgagatatttaaggcatacttaagtcgctttagctcggcagtagcaagggttaggaatttggatgatagcagacaactcacagccctttaagcgggaatctctactgattcatcaaccgtagggggagagttgtgggacagtttacaaggtcgttcagctagaaacattaccgagtttaatgagagggctcaagtattcattcgaaaggatatgaacttgttgaaaacaagctcgggaggcaaacccaacaacgttttgacaaaaactgtttcaacaagaattaataac

SEQ ID NO: 91751 - DNA, 1066 bp, Cannabis sativa
ggtaattatatcattaaatataaactagaagaactcattaaatacagaataaatagagtatatttataactcattgactgtacggtcttaagtgagatcagaatgtacaaactatcaattcacgtattgacgagaagccattttgcatcaaaagacataatctcgagggagacatagagagcgcatagcaaggcatctacctcgctatatgtaaagaagcattgatgaggtgaagtaattcttagaacacttagcatataatatacattataataactaactataataacttgaaggacatattgtccagtctgcaaggccttatggtcaaagagcagttcttaagttttcttagtacactggcgctcatgccattggtggaatgcaagtaaactaagtcattcacttaagtactaggcgagacgcctcagcgaggtacatttggtaggatgtcctaatccacgttagcgttgacttccttacaaacggcttaaatcacagctgtgtgattttctaatattaactgcacttatttaagtggagcgtagttaaggcccacactttcagggaatattgttatgtgatttgaacttaaatgtaattaactgctaacttatattactataaataggggcagagtatacaaaaaaaagaggggacacaaaatctaaagaaaaaaggggagtaaactgattataaaccctaattttgtatccaaaaatatctgaataagatagactcgtggactatgtagagttaactgcaaaaccacgtaaaaatcttggtgttattgttattattttctttatatttgtgctttatttattacaaaataggctcataatcgttaacgaaaatctgcgttaatagtttggtgctttcattgaaagcctacgtgataaacgcttagaaaaatccctcctgactaaagaatgaatctcttccccatgagtgacaatggggaaaatgacaacaatcgcttacgattccattaggtatgtactgttggttgaattggtaaaatcgtccactccggcaatgtttgactgaggcaaaccaatgaaat

SEQ ID NO: 91752 - DNA, 769 bp, Cannabis sativa
gtagtattctaaaactggagtagaaccataaatcacatcgatctatcagacttgaactagtatatatcatggtattgtttttattgctttactgttttaatcgtttatgggtgttcatactttgttcatccctgttttcaccgattaatgttttagtattattattgtagtcattactaatcatttgattttttaaagtttagttgatttgactctacactattagtcgtatttttccataaatcagagccttgtaatcgatcaagaacgtagaatcaagatttctgttgcaattcttgaagaaactctacacatcatccatgacgagattcaaattggagaaatatgatagaattaggggctttgcattatggaaagaaagtttgaaggaatcttagtgcaccagaaagtctccaaggttcttagagatgagaagttattggtagaaaagaaaccaaaagaaaaggcataaagggaggagatggcttactacaaaatcatcatgtacctgtcaaatagtgttcgaagaaaactcatcgcagagaagacatcaaaaggagtctgggacaagttagaagaactatatttaaaacaatcaattgctagcaagattaatttgctagaaaggttatacggttttagaataatttttccctttctttaggtaataatattgacatttatatgagattattgtaggattgactaatataaatcacaaggttgatgaagaaagataggccatcattttgttgagatcgctcccaat

SEQ ID NO: 91753 - DNA, 877 bp, Cannabis sativa
  modified_base (192)..(194): a, c, t, g, unknown or other
ataaatgattataaaaaaaaaaaacacacactctttttaagtttcattaaaatgaaaattgtctaagtaaataatgatattgtacatatagggtattgagtgagctttcccttgatcatgtcaaagtgcatttgttgtgtaaacaataaccacatttggtgattcttactttctcaccattctgaaattcannngcacatattgagcattggtttgcaattgcaaatatggtatgcccttcgcatggatatctttaactaatgagatagcaataatcacatatccaccgtattactaattaaaaaaatagcaataatttatgagattcttatgagataaataataatatttatttattgatataattaatattacacacatatcataaatgattataaaaaacacacacacactctttttaattaatcattaaaatgaaaattgtctaagtaaataatgacattctacatatagggcattgggtgagctttcccttgatcatgtcatgagtgcatttgttgtgaaaataatgaccacatttggtgattcttactttctcaccattctgaaattcataggcacatattgagcattggtttgcaaacagggccggccctaggcataggcgagctaggcccgtgcctaaggcctacactttccgggggcccaaaaaaaaaaaataaaaaaaaattattgggcttttattttattaaaatttaagtgtattatgaacaacaaatatttatagcttagttggttgatgttagtggtataatgtccatgtcaagggttcaaatcccatagcactcttcttttatatttttttttatatatattttgagggcccaaaatctaattcgtcttgggcccatatatt

SEQ ID NO: 91754 - DNA, 1321 bp, Cannabis sativa
  modified_base (173)..(176): a, c, t, g, unknown or other
agtaatcaaggaattaataaacaaagattagttgattgatgagactcaataaataatctggtttattggagcttagaattataggtccatggccgaatcgccaccttgaaacacggtcatgggtaaggataaagagttatataatatcttttagaaaaatctattttgaattnnnnaaatagtaattatttatttttttaataaataaataattttttaaattaattcaatagggaaagacaaatattattaagacaaaatttgttaagacaagattcgatgggataaaaattgtcaggacaaaagacacaattcttcttatatttaatagacaagggtaggtacctactatgttgcggtccctatggattttttcttttgagttaattaattaattaagtcaatcaaataaatatatgaattggaaaagtgattataaatatttcaaatttattgagatatcttctcaagtagttgagagattccctcataaatatcgataacataattcggttatagatatttatttatttaaataattaaatatgatttaattaaagatcagtctttcattgaaaaccacatctctactacaaatgacctttttgtttttatcatcccaaatacagtagacaaactcatcccttccatagccaatgaaagtgcatttcttagattaaggatcaagcttattcttgccttgatcactaatatgcacataagctacacaactaagaacttttatatgtgataggtttatctcttttccactccatacctcctctagtattatgtactctagtagactttatgggcctcgattaatcaagtaagctattgtgttgattgcttctgcccataattgctttggtaaacctaactgtatgcgcatgcttctggctctttctatcaacgttcagttcatacactcagcaacaccattatgttgaggtgtgctaggcacagttctctccattatgattccatgctcataacaaaacttcttgaatgtgttctcttcatattctctaccattgtcagttctgagaattttaatcttcagacctgtctcattttcaaccatagctttccatctcttgaaatcctcaaacacttcggacttatgcttcaaaaagtaaacccatacctttcgaaaaaaatcactaataaaagtcacgaagtagtgtttcccaccaatgtatgaagtagttgttggtccccaaacatcagagtgaacaagctctaatctttccttttttggggttctactacttgtctaaaagcttaccctcttttactttccaagtacgcattcttcgca

SEQ ID NO: 91755 - DNA, 554 bp, Cannabis sativa
gaaatgatgccaacaagctgcaccgaaatcccctgtgtacttcgagcacgaactcccagcttctgcaggcagagtcttaactgcttggctcgaagaggcagcaacttgattcgctttgggaatggcctcatcagtatgtgtggcggccgtagtcaaccttttatttcccttcttgcttgaagattgaaagaggttctcgagattcatttatgcatgacaaaacaatgtgttaatatttgtctgaaaacaagtaaaaggggaagttggaacacaatttctcgcctaagggatttaccataatcataagaagacaaggtaggaggacaataatattcaataaagtctctacatcctgtgatcctgaatatatcataggagttaattggttctaaatcccaacttgtatctatatgacctgtcctatccagcatggtcccacactgctcggctatcccataattcaagtcagtacaactaatttagacgtagaattctgggcaccaactatcaaacctatatgcaatgcaatctatgaggaggggattccaggtgta

SEQ ID NO: 91756 - DNA, 1316 bp, Cannabis sativa
ttttcggttggtttattaccaaaaaaaaaatcgaccgtttaatggcagttttaaccgttagcggttttttctattttcggttttgtcgatttcggttctaacggtgttcggtaggtcggtttgaacggttttttcgatttcctggattttatactcacccctaacacaaaacaactagtgttacaaattcaataaaaaaattaataaatttttttaacatatataaatataattggattggatcgatttttaattggattttgagattgatatccaacaaatgatctaatccaattgatatctaacttttagcatcgaattcaatctaattgtaattggatatccaattttttgtaattggattaaattgaatcagtttgatttggtttaatttgattggatgttgcccactcctaattgtgagggtcaccaatttgtaataactttgtgaaattaggacagaaaaaaaagtatgcgttcacaaatttgtagcaacatttatttatagaattatgcacacgatgttgacgtggcatgccacattagcaccaacaaaatactaagtacctataagtaatttgttaattaagtagaactgaaacagacataacataatttaataaaataaatatttcaaaaggataagcgaaaaagtttggccaacataatatgaaagtgataataatttagggggatgaatcattttcactctttttctttattcataatcgtgcactatatttattgcgtatgaataattttcttgtgcacaattataaatgaaaattggactaaaactttctattaaataccaaaataaatatgattatatcaaaataacatacttcgagttaacctaaatcattttacagtataaatgctctagggttattattttttttctttaaaaaaagatgataaattgtttaatgcgtgttttgcatcagttatgggtttttacctgtctcctttagttttttgacaaccttttcttcttttctttcttgtttcaaatttgcatctcagtgtaactgttcctgcctatctaaccctaatcccttccgcaattttctccattctttttctagttttttatggtttttatctgcttcaagactggtcttttcgatcctcattactttcccatggattcaatcttacacaccctaaactctaccttttcactcactccatcatcacattgcgtgatgcctctgcttcaaaccctttgcacaaatcaacctatgctcttattgctcaagttctctctagtaaacctatctacaaaattaaacaaattatatgtacactttaga

SEQ ID NO: 91757 - DNA, 574 bp, Cannabis sativa
tgcaatcggttctagtatgggtttgattataaggtttgggtcttcattattggggtgttaattgccttagtgcccttgttagcactataggtaaacccatactaatcgatgatgttaccaaagaacagactctagttaagttaagtttgccgcattttagttaagatggagatcaagaagaaaatttccaactttatttcctttgaaaatgaatgggtcagattactgaggtgccaattgaatttgaatggatccctgccaagtgtaatgcttgcggggaatatggacataatacaactatctgtaaaaaaaaaaaaagtgaaaaggtgtggaaactaaaagctcatattgtgggtatggctactaaaaatattcaaaagaatgataataaactaatagctaaaaatacaaatacataggagataattgcattggctcctatggatcaaaatgatgctaaattagaagagacattggtagtggatctttcttctactaatgtttagaatactaccatgattgaggctatggagaagaacaatactaatacccaaccattgattcaattggaggg

SEQ ID NO: 91758 - DNA, 1616 bp, Cannabis sativa
tttttttttttttttaaataatagaaaaatgtatggtttggtcttgtttgtaaatgtttagttaaatggttttaaggatattttttttaaaaaaaattaataattttcttgttcattttatttttggtactaattcttttgtgtgtaataaatttttgtttggaaggcatgtttttgagaccatgcatgaatatttcttgaaatagcaaataaaatattgttgtagattttgattttttctaatccattaaaaaataaaataatcaaacaagataaattataatattatctaatgttgtatagaaattagcaaagatcataaaattaataaatgatatcaaaggattcaaatttcaataatcttaatcttatcactttcttttaaatttttataaatatagatataaagatataaaaaaacaattctttgtactaaacatgttttttcagacattaattataaatttaattttatgtgaatttaatatatttaatttgctaattagtatctaagatttcacattattgaagttatatttgttaagatatttaggatttaaaagaaaaaaaatgtgttgattggcaattattattatttccataataataggtgaaattaaagtttatccccagaagagaaaagcatatataaaaaatgtaattagatctagataaataaaatataaatatatccatttaacaatttcttatttaataaactttgtttttttcttcccagatatatattatttaaagtgagacaagtaccatgttttgaagtcatttaaattcattgtttgttttttttttttttctgaaaaaaattaaaaaaaataataaatgtgtatttttgtgtgattaattgaatgaattatcaaattcagattacttggttacatgatatgtacttgaattattattattgttgttgtctttgaaatactaaagacaatattaataattgtaaaataataatttaacttggactaaaagcctaaaatatgtgaactcaaatcactattttttttagctaaaaattgttagatagtgattatttttaatttatttataggaatttaaagtctatatataaaccctatatatatatatatttaacatgattgtgtataatataattagataaggtctttttttttttaaaaaaaaataattagcatactaaaatcaatattcaagtaacttattgcaattatagttatttcaatatattattcgtgtacaataatttatttgaatcacgagttgcatatcttaaattatttaaaattttataaaaaattatgaatattttctataactacatattaaagaaaaaaaaacccaaattttaacttattaatgtacaaaaaaaaaaaaattaaataaccactagtgttacacatacagatagatcttaaccaactctttttaaaaattacatagtttggtgaatttggtaatactttatggtaatagtaaaaaataaaagctagatggtaaccaactcaactctacttgatctatgcacatgggttagttgatggtagtttggaaggtttatgacttatttacacaaaggtgaatctaaagtatttgatttgatattgttttgtttt

SEQ ID NO: 91759 - DNA, 616 bp, Cannabis sativa
acccaaccaccctcctcaaaaatattgatatatatagattcatatatctgatgagttactatatacatatataactaagtttacctttttaaaataaaaattcattgtatatataattatgtattgtacttttactttatttgaattgaatactatgatatgtgtacattttttttttatttctgtgtctaagaaaattttttaatttatttttttataatcgtattcattttaattatttcagacattatgtataattttaaaaaaaattagaataatttacaatattgaaaacaattttcaaatagtatttcacacgcgtataaaatcatagtcacccatgcaataggttatttaaactatattttcagtgtgttaattttttctaaattttttaaaattttgcaaaatatcttaaataattacaacgtacacgactataaaaaaaaaattagactaaatttcttttatcgaatgttgaaacagataagagtaaaaaaatttctcgaatgctgaaaccgataaaagtaaatcagtgcatcatttctagaggtactttgtataattttcctatgtatatgtgacatcttttaactaaaggtgcattaattattta

SEQ ID NO: 91760 - DNA, 990 bp, Cannabis sativa
ttcctcgcgtgtttgcatttttggccaccaagcttcatgtttcttatcgccatgaccaacttccctaacttccttccaccatgcttgaagctctgtgtccttctggacagttgcatcagtcttgtagtagaaagaacagtattctttcacccatgttttaatggcagaccaaatctctagcccatcaacagcgtaaggatagtcctctattagtaagcgaacgccatgtggggaattttgatctttaactgctactcctctgcatatagagccataaaataatatattactaagagaaaaacataacaaaaatgtgttgaatattagaaaacaacattagcttttaccttttaaggagatctgctgggagtgcttgctcagtaaacttccaatccttgtaaattattgctgacgattccaatgcaaactttccctggaaaaatgtggactctataatgccgtcagcactaacgagactctgtctagcaagtgcatttatgttcatggtatcacggtaatgagggtgtaatagtttgtagattggatggagggcacttagttgcctgtttgttgctatcacaaagggctcaatcacagcatgagtattcaacctgtataacaaccgaattcaagtccttaagaaaaaaatatttcaaactcaataaaactcaacataatttgatagtttcataccaatgactattgagctgatggtagccagaatcatttacagctgcataagctttagccaattgccaaatggtgccatcaacaccatcttcagatggggtatatactttactaactacaccaaattcatcaccatctggatgtggcaagcttaattcgatggcaataggcctcaatgttccgtcgttagccaaaaataggagagttcgagttgcataagcctttgtaggtgttgtgtttatcctcctcagatagggaataaatgaatcatggtgatccaatatatataacctattttga

SEQ ID NO: 91761 - DNA, 867 bp, Cannabis sativa
atatattactctttattgtataatgtcaaataattaatgataattttaaaaaatatatctttttttaatgttttattataattttactatcaattaaaatttttatttataaaactacgcttttaaaattttaaaatttcaacaatatatttttctaaacaaaaagtaaaaatgttattaacacacaaccagaaaatcaacctaattacaattataaattaaatataaaacaatcaaaaacaactaaaaaaatgacaactataatacaactataaataaattataaaacactcaaaaaaataatttattatttttattgaaaaatatatttttataaataaaaaacttcaaaacgtaaaaataaaagaaaaattatcttaacatatttttgtaattgttttcaaaatttgaatttatgtaaatatttcaataattaattcacatgactatttcaaatggccggtagtgcaaattgcaattaatcaacattttatatgtacatataaaaatacaataaatatcctatcattagttaagcctcccccctcccaaaaaaaaaaataaaaataaaatacagcaattaaatgtaaaataattagcatttttactctctaaacttttgaaaatattgattttggcccttaacatatccgacttgttaagaattccccttgaatttttacatatacagaaatgtagtccttctgttaggttctgtctagaaatgactacggggtggggattggcggagagtgctccccccgtccccatccccgttaaggattttaatccccattcccgcttattctccatcaggaataaggaggaaaatcccctaatagaaacggagacggggcgaggaatccc

SEQ ID NO: 91762 - DNA, 752 bp, Cannabis sativa
acaccagttttggccaaaccaataaacttaagaaactttatacctttatttagctatctcagaacatgcaattagtgcagctttagtgcgagaagagggaaaacaccagcaacctatttactatgttagtaaaagattactaggggcagaatcgagatatgcccctcttgaaaaacttctattatgcctgattcatgcatctcgcaaattacagccatacttctaggcacatccaatcaaagtcctaacggatcaaccactaagacaagttttatcaaaacctgatgctttaagaagattgataaaatatttaatcgagttgggataatttgatgtacttaccacccaagagcatcaatcaaaggccaagctttggctgacttcctaattgaagggacaatctcaaaagaagacccagctgttgagcacgatgcagaaacttggaagctatacgtagatgaggcttcaaatgagaatgtgtcggggcagaggtcataatgatgtcgcctgacaacttcaaattccactacgcattgagatttcaatttgatacttcagacaacaaggcagaatacgaggccttgttagctggattgagaataacatagacattaaaggttaaaaatcgcgtatgatttagcgactcacatttaattataaatcaagtcttgggggaataccaagcaaaaggcatgaaaatggaaaatatatttagagaaggttcggaagaacttggaaaagtttgattattt

SEQ ID NO: 91763 - DNA, 729 bp, Cannabis sativa
ggggatggatatagtaggtcccctgccaacggcgcccgcctagaaaaaattcatgctgactctcaccgactacttctcaaagtggattgaagctgactccttcgctcaaataaaagacggagaaggggaagggtttgtctggaaaaacatagtatgcaggttcggactaccttaggagatcgtggcagataatggttcccaattcatcagccacaagttcaggaacttctgtgaacaatggaaaattaaactcatactctcaacgccacgctatccacaaagcaatgggcaagcagagtcgtcaaataaagtcatcataaaaaatattaagaagcgactcgaaaaagctaagggaagatgggcccaagaatttcctggggtattatgggccaaccgaacgacgccacgcaccagcacaggtgaaacaccgttctcgctggtatatgggatggaagcagttatcccaacggagatgcaagtacccacttcgtgagccgaactaagcaacgaggacaacactttcctcagactacaagcagccgacgatgtcgaagaaagaagagaatgtcctttatcccggatgcagaactactgttccgcggtggcgaggcaatacaataaaagagttaaacccaggaacttcctcctgggggaactagctctaagaaaagttttcctgaataccgaagaggcccaagcggggaagctatccaccaattgggaaggacc

SEQ ID NO: 91764 - DNA, 576 bp, Cannabis sativa
ctctctctctctctctgtatcttcctaatatggtatcagacgcaaccttgtgcaaccatcaagaaatcatacagagctagggaatcctacaatggtgcgcacacgagcaacatcttctgctaccaccgctggtgatgtccctacggttgatgctaacaatcttgttgctcctccaccatctcaacactcagctggcattactcgatctccattgctagctcatcgatctgctgttcaagatcgcccaccttatgaagatgtgcgaagtccctactacctaagcacagcagatcacctaggttcgacccttgacactcccgttctcatgaatcgaaatttccacccctagaaacgtgacttcaaactttccatcggtgctagaaacaaaattcaatttttgatggaacgattccaaaacctcctcgtgaagatcctctcctcaatctttggcttcgatgtaaccagatggttatgtcatggatcttgcactctgttttacccgaaattaaaagtagcataatgtatctcgaaataactgcagagatgtgggacagtattgaacaatcggttcaacca

SEQ ID NO: 91765 - DNA, 1104 bp, Cannabis sativa
atacaactatatatatttttatatagatagaaaaaaacaatagcaaaatatctattatattgggtcatttttttcttcttctttatatatcataagatgctataaggtaaaatccttgcgttatatataaaaaataggccaattatttatttagcgataattttttagtcataatataaattttttgtaactaaatgtaacttttagtcattacaaagattacttgtaactaaaacataatatttacatacaagttgttactaatttagttttaattacaaaaaatattgtgactaaaaatatctacacaataaattgtgatttttgtgactaatacccttatttatggattttttagttacaacataagaagatgatttataattagtcacaacttttttacttttaattataagttttgttgactaaaagtgagatttttgtagtatataaatatttaggatttttttttttatttttatacttcaaaataattttttttatatatttttacgaaattcacatagtaacacatataacaactgactgagcaacttaaatcgcaactaaaattgtagcgtccccgcttcaagcctccattaggtccttacacctatggaataattgctcttatacacgagtacgttactccggttgcttcatggatagataactggccccacaaaccaacacgagtgtttccagcgtgctttgtcctcactcgcacgcttcttaggaaaacttttcaggaagtcaccaatcttgaaattaccctaagtcaagtacgcttaattgtggagttctttcgtgatgggctactagaaaacaagatgcacattgttgatataggtagtaccaatcaatccatttaagtcatcttcaactatgtagtctcatacttatacagtctcagattcatcccgcttgaccttccccaagcagtgtgggactgcacaacttaattactcggtatttcttcttatggatcatgagactactcactgttacaaaagtccatatagcaaacgaggtcataaaaaacctaccaaaacaactattaaaataatttaaacaaccgtaaattaaacaaattaaataataata

SEQ ID NO: 91766 - DNA, 1048 bp, Cannabis sativa
attataatttggacagatactattttatattataagattgattatgttttaaatatattagtaatattttcttttattcaaaataaaaaaaatatcacatttttttttttttaagttctagtataattccaaattatattaaaaaaagctggaatcatgatatcaactccaaaatttttgtttaaaataaagattgctttaatttatgctaatttatcaatccatttaatttaaattctataattaaaaaaaaaaaagtaaaccaaaatattataataatgaattaaaccaattataatagtgtaactagtaagttttcttaatatttgattgttgttagtatttttttttaatatataaacttccaaaataagtgtattatttttattttttatttattttatatataagtggccaactaaacaaataatttttaaactttacaacaaaaaaaaaattatagtaaaattaactaaaatttgtgctgatttatattttttaaaaaacattatccactgatacaacaacactaaatatttgtaaatataaaagttgaacgaaaaatattaacaaaataatattttgaaaaataatattattttgggcctttatgttgaaaaaaaaatgtgttaattttcaaaatcaataaaaaaaaacttgtgtaattttaaaaggaaaataaatttataggaccctgggctatgtaagccataggcacaagcctaagccgcctataaatgttagtgcattttgacttctactttattttttataaccattatcttagttcagtctaatttattttataattttcttaatctggttgtaaggatggcaattatacttgtgggtacccgcccttatgtaccacgatatagatacgttatgattatccattgttacaatgctaatagtcaaagatcctctatagatgatggacgttgaatagggacaaatttactattctacctttcaatgtattttatttttaaaacacttagcaacctataaattaacttcagtaaagtaatataattattgaaatgag

SEQ ID NO: 91767 - DNA, 796 bp, Cannabis sativa
  modified_base (34)..(62): a, c, t, g, unknown or other
tttattccattccattcctattctcattcccatnnnnnnnnnnnnnnnnnnnnnnnnnnnnntcccaaccaaacgcctccttagagggatgggcagggttgcatcttcgggacgatggtggaggtggtgggagaattgcatggggttagggttatgggtgagacaatagtttcaaattatgaataaaagaaggagatgagttgtgagaatgttagtttggaaattattgaaaataaatatatcatgtaataaagaagttcaaggcaatataaaaaaaaaaaaagatttttgtgatgtatttcgaagattaaaaaggagtattgtaatgctaatataaccacctcaaaattctgtctctttctatagatttaagaatgagtaccgttgacgctaaaaagtggtcaacacttactcgctatattggcgagatgaataatgagtttaagtaaaacatttggagagatacaaacaatttatagtagtttatttctcatgtcgcgacagtaatggagctacgtctacttcgagtttttatttctcaggagatgctaactacagaaaaggttaagtgtttaagctcttgcttctagagaaagaaactagagacagatgctttgaccatgtgggtagtttttttaatatggaaaatgaactacgggagctctccttttataggtgaaggaggcctacaaaaatagagaaaaaaaaatataaatttgctatttttgatcgtagataatgatctaatggtgaaaattaacttctggggctaatagtcattttttgaagctcggta

SEQ ID NO: 91768 - DNA, 747 bp, Cannabis sativa
ttgtgactcggaaataacttgaggtaggtacggtttcagccttaaaacaatggatttggaaacaagtttatagaggacattacaaagactgataggccgtagctgagtcatatttgacggctttttgactttggggataagagttatcaatgtttgattgaaaatggtaggatctcttctctcgttaaggacttgtaaaacagaacaagtaacaagatcgccaactatgtgccaataattggtgtaaaacattacggacatgccatcgacaccaggactaccatctgaattcattgattttaaggcatcatagacttcagtagcagtaaaaggccgtgtaatctcaatattatcagcctctgtaattgttcttggcaccttagattgaataaattgaagggccgcattatccacaccatcagtagtatagatgtcatgaaaataatctttaaccacctgagctatagcagtttgtgaagtgtgctccacaccagtagcatcagtgagctttttaatagtgttgttcttcttacggctattagctttttgatgaaaaaactttgtgtttgagtcacccgatttcaaccaattcatacgagaacgttgcctccaataatcttcttcttgtgctagtaactcatcaaggatgttctcacagtgcttcagttcttcaaagtgttcaaaagtggtggcatgagagttttgtaaggcagaaaccttgtgttgtgtgctattaatctgccgagg

SEQ ID NO: 91769 - DNA, 525 bp, Cannabis sativa
gctaaaattaaaaatgaatatattcctagtccctagccttgtgttttacttctctgtacttctgtataatttgttttgtctcctcataagtcataaattggtttatttatttttatatccatctaaaattgataaaccaacatgcttcttgattatatttctttctttcttatgtgtttgaaatatgtttgtttatatattcttcagtaggccaaggtggagacttggaaataaagaactctctcaattgtggaaatggtcagatcagaatccggtgtgttatcttgcctttctaaaatgattttattaacactaacatttgccaggatgtgaacttaattaacttccaagtaacactagaagtggaattatttcataatgtcataactatctttgatgtgtaaagttaaatcttttcttttgttaatttagaaatgagaatcctagcaatatatataataacagtaacataattctcagttttcattcctttaatcttttaggggaatgaaaagaaattccctt

SEQ ID NO: 91770 - DNA, 1230 bp, Cannabis sativa
  modified_base (872)..(877): a, c, t, g, unknown or other
ttctctttaaatttttgtttcacattagggacaatatgaaattttaagtttgggggaaggaattaattttatttttcgttatttagctttatttttttttagttgttaattaagccaatatcgattttgatgcagttgttatttgtggaatggattgaaattttaaatcgtgtgcttgattttttttactctttaaattaatttggatgcttgtaaaaattttgtattgatgtaaattgtcaatagttggattgtatcataattattttactttagtttatggtaagatttattgaataggatagaacttgcatgaattatttttttaggagaaatccttgacaatacttgtttgggtctttcaagcttacctttatttttattatccctaatttgtctgtttgagattagcctattcaattatttttagccactttatgatactaactttgaatccacttgcaattctctatctttgtcccttgaattataccataggcttagaaataagtttaggggagatgaattgtgtgtggataaaattattatttaaagtgggtgattaagacaatgtgtgaattgtaaaagtatttttcaacatcactgatgttatttatgttctgaaaaaaaaaatgatgattaaaaaaaatagacaaaaaaaagaaaagaaaaaagtgttgaataaataaagtgatgttggaactaatagttgtaaaattctcaatcattaaaatttttgggtacaatttgaaatatgcaatttattgtgggtgattgatggattataatgtgcttatggtataacatagcctaaataactttttatctacctattacttaagcaaatacattacaaccttgaaagtcctttnnnnnncgagcaaggattgttgacattagtagagagaggtaagtcatgcaagcatattgatcattagattgtggaaagttagaaaaagtagaattgatatgatatttttcaaatattgaagttaatttgcatctttacattatttttcaaagtaagcatccgaattaattttagagttttgggattaaaattctggtttaaataattgattgaagtttcacaggttgcagcagcaatttgattgtctaaaggcttagttaattttgtgttagtttgtgtttttttgtttctctgtctcagtttttagtcttactcgagggcgataaggatttagtttggagaaatttgttaggctattt

SEQ ID NO: 91771 - DNA, 535 bp, Cannabis sativa
actccttctgatcacattaatggcgatctaaggtatatataaatgtatatatatatttatttgtttatgttctgtgattgattgattgattctgtgtagactttattaatataaatttcaaattaggttttgattgcatgcattacttctaatgcaataaatattttactaaatatgctaaatttgtttctaaatcaagagaggaaaactgggttttgttctgtttatattattctaactcatgttgatgtatatgtgatatatatatatatatgtgtctgtatatactaaatttgtttctaaatcaagagaggaaaactgggttttgttctgtttttcttattctgactgttgttagtgttgaataatgtatgtatatactaaatgtgtttctaaatcaagagatgaaagctgggttttttttcccttttcattactctgaatttctattggtgttgaataatgtgatatatatactaaatatgtttctaaatcaagcttggaaaacttagttttgattcataattaaaagatg

SEQ ID NO: 91772 - DNA, 907 bp, Cannabis sativa
catccacacatatatcaaatgttttactctttatttaataataaaaaatatatttacaagctttttaaggcataaaccctaacaatctcccacttttcctaaaaataaattgggcgtctcccttaatccaatattagcaatatgacccataaaaaatttcgttggtagcgtctttgtgaattaatttgccaagttatgttttgaagcgatcttcaagaccgtcacatcacctctctactatattccttagtagatggtactcctctcatatgcttgcctctcttgtggctccttggttctttagagttagccaccactctactgttgtcatagtagagcattagtagtttttctacttctagaactacttgcagagttatgtagaatttattcaaccaaaccactttcttagctacttcacaagctgttatatattctgcttccatggttgaatttgtaatactagtttgcttaatgcttctccagactacagcttctccaccaagagtaaatactgacccaaatgtcaactttcgactatctttgtctgattgaaaattagaatcaatatatccagtaggatttaactcttcaccggaatatacaagcatgagatctctcattctctgaagatacttgagaatgtactttacagcaatccagtgttccaaacctggagtagattgataatgactaacaatcctcacagcgtagcatatgtcaggcattgtacacaacattgcatacattaagctcccaactactgatgcctaaggtactttctcatctcctcttcctcttgaggtgtttttggacattgatccttacatagagtaatttcatgtctagacggtaattgttctttcttggaattctctattgggaatctttctagcaccttatcgat

SEQ ID NO: 91773 - DNA, 820 bp, Cannabis sativa
ccgggtattgtgaatcagaaccaaggggcatttgtgcaagggagatctatagctcataacgtcatgattcttcaagacctcctgaagaattaaatgaggaaaaacatatctccgagatgcactatcaaggtggacatcagcaaggcatatgatactgtcaattgggaattcttggagaatcttttgaatgaattcaagctcccgggcatattcatatcttggattatgacttgcttaaaatcgacatcctactccattttgttgaatgggcgagtcccagggagtttccaaggcaagaaggggttgagacaaggtgacccgctttctcctctcttatttgttctaatcatggaatacttgaccggaagattgatcctagctgccaatgaaccacaattcaggtatcatcccttatgtaagagtattaagattgttaacctgagttttgcggatgacttgatgatattttgcaaaggagatcttgattctattcaggttataaggaggatttggatgaatttagtgctgaatctggtcttaccattaatatcaataaatctcagctctactttggtggtgtgaaagtggacgtaaagaaagctataatgacagaactggctctccaagaacatgattaccctctcaaatactagggagtccctttaagaccaactaaatggaaagcggaggattgtggtgtgattattaagaaaatcaagcaaaggcttcacacttgggctaaggaactattggatgagtatctttatacttcctcatagtgtcacgagggaggttaagaaactttgtcgcgggttccttt

SEQ ID NO: 91774 - DNA, 555 bp, Cannabis sativa
atatcaacaaggtgcatcttgctgttcaatagcccatcatgaaagactccaaagttaagcgtgcttgacttggagtaatttcgggatgggtgacctcttgggaatttttcccaagacctgtgcgagtgaggacaaagcacgctagaaacactcgtgctagtccgtagggtcagtcgtcattccaggaagcagccaaagtggcgtactcgtgtataagatccaggagtccgtgggtgtaagggcccaatggaggcttaaagcgggggctctacacaatccacttggtcaacttgaacgaacaagttaatgaacataaataatacacttgaacgagaacctaaccatctcaggattgtgatcattgatcttagatcaactaattgatctttacttaaaaaagacattacggtaagttaatgatatcttttccactatgaaaatcggtccactccgatgtataacagtacatccaatagaagcttactttattaatcccttggaaaagacataccactatgtaagtgtaagtaaaccaaattgttagttattatatca

SEQ ID NO: 91775 - DNA, 1261 bp, Cannabis sativa
atctgattatcatcgtaccatagcccctaggatctccatatgtgtgtatattaaatcaaaacaataaatttagaatatacctcttgaagcctatcagggtaattctcgaaacttctcataagttttatcccttaatctagttgatgaagaatatgcaatttggactcacactagtgcctttcaaatcgacccaccacacacaaggaatagtctaggctattaggataaagtgtataaccttgttcttgttgagttctcaacacatgagcaagaataatagagagaaaaaacaatttccttttctctctatagatttcaaaatttactgtgtaaaagtgattgtaaaagtgattttctaatttctctctaatttctcaaataatttctcaaatttctcaaatcagacttctatttatagtagttaaatcccttcaattaaatcattatttaattgtttgaataaataaatatctataatcgaattcggttactgatatttacgaaggaatctctcaactacttgagagaatatctcaacaaccttgaaatatctataactatttttcaaattagatatttacctaattgaattaattaaataattaattaacccaaaaagataaatcgcatggatagggacaagcataggggcctaccattgtctttaggacaaggaaggtgtcttttgtcctgacaatttttgtcttgaaaaatcttgtctcgatatattttgtcttaataatttttttttctatttaattaatttaaaaaattatttatttaatacaaaaataaataatcactattttaccaattcaaaatacattgttttttgaacatctttatataactctttatccctacccttgatagtgtttcaaggtggcgactcgtggaccatggacctataattctaagttccaataaactagattatttattgatcctcatcaaccaaataatattttatttattaattctatgattactccattataaatatggaattgcacttttagtcattataaaattatatttactaagtttaactgcagtgtctattgatataatcaattccagtgatcaaccttccatgtgttagttcataattagttttggtcaaatactgttttacccttctaattacttctttatcctttagttccattaattcactagtggaagtttaattcaagatcctatgtaaatttgtgcacaacatttcagttctatcattaacacttaatgggaaccaacattc

SEQ ID NO: 91776 - DNA, 564 bp, Cannabis sativa
tctctctctctctctttagtttttccccaaatcaatttttgaaagaaatcgttcctcactgatgcaagttaaacctcgtctaaaacctccgacgaaccccgaccttcacatcaaacccacgaccctcatatgagctccacaccttttgaacgacaatgctccatgtttgaacggaccaccgactctctcctctgctgagggtttgaccgccataagaccttcagtcgtctgcctctagagctccatttgctgacctttggtgtatatatatatatatatttatttatatgtatatataaataattaatatgtaaaatttatttttatatattttttttaattttgaaattggttaatttggattcttgatttttaaatattgtttgcgatattagaagagaatacatatgaggacactacaagtgcctcatttttttaaggtataatcttaaacataattttttgtatgccagtcatggagctatatttggttgagatattttaaacacagatctaaagcttattttatactctgtattttctttgatgttttaaagaaggttc

SEQ ID NO: 91777 - DNA, 559 bp, Cannabis sativa
acttatttgatacgagagatcgtaacttgatttttagtatccttttgttcgaaactgtacaaactgattgttggtcctggagcaaagattgtacgggattatattcagtaaaaagtgcttacgggtggctgcaaaaccagtccaatgttcctggtttggatactggtttttggaaagtgttttggaagataaaagttcaaccgaaggtacttcaatttgcttggagagctctcactgacaccttagctacgaaagttcaactcaccacaaagcatgtttatgttaataaactttgcattttctgcaatatggcagaggagacaataatacatgttctggtgcaatgtccttatgctatgtcttgttggcatagatcctctatcaatgttgtctcggctggttagttacaattccaagactggtttcaagacttgttgcagaataattctaaggaacaaatagaggaagccttgatggtgtcttgggcgatttggaatgctagaaacaacctgatgtggaaccaaaagaatactattgctgctgaagtagttttatcagc

SEQ ID NO: 91778 - DNA, 570 bp, Cannabis sativa
ttttaatcatcaagatataattttacataaacctaaggttaacttttttttttttttttatatatattaaaagttgacaaaaaaaacatatactcttctcttcaaaagtaaaaatttttcaaatgcaatatcatcatatttaaaacattatcactaacctataataaagatgagtagtccaatgaaccaagagccttaattacatagtctatttatattttttaaaattaaaaaaaaaaagaggaaagagagttaaaagtagtacataatacaattatgattataatctatcaaattcaataagaataatatgtaatattaactttaattattaataaaatttagattggattaattttgacttccacaattttgtgtggtatatagaaaatattaagtatttttcaacttttaactaaaaacattttttttttttttgtgaaatcatacaaaactcaatttgaaaaaataaaataaaataaaaatatattggtaaaagtaaatcgaacatgctttctataattttctttacataatgcctctttaattcagctacagaaaaaaaaaata

SEQ ID NO: 91779 - DNA, 1399 bp, Cannabis sativa
agtagggtagggttccatttttgcggtatttttgtttttggcgggaaatggtaactaaatggacagttttccatcaggtttgcgtatggtacttttcgtaaagttcggtctgtgtgcttcgcacggggaaaacatccattttttggattattttttttttttaaaaaaaaaaacacattaaattttaaatatttttatttacataaaatacgttcttttaatatatttttagagtaatttaccgtataaatacttaagttcaatttataattattgtagttttttttaatgttttgatgtatctacttaatattttttaacaataaataaatatacatgtgtggttggattttaattttgaaaaaacatttaggatgttgttttattagattttatcacaattaaattaaattattatattaatttttttagtacaattaaccataattttgtttccaaattattgagaccgatgtaattatataactaaccaacgatgtggaatctcatggagagttcgattctggatcataatgaacgctggcggcatgcttaacacatgcaagtcggacgagaagtggtgtttccagtgacggacggatgagtaacgcgaagaacctgcccttgggaggggaacaacagctgtaaacgactactaataccccgtaagttgaggagcaaaggaaggtggatgataatttaaaaattatcttctatccgcaccattgccattcctactcgaatgtagcttattattctaaataagtatagatatctattattcactaacctttgtttagtagaggaataaattaaaggctatggatttgattggttaatttttagtttttatttgtttggtaagtgaaatgagaaggttgtgaattgccaatgaaagtaggctttactaaaaattatatttccttaaaaaaataaaagggtcattcggccaattagttctaaaaagaacatttaaagtaaaagtaatagacgtggaatataggaggtaaagctatatgttaataattatatttagggtaaatactattttcaattttgtgttttgtaaaaattattaattgataagaccctaaactcaatttttaataatttatttttttaatataattaactttaagacaaattctaacacaagttttgtcataacatctatagatcatattattattaagttttattttgataaaaattagttcagggtcttatttgtacaatttagaaaatacaaggtttattttgttatttaacaaaataaaaaatccaattagtattttttgcaaaacacaaggtctaaaatagtatttacccttacagttatcaatttaaaaatttgttaatttaatacaatgtataagtttatagcatcttcaaccacact

SEQ ID NO: 91780 - DNA, 675 bp, Cannabis sativa
tatatgaaattttaaatatttttaaaatttttatgattttatttatagaaaatacaataaatttcaatgtatttttatgttatatttttattatagttgatgttttttatttatttattatatttagttgttgtttgatattttttatatgttattttcaatttatttttatattttttttgtaatttaatattatttttataaaataccataaaatgtaaaataaaaattcttaaaaggtaaaaaagattttttttatacaaaaaatagtgtaattaatatgtaattatccctattatataagatgaggtaagtgccacacatatgaacaattaaaattattctgcaccaataaatctgttactagttggataagaatatttaagtaataaatactatatcgtaaatttgtaagtatttctgtaatggtagattttgtttgatgacaatctctttcaaaaaaaaatcattctgcactcttactaaaatatatgcctaaccttcctgttcatatgaattttttttttttttcagttttgacagctggcatattagacaaaattttagaagtaaccaaattatttactattatattctctacatatcctttaaaattaaaacttttgatttttctttttgagataaaaagtttttgattttgttagttttgagaaa

SEQ ID NO: 91781 - DNA, 546 bp, Cannabis sativa
tatatgtatcatttggtttggtcaataacatagctattattacgtgcatgttgtgttagtactcaatttatatttttcagactttttaaaaatatgggtcgtgttctattagatcataaaaaatatagatcgcatcgtatcgtgtcatgtagtaattttataaggtaggcctgacacaacctgcaagtttaataattttatcgtgtcatgttttatttcgtaaaattcgcgtgtcattttatttaagcaatatacaaatgtatgtatattaatttcaatgtatatattttaaattcatatatatatatgaaaattaataaagatatatattaataaataaaatattaatggtcacataaagtattatgtattaagtattacaaaaggtagtatactattattagtacattttaatattaattttcataaatttcaatttaataaatgatttataaatatgtactacattaacattattgaacatcttaaaataccacgtagtagtaataataaaaaaaaattaaacatattatttttcaaaaaaaa

SEQ ID NO: 91782 - DNA, 605 bp, Cannabis sativa
taaatattattatacattaaaataaattttaacttattatatattatattaataaatagttattttttattataatagtaaaaaaattaaattagccacgcaaagagcggctatattacttaatttaattatattattgtatacaatttaaatatattactctatgcatttgtgaacataaacgtactaatactatacatataagttttcctatatatccggaaggtaacatcaaatgctgggggttacctctttttagatctaggcaaaaggataccgactttaattttatcctggataatctcacgtccaaactttagggttggaaagctaagacgttgtctaaagcgggtcgtgccacccttataaagtctgtgggcttgacgttgcccatgtatgttatgcaaacgaccaagctctcgagccgccttgttgctaagattgatggaatggttcgtgatttatggtgagggttttaaaagggtaaccatggtctccatctaaaagcttgggataagctttgcctccccaagtctttagggggtcttggatttagaaaaactagagagatgaatcaagcgtttctggcgaaatgggggtggaac

SEQ ID NO: 91783 - DNA, 539 bp, Cannabis sativa
tcaattacatttatatatgttaaagaattattaataattatttatataataaaaaatacaatatattaattatatttttatttgattttttttttgttgaatttgtaaccgttagttgttttatgtattaattttcaagaaattttattctattttattacatagaaatattgttgttttaactatttgaaatttttagttgcattacattgtaatgatagtgtttttatagaatattaaacttaaataaaggatgatatttaatttttaagcattttttttcttcatatttttatattaatattaaaaattatgtgtgtaattgaatatccaattaaaaaccgatctaatccaattaataattagatttgattggattagattttgaggtctaattgaattggatcggaagatgattttctaaattcaattactaattgaattgaatcgaagaagaaaatgttaaattaaatcagatgcccacccgtatttaaaacaccactcactatctcaatctcaattaactgtatagtttatat

SEQ ID NO: 91784 - DNA, 685 bp, Cannabis sativa
aattacttttaatttttttttaaacagttttcttaattaatattttagactccgaccccaacttagaccttgaaaaccgaatccggatccaaccccagacttcgacttgcccctagtcgtaaacttagacccggtctcggaccaacttgaataaaatcaacaaataaaaataataaaaaaatagaaataaaatttatagaatatactttattttttgtttttaaaattgaaaaataaaagcgatatagaacatatttttattttttaaaaaataaaaatttaatgtgattaaaaaatttaaaacaaaaacgctaccaaaataaattaatttaaaaacaaaatttggaaggagtttgatagtgcgcataaatcatgaaatgacaaaatattatatcataatataatacaaatgataaggatacatttgtaatttttcttcacaaaggataagagagagagagatgtaaaaatagttgtttatataaaaaaacaggtaaatagcgacaaaattctaaaaactttcactttggtttcacttaaccccaaaatttaaatttgggcggtaaaaccccaatagtcactttctgttagcaatttaatatttccgtccattttaagtattaagtgccatattggactgtccacgtgtgcatctacgtgaatacagtgtacacatagtacaatt

SEQ ID NO: 91785 - DNA, 550 bp, Cannabis sativa
atactaaaaataacctaacaatacctcctacaataactacttctatatatttatcttaaataatatcattctatcctatatatcaaaatgaacatatgacgccttctattcaattcctactatagtatagatcatatcatataattgttcatgtaacttaattcccatatatcattcaagtgtccattacttgaacatataactaatagattactagatttcaaaataaatatttatccaccattggtatttatgtaacgagtcattattcaccttgaccacttaattatcatgtcatataatgcggttcaaacaaattatatttgttaattatattttttctaagtcacattcaaaatggactacacctaaagcccataatgatctataaaattctaaaaataacataatttcttagaatttagtaaaatactatttaatgagaaaaattctaagcaatccactatctctccaacgagaatagtaaaactatgtactatagaataatagtcaatattttgattattacaccaattaagagagagtggtt

SEQ ID NO: 91786 - DNA, 583 bp, Cannabis sativa
gtaatgggttttatttagggcacaaaacccaacattgcccttacaacacctaggggcaacaactgcatgaagcaatcaaattttgcttcaaagcatcaatcaacgaggctaaatatgaagccatgatagctggcctgaggctgccacatgaagtataggttgagcacctagacatattaagcgatcttaactagttgtgaatcaagtcttgggtgaatacacatctagaggtgatgaaatggtcgccgaattgtgaaaatttagagacttagtaagtcagctcaaaggttacatgatcaatcagaaccccacagaatagttagccacagtagatgcacctgcccgcctatcgagcagtaccatagctgacaaagcaaacctagtgcccatcttgttcataaaagaactaagcattgttgtcccaaaagaggtcaacatgctggatggcacaccaacatggatgacacctatcgtagagcttaccttcaaactagagccttgctagaagacaaaaacgaggctagcaaactaagaagaaaagttgctgggtacctgatcctagaaaggataatgtgcagatgga

SEQ ID NO: 91787 - DNA, 890 bp, Cannabis sativa
ttggaccataatataatttatggtccacttatagtatgcacgctgatcattgtagcaatcatgatcagtactactttagccttagcattatgttcaatttgtttctactatcaacaacataaaactcgaattttgttatattaatcaacgtaatctcacctactagatcttttgacatataaagtttatatacgtaccattttcaataatattgagtctctaacatttttatttaataaataatatcaaatatattgagctagatacttcacaatactaatactctttttaaatcctcaagtacgtaagctccggttacttaattttgagtattgctaatagacattttaaagtatgataagtatctaatactataatgggatggcactatatgcatgagtggttatataatagttttatatgaattattaaattaaaacatatatgagactatatatatatatataattcaattgtcccaattaatattagaacttctatctagtacaattaatatatatatatacacttataaaagtgttataattaacaattgtaaagatgttcaacttattataaatattttaataaattgagaatttttcaaaaaaaaaaaattgataaattaataaaaaaaattaagtatgattctttatataaacccattaaaagggataatccatttataaagggacaatctattgggacttagtacactgagatcataccattattagtgtaattaagtatcgaattaagaaaataatttttaaaagatatcgctaactaatcgttgagacaccacttataaaaagtattaaaaacactagtacccaaaaataatattcatttataaaatggggtgagttgatattggcttgtaatacttt

SEQ ID NO: 91788 - DNA, 1094 bp, Cannabis sativa
tgtcaaacttaggtcaggcaagccacaggtcccctcagtaggagtatctgctcagaaccaacaatatccaattagcttaattttgagtggcaaaaggtccaataacaatggcagacaaggcaacaggtagaagggaaagttcgcaggcaaagccgaacaaacactaagaaacctccaaatcactgccttctctgtcctaactgatgacctagagataatctacatggcaacccaatttgtggtctcgtacaaaaaacctgctctaattaaaaaggacataaacaagtgggatatgcccaaatttttccgttttcatggtgactatggccacgacacaaatgagtgcaacgacttgaagcgggaaattgaattcctgataacccgaatgtgaaaacgtacgtcaaagccgatcagaatcagctggacgcccaagcagacaacaaccaagacctactaatgccaccaccagtggatgggcatttacaagtcatcattgggggcccacacatcgctggagattcaggcaaagctcgggagaggtatgtccgaactttacaacacgaacaaaatgaagtagttttggccgtaaaagaaaggaagccaaaaatgccacgggtaggggaacccactataaccttcactgaagaagatactatccacgttcagaacctgcacaacaatcccttagtcgtggaagtacagatagcaaataaaacaatggcccggactatgatgaacaatggagcttctgcaaatattctgttcaaaacaccatatgaaaagatgggactccaactcaaagatctgatcccctctacccaaccggtgtatggtttctccggccagagtgtcacacctttggggcaaattcgtctacctctcactgttggaaagctccgaggagcataattgtgatggcattgtttctgataatttatgtttcgtcgacttttattgttatgttaggccgaccagcctttatgacctaaagactgtcacatcaattttccattcgtgcatcaagttcccaacaaagaatggggtagggtgcctaaaggaaatcaacaagttgcacgagaatgttataaccttgc

SEQ ID NO: 91789 - DNA, 649 bp, Cannabis sativa
aatactactagtgctcaaaagcaaaaatcattatatgatagtgttcactaatctaaaagtcatggtatattgattaaaagaactgctaaaatgtattattggtttttaacatcttcctcaatatcataccgctattagtgtaattaagtattaagtctcatgtaaaaaaaatcatttttaagaatattgtgaactaatcatgagacgtcacttataaaaagtattgagcattgagtaaactaattaatgggcaatttttattttttttaatgggcaatttttatgttttttagaatggtttaatgggacaattaagtaaactaattttacataatttaaattgaatttgatagttttttttaaaaaaaataaaataaaaattgacttagaggagaagagattgagtactttttcttattgtctctttctcctctccttattgccactgatcttactatgcagctagtcgttaccttgaccgagagtagatcaacgcatgaggtgtgtgtagatggtggttcgtggttcgtgatgtttggcataagggtggagctaaatgatgggaagaggatggatgatggcggtgaagattggcgcactcgccaacccgtgccctattcgggtccgggttcggtttcaattttttgaa

SEQ ID NO: 91790 - DNA, 933 bp, Cannabis sativa
agtttgtacttcttatctgcgttgttgtattcactcagtaccttaatgtactagtgttggtagggttagttcatagtacatgcatgcaccatgtatatatatatgtgcatcctttgcactaatcttacatttactccgcaattaggtgtgccggtcaacctgagtagaatatacagctgaacgactgaaggccctaagtcacatttacatgaaataggtaagtgtctcgcttaaatacttttaaggatataaacttaaatttataagtttttctatcaataaatagcacgttaaaaccgtaaatttcgacaatataagaaaatcaaagaaccctaaaaccaccccattcagtccaccaaatccccaaacggttcaccatttattgggatcatgcaaaaccaaacagttaactcaaattttctcactcttttctactcgaaatataacaataccttctagaaaacctaattgcaccataataaatataattcaacagaaaactgcatcatcaaagctcagaaaatagaaatgctagtagttaaaaatcatcaaaaataatcataataaacacaattaatgttcccaaaatagtttctaaataacccaaacctcaacagaacagacttcaccaaaatcacatatcaaaccatgctttaacttaaaatttaaaaaagatatggaagctagggctaccttggatcttctcttgacaacacccttaacaaaacttttgtgaaatcaaacttgaaatgggtgaattaggttttaaattatatgttctttggggctgggtttttgctaagagagaggtgagagagatgtttaatttttgatttataaggataactataattttttttattttattgcttgttatgtgaaaaaaaaaaaatttttttataaatattaaataatttaataataaaaagtaac

SEQ ID NO: 91791 - DNA, 778 bp, Cannabis sativa
ctgtcaagagaagaagagttagttggtttatacaactaactttctgttgttctgttattggtttcaaccaattctgttatggttgttatattgcctttgtttgttttaagtcctttctcctcttgtatataaacaatgtcattggcttttcaatacagaatagagaattcatttctttcttttcttttctctgctgtttacactatctaatattgatagatttaatcataattaatgtctccagattaatgttataaatgaaagatggattcactaattttgtgttggcatataatttagatgagcttaattgaattttagttttataatatgtttttgttatctatactactacatctataaatggatcatttatcttttatttttttttgtcatcaaccattaattgaataactcaattattcctcgcgttaagaaagtatgaatgaatctacaaagtcttttaggaattgctctaacgtatttttcacaagaaaagtatacatttagatgtaatttgatttatgatgaaacattgaagcttaaactagcgttttatagttattttagaattttagttattatttttaagtaattacaaatatataaattaatcgatcaatatttttttaattttaaatttacttattatatattttaaattttcaatattattagtttttaatctttttccgtacatttaagttttattattaaaagaaattgatatctattttgtctgatttatgatttggtgatgattttttttttttttttt

SEQ ID NO: 91792 - DNA, 557 bp, Cannabis sativa
gctttcttggctcggggttgtcggcgagggtgcgaatccagcactactgcaaaattgggaacaaatgtacgtcgcgattcaagagaccatccaaaaacaaggtgaacagattggagaatgtagagagcagcaagctcggtctgctctaaatcctaatcctaatcctctagcaccattagtagtgccacatgatgtgagaaattgtctggagccgttgtacaagcagttcaggaagaaaaatctgccagtgtttgaaggtggtgttgatccacttaaggcggagcaatggatgggtatgataacacccatctttgacattatgcgtgttgagagtaacaatcaggttggatgtgctatctttatgttgtgcaaggatgcccgtatttggtggaaattagtatctcaggatcataatctagctaacatgacctgggatgcctttcagatttttattttatgaaaaatattataatgaaaccattcaagcggctaaggcataagagtttatacggctaactgagggcagcatgacagtgacagagcatgccaccaaattt

SEQ ID NO: 91793 - DNA, 575 bp, Cannabis sativa
aacacaaggaaatcaaagaaaaagaaatataggagtgcaaaagctgcttcgaactgccagaaaggggcgtacgaagaaccctccaatttcgaccctcttttcagaaagaagagagaagcaatacatacataatgaaaatagtaggccaaaaatatagtgataaaagacacatgccatcagaccccccttgaagggggcgtcacaccaactatgaccatggtcgttattccgaggaaaacaaacaaagcaagtaaatatacataatcttatcactacttgccctatcagataaaaagaaatatataagcagaaaaaacttacacaataaaggcaaggcaagggccgaagacgtcgtgtgatggtaatactttgcctgacaacgacagagaaagaacagaagaaaatcaggggcgtctggaattttgccaaatgggtttgaaaatctagaaattgaagggcagtagaaatgacccagttgggggaagtgttgtcttttatagaccatttggggtgcgaggcagtgtcgagtaaacaccatcatgcggtgggggttcacaacagttcagatcccttga

SEQ ID NO: 91794 - DNA, 992 bp, Cannabis sativa
ggacatctggtctttctcccatcgacgacacaaccaccaccttttttcacaaactacttcgtaagtgattgttttcctctttctcagttatatcaatccttgtctttcagttttctgaccaatgttttgtttgtttttacagctctcttgacaaggcctactcctacccccgagatggtcagtcggcacaggcacctgataacccttccccatggtcttcgatcatgcgagttccttttgaacgaggccaacctgcgatcagtgggccttcttgctaacaaggagtatatacttgtgattacaaatttcccaagtattcttcttggcagcagattatcatttgggacgaggataaggcctgggatcgtgtggctcaagcacaatatcttcaaaacaatgccccttgggaagccggtgaaggagcatctcgaggtaatcaatgtggttggtctcctacagtacttaggggtgaacgtaacacattagtcaccttccaagactccctccttaatttttgtttttttttgggattcctttctcgtagaccgaattgctcataagtttgacagctggtatcctagattccacgtctagattaactgtcatgagtcatattatggtatagctgagcaatacaacactatggaagatagggcaggtcatatagatgcgagttgggatttagaaccaatcgagcctcttgatatattcaagattacaggctgtagagatttagaaccaatcccgaggtccctacagctggcgaggtggttcctcccaaaaagtgcaggaaaaccactgcccacagaaataagttcttgtctaagcctattgatctcgagatttctaataacgaggcccaaaaacaagtgcctcctccagttgcttctaacaccaatgctcctcctcctgagacagcttatgcctctgcttcctcgagctgggtcattgaaaccttatcggccaccgcgggggaggctggatttgaattt

SEQ ID NO: 91795 - DNA, 992 bp, Cannabis sativa
ttgttactaaaatacaacctgattgatttattgtcataacatatatatttaatagctttcaataccattcctaattttacagccatatgtgacaaaaaaaactaacaactaaaaaaactttataagatcaaaatcagaaatcttaatgatctccaaaattttttgatttctgatttctgataagtgaacatatattattttgttctccttaaattccttatagcttatttggctgcatactgaaagttccttatatggttacttaaatattcatccaacattcttaatttgtatattaagtacaaatatatatacatgcttgagcataaattagattccaatatgaataagaatcttctatatttcttgaattctaaggtttctcttaagacaatgacttagacaacttattttctttagctacaagcctttcacctagtatagtatctttcatgccgaaagttttgaatactttattgatatacctcttttgttataattcaagaatatctcaagaacaatctcaacatatcttgaattcctaatacaaaattggtatatcatcagtggtaagtaatttttcaccgatatataataccaggatcatattcttactcccactgaacttgtgacgtatacacaatcatcaaaagcttctatctcaaaaccaaatgagaatgctcaataaaaattgcgttattattgatgagaagcttacttgagtctatacatggattttcctaatttgtaaaccatattctttggatctttggatgcaaagttttctggtaacaccatataacttttttcatcaatattaccattgataaatgacactttaataatccatttgatgtaactcaagaccacaatgagcagtccgtgtcatgcttgtcctggaatagtctttcaattaaaccaaaagaaagtctatttaaaatgaatatatgctttatgagtaattctttacatacaagacataatgtgcatct

SEQ ID NO: 91796 - DNA, 749 bp, Cannabis sativa
attttataatcgacactaaaaaaatggctttgatcagagtttgggaaaagctattaacatattattaaggtttagccaagtgctcgtagtaattatagaatttacaaaagtgatctttgaattcttttactttccataaacaacttagtattattattccactaactaaattgactattcaaaagccaacaaatgtctctctaagcaaaaagaataattatctctcagattcaaacctaatatcttccatcattgaactcttaactacatttgttgcctactggattttcagggagggagaaagagagcacacaaagattgagcacagaaaggcctgtaatttcaggacttctagtcatgggtagggtaaaacccgttgatggacattcccccatctacacaaataacttgcccagtaatgtaggaagatgcaggtaagcaaaggaatgccaccacagaagacacctcttctggatttccaagtcttctaagaggagttcttgcatacacttcttctaagtattctttgttgttgagtacctatgaaattgcaaagtcaagagtaaccaaagaaatttttttgaagattcctaaccaagaacttgcaatgttttaaaatgtaacaattgaaagaaactgagtctgctgctctaagatattgggcagatgagatggtaaaacttatgtgttggcactgtgttgtttgattagaaacaattcaacattttctgggtatcaactaattctgt

SEQ ID NO: 91797 - DNA, 548 bp, Cannabis sativa
aaacacacattaatatcaagtctttggacagtaatattaactgtaagcggtattcttagtgtaacaattaaacattgacaataaaattatgccaaacaacaggtcaatttttggactaatatattgctcacacaaaataccttataattgtcacatatttcacttaccgttgggtcagtcaatatatgcatcaaatacaaacacataatcatcttgatatttcaaatcaattaatctacacgaaagaggtcactttggtggcatattgttttaattaatttacttaaaatattagacataaaccaacaataatttaaaatttaattatttcttaaaattactcaaaaataaaacttagaatcctcatacaatatgacacatatattatcatatcacagtataaagaggagaaaaaaatcacacccaaaattttacgaggcagaaaaaaaaatcacacccaaaattttatgagcaaaaagttagtcaagataccaaatgataaacccaagaagttagtcgaggagccaaaaatcaaattaaacgcccat

SEQ ID NO: 91798 - DNA, 580 bp, Cannabis sativa
  modified_base (322)..(332): a, c, t, g, unknown or other
tagtaattttgatccgagaagggtaaaattatgatattaatatatttacgtgtttatgggactatattattatatagtacacctgtattgtcttttcaggtgtgttctgaagagtttgcgcggtataatcacaactgtgtatttcgggccgaatcgggttcggggccgaaatacaattttgggataaattattagcgttttatttatgtgtgatgaatctaaaattatttaaatatgtgttacatatgaaatgacttcaatgcccttaattatttgtgtgtgagaaatggccctcggggcaaaatggtaaatatgtattttnnnnnnnnnnntcaactaaaggcattctttgtaaaaaaataaaattcactttttgcatttaccttaacaccaaaagagcccccttccctctctctctatctctctttgtattttgttgaaaaatttgtgatttgcttggtgttcaagcttgaaattgaaaattgcttgaaaattgtcttgggttatgcttgattttgaggagttgtggcttgatcattgcattgaagcttgaggtagttttctattgctgaaatttaat

SEQ ID NO: 91799 - DNA, 582 bp, Cannabis sativa
  modified_base (467)..(485): a, c, t, g, unknown or other
tcgaaatgcaagaatcagaacaatcaagaacacaaaaaggattaaatcgatgataattgagttaataaaggatatcaaagagaaagaacgaatgagtttccgatcaaagcgaggaaaagcttggagctagggacagcgaagttctggagatcggaggggcagacgtaagcgagattggtgagagcgagatccggagatggagtggtggtgaccttcatggtcgcctgagaagatgacgagaatccgtaccggccggccattttctcagacagatgagatctgtctgtcgtagcttaatagctttgttatgaagaaaatatagaaacgaactataaaggaaatggagaagaaagagtaaaacactttgaattttcatgggcccaattcagattatgggctgttatataggcccaaattaaagcccaactgactggttctatgcttaattttggggtaagttgaaaaannnnnnnnnnnnnnnnnnnttaatcaaatttacctttaattttatatttaattgaaacatatctcttttcatatgtattgtacccaaaatatcctgacataagagagtcacataga

SEQ ID NO: 91800 - DNA, 780 bp, Cannabis sativa
taaggtgacaagggatccccttgacgtaaacccctagtaggcttaataggatcactaacaacaccattgacagaaaaagaaatagcagcagaagcgaggcacttaaagatgagagaaacaaaatggacagggaagttaagatgaaacaaaacatgccttagaaattcccattcaaccctgtcaaaagccttaaccatatcaagcttaagtgcagcccaacccctttttcctactttcctattagttatattatgaactaactcattagcaagaataatattatcataaataacacgaccagaaacaaaagcactctgaaaaggggaaatgacactatctaaaactcgtttcaaacgattggccaaaacttttgagatgactttataaaaagtagtacacaaactaataggcctaaaatccttaagcatattagcacgagcattctttgggattaaaacaattaaagtggagttgatttcaaaaaaatcaatacccttgttgagacagtccaaaacagctgcagtaaaatcattacccaaaacagaccagtctttctgatagaaaaaggcattaagaccatctaaccctacagccttgtccccagaaagctgaaaaacagctctcttgacttcctcagcaacaaagggttgagaaagactctccacatcctggtcagtgagcccagatcctaaacagtcaaaaatagagacagcagcctctatatcactcccctgggatgtaaaaagtgttgggttttgtgccctaaataaaacccattac

SEQ ID NO: 91801 - DNA, 781 bp, Cannabis sativa
tagtatatattgtaattttttcgttttttttttttttcatctgagatgagtacatatatattgacatatatgtaataatttgatttgtatgtaaatggagatggaaagaaatgattgttcaagattaaaaaacaatactttttttttttgcaatttaataaaatgttaaataatttatcattaaaaaaaaagtaattgatccaatccatattattgtggatctaattagatttaaactattatgcggattagatgaatcagaaatataaaattcgcacttagtgtgaatataatgttgtttgactaaaaaagtgtgaattgaatcggatacgcatccctatcatacttttttgaacttgtatcaaatttcgtatcatatcaaaaactcatccctatcatacttttttgaacttgtatcaaatttcgtatcatatcaaaaactctcgctcgtatttacagcaatagacatattataagtcattttaaatacaacttatcctgttgggaagtaaccaccaccattggcggaaggacataggatcatgtggggacacatgtcccactcaatttttaatatctttttttttttctaattttatatatatttacatttttaccataataaaatttaatttttctaattttgttattataaatttatatttttcatttttctcttcacatacttttatatttaatctcatatataattttatctttttttaagagtaatttacggcataaatcctaagtttaacttctagttgtaaataaataccta

SEQ ID NO: 91802 - DNA, 742 bp, Cannabis sativa
tataaaattgagtgagggcttaagcctacataatggcttaagtccctccgtccctgtaacccatggagggcttaagccaccctcaaatttcaaaacatattatataaaattagagatagaaataatacataattattagacaacataatttgtataggtatttgttcgttactcagaagatctggttttgaatctgattcccctgaactctatcttctatttatatatatatatatatatttatatatataaatctaccttttcgaaagaaaaaaaaatacaaaacattaacatagagtattcaaactacaaataatttttctgttagaaaaaatttgttatcttaataaattatgttcaattatatttaatctataattaacacaagttccaacataaaaaaaaaactaagaaaagaatttttaaatctcatattattatttagatgctaaaatttgttccaatttatataataactataatcaaaatttaaataaaaaatgtaatatgtattttttttaaaaaaaaatattattttaaattttagtgcaaattttagttaccttaccctaaaattatatcttgggtccgccattaactgtatacacaacaaaataggagaagctttcatatatacttattttgagtccaggccgccccaaagtttaggccatcatacaaagttcttattttttcagggtccatttttttttttttttttaaaaaaaaaataagccatttt

SEQ ID NO: 91803 - DNA, 868 bp, Cannabis sativa
tcaataagaaaattacatataaatataatctcaaatgatagaacaagaaactcccactaacccaaaagaataaaagattataaaatatccatatcaacaacacatttaataagcaacatggcacttaatcttttggtcggaggatctactaacatcgacttggtgttgcagtattctatcacaatgtctcctttcttgaccaagtctctcacagtgagatactttattttcatgtatatttgaaagcgctactaatctcattattctttgaaaagaatacagtagtattattatcacaatagattagtatacgagagaaaatagaattaactagttgtatctctaaaataaaaaattttaaccacaaagtttgcaaagataccctataatatgcaacaaactcaacatacatagtagatgatgtgattaaagtctatttaacactttttcaacaaatagttgcaccagccaaagtgaaaatatagtgagaaattgactttatatcatctacacaaccaccaaaatatgaatatgaataactaataattcgaagattgtcgacatgcttatacacaagcataaaactattcactatttgcaaatattccatgactttaattcttgactgcaacccaatgatcatatccaggattagataaatatctctcaagaatattgactacaaaagcaatttcaggtcgtaaacctgggcatacataaaaatccctactatagtttcatatgggatgtttttcattgcatctttttccaattcattcttaggacaatgttgcttagtaaaatttgtcctcttttagaatatgcataaaaccagccttacattaattcatgttgaaccttttgagca

SEQ ID NO: 91804 - DNA, 695 bp, Cannabis sativa
gacaatacaagactaataataaaaacacacctcagagtagacaagagtacaagagaaaaaacccaacattttcttgtaattaaataataacacaaacatatctaaattaacaaaaagtataaataaaaataatatggtctctactaactacaaggtagagacaacatttagactttataaaaacatgttcatcatcttcaaggactagaaaattttgaaatttaggatggtggtggagaagaaaggaatggaatgtttggcattgtgaatgggatattgggcatgtttggaagcgaggttatacttggcataggtgggaagccgagttttgggatagtgggcccaatgggcaagcttggaagcggaggcatagttagcccatttggtaaagttggcaaattgggctgcgggagagatggtatggaagggatattgggctttggtaaatttgggcctgttgattggagaagattacgagctgaaagcccattatcaatgctcataaaggcaaaagcaatgaataaaactaaggtgaaacgattgttgaaggccattatgcaaatcaaaactcaagatttttcaagcacaatggttgtgaattgtgtgtaatgattgattgggatgttgagtttatggtgtttgaggattgtttagggttttatatagaggaagatctcatgggttggagtatgttt

SEQ ID NO: 91805 - DNA, 575 bp, Cannabis sativa
tgttggtctgtagggtcagtcgttaatcaaggaagcatccagagtggcgtacccgtgtataagagccattagtccgtgggtgtaagggcccaatagaggcttgaagcggggacattacggatccaatccaatccaataaaaatctaaaacaatagatgaatctgatctgattagatccaaaaacaaaatagtatttaaaacattagacaaactcgaactaatacaataagtatacataaaatacatccaaaattgatccaatccaacatcagttcaaatgttgaatgaaactaattagatcataatgtttaacgaaatttaacatccaatacataatttaatcgaacctaaataagcttaaaaatattgaatgtggtccaataaatacttctaaattatttattaattaattgaattaattaacaaattaagaactataataatcaccaacaataataataacaaaaacaacaacaataataagagaaattttatttacaccacaaaaatgtctaaagataccccattttaataatttttattttatataaaatgtatatctttaattgtactaa

SEQ ID NO: 91806 - DNA, 800 bp, Cannabis sativa
tttcctatctaattaacttaataactgttaattaaaatattaattataattaatagaaatagatgataatattctcaggttttaatagtttaatttaattgattattacaaatgaatgatatttaaagtaaatattttctaaatacttatgacgaatattcttgaagaatttaactaacgctagtggtaattagttttgtttgtagatgtactactgctgttatatatgtatcatgtccaatatagtgtgttttgtctgctttgttagttttacgatcattataatagttagcaattttttggggcccaacctgcaacaaattatgcagactttttcaaaagtcttggaacccatacttaaatactagtaaaggaattaatctagaatattaaaaacaaaactttaaagtgtataaatcaacaaaaagactttaaagtgtataattggattgtccaaatgccaacaaaatttagttaatttaattcctaacctgttagttttagagaaaataaaatgtgtaaaaatgtattctcattgactaatgaagctttaattacaagctaaatgtacatctcagtaactaactggttactaaaccagtacactccatcactaacaactcttataacaactaatagatttctcattaactcaattctaacactaactatgctcagcaccattatgcagatttgtaaggtacgtacacacttcgattattgatccaggtgctaccaataccaaaccagttcttctagaggttattgggtatttgtttatataggaaatcagtctctaa

SEQ ID NO: 91807 - DNA, 606 bp, Cannabis sativa
ttaacgccaaaaaaaaaaaaaaaacttcattcatgtatacatacacaacacttatatttctcaccttctgtttttttttttaaacaatttttttataaagtagatgttttttctttaaccaacaaaaaaaaaatcacatgtacgtacgcactaccataccatgtgtaacgctctaatctatagggacaccaagcgtgtgattttataaactagtttatagtaataatagattaattaattattaaaatctgtaataatattaaaaacttcactaaaataaaacactagtaacagacattataacgatactaaaaccttgttccggagatccatgctataaaagttttaccaaaaaggactatatacaataactaatcaaaatacacaacatataacattatgtttatttatttattttatttttaaataaaagtatgtttatttattaccggtacgagttaatattgtcgtgtttattaattttttttttaaaaaaataaaaatagtttatagttaaaatgttgtccattctctcttcctagaaaagcataataagtaaacaattttgagaatttttaaacctatccaatttagtttgttatattt

SEQ ID NO: 91808 - DNA, 535 bp, Cannabis sativa
ctagatcctggtaaaattatttccgacaggctcgccgttccagcagtgaacacaagagaagataaatcaacagtagaagaaataccaacctcaacattaatgcttttatcgaaggcctcattacacttcaggaacccactgtggcttccaccaaaaacttcgcacgaggcactagagtcaatgatatcctttcccttgcctaaagcacgagccttatttttaatagaaaccggtcgccattcattaatcccagtcgcccccgatggcatcacacccactccctgaacaaaagaaccccccacaccagcttcgtgaagctcaaaaaccacctccttcccctttccttccaatcacacactcccatggtcattgatcttccctaatcgtgaactaccccctgagctccacacttccgtttctttaaatctgcctcttcattcgtattgtcactcaaccccatcccctctttcctagttttctgagtcgaccccaacaaagaagaagaccctaagcatgccatatcaatctgattgat

SEQ ID NO: 91809 - DNA, 1498 bp, Cannabis sativa
tataaatgttgtctttaccttatggaggtatttttgtaaataaaatgtcaatttatattttttatgtaataattccttgatttaaagcactaacatattaaaaaatacaaaataatgataacaaaaatactaatataaaataaaataatattatataacactaagttataaaactaaaaaaaaacaacctaaataaaaaataaacattaagtaaaataataatgtaatagtcaaattgattacttaagtattttagccttgaagaatatttaaataatttaatattttctttatcgacatagaaaaagcaaggatatagatactcactatgtcctttgaaatgcattgactgattatctgtaggaacatcataataattagaaaattaaattatgtaggtgttatttaattttaagtttttttaaaaaatatatatcatgttcagttcattgaacaaataatttattttactaaattagtttaatattttaaatttttactagtagtcatgatatgattacatcctaaattagctatcttgggttaatgatgttaataatataaaatgcaagatctttttaagtaaaatatatttatttggtggaatatttgatgtgatattttgtgtgaatcattaaagttattgcactaaaggtaaaagattctacactaattttgtatagattaaagaggcgttgtttcagatgaagaggttaaagatgcattatttcagatgcatcctcacaaatctctaaggccttatggtatgactttggctttttaagagaggtattggtcagttgtgggaaggatgttattttattagttagaaattttttgcctcttatatgatgccagatgggttgaatgatacaaactttgtccctatttcgaagaagaagaatccgacggtcatggggtgtaatatcccaataaacctaatatttaataattagtgtttatatttatattatgagttaaccaggtaataagtgggattctgatcctcctaatctagttcaacataaattttaaatttgctataagtagataaataagtgtaatttataaattacgaagatttatagggcatatgtgaatgtaatatgagttactggtgtaacaaaatatttttagttttggcaatcttggagactcgatcgggggccaaaaatatcataacatgcttaattgatagaattaattgaaatattgtgataagttgataatgtaggtattggggtaattaggagtacgcgggatttgatgtaccaccatagaagtagaagtttcttagtagctaagaaatgataaaataattattaataataaaaattttattaatattattatattattatattattattgtattattattataattttattttttttaaaagttgatcaagagtttacatctattataaataagttatattatatatcaaaaacagtaagaatgaacgaaccttcgttcctctactttcgacaaaac

SEQ ID NO: 91810 - DNA, 727 bp, Cannabis sativa
ttcaagttaattataaagtctacagttagtttttttttttttaatatatatataatttatttatctattattttttttattacaaaaaagtccacagcgcaagttggtgcataagttataaataataaataagtgctcttccataattgcagtaccctatcaaataggcaataagctcactgttcattcctacatactagaaaagaaatatatattgtatatttatgtaatatgcatactatatatgtatacacacaaacacattattaatttatataatccagggttcgtgcactccagctaataatataatatataatttatatataattaccctataaatgaaattgtagaaagaaaaattaatatatagatgatccatttttattaaaatacatattttattgttattaacatatttatatctattatccaacaccaaagcaaaatcaacgggttggtcatgtgtaaatatgtgattttggaggatatattattatatattaatcttaagaagtagataaagttatgtgtgtcattattttctcaaaaactaaccagtgacattattttatttttaatggatatcatatataaaaaattcatgacaaatagttatatttacaattaaagtttgactcgctataaatttatagaagtactttataatatggacactaattttataaaaagttctttttgtattaatttttagggtattttacaa

SEQ ID NO: 91811 - DNA, 557 bp, Cannabis sativa
aaataagaagaaataaaaaaaaataactaaactttacctaaaactaatctttacgtgcctcgacacgtaactcctacctagtatatatatatatatgccatatcatataatttaaaacttcattgctcataataaaaagtacataatatatattacaactattaatacaaaggaggactttcaaataaggagaccaaatacacgtacggatgcatttgagctataaatatatgtacatacatttatagtcatatgacacccacactttttattcatcttctactaatataagctggaaaatcaccatatccaccataaatatcactgaacactgcatcaaacataaataaataaaattaattaattaataattattaagacaaaaagtgtaattaattcaatatctagcttttcatttaaatatgtgaaatttgattcctaataataatcacatatttgattcctaataataatcaacattcttgttattagatactagtggtgccgatcactttttattagtgacatcttaagattagctagcgatattctttaaa

SEQ ID NO: 91812 - DNA, 557 bp, Cannabis sativa
gccgtaaaattgtaaataattgtaaataaaatataataaaatatgaaaaaaaatatatatatttttaaaaattcttcaattgtaatatatgataaaagatttttgtctctagttttgccttatttttaaaagtatatatatgatgtgaatgtgccaacaacaatgtaggtgggcatgacttattaattggttagacatatttatataaaataaatatttatttatagaagtagtgtttggtacgaattatattattgtgttatatataatattctatttggttatattatgtagaattattttaatacaatattattttagtattatcttatcttttcttatatataataagattcttattccctttcaattcattttactactctagccttttatattagatttttacaagttgttttaatgtcttttttatataagtttatttctttttttttattactatttttaactaatagccttcttttttctttgttagtagattttttttcacaaacaacaaaacaagtataattaaaatacacattgaatgcttattc

SEQ ID NO: 91813 - DNA, 858 bp, Cannabis sativa
aaatattatttaaaaaaaaataatatgatgtaaaacaaaaaatatgtattattcaccaaaacatatataataaaaaaatatattactaatatatatatactatactaatcaaattatataccacaattaaaacatatatacaatgaacaaaattatatatatcattgtatataataaaataaaaactaattaaatattatttaaaacaaataatatattatataattaaaatatataaaaaataataattaaatatatgtagcatgccaataaaattatatacatacatatctgtattatgctaacaaaattatatatcactattatacatagtaaaataaaaataaatatcatctaaaaataataatatatcatataacaaaatagaaatactgacaacccataaaaaaattaaaaaaatgacataactttaaaataaagaaaaaaaaattaacaaaactaatatatataccataatcttcaataatttgttgtaaattctaaaaaacaatatatgaaaaaaattattgattttttcatataatgaaaggtaatataaataaataaataaataatagttatttctctacaaattttggaatgaaaatatttacatacataatgttataatttgggatcatttgttataattttcctttattttttgtatcaataagaatgagtaatttgataatgtatactgccaacgtgtctctagcacagatccctaatgattggaagaaatcatccatttaagcttaacatgtgtaaactagagtctagagagataggaggataggaagggtgtcttctaaggaagaccccatgcttataaagcctaccaatgcaaaagtaata

SEQ ID NO: 91814 - DNA, 928 bp, Cannabis sativa
  modified_base (48)..(56): a, c, t, g, unknown or other
gaccttaaaagttcagggggcaagaattggtacatgtcaaagttcagnnnnnnnnnatcctaattagccttaaaaaaatggggagagaggaatcaattttaaaaaatattgatacataaattacatataaccagttccacagcaaaatgaataaaaacatacaaaaaacacaataactcatatccggttctaatttaaaaaaaaattcagaaatcaagtctaataaaaaaaaatcacgactcaacaataaaataagtaaaaacataccatacacattcacttccggttataattaaaataaacaatcagaatgatgaattgacttataattaatggtaataatactacaagaaattaagaaataatcatgaagaaacgagagtcaaatttatagaagttgttgaatacaacataatatttttattaatagttggtactactaccaattaaatttagtatgctctaatcaaattttatgagatttcatatgtatagtttgcctaattagtaaccttaagtgcaatttcaaatatggtatatattttgaaaatccaatccacaacatagagatccaaaaagttcaaatagaaattcaaactagaccagatcaagacaaaaaaaaaaatttaaaaaaaaaagaaagaaagaaagaaaaaacgctccaaaatatggcatgtttgagtgcaataaatagatgattaagttattatggagaaaatataaagtgataagagataattcagccttacctgttagcagcttccacctaagcttctctgccttcttggcagagatttccccagcccctattattagaatttgggataaggtgaatggtattccatcttaaaaccaattgacaatgagaggagtagcccattcctcttatatattctattatctctccacacattagcaatgtgggact

SEQ ID NO: 91815 - DNA, 702 bp, Cannabis sativa
tatgagaaaatgataataagttttttttgcacatattttataattaactaaaataatgtatacaaaattgtaaaatgccctttattaaatcaatttatttgtgaaccgatattaaataataacaatatgtcacattttattgtatttgacaccttaagctatctcttagcatttttctaaacaaatgacatcatcaaaatagaacaaagctattccttttataaacactctcccaatttgtttgaatgtggaaaagaataaagtgagttgtgtgtagggtaagatatatgaaattgtatctcaaattaaaaaggaataatataagtccaaaaatatacatggttgcttcttaaaaccatttgataattagttgagtatgcatatgcatctcatattaagttctcccattggggttgtcatggagttcttttggcatatatgtaatgtgatcattatttttaatgcaattttatcaatatcattatctatatttagcatcaaccatgtgacattattttatctttttctttttttattcaaaaaaaaattattttatagtatttaataaaatttaatcatttaaatggtggcacgtggatcatggtggataaattttgggaaacttacaaaaatactggaatttggattaacttttataaaaacattgtcacacggaaatcttttcaaaaatactgtgttttt

SEQ ID NO: 91816 - DNA, 542 bp, Cannabis sativa
tttttgttgtagagtatgatcaagatctaaacttagattctccttcaagtaacaaaaagactacacagacttctacactatcttaactattgcattgaaatgtgtgagaaatcactcaatcactcaaggtttgaaattaacaacaacaagaagaagagattttttttttttaaaaaaaaaatgagagctctatttgattttctatttgtttaacaaagtgagtcaatagtgatatgaaaataagagctatcatattctatttatatggcaactttagagttaggtttagaatttaaatggaataaaaaaagataaaattagctttagttaaaccttatggtcgaaatacaaaataatattatcccagttagcgtggggacgataggcctatgtaaccaagctcccaataagtagttttagaattcaccgagtaaattttctatcttattaattcctccggactccactatagattcataattacactcttaattacatagaacgttctataccaagtatagatacgtcataaattatctatt

SEQ ID NO: 91817 - DNA, 591 bp, Cannabis sativa
aaatgttatgtgtttagagaaaaaatattaggtatatgtaagtataaaaaatcaaatttcccttttaaaatatttaaatattattttaattaaataatttgtttttatcattttagttgaataattattctattttgaaatataatgaacaattatttcaattcatgcaagatgagaaaaaaattattaattttttttcatgaatattttttttacgtattttaattttgattatattccattcctacttttattctcattcacatttttatatttttattcatcctaactaaaagtcataatttcaactacatattgaattttcgaacacgggatcttaaaagaaaaatgtttggttattgtattatatgtaaggtgcttctaggaggagtgtgcagaaaatcatctgatccaatagaatcggatatccactagtaattggattagaatggatgtaaattttgaaaatccaatcgaatcggatcttgaataggacatccgatttagggattttttctataataaattaaaaatggaacaaatttacatttatgacccaaaaaagggaaataaacaaaaataaaaactaaa

SEQ ID NO: 91818 - DNA, 1893 bp, Cannabis sativa
  modified_base (857)..(862): a, c, t, g, unknown or other
  modified_base (1266)..(1270): a, c, t, g, unknown or other
tagaagagaggtcctgaaaaaaaatcagaaacctgaataagattgactcgtggactatgagaattttaactgcaaaaccacgtaaaaaaaccatgtgttcatatttttatttcaacatcttttattttttctgtgtgaaatcactacagtgaggctcaaatttggttaatgaaaatttacattaacagttttgtgctttcattgacagcctctttaaaaaagctcagaaaaaccctcccttcttttgaagaaaaacaacctcccttatggctaaaaatccagaaaatgttaacactccacatgaggaaactaatcaccgtcttgggaaagagcccataggctccaggaggtttaccaacccgcggtctagaaggaccacccattccaggaggacttaacctgaggatggcctcagtgcacgaaccacacgttcttggagaacccaacctgacgttggtcctagtacgcggacaacacactcgaggagaactcagcgtgggagtggtcagaaccacgagatgagggatgaagagctcaatcgtggaactgcccagtctatgggtgaaggtatttatggaacagaaaactgccgccggagacgccgtttggaagaggcgcagcgtcgaaacgctgagttagagcatgatgcagcctcgccagggcggcacaggggacgaatgctcaaaatcaacttgaacgtggagtgaggagaccacgaggtagacctcatggctcacgaaccaggagataggaaaacacccaggaagaacaacctagggaaaatgagacaccccctgaaaatcataacgaacagccagataggagacaaccagaaactgatgaacgagaaatccctnnnnnnattgaggaggatcttgggactcaactaggagaactgaggtcacctgctagaaatcaccagcgttcttccaaaactcatagagcaagaactcatacagaccctgatgggggaaatacgataaactgctctcggggggaaagaacagagcgtgaagaagcaagtgtgacttcgaggcggtcaagcacccatagacaatcatctcgaagaggaaaaagtactcaatgagctaatgatcaagaaagtatgggacctagtaagtctgcgagccactcaaagacagagtctatgagtaggacgtgatctgtgagtaagacaaggtctgccagcaattcctcccaaccggatctgcgagagcacttgaattggaagaaatctaactttcgccaacagcttggtccaaagcnnnnngatccaatccaattgtagataaacgagttagaggacaagtataggagatatcaagtaggggaattagggaaactacctggatacgactctagcgaggagcttgagccgtatcatcacaacataatgaataccctttttccttcaagattcaaaaacttgcatgtctcatcatatgatggaaccactaatccgaactcgcatttgaataacttcaacacgataatgcgagcgagtaatgtgacaaacaatttacgctgtattttgttccccacctcacttgttggagcagcgcgtagctagtttaacaagtttactcatcattcaataaattcgtgggagcagttgtccagagatttcaagaaataattctacgctactagggataggcaacccaaagcagccttgctaaccaatataaagtagcagcccatcgagacacttaaggcgtacttaagtcattttagcacgactgcggctagggttagtacgcaacttatagcccttcatgcggggatctctactgatccattaaccgcagggggcgagttgtgggatgacttacaaggtcgtccagtgagaagcatcactaagttcaacgaaagggctcaggtgtttgttcgaaa

SEQ ID NO: 91819 - DNA, 689 bp, Cannabis sativa
accatacatgaaggacttttcatccaacctgctgcaagattagagctttagacttactctaatgcagactgggcaacaagcattgatgacagaaaatctactggtggttatgccgtattcctaggtggaaatttgatatcctggtcagccaaaaagtaacaagttgttgctagatcaagcactgaaagtgaattccgtgctttaacaaatgcagctgctgaagtgaattggatctgccaattactcaaggaaattcaggtctctctcccagcttgtccaaatatttgggttgacaaccaaggtgctgcctctctagtagccaatcctgtctttcatgcacgttccaagcatatagaaatcgatcagcatttcatacgagaccaactgctgaccaggatactcgaggtgcgttatgtgccctctgtcgatcaaactgcggacatcctcaccaagtgtttatccacagatcgatttcattacctcaaagacaagctcaaagtgtgtccttcaccctttcgcttgagggaggatgataaactgtctacgaagttagtcatagttagttataacagtttggtggttgttatgtaactattttgttttttgttattagttttctttttctatgctctgtaacaaactctgtatcagttctctataaatactatgctcaaatcaaggcttgctaa

SEQ ID NO: 91820 - DNA, 612 bp, Cannabis sativa
gagagagaaagagattgagaggtagagagagaggtactgagaagaaagagagattgtgtttaggttttgtatgaagaatcttttgtagatgaagagaattcttaggtaagagtgtgagaattaaaacactttgagagaactcaacaaggaatttgtcttgactgtaatgtacatgttcttgctcaatcaattaaggagatttggtggtgctctagaactggagtagagccatagatcacattgatttatcggacttgaaccagtatatatcttggtgttgatttctttatgttctacatttattgtttctagtttttaatactctgtttgcatttgtttttcactcgattattattcttgaattgttaatcgtgtttttgctaattgtctaaatgttaaagttttattgatttatttttgcactgttagtcgtaattttcctacagaaattaaggagaaagagttagagtttcatgcaaactgctgtaaatttatcgatattgccctttgagccaataaactgactcgttgactaagattaattaatgcgtgaattacgtaaaaaaatatttctccaaatttttctccatttactatttcttttaactctta

SEQ ID NO: 91821 - DNA, 2650 bp, Cannabis sativa
tcccaactcattttctagtcttttgtttttgccattatttcacccttaatctctgatcatctaaaaaacactagggttacttgcatttgaagattttgatccattttcttaatgttgagggtttcatttcaccttgtttaactctttattattattattatttttttttttcaatagagactgtattatattatatacccagtgagttagtactgatactattgtttatacttgttttatttaattagtttttttttttgtttgtcttcttctttttactggagatgagtctgatgcgtgttttcttttaccgctgatatctatttatttcaaatatcaaattaaacggaaaagatttctctgcgattactcattcttcagtgccccatagaagttagaacttagaacatgaatctggacttgaagaaacactgcatgttttaatttggactaatggttatcttggttcagttttctcacttatcaaatgttaaattgatggaatattgaatatttatttcaggattgatctttgtttcgaagtcatttccaagagaaacatcagaagaagtatctagtggagccaatcagagttttggcgaaaagcgtgatgatatgattagtttggaagataaaccatcagtagaaaggaaagtcgatgatgatgatgatgaaattgcatcaaaagttccagaagaacagttttctgatgggccaacgccaatttttgagttcctggataattttaatgtaagtccctgtatcttttttctgactgccctttttatttataatcagcaatcttgccttaaaagggtttttaagcaagcaattgatatccctttgtcgattaatggacattgtttgaaagtaaataatcattgtaaccagcgattacgattttcttgttgtgtttttagtttttttgtcctcttagcgtgtgatgggtttattagtattttaagttttttttttttatttcttcctgctaccatatttttgttcttttttgacttgattctagaaaaaatttacttttactatactagttaatcttgttgctacgatgactttaacagaaaggttgagagtgtttctgaaatgctctatggaacttcgacataatgtcgatcctgagcggttaactgagcaacgtggtaattgattaagcttttaagtacttttataatgtgttctgttcttttacttattttaatactgtttgatgtttgtacatttatctttgtatacatacatttactttgtaaactcagtttttgtagctacgtagcttgttaggttgctatgatgagctctaggaagtgaagaaagtaaaaacttatttgcttaatgaaacattatcctgagcggttaactgagcaacttaaaacttatattctttaagtatatataaatggttacggctgtggctaccgccatgtgtgtgtaagactagggctgtgagtggtgatggtgaagttatctatcttgtgagcatctccaatggagtgctataaagatggtgtaaatgtatttgttagcccatgttgataaaattgaactctaatggtggtatatagtgtgagctaaatttagtacatgctaaaagttgtgtcaaatttgacacaaaatatagtatggaccaaattttacaccacaataaatattatttttttttacttactcttttgtcaccagttaatgtctttaataattttttttacattttatttatgtatttaattaggtttttacactttcaatcataatttaatgcatttgttgacttttttacacctttctattaaaaatattacactgactcattttttgagccaaatatagcacacattttacaccagccattggagattgtctaatcatgaagctacttggtagttattgcaatttgataattgttttgacaaatgctaatatatttttttacctttgcatatttaaggtttcattgcaaactcagtttctttagttacatattatttattggttgctatgatgaacccaaggaaatgaagaaagttaaacttatttgcttagtgagacattatcctgagcggttaactgagcagcaagtattctcttaatagatatgggcatctgtggttacaaccatatgactatgcaagcttattttattttcaaaatgtatttttgtttcttgctacttgctatgatgaacccaaggaaatcaagaaagttaaaactcttttgcttaatgaaacattatcctgagcggttaactgagcaacatgtgcatgatgactgtggaagctctgtacatgctaagagtcaacgattttcttactgaaacattaacctgagtttctctagaagctagaactgtattttcctttgattattgctttattttaaaaattgtttttgttttgtggtgtttgctatgatgagaccaggaagtgatgaaagttcaaacttatttgctttatgaaacattatcctgagcggttaactgagcaacacaaggttccccagtactatagtttcttagtaggttagagggtataatgccacaccacgatttgtctgagacttgagataatatatagcatttcagcaattcaaactttaatcgccacttataactaattttagctattggcagattgaa

SEQ ID NO: 91822 - DNA, 724 bp, Cannabis sativa
ttttttatagttgatttaaagttatcatgagatttatttattattttttgttattttatagttgatttatagttgttgtgaggttgatttctcgttgttttttaatggttttcttgcacttcattttttttttgctgaaaaaaattgtatttttgtaattataaaactttagaaacatattttttgtttgaaaattttaatttgtaaaactgtaagaaaaaagttaggtcatacaactgtaaataaaacctttataaaagaatagggattttttttttatttttacattttaaaacagtttttttagtatttatataaaaatatatggagcaacctaaatcgcaactcaaatccacatagcaacccttacagcaaccaccggagcaaccaaactataaaaaataaaaaaaaattaaaaaaatggtatatggggtgattcccctaaaataactgcaaataatatatatatttaaatcatatatatatatataaaaaccttgttattaaggaccagtaatgtctagcacttcctaggtgacgtcttgcgattggttagcgatactctataaaagttaatatattaaattatatggtacccgatacttaattaaacttataacaatattatactttaagagaaatattaaagaccacccatggtccctaacactcttatgatatgtaatatcgctaaaaaaatatatatgttcaaagatttataaaa

SEQ ID NO: 91823 - DNA, 926 bp, Cannabis sativa
tgggccttaattacgctccacgtaaatgaatgcagttattatttgaaaatcacacaagtatgatataaacagcttttaaaggatgaacgctgatgtaaagtaagacatgctactaagtgtatctcgtcggggcatctcgcttagtacgtgaataacttggtttattcataagtctttcagcaatggcatgagcatcagtgtactgagtaaatttaagaactgctctttgaccataagaccttgcaagctggacaatcatgtcttgggggttctcaatagcaacaataaccctggcagcgagctgaagtttaccagtagtatgccttcttatagcgagatggatgtctcgctattcgttatccatgtccttcaagctattacacttagttagtataatgtatattatacgttaagtgttctgacagccaattcgccttttcagagcctctctacacctaacgaggtaggtgcctcgctatgtattatagatgtcattcctgcgattatgtcctctaacgcgaaatgatttctagtcaataagtgaatcaatagtttgtacatcttcgtctcgcttaaggctatacagtcagtgagttatagatatggtctagtaactctacattaaatgagttattccatttgatgatttttaatataattgtcattatatttgttgattcgtattctccaaggttgacatgtgtcatcctctgaagtaccagccgaattttgggtataacacttcatcgagaaattagttttgattatatagaattagaatttatatatgtgcttttatgttttttacggtattttctcttattttttatcatttgtccgatatttttaagtttttattttttttaaaaaaaaaaaaaaatcatatttggcacaattatatatatcaaaactttcatttgtttcta

SEQ ID NO: 91824 - DNA, 535 bp, Cannabis sativa
gtgaacattgatgtcatttgaaaatgaatagttcagatagaatagaacttttgattgatcttgatatttgggatcctatagatgaaggaagacatgatctctctagatcctattgaatttcattcggaggaggaaccttataaagagcgtgttgattcttatcaaagaaagacaggattaattgagttcctgatattatattatcacctacgttcaaaaaactttaaacgcactttcgacactataaactattcgaaaatttttaaaaatttactaagatgatgttgtaagtataatgaacacgacatgaaaaaaatttgaaaaaaaaaatattccaacatttattttcggacaaagaagatgactaagaggttgtaataggaaattgacagttacactcttcatcgagtaagatggcacaattgatcactattttttttttaacaaagtgattaaaattactataagaattcaaacatcaatgattaactataagagtatatgtcggtcgattttgtcgatatatattaaggaa

SEQ ID NO: 91825 - DNA, 858 bp, Cannabis sativa
tatttacatgcttctaggatggacaataaattttatagtttgaaagagattcatattccttccatttaatttactagttctaaaaaataatactcttatatgtaataaagaaaatagttagttatgtaaatataatcaaaatattatcaccttgtgtctagcgtttttataaagtgtagtattattattgatgtaatttaatatcgagtctcattattttactttaataaaaaatatagtgaaactctatttaagaatacacttaggatcaatcaaattatattctaattaaaagattataactatatatagacgtacactagaaaaaaaaaatcaaaacacctaaaagtatccaatgtaacaacaataacaataagcaattcttaatattatatcataataacattattattgaataaatataatagttatacatagtgttgtaagttcgtgtgtgcagtgccggttcgacttatatttatttgtgctttcaaaaaaatgggtgttattgggccgtaccacaaaaaatatgagttgtgttatgtcgtgccaatatttttaaagggtaggccagatatttttgtgtcgtgctttgctcatgccgacctgtatttcttaaacaagccatccagtttccatatttgaacttaaatttgtgctttactttttcatatttttttataattactaaaatttataactttaattatatttatataattttttttaacaatatattaaaaataatcatataaaaaaaatattagcgtaacttgaatatttacttataaatacttaaatttttatattactctataaataaattaatatataaccataattttttatattttaata

SEQ ID NO: 91826 - DNA, 592 bp, Cannabis sativa
gtaatgcaggacgtgtggttagagattggttactgtcatgggatatggttgaattctagtgtggggttgtattgcagtaactagtgaaagagttacgcattgaggagggtctgttttatgagtttatttggtttgtattggtgtgtaaacttggttatgcatgccgtggagaagcaatctgaggaggggcgacaaggatcgaagaagattctcccccaaccaggattcgtggttgtgattgggcaacgttgtgtaaacgaggtatagttgaatgaagagtgttttgagcaagacgtgtcaaaagagtccaagcatttccttagtaatcagttctatatttgtcataacccgtagtaggaagtttggctcctttcatccaaggtccataaagaaagttgtcatcattacccatatccatacgctccatgaatataatacatttttcaaaagggtgaccaagtaaaccagattcaaagtaaaattctggaagacgctcataacaacattctatccaaaattcatctcttatccttgggagacttatccaaaattcatctcttatcattcaacatcgaggaagtggcttaataac

SEQ ID NO: 91827 - DNA, 1233 bp, Cannabis sativa
caaaaatattagattttgggtaaaggtttacatttatacctcacacggcaaaaattacatttatattgtatttcccttttttttttcttttatattgtatatgccgaaaatcacataccaagcctctatcttgcacacccacagacagaactaccccagcaatatgagaacacttgaaacaatcattaattccagcaagatggaacaaaaatagagaaatcaacgtcaaataaatagtcatggcaaaataacactaaaacaacactaaaacaacactaaaacaaaagaaaaaaatgattaaaaaaactaaccatcttctgcacagcctcaatactagatacaatagcggctatatttgcaagtccagtcctgaaaaattagaataaaaaactactaaaataacacaaaataaatgtaaaacaatgaagcaaatataaccacttaaaaaaatataaaagaaccacacccctcaaaaaaattttgctaatgagtttgtcaaatgtatttttaggagaatcagaattaaaaaaaacacaaaaacagtcatagagaaggaagaaaaaatatatttatagtctccatcttccacacccacgtatagaaccaccacaacaacacgagaacacttagaaaacaactattaattctagtgagatggagcaagatcagtgaaattgacgtcaaataaataaattatggcaaaacaaccgtaaaataacactaaaacaaataaaaaaaatcaaaagaaaaaagaactaaaaaaaactaaccatcttctgcacagccttaacacggctatatttacaagaacagttctggaaaattagaataaagaaaccacactcttattttttcccaaaagcgtgactgaaaattagaaaaactcaaaaaaatgaaaagaagataaaaaaaaagaactgaacaagaaataaaataaaaaacttatattaatatttcaattaattaacatatatataacttaattaataatacgataaagatttattatataaagagtaattaaattattactttttcaacatcgcatgaatttgttagggaattttatggccatttatatggtttaaatagataatttttcctggcgcaatgacctctagcatccaataggcactaaaaaatatacatacatgtatataagatagtgtaaaaataatttcaagttataataaagaaagaaattttaaattatttcttaagaagtgtttaccc

SEQ ID NO: 91828 - DNA, 616 bp, Cannabis sativa
aaattaaaaaaagtgacggtaaaagtactttatcttacgattttgttgcattcgtacatttttttaattattaagtatcaattaagcccgttaagtgccagctcaaaaacacgtgatgacatatttctttaacttatttgatacatagttcaataatatgtcattatgtatttttgagttaaaatttaatggccaaaaaaaagtatgactgcaacaaaattataaaataagtatttttaccacttgttttgattaggattatatgtataataattataaatattaaataaattttgtcgcaaatatctcaaaataatattagctactaagactttatttggggcactttaatagtgcattaaataaaaataagtgtattgatattttatttatttatatattcaaataattcctttttctttgaaatcatatattcaaataattctaaggatattatttttatataatagtatatagtacaaaataatttacaatacatacaaaatttaaacaatttattttctatacatataaaatatttggcgatattttttacatgataaattactcttaaattttagtaaaattttgcaagatgtgcacacccataataata

SEQ ID NO: 91829 - DNA, 916 bp, Cannabis sativa
  modified_base (733)..(733): a, c, t, g, unknown or other
tcgtcagcagaacttccaaaagcagttttatcctcaacaaaatcaatctcagcaaagccaacaatatccacaacaacaacaagcctctagtggagggtctaatccgtaattagacacgttattgtaattcatgatggagattaagtcttccattaaggtcttagaaacccaggtggggtagttggctgctcaaaacactaacagagctcaaggtaacttgcctaacactactgaagtaaatccaaaggagaactgtaatgcaattaccttgagaagtggtaagacctatgctgggcaaaacaaagacaagccaaaggaggaagatgatgtagagacaacaccgacacaactaaaggagaagactactgatggtcttccacagaaagaaactccacctctcatcagcattgaccatcacatcaaaattccctatcctcaaagactacacaagaacaagatggataagcaattttcaaaatttcttgaaatatttaagaaactgcatatcaacatcccattcatagaggctttggaacagatgccaacttacctgaagttcatgaaagatattctatccaagaaaaggaagttagaagaatttgagatgatgacacttactcaagagtgtagcgcagtcttgcaaaagaaactaccacccaagctaaaagatccgggtagtttcaacatcccatgttcaatagggggttcaatacaaacaaaagctttatgtganctgggagccagtatcaacttaatgtcactatctatgttcaaaagattaaaattaggagaagctaagcccacaacaatcacttcacacatggtagatcgttctttgactcatcctcggggtataattgaagatgttttggtaaaggttggtaagttcatcttccctgctgatttcttaatactt

SEQ ID NO: 91830 - DNA, 879 bp, Cannabis sativa
gccccttcctcctcctcctcctcctctttcttcttcttcttcttttttttacgccagttatgtgctctttagctccacaaatgggcaacccttggcttccattgacggaaccgaaatgacccttatcagaacttcatgtgttttaggcttagcttcgagaattttggccagaaacgatagccgagttctggtgatgattagtgctggggctaaggcaccacatctgattagatctcttctcgtggcgagacccaatttgaagaaagttgtaatctggaaccgtatggtggaaaaggcaacaaaattggctgagaaaatgaaagaaagtgtggaacttgatggggtttgttttgagagcaataatgggtgtttggatgaattggttgagatgggagatattgtgagctacgtaacaaactcaaaggtgccgcttgtgaagggccagaagctgaaaccaggtgctcatcttgacttggttggcgcgttcaaacactctatgaaggagtgtgatgatgaggctataaagagaggaagagtttttgtggacaatgaggctgctttggtgagttagtgggtgcttttgagagaggtgtgattgagaaaaaagacattggaggaaacttggtagagcttgtaacaggtgagaaggttgggagaagcaattctgaagagattactgttttcaagtctgttggattagctgtgatggatattctagcaactcaattggtttatgagacctatatgcagcaacaacacaagtagataatatcatgtattttgttgctatttcttactagacatctttttaatctttgtatatccctaatctactaccatacatattcagctcttaataacatatcttcttatcatgaa

SEQ ID NO: 91831 - DNA, 542 bp, Cannabis sativa
ctataggttggtcaaaacgttttggacaaaattgttccgaatgcccaattattccacaaacaaagcaaaaggtaggaagatgttcatatttaaaattagcccaaatccaatctccattctctttacagagtttcatcctcctctttaatggtttttcaatatctaccgtagtttgaacacgcaaatattcttgctaaataccattaaaattcttgggatcagattttacatacgtaccaatataggcacccgcactccgaaccactttatctaacataaaaccagatttcagatcatgaatctgaacccaaaaatcaatcttgtgtaagggaaaaaccttaggatcttctccctttctcagtcgatgaaaaacaagaggacatctattgaacgtccatgggctcccgtctataacggtttggacatccaactcatggaaaaactgaaaaagatatctattcgtacccaactctttggtaaaaacacccttacctggctgccaaagtgaagccatcaaatgccgcattgcatcaaaatccacc

SEQ ID NO: 91832 - DNA, 947 bp, Cannabis sativa
aaatagatatgatcttatgagagaacctgagaacatatttttggtgttttctttaactctgttttctaaaagctatttaagaaacaggaaaccaaacattttttttttcttaaaacatgtttcagttttataaaacagttcttcaattaaggaccgaaggtgcccaacaggatgtaaaatgtccccataattggaatatagattttatctctgctaggggcaattttcatacaagtaatgcttttagtaatctcatggttatgtgcattttgatttattagtgatcttaatttatatgctcgacacaggtttgctattatgggacttgtgacgaattactttggacctgctcgacctggaacaaagaaatgagattcatcggtttacagagatgagacattttaaattttagctttcatttatttaatttatagtcttatttgattttgacatgttactgaattcaatattaagcagaacacagggtatgcaaactttctgttgtctcttttttttttttttttcagctcagttttaatttttttattgctccccctttttagtatagttttattgtgctttcaattagtggttataactctagcagtcttagggaaggataaaaaagaactaaacttagtactttaaagcaataaaatgaagagatttcttttgaaatatatagggagtctgtggtggggttggaactttccatctagatcattacgcactctaacacaccacactaatcaccacttctaagcgtaaccaaaattacaacaataaccacctcgtcaagtactccaagctcaagaagtttttctccagcaaaattctcaccttcgccctggccactgccattgttatcaacccctttgttgctttcggcaacgatctatgtcgatgcttttgctggaaaagaggccaggtcaagtgaacctaataag

SEQ ID NO: 91833 - DNA, 571 bp, Cannabis sativa
aaacggagaccctatggcacctctaatggagggtcagctaggggtcataattggtggatcccatattataggtgagactagtgaggcctgggaatgctatgctcggacactctatcacgagcctaaaaacgatgtcttgatggttgaagaaaggggctcaaagcagctcaagcttggggagcctgccatctcttttacagagggagatgttgtccaagttaacttcccgcacaatgacaccctggtcattactgcacaattgaggaacatgacggttacaaggtgcatggtggataacggagcctactccaacattctttttagatcaacatatgaaagatggggctctaactaactaacttggcaccttacacacaagtcatgtatgggttctttagttagggcattgcacctatagggtacatctaactgcccttgatggttggagaaaatccaacaaccagaatgcaaaggcataatttgtggtaattgacgtgccatcagcctgcaatgctatgataggttatccagccctgtacgacctaaaggtggtaacatccatctaccacct

SEQ ID NO: 91834 - DNA, 1224 bp, Cannabis sativa
  modified_base (915)..(916): a, c, t, g, unknown or other
  modified_base (1138)..(1147): a, c, t, g, unknown or other
taaaagtttccctatggataaataacctggccataccctaaatatctcaaaaatgggaaaaactagggttcctaaaattgccccaaccagtagaccgattcccgaactggaatttcggttcttggaaaaattcctagaagccaaccggaattccgattcctacaggcctccctgaaccagaattccggttcagtgcaggaattattcaaaatttcatttctcaaccaattcaacaccaatccaagccaaactttccagacctgttctaaacaccctaaagaatattttccaagcaataaaacggagtacccaaacttaaaatcaagtttcaccatgcgatagcaaagtttgagctctaaagctcaaaccttgaacaaacctcacaaacagccatcaaaaccttccaaatcagcataaataaacataatctaactctagaaaacaaattcatacaccaacagcaatcagagaactcaaacacccaattcatgcaaaaatctcttcactaaaagcttaagaaaataaaggagattaagtctaagaattctaccttggattagatcactaacagttgctctacaactctgattacagtaagaaaacacccccatagctgctggtcctttagggttcaaccaagaggaagagagaaaatggtttttctctcaaatttccatttccttaaattcccaaataacaacataacacttagattattctaacatattatggccagctgccactttaaaattcagccaccaattctaagggtaaatgactaaaatacccttccccacaagcataaacatcaaaatggtccatgggataaaatggtcatttctaaaatcttgacaaatcccgacattcccaatgtctaactataccgccctgctatactagaatactaagatgtgnntctactaagccatacaccgcgttctaattttgtcgggcactgaacatgcaaaaatattaaatttctatatatgacatataaaatgcattctgaattcaaataaatcaccataaataattattaaatatcaataaataatttttcataattaaaccctaattatctgctaatttccaaatttaaattaagcggtcttcacaactatccccccttaaaaggatnnnnnnnnnnaaatctaacctgaataactttggatattgggttatcatgtctgattctaattcccaggtggcttcctccaccttgct

SEQ ID NO: 91835 - DNA, 531 bp, Cannabis sativa
tagaaagttcatatttagtgtgtttaaacaacatacttaaacaacatacttgtgagtactgagtacatctaagatcctggtaaaataaattccaacaacaacctctaaagtagtaggagtgttcatcaaatatacaatttaaaccaatcaatcttatttaatctgcaaagtgcagatattcgtatttgtgcggattatattagataaaaaaatctaaaaattcacatttatacagattagacattaattgatatataaacgtaatcaatttaacacatatttatatatttaaaaattcaatacacgtgatacaaatatattttaaaacttagtaattaaatgtatattttatttttatttagaaggaaaatgtaatccaaaataaattttaatatttctaaaaaaaaaattttaatatttttttatacatacaatttgttttctttttttaaatttcttctttttattttatttattttagtttattgttgtaaacacacaacaacgataatttattttattttgttgtta

SEQ ID NO: 91836 - DNA, 873 bp, Cannabis sativa
agttttcataactaatctttaaaatattttaaaatttgccatttttagagttcaaaatctggaaagaaaaaggcaaataatttttctaaaaaaattatacaagtattcaaaatttatggattactagtgttatgaatattttcttcacttcaagttttgattcattaaaatcacaaagaattttttttaaaaaaaataataagaaaaatatataatgtactaaggaaggatgagaaggtggaaagtggtgccaatgatgtcaaatggatgattgttttttttaatatgggtggtgtgatttgacgtgggcagagagaaggagaatagagtagagagagaatgagagagaaaatgaagaggatagcattgcctacttatggtgtttagcactataataaagtgttattttataattggttagtaattttttataatatttattaaagtaaaataagtgagacccgatattgagttacacctcacaagagtgctcgacaccataggtgtcttttagtagttttctttgagaaaggaactttgaattagaatggcaatttggcctatttaagtgagaaaatacttacttttgacaaaattatcaagaacattgttatgagatacttatagtgcgtattactataataaattgtcgtcttataattggttagcaattttataatattaagttgcaccaatagcgatctcacacttcacaagagtgttagatatcattggtgttctttaacatttctcaattatcttattggaaatattagtatataatattattattttgactttttatgtaggatgttcatgtttattttgtgtgtgcatatgccattaatttttttttcaaacaaacctttcatt

SEQ ID NO: 91837 - DNA, 998 bp, Cannabis sativa
  modified_base (54)..(63): a, c, t, g, unknown or other
atcgttttagaagttcatattttggttgttaaatcagcatacttgtgagtagannnnnnnnnntggtaaaataattccaacaaaacactcgaataggtacgagttttgcctttggctgctgctcttctttctttgcctaagggcaatctttcttgaaatgcccaccatgccgcactaaaagcatgtcttccagttgcactctccaggatgatgtttcttacaacctgggcgatcagggtaagagtaaccttgacatccacctctaccttggttcccttggaactgcttgctctgccccaagccaccagatgccggggtaacttttcctttctgatcagtggtggagtcaccatcatccctaccatagacaagagtaggaagagttgggttcccaccaacactcggggctcttttagaaattttaccgcaccctcggctcgtagagccatctcaaccatctctgcatatgatgttacctcattagtagtgatcaccagatgatgtctaattttaaaattcaacccggcttgatatttttctttcttacggaaatcagtaggcacgatacccgaggcgagcttggccaagaagtcaaactttattgtacactcagtaactaacataccctcagtctgcacaaactcagtgaattctttccgcttggcactgcggactgcctcattataatagttggcattgaataactctcgaaactctttctaggtcattacagtgacgtcctgggtgagggacactaactcccaccacacaagagcatcctcctggaactgaaatgtggcccaggtcacccgatcatttccaactaccaccatgaaatttagaatttgctctattacagtgagccactgctcaaacttcatcacatttggacatcccaagaacattggaggtgcttgcttaaagaacctctcataaagccgctccatacggttgccagcaataggttgttctgctggcaccgctggaactacaacggc

SEQ ID NO: 91838 - DNA, 735 bp, Cannabis sativa
atgtaaaaaattctagctactcatcatgttagtggtctaaacaaggccacattgttcgttaattaacctttgtttttgttactgctacaataatatataaagaaggtgatgattcgaatttggaggtaaattagaagttcattgtcgtttaatgaaagtagctcacatgcctccatgtgagcaacatgttggttcagtttcaattccatgcaatgatatatcataaaaaagagaatttataattaattaaacgaccaacttaccaaccaaaacggcagtcaaaactattttaatttagcacaatatatacattgagggactagtgggagaggttgataaaaggggacaaaagatgttattccccatatctttgtttgatttaaattaaatctccattttgctctcaactctgtcctatataatttgaaatgaattaaaaacatttgtgaatacaaacgacaagaaatcttcttagatgattgaatggaatatatatatatttttttcttaataactctaataattttattttgggggtgttatttgtcttggcttaattatattagtcatatttattttgataatgattggaggagattttgtgcctcaatttgtcagattgtcttttctgctaagatcatggacttgtgaaaaaggttgttgctcctttcagtatgtgcttgattaacttctaaaaatccaatcttctaaatcttcaaaattaagataaaataa

SEQ ID NO: 91839 - DNA, 602 bp, Cannabis sativa
ccagaaaccctagacatccatcacccaaccattctttagctgataaggccgaaatcaccgggatctgagattcctgaactgaacaacaaaaacaaacggttcttcaccttctggttggaagattacaatcttcctcccacagtcaatactggctgcatatttggataagaaatttattcccactatgttatcaaatctgctaagctcatttctatcaggtcagaacttaactccctatcgtcaatcctgatcggcataggcctaacccaccttttggagataactaactctccgccaggtaatagggttccaaaccctgattcgtaacgattgtgcggtctatccaatttactaaagattctggttgccacataagaatctttggccccaaaatcaaatagtacagagtaaaaagacttgttaaccgagagctgaccttttaccactgaagggatggcttctgcattagcttgagttatggcgaacaccattgctggagtgggtttctctggagccttcggtgcttccgttctgagttgagggaaatccctctggtaatgccctggcaggccacactgaaagcacccttgtcctctacactc

SEQ ID NO: 91840 - DNA, 656 bp, Cannabis sativa
atctcagagcgtgggacaaattataccttcctaaatcgcggggtggcttggggttttggaaatctagagaaatgaatcaggctttcctggaaaaatgggggtggaaacttttaaatggctgtcaatgtctttgctgtcagattttggaagccaagtatcttaaaggaaaggattttctcagctacaattataaggactctgattcctggttttggaagaacgttgtgaaagccaatgcaatcttaaggaaaggggcttgtaagttggttgccaatggtagggatactagcatttggagggatccctggattcctcatttaaaaggtttcactctgaaaccgactggtaatggtactccgagtcacatctatgtggtcgatctcttgttagcttgtggcaaatgggatgttaccaagttaacaagcttgtttgatcatgatactgtttttgctattttaaaaggtggcaatcctttgggtcaaggaaaggatagatggatttggaccttagagagcaataggcaattctcttgcaaaatggcttatctaactcacgctttggaaagagcgcctcattgtgaggtggctccatcactttagaataaactatggaatagcaaaattttggagcgacataagattctttggtggagcatc

SEQ ID NO: 91841 - DNA, 762 bp, Cannabis sativa
ctaacaggaacagatacacaaaatgtaaatagttttgtcataacacatttatattggattattattaaattttatgttgacaaaaaattagttcaaggtcctattctactatttgaaaaatacatggaccatttgccatttaacaaaacagagagtccaattggtaacttttgtaaaacacaaggtctaaaatagtatttaccctagaaaatattgtgccaaatttaaaacaacctttgctatgtgttaaatttgcattactttttggtatactattggcgcttttttttttttgctaagtgaactatattttaactttgcattactcatttacattttcacgggagatgctctcgtggattttagttttaaacattaaagaaattacacccaaaatataatttcaataatttattttttatttgtagaacccatgtttgttatttaataataataacaagagttaatacgattttagatcttatgttttacaaaaatgactgattagatcgtctgttttgttaaatgacaaactaaattttgtatattctaaaatagtataagtaactaggacccttagctcaatttttgacattttttttttttaaatataactaacttgaaaacaattcctgacacgaatagatgcagaaaatgtaacaagttttgtcataacacctctacaccgggttattattaagtttattttgacaaaaaatcaatgatcaatatactatttagtactattttaaaaaatattga

SEQ ID NO: 91842 - DNA, 872 bp, Cannabis sativa
atacagagataaatgtagagaggagttctttctggcaatttatcaaaaatcataataaatcatggaaaaataggaacaacccagatatatcgtaaaactcaaaacgaaaaaaaaaaagatgatgatgaacaacaaatattgcatatagttcttgatccaaatcaaaattacacattcacattcagtcttcttcccctatgtacaaaacagatgctaacaataacattagcttttcttttctctttcaatcattcaaataagtatctctctctcacacacatatttcagtccaaaatgatgcaatcaaagctggaaaaggtgggaaatggaacgtagagatacaattaaaattaagtacttggggttatcaaaaaaaggtcatacagtattacagtgagtgagaatatactttccttgttcaagttcgaaggtttgttctcattaaaggaaaaaaaaatgtttttaactgaaaggccaattacgatagaaggtgtttaacaattaagttctcctattaaataaatattagaagattacagcagtttcatgatatcgttaattaggttgctagttaatcaatcacaactcacaagtgatcatcagttgagtgctaacttaggaggcatagttgggttaactttgttatactggagtgaacttcgttctttgataagcaaaaggggattgggattagcagcagcacctaattacttcagcagtaaaacatgagcttcttgatattctcactaagtttgggcaatggcatagtctttggagaagcagctcgagaaagtgaggatatagtagttttggagtccgatcgctccaggtaaagcctgcctctgtaagcagccaagtgagcataataaact

SEQ ID NO: 91843 - DNA, 659 bp, Cannabis sativa
ttttcatcagcaggtgaatgtgatcatcaatgattagtgctccctgctggacaattttttttgttcacagactttcggttctgaattttagagcctaacaattcctcatagaatgacaagaaagcatcagtaactttagtttgattttctactctagtaccttctttgttgacaatagagtagatattgttttgagttcttctttgcttgagtgcctggtggaaaattgatgaattagagtctccttctttgatccaagtgatcttcattttttgctgcataaaggagtaatgtggttgttgagtttcaagaactttgtttcgggcttccaattcttcttcaaggagtacaatattaagaggatccttatgcagattgttctggcagatctccatatgctttttagccagcaaatgaacattttgaatgtcacaaaaacaatctttattaattcgcttaataacctgcttcaaggacttcattttcgacacaacctggtacattttagttccagaaattggctgattccactcatcttcgactagcttcttgtactgcaggtggcttcgccacatttggaaatacttaaaaggctttttcccagtaacaagagtcgggtaaacacttagtatagtaggggagtggtcaaaaagcccttc

SEQ ID NO: 91844 - DNA, 693 bp, Cannabis sativa
  modified_base (347)..(355): a, c, t, g, unknown or other
gacctagaattaggatagggacctgggagaaagaactaggagcgggacctagaacccgacctagacccgaacttgaacttaggaccccgctcgtgacccgacacaaaaaattgaaccaaacttggacccgagattggaatccggatatggacccagtgcttttacaaaactcgtagtcgttgtctagatttgggacccagccctggacccgaaccctgagaatgacccgaacccaaacccgaacctcaacccagtccgaaacccaaaagtggacccgaacacgtaccctgtgacccaaaattggaaccaaaactggaagttcacagggactggaactaggacttggnnnnnnnnncataactgaaattggacctagatacagaaccgtcaccggataaggacccacactccaaatcagacctagacccgaattgggagccggacccagatccctacccaaacctagactcgggacccgaatccaaacctgaactcagacctaaacatggaaccaaactagggagacagaatgagggtcaggacctagaactgcacccgagtctcgatcctgaacccaaaactcagaaatgggacctgaggcctaaaccagaacaacgccgagacccgtgacagtgatcctgatcttgactcgagattcgggtaacggggcgtggaatagaccagtagtcggtg

SEQ ID NO: 91845 - DNA, 766 bp, Cannabis sativa
agaagaaagagaagagtgtggaacagagtggtaataatccaagacgtaaatggaagttttttcatagatcatcaactacaattcccacaataacagaatcaaataaacaacctccaattgaattcatatgtcctattactggatcattaatggctgaaccagttattgtttcatcaggtcacagttttgaacgtacctgtgttgaaatctgtaaagctttagactttactcccactttaccagactcttccacaccagatttctcctctgtaatccccaatctcgctttgaaatccaccattatcggttggtgccagaagtactctgtcaaccctccaaaaccactggattccgattctgcagaaaatctcgtccgtacattaatggcgtcacagccccaaaaaccgaattccgatgagattcaaatagaagagaaggaattagtacaagtaacccttctgagaagagaaagaggagtgataaaacaaaaagggtgtctgtctctctctcctctctctaagttattaagcttatgtatgtatatctctctgtgttttggtttatcaaaccccaattaatgttgaacacaactgagaattagggttttctgatttttttgaaggaataggatttgtttattgggctgggagggtttctgtagaaaaaaatagaagaaagaagaaagaagaagaaaaagaaaaaaaaatgtaaaaaaaaattaatttgttaatttttttaaattaaaaaaagtgaaaaagaaaaaaaa

SEQ ID NO: 91846 - DNA, 546 bp, Cannabis sativa
tgcaagagcataaaaaaattcttgttttatatttatgcttattcttgttcatgagttgctattgtggtcatggaaatgtcaagatgatatagaagggcttttaccctcaaccattacaatctctaaccgcatcaggttgtgaaacttgtaaattgagacatggttaatgggtgctcagtgcttttgatattagttctataagggtggaatgagatacacaacagtataagaacttacaaataacatatgaagctcttttaagaaagttgacagaatagtagtggttgatgcttattagaatttggaaaggggttccatctcaaaatcaattgacaatgagaggagtagcccattcatcttatatgtggtgttttatttccacgcattagcaatgtgagactaattctaacaatgttaaatgattaaaaaatatatcttaatgttttgtgtataatatgaaaaatgcaaaagagtttattttggtcgacctgctaagtttgtctagaactaagaagttacctgtttgacttggactgtgtacttcac

SEQ ID NO: 91847 - DNA, 635 bp, Cannabis sativa
ttttttttctaaattttacttattcgataattgtagaaaaaattacacaagtttttcctgttttaatttttttaagtcttttgtataattttttactatttttttctcatgtgtttttttttttcaattttatttgcttattttttttcttatttatttaacagcaaatatatagtaatttagaagactatacaaatatatatgatattaattttttatataaaattttgttagctattattttttttctaaattttacttattattaatagtggaaaaaattacatagatttatatttaaatatgatgactaatgactgtactttcaataatcaaatcacactatatttttgtttaaacataatttttcaataattatttaaatataattaataagaataagatatataattataatttacaaattttaatggagttacctacctctagctagcacattctctatgcctaatatgtatagataaattacattgtagaatgtattttattgtaaatatagttggtatttaaagagaaatactaaagggcaacagtatctagtactctcttatgtgtcaatattgttattggtccaactaagtatcgagtcgcatattatttaatataatagcttt

SEQ ID NO: 91848 - DNA, 1438 bp, Cannabis sativa
  modified_base (33)..(48): a, c, t, g, unknown or other
aacataaaatcaataagaaaattacataaaagnnnnnnnnnnnnnnnnacaaaaaataacatacatataacacaaaatcaacaacaaattaactgaatacaacataaaagactgtaatttatataaataaaatcaaaaaattcgtaaaaatatttaaaattccgtgaaactgtatttttgttatttttttgttgtttttatgtatttgtgaaattatccctattttctttagaaaataaattagaaaaaaaaaatcacgcctcgtgtgcagttgtatttttatttagtggtaattatgttataaaaatatatcaaattttaaatttttttttagtcaatcagtaaaattcattactctaaaaatatcaatttatatcctacaagcatcttcatttgaagatatgatttctttatatttgtacaatctataaaatcaatgtataaccatgcaacaaaatatgttaatcaaatgtttgaattacaattttaaaaaccaacaagtatcagtcgggttgacatgtttgggccaattgcagattactcttctcttcacatcttcttttgtaacatgaaccacttgttctagtgattgctttgtcgaattccacaatgtgtcatttcgaatcctccataattgatacactagggcagcaacagcagcagccaagattgccttcctaaacttgctgattttggctcgttctatccatcttaacagtctacttaaggctattgtttcaactctccaaccgagccaagcatttacttgagataagcaaaggttagagaaggagaaagagaagaattgatgatctgaagattctgtttggtttctgcagattaagcagaaatcttcaccaataatattaagtttatgcagcctttctctgattttgagcctatcttgaacagcaatccataagcaaaaattatgtctaggaatgttaagtctattctataccgcatggctccaattcactttgtattgggggggacaaaaaactttgtaaccattagagatcttttatttaacagatgcaaattgatgaatgtccatagaagctttaacttgatttttgacagcaaccaatttcttccaataccaactagcttttgggggagcttggtagttccaccaatcttcacccttaatatacacacaatgaatccatctaatccacaacttgtcttccttattcgcaattgtccacacatattttgtcatcgcttctatgttccattctacaatcattttcaaaccgatccctcctgctgcttttggttggcaaacatggtcccaagcaatttaaaagtttgataatttaatacttttgatattatttttttttactaataaattgactattttacaatattttttacttagaaaaataaatgaatatcttacaaaataaagtcatgaaaaaaagactgttga

SEQ ID NO: 91849 - DNA, 1166 bp, Cannabis sativa
acacatggactccaccaactacctccttcgattaatgaaatataaggggcctcacaccaaagagaccaagctgggtttgaaggctcacacagataaaaccattagcagtattttgtatcagaaccaagttgagggcttagaggtccaaaccaaacatggccaatggttttctgccaaaccctcatcttctcattctttcattgtcattttaggagattgttttcacgtaagtacttattttatataatatatatagatacgatcagttgtaacaaattaagtttattatcactaaccataaaaactaaataaataataaaattactatatgtttatgtggtattttgtataggcatggtcaaatggtagattacattctccaaatcatagagtaatgatgacaggaaacgaggcaaggtactccactggattattttcgatgccaaaagcaggttacatagtcaaagccccacaggagcttgttgatgaagaccaatatcctttgttgttcaaaccctttgaccattttcgattccttgacttttgttatacccaggctggtcaaacagccctatctcctctccactcttattgtggcctctgatcatcttatctctgttttcatatccaaaataatattttaatcaatttcgatgatgtacgttataattatttaaaatatcatgtaaaattttaagaaatttgaaaaaatataacacgttgaaaataatattcaaacagtatgttccacgtgtgaccattttattttatatgcgtgtaaaattaactgtttaaacactgctttctatattgtaaagtattctaaatatttcaaaatatttttgtaacatatctgcatgaatatgaaaacaaaaataaactaaaaaattcttgtggataccgaaataggtagatggtacatcagtgcatctattttaagaaagtgcattgtatatatattattcgggagatcgatattgtatatatattacaaagattgcagttaagtatccaaacaattaaatttctaattatattcgatgacaataaaaagaaaagtggtttttaaattcgactgaaaaaaaaaaaacaaataaataaagtgaaattaataatgattaaaacttaaggtgattaattttgattgaatccacgtatgatttaat

SEQ ID NO: 91850 - DNA, 698 bp, Cannabis sativa
  modified_base (225)..(228): a, c, t, g, unknown or other
  modified_base (310)..(320): a, c, t, g, unknown or other
  modified_base (458)..(461): a, c, t, g, unknown or other
  modified_base (652)..(655): a, c, t, g, unknown or other
actgttttataattttcgtaacaatcaacaaggttattgaaaatcgtgaataattaaaattttcttatttaattaaaaacataaagtaatacatttataataatctgggatcccgttacaaaaagtatttgtaaaagtttgctagtttaatacaaaagaattgtcgcctaacgactgtcagcaaaagccttgatgtcccttaagatcgtacgctccaggcctaannnncccgacatgtacaatcttcacctactcgtcctcacggctcctcagctttaaccttgcccttacctcaattccgaattcaggnnnnnnnnnnnacctgagtggaacaactgctcagcaaattataggctcttgaacttgaaaacactaatccttgcaacaacaagcttgaaatgaagagaagctacagcaaaccctagctggtctagggattgagagagagagagagagannnngagagagagagagagaagttgaaagagagagaaatggctttctcttattttttctaagtttgaaaataaatgagtaaataaatttttgttttatttagaagataatatcggctaacttagttaaaaaaatcagattaaataacttaagcaaactcacaaaatgacaaaaggctaatggggcaaaatgaccnnnntgcccctcccacactaaaagtcataaaatggcactaaggggta

SEQ ID NO: 91851 - DNA, 590 bp, Cannabis sativa
aattaattattatttttgtgataaattttaatttgaggattaaaatatatgtaagattatattttaaaataaaataaaattataaaggttagaatgcaaaaaaaattgtataccaaatttgtatagattcaaaatccaagagtactattaatggagtagaattttgtgcacattaatttactatattaattgaagtgaaatgatgtgaaaatttaaaaaattaacaaaacgacctaaaaaaaaacatatatttcgtaaattaaaaaacaaaaacatgtattacgtttaaacacattttcaaacttatattattcaaacttttgcattatatattacgttcacaacttattttcatgaaagcaataaaaaccacttcattaaagaaaaaagtcacaagaaataaaacatggtaattgaattatatatatatttcactaataattagcactgtgatataaaattacttttataactattttagttataatataaattttttataactaaatgtaatttttagtcataacaaaaaaattatttgtaactaaaatataatatttgaatataaaatattgtgactaaaagtacat

SEQ ID NO: 91852 - DNA, 604 bp, Cannabis sativa
  modified_base (35)..(46): a, c, t, g, unknown or other
atctttattactaagtaaatctgattatattgaannnnnnnnnnnntagggcacaaaacccaacagatgtcccatctgtacttgtttaggaaaatgcacctgcccccatgcaaggtattttaacttgcatttacttcttttatattatgctttcacatatagtatatctatctctaactgcattgtcttatccatgcataaatgtcttaaaagatgctctaagccttaaagaagagggtaggagacagctcgggcctgtctcctccagctaagaagtctagaggaagtgagattccatccaaggagaaggcgccagtggatgagatcattaacctttctgagcagcgacctattgtggaccttctagttcagaaggtctcgatgtcaaagagttccagaggggagagctcagacgggtctgatcaagtcaggaccccatcaacaaccgtggcgctgagcacaaaggccaagaggggtaaatacaagttctagtactacttgaacttatcacttcttgaagtgagtgatcagatgtccgaggtagacaatgagctatgtttagagcttttcctaggagaattcttgaaggaagctactcgggtaa

SEQ ID NO: 91853 - DNA, 655 bp, Cannabis sativa
ataactaataactatgagaaaataagtagatttcaatgtggttcaatatccctaaagtaaattgctctgtgaaaacaaagtagatttcaatctcagtctagttcttcagtctcttcaatcaagaaactctcagtgggaaaaaaaaactaaggattgaaagatgtaatgcaagacaaagaaatcacactttgctcatgaaagaataatttaaaagaaacataaatattacatattctttccatgtggatgcgctaaaatttaatttctttaaatgctgggaaacgtgattcagccgatggcaatacatgatatccatcgcaaattcacataagtacaaaagaaacataaaagctaacccacatttcccattatattaaaaacacaaataaatttgaggcaagagggattgaatcttgcactacagaactgagtgtactgtagtgcgatttacttgtgttttaccaagtaacaaaggtgcattttcaaggtaacaaatacagaaactggaacatcaatgatcccaatcatatttgcccccatttcaaaccccattttcctacgtaaatttacaagttaatctttttttaaaaaaatgcaataaattcgaaatgtccaacgcccaaaagaaacaattgccaaacaaaaaacaaataca

SEQ ID NO: 91854 - DNA, 735 bp, Cannabis sativa
gtcagttggtcagcttaagagatttcatataaggaatgaaaagatataattacaaattatgtattgtgggatcttatgatttcgactgaatagtaacagttggacataccgagttgatatgttgtctatcagtgtagacaatttatacaataaatgaggatattgaattcatatgaaggaatagtcttatcttgtgaaatttcaaggttgatatctttggctatgatgtcaagaattaaagaaggttattgagaaccatggagattaaaatagtgtgatgttttattcttgaaaggtgggtaacctgagaagatcaatggaatattaaaaacatgctttgagcatatacgataaatgttagattatcttagaataatctcttcccctgacaaagtgtttgtctaaaagtgataataaaatgtaccactggaccttaataagtgtggtacgagataaatattagatacatgtttactggattaagtaggctcgatagcctattagctagccttaactcctgcattgtctggagtataaaatgtgtttcatgtctccatgctgagaaaatatgattcaaactcgatccatattttgagctgtgacgatgttaaacttcagacatatttattatatgggaaaaatggacaagaaaaatgaagtactatgaaatgagacaatttcactagttaagaaagtgctgtagaaaaatagcaagatagaaacaacaatttgaga

SEQ ID NO: 91855 - DNA, 706 bp, Cannabis sativa
  modified_base (69)..(75): a, c, t, g, unknown or other
  modified_base (213)..(217): a, c, t, g, unknown or other
tttgggcggtttgatcgggttaacccgcccaaacttttttttttttagtttcaaagtcaaaatcaatannnnnnnaaaagataaattaaaaatatcacaatcgactaaagtataacacaatatatgtgactttaaaactaacaattaagtatataactttatattattatatatttaatcatttatgttatatataataaaagctaaaaagtnnnnnaaaaaaattaaaattcaaaatcgggttggtcggtttcaacccgcccaattaacagattggacggtttgtaattttttgtggaaattacctgtattatggatttttattaaatgtttagataaatatggataaattttaattttaggtaagttatggtatttttctattttaaattattatgtgggttttttttttccatatttttaactcttttttttttatatttttctagaaaaccattttctctcttacctctttgtcttctcctccaccattgttcctcttcacctctctgtcttctcctccatcttcactcctttcattctcaggtgaaggttcttctaaaactcatttttccttctttgaatatcattaatttcacacatgtatagcattgatgtgggtcattggtagcaagtaacatggttattggtagcaagtaacaaatgacccatgtccaaataaacctgaagaggaggcattgattta

SEQ ID NO: 91856 - DNA, 525 bp, Cannabis sativa
atttgcaaaaactcggtttttcatctttatttatatattgatcggtatatgttgttactgttgtaacatacatctattgaattataaaaaattattacatatctagctcatctttagttaattaaaacataaaacttttgaacggtatattcttctcaaaagacaatactcaaaagtaatgatttttaaactaactatacttcgaaagtggtcatctgaccttagcaccagttgatcaattgtgttgctgttttttaacaatgttagatcttcttcttcttttgaaagaaatgttagatctttcagtcatatatttttcacaaaattatttaagtaaaaagactaacattctcaataaagttgggaattctcttacaaacaaaactaaagacttagaaaacaatgcagcttaattatcaaacgaacgacaacaacatccagcatattatttattatgataatatgataccataaattaaagtttaactaataaactagatgatttttttagttggtggtattcaa

SEQ ID NO: 91857 - DNA, 916 bp, Cannabis sativa
tactacatatcgtttatcgcttataaaatagactcattgtcgctggctaaaagcgaagtcaacaaatataatttagctaagatatatataaaatatataaatatttttgtcaattaaatatgattaaataaaaaaaataatgtatacctatttattataactaccaaatttcatatatatacacgtagtttatagattaggttgatgtatgtttaatttttttttaattaagtaatgtattttatttttttttaaatggaatttaatattttaatttttgagtgttttttaactattacagctatattggtgttctctttagatgtgattatatgcatatatataataaaactcaagtaagatatcatgatgaatcgttgcgtactaaaaattataaaaccacaaaataccgttaaattaaaaattttatttaaacatctaatattatattttaaatgtataattttaggtagtctagaaaaaattaataagcgtttttttagagtcgaaaatttagaaagtttttaaataatgcttttacacataataaattaagagaaaattatacagtaagtatactgagtttttcttatttttttacatttatactgccacgtggtattttttttccttttatactgtataatttttaatgttttatatggcagtatactgctttttattaaaatatttttttgtcatttggggcttccacctgtcttcccaatattaaacctttacaaattttaaaagttttttttttatataaaaggcttgatgttgatatatttacataaacgtacatactttctctctaatttatatatataattttgatttaattgatgttgtcaccttgtgacaagtttatttatttatttattttacttaaaattgatgatgataaagatgagac

SEQ ID NO: 91858 - DNA, 936 bp, Cannabis sativa
  modified_base (218)..(220): a, c, t, g, unknown or other
acatatttttatttttcaaaaacacaattttaaaaacaaaagtttacttttatttttgtgattaaaaaaatttaaaaataaaagtgtgaccaaaagctaggttaatatatagttttaattctatattttttaataaatttaattaaagaattaaaatattaagtattatattaaaaatttattattactttaacttatctataataataataataatnnnaataataataataatattaaattatagtattttttaatgtgtcatgtcgtgtttttttaagtttgtctcgtgtcgtgttttttttgactaatttattcatgcttacgtattatgttattcgtatttatcgtataaatgtgcagctcgaatttttgagatcatgctaatgtgtagcatgtccaagtccatgttttttcatacctggttgtgtacgtgccactcgagctcataccaatttcgtggtgtcaaaaaaactcacccatatttagagtagtgctttcgggcgtactcttattaaaatatgtacctatttatctagctagcaatatttaaataaaaggtcacgatgcgattactattattttttggttttgaacagattgacatattattatttatatatacaaatgacagtgtatcatgtattctcccttaaagtagacagcactaataatttttttaataaaaaaagaaatatcatgaccaaagaggtgtcaagctatagtataatttattgtaattgagaaaaataaaaatctacagaatcacgtataagatattgtgttttgtcttggacttggacacaatattaaatcaaacttaattagtataaaatataaatatgggtttctagtatagttggatggagcatgttgggtaaattgtagaaaattgtttagtcttaatattctgagacacacccatataaatatata

SEQ ID NO: 91859 - DNA, 590 bp, Cannabis sativa
tttttattttagaaggtattagaagaaaaagcaccaaaaatcaattctcttcctccctctccttcatggcctagaagctagccaaaaccaggggagtttttctcaatttctctctgattttgagcaaatttgatacccaagaagctttggaggtaagtcctttactttgaggattgtaattttcaattttttaagttgattttggaatagggttttgggatttcgtggctataggattaaattaggttgagattgtgtttttagatctgtttttgagtgtgttggagtttatatcaagcaattttaatggctatttggattgaatatgtttagtgaagtaatttgagcttaattttcatttgagaatgtgattttgagtaaattgatgaattgtgaggaattggtgatttggatatgttatatttgttatagtggacttttctggaaaagtatagcaggtttggtagaggtttgatcagattttggagtgaaaaaccagatttccccatggctgcccaaaaaatcggtccaccggtttcctaggcaactggcaaaccggtcgactggtttggccagcagggggaaatctc

SEQ ID NO: 91860 - DNA, 889 bp, Cannabis sativa
taagagtcctataggagacaaggggacataattaagtagatattcttgcatttttatatatacattggaagttgattttaaccctttttttctttcaaaaatatcattaagaaagtggctagcatttgggagaagaaactcatacccaatatggccatttcttcaatgttcaatgtatattatctgtgacccacatatatgattcttcttgtcccctattggtttttacataaaagtactttttaagattaagaattaatgtgtttggtttaacaagagtgaatcaagtaagttaattagttgaaaaactaattgacaaagtcctagtaagaacaaattaaggcacattgttgaatagagaagaagcattatacattatgtttattaaatttatataaggcaaatctataacatgtgattgcattgaatgatgatgaaattgaaccatgtatttgtgtcaccataaccacaccaaggccactcaccccccattcttctcatctatgccaccatgtgatataatgggaccaaaaaaatcatcaattatgaaaaaaaatatatatttatttttttgactatttttttaagttattttggataatgacattaaaaaaaattacaaatttatggattttttatatatttttttttgtttaaaaatatagtttttttaaaaaaaaaagttattttacaaaaaaattgaaaaaaaaaagaaaaaaaatatgggaaatcagataagaataagtactcttatggtagagtaaccaagtacctcatcctatttttttcatatcttttaacttttaactaaaattttctcataaaataatctttttgagaaaaaaaaaattatatttttgcaaacttatactttaaaaattataaaaat

SEQ ID NO: 91861 - DNA, 675 bp, Cannabis sativa
gtccggctatatgacaataaagacagcgctcttgggaggcaacccaagttttaatggtgtttttagttgaactttcttattgtttttcttgctttttgttggtttatgttcattgaatttgtaaactgaattttagtttattgtgttttattcttgtgcaaaaaaaaaaaaagaaatttttctgggcactgtccagtggccgcggcgagcccgtatgtggccgcggcgaggtagagtgttcgccgcggcagaattatttacggccacgacgaaatactcttggtagaattgtgtatttttttgccatctcgctgcgacgagaccttctttggctgcggcgggaatgcccagacggaaataaaagggcactttcgaatttcaaccccaaaacacccattcttcaaccctaacctctccaatccaatttctccatcccccataccaccaatcttcaatctcatctcaccaaaaccatttttcttccatttatctcttaatcattcatctctaataacatcaaaaaccctatttctctcatcaattcatcttttcctctcaacaccacactcaaatccctaatttccactcaattccaaaaattcactattcatcatcttcatcctcaagaacttgaaatgtcttcatcaatggaggttgagtgaaggaaattctcat

SEQ ID NO: 91862 - DNA, 693 bp, Cannabis sativa
tgcaacatatcagctccaacaacagaatgccatagctgtaaacatccaccttcactgtcacagccatgtttctaaaccattcaggagcaacatatcctttggttcctcttattccagttgtagttcgagtctgatcagtcttcaaaatcttggccaatccaaaatcagaaattcttgctgtaaatgagtggtctaggaggatgttttgaggcttaatatcacaatgtatgatttgagtgctgcactcttcatgcaagtaaaatagtcctcttgcaatccccaaagcgagttgctttctttggtgccattttggctttgagggtccaaaaagaaagcttgctaaggatccattgctcatgtactcataaacaagaagccggtgttgtccctcgttgcagaaaccaataagctttaccaaattcttatggtttgtactaccaatagacatgacttcagctttgaattcttgctcaccttctttcaccatgttgttattgtacaactttttcacagcaattattgaagttatattattgttgtccaattccacaacacctttgtaaacaactccaaaggcaccagctcccaattgttcctcgaatccattggtagctttttctagttcaacaaaactgaaattctgcaaattcatttctaggatgttctgatttggtttagtgattgatgctttgc

SEQ ID NO: 91863 - DNA, 510 bp, Cannabis sativa
gtgtactcatcatgcactccccaaataattattatttgcagtataattaaattgagggtgaaatctttttatattttaattttatacatttaatttattatatattttttttagtaaaatcttctaattttatttttctttataaatttgaggtgctaataaaatctcaacattaaataacaactagactgccatgtatacatttatatataggctgcatacatttattagcttcaaggtacacatctatacacaatgacaatcatagttaacatttgatagtaaaattaagatgacgttttgttggaggtaatgaaatagagtggaaatgcaaatgaaataattttcattccataatttctttatttggttgcatattaaagtattggaatgtcattctaatggaacgacctttctaccattttcgtggaatgactattttattttaaaataaaaagaaagatcattctaatgcataataatgagaaaaaatatcaatttgtttatgta

SEQ ID NO: 91864 - DNA, 806 bp, Cannabis sativa
cttcatatacaagcatattgtgatacaaattgggctatagatccaaatgatcgaagatcgacaactggttactgtttgtttttgggagaaagcttagttgcatgaaaatctaagaaataaaccaccatctcgagatcatcaaccaaagttgaattttgaagtttggctactgttgtcattgagatttcctagctgcaatctttgttgtcttagctccatatgaagacaactattacaccctctatttggtgtgataattggagttccataatgctagcagctaaccctgtattacaagctcgcaaaaaaaacatattgagattgacctctactttgttcgagataaagttctcaataaagaaattcaagtttctcatgtccctatagaacaccaaatagcagactgcctaacaaagctaatttctaacaatcgttttcctcagtttcatgacaaactaaatgtcttgtactcaagcacacttggtttgagggggactactaaggaaactgaagctgagttgtccacttagttagtatttctgttatggttgttatgctttctattgcaactaattgagcttctttcctttcttggtttagtgtataaaagcatgtaacactctgttttttagtaatcaatacaatttttaattctttctctatcttctttcttctctctcttctctcttctccttcattttcgtttacaccaaacaccattatacataacgaatgcaaaagtagttgaacctgtgatccacaaacatttaaataaaataaaatttagaacaaaaatctaacagaaa

SEQ ID NO: 91865 - DNA, 792 bp, Cannabis sativa
  modified_base (27)..(36): a, c, t, g, unknown or other
tgataatatgattgagtgggagtgctnnnnnnnnnnatggaatctatagcttctactggcactacaagaaaatagatttttagcgactagatttttaacgactaaaataatttagtaactgaaagttagtttttcgactaatatttagttgcagatatttttagtcataacacaatgtttaattggaaccaaaaaaatttacgactaatttttagtcattacttgttattatgattaatgtataaaaaagaacaatttatttattattatactaaattcaaattaaaaatggttttgtaaaactttttttagagggaagctaaaaaactgagtgctcccgcgcttatcttccctccttaggcataacttctctcacgttactccataaccattttttctaaagaagtagtttcaggtaaattctatctcaaagaaggaacgaattcgatatataggctatgagctttgcagtaacggaaattgacaggatatacaaagggcttcgacgaggattcgacatattgattttcccccaaattctgaatttttttcccatcgttcaagtttcaacttgaagtggttcttgcttcctaaccctaatttgtgtgtgtgtggtgtgtgtgtttttttagctgtatttttatcattgtaaatgtagcttgaatctttttataggggatttatatgacatttttctttagttaagttttgttttgatatgtctagtaattttattgttacatgttaggattgggagcaaaaattgtggaccaaagaggtaaacaatgtggg

SEQ ID NO: 91866 - DNA, 910 bp, Cannabis sativa
  modified_base (465)..(471): a, c, t, g, unknown or other
caattttagaaataagtctcgtcgtttcctaaaggcaatacgccttagtttccgattctttacattgtaatcatggaattaatatagcttcatattttatttattatagattaaggaaaaccactcatcatgtaataagctcttataaatagtggcataatctaactattgagggaggagaaattgagttcagaagaacattcaagagagaaaattgatctaagagaaagaattactaagagatcaattgtaagagctttggagagaaagaacactttattcttactctcatgtcaataaaattaaaaggggagtagtctattaccattctcatgaggtcgaacctctagaaaattttgtgttatttttaccttattatttttgttttttattatttattttatctaatcactttatcttgactcactgtcgttggctagaagcgaggtcaacattttggtgctnnnnnnnagagcaaaaacacaagcttttattttaaagtcttgacaggttaacaggatggttgtacaaactcgaaggggaggcctggctgatcaaggtgatccaatggtgactgatccaaacatgcaaaatcctagaaacacgagaggactaccagggacaaaccttgaacaaattaacaacacaaccaccaccggtaggccacagactgacttcctctctagctgggttcacaccaggcgtacaggaaactgaaaaacaccagtacgtcgaccgatcaaaccactcctggcaccaagatcccgtccactaatagcactcaaaggccagttggacatgacacttactgactgaggtttttcgacaaccaatataataataataatataaagagctataaggaattaagagagagatttttacgtggttggggcgttcatgagcctta

SEQ ID NO: 91867 - DNA, 1989 bp, Cannabis sativa
gatgacttggtactaaatttatgagtaagttgaagaaggtacaacagaatatttaggctaggaacaagaatactttcggaaacattcgaatgattaagttcgcaatcgaaagaagattggaggagctggagaagttagaaggaagaaatgattggagcataacacttgccaatgagagaagggatattgaaaaggagtagcaaatgctggcatttgaagaggaaaggactgtgactgtagtcaaaatgtaagtgggccaaggaaggatatgcaaactccaaatttttccataatttgcgaaatgtaagaaaggctagaaacacaatttctagaattgagaaagaggatgggtcggttattgataaagaagaagaaatagttgcagaattgatagagttctacaccaatctatatgcatccgaaaggagagtgggcttggggatagaattaattgggaaaagataagtgacttttctactagacatacagaacgatctcttatcgaggaagaaattagaagtgtcgtttttgaatgttaaggaaataaggcttcggacccaaacgatttcagcttagcagtcttccaaacctattgggatacaattaaaggagatctattggaagtgttcatagattttgaaagagaaataagaattctaagaagcataaatgaaacatttatatgcttgattttgaagaagattaacagctgcaaagtgaaggattttaggtcgattagattgataatgagtgtctataagattatctctaaagttttggcttatagaatccgagatgtgttggatagtactatctctgagactcaagcgacattcgtggacggaagacaaatactagactcaatattgagtgctaatgaagtagtggaagagtatagaagtatggacaaaggtgggttggtgttcaaaatagatttcgaaaatgcatataatagagtggaatgagacttcttggagtttgtcttggaacgcaaaggttttggtacaatttgtaggaaatgaatcaagggatttatctcgtcaacttccttttcatttttcttcaatggtaaactgtggggaaagttaagttcgaagggtcttaggcaaagtgatccgttattatctttcctatttacattagtggcgaacatgttaggcagagtgatggacaataatgtggagtctgataaactactggggttcatcatagaaaagagaagattcaagttagccacttatagtttgctgatgatatggtattctttgcgggtgatgaaaagtcattgcatgccacgatgatggtggttaacgtgttttgcacaatctcaagattaaaaatcaatccgagcaagatcaattcttagggatttgtttggatgagagtggtgacaaggtgtgcatcttcggtacccattaattttgcaccttttaacatttcttaaaaaagaaaattcttgtcacactttctttttgattcacgattatatgttatggattcctcgtccatggaatccttgtcgattcttctccccgttccttttattttgggcatctcatactaagactcaaaactaacccaatctctatatcgtcactgaacacaaaaaaatattagaatttttgaaggcgtcacatcacaagtgagaaatggttcttagccaacggtgactagctcaatgagcacctttgagggatactttctttcgctacggctctggtgggttcctttaaccaagccactgcctatgagtcgccggctcattcttcaacaagcacgcggtcagagccctaggctcctcccactgcttgagagcttacggtttcatgttctatttcactctctgatggggttcttttcacggtgggggcttccattcaccagcgtagactaaaaatgctctccaaaccgtgctggatagtcacccatcacacgactctcaaacccaacctatggtgaatcccgggggacaaagtcaaagcgcttgat

SEQ ID NO: 91868 - DNA, 1497 bp, Cannabis sativa
tgtcctcactctaaacagatttatacctatgctgatcttgtttcaccaggtctgaacccaaataatgttgttcctaatgcttcagctcacattgaccatgatgctttatgtgatttgcctgtgcctaatcctattgcttgtaataatgctgctaacaacttgcacacagaccagccatctgtttttgctgcaggagaaacatctggttcaactaatactgatttctcagtcgagttgcctgctgcaacacacatcaataacatcagtgacctccctattgtgcgagataattccatggcatcacagagagctgaagctcctgaacatggtgctgcggtgtctgctggttcatcatcacagacagcttctgcaccagataccagacctgcaccagatacaagaccagcaccatgtttctcctctccagcagccttacctctcctatctggttgtttaaatgctcctggaagaaacaactctcaccatatgacaaccaggtctaagcttggagtgtttaaacctaaggcatttatggctttgagagaacctacatccttaaaagaggcattacaacaagagcattggaacaatgctatgggtgatgagattcttgccttggcaagaaacaaaacttgggtacttgttagattacctgaaggaagacaagccataggatgcaagtgggtttataagaggaaagagaatccagatggtagtgtgctcaaacataaagcaagattagttgctaagggattccaccaacaagcagggtttgatttcacagaaaccttcagcccagtggtcaaacctgttacaataagagttgtgttaactctggctttatccaaaggttggtctgtgagacaattggatgttaataatgcatttctcaatggtgatttacaagaggaagtctacatgactcaaccaccaggttttgagattcctggtcaagaacacttagtgtgcaaactaaacaaggctctatatggacttaaacaagcaccttgggcttggtttgagaaattacaacacagcttgacctctcttggtttcatctcttccaaatctgatcactcactgtttattagtcattctcccaaatcaacaacactagttctagtatatgttgatgatattctaataacagggagtgatgagatagctgtaaccaatctgattaccacactcaacaagcagttctccctcaaagatcttggtcctcttagatactttttgggaattgaggtcaattatacagatcatgggattcatctttgtcaaaccaagtatgcaagagacttgttaatcaaagcccaaatgctcgggtctaaaccttcaccaactcctatggttagtggccttcgcttatctgctcacgagggggaaccgattggcgatgttcaaatgtacagatcaattgtaggtgctttacagtaccttacaattacaagacccgagctatcctttagtgtcaacaaggtatgccaattcatg

SEQ ID NO: 91869 - DNA, 699 bp, Cannabis sativa
ggtaaaataaattccaacatagtgttgctgttacacccatactttcgagatactactgcttactttaggatgtttcctacaaaaatcaccccgaaaagtataaaatacctctcgacgatgtttgttatatatgtagagctaagttggcctcagcatactccatatgtgtttggatactactttgatctaaaatctactccaaagtagaaccggatggggtatttatacttcagtcaagttagccatcagtggttgggtgacaccaataacacgcctatgtcaaaagttggtagatatgtttggaactacttcattgcctaagacattcataatatttgacatcaccacttccagcgagtggcgacatacaagtactccatccctactatgtagatgagggatagggcgagtcacatcttgtccctccccatggcgaaaagaaacataattaggtaggccaatgtaaccaactttcaaaagtaaggtatgtatcctcctgcttttggagttgtgggggtcgagggtccatcagttggtgtggatggagcctcagctactgagggcttttttcctggtggtggacatgttcctaacatggatgacgatgtgcctctatcccagacagccctgggtttggagaagatagagagggccctctgctagcacttggttcgtaggggcacagttggggacactact

SEQ ID NO: 91870 - DNA, 706 bp, Cannabis sativa
ggcataaaacccaacaacttgtaccaaggcattcttgatagtgtagaggttggcaaaaatcatgcttcaaatattggccatcgaattgttctaccatcttcattcataagagggccaagagatatgagaaagtgttacatggatgctatggcattagtacaatgatttggaaagccagacatcttcttaacaatgacatgtaatcctaattggttggaaattaaacaataattaggcaaaaattaagaaattcataattgccctgacttgatcgtaagagtttttagagcaaaattagaattacttaaagtagagcttttcacttcacaaatatttggtgaagtagttgcatctatgtatgtaattgaattccaaaaacgcggccttccacatgctcactttcttataatcttgaaaagttcttctcgtatttactctcctaaaagttgtgatagaattgtttcagctgaaattcatgacaaacttgaaattccttatttacatgcattagttgcgtcatatgatgcatggtccttgtggaactttaaatctaacaaatgtttgtatgctacaaaacaaaacttgcaaaagtaagtatcctaagcctttttcttcaaaaataacctgtggtgacaattcatatgctatttataggcgtcgtaacactggtcataaagtaacagtccgtaaaactttattggataat

SEQ ID NO: 91871 - DNA, 652 bp, Cannabis sativa
tttcaatcgttataaactacttatcacttactaaattagactcgctgtcgttggctaaaagtgaggtcaacactaagaaatgcacttttgggaagtttcaagggtatattgtcggttcctgggcaattgaagcaaacccagagaaaatcaaagccttcattgatatgccctctcccaaaaagcataatgatgtccaaagtataaaaccgcacattgccgcccttagtcggttcatttcgaaatctacctacaaatgtatcccactctttaatgtgttgcgaggcaacaaaaagtttgaatggattgaagacagtgaggatgcttttcaaaagttgaaggagcctctgaccaaggctctagtgttatcgaaacctgtagagggtgaagatttgtttttgtacttggcagtgttagatcacgctatcagtgccgcacttgtgcgagaggaagacaaagtccagcacccggtgtattatgtgagcaaaatattgtagggagcaaagtccacatatcctataattgagaagctaaccttttgcttattgattgcatcacgcaagctgtgaccatacctccaagctcacgcaataagattactcacaaattatcccttacgacatgtgcttcaaaggccagagttttttcgcaggtt

SEQ ID NO: 91872 - DNA, 1310 bp, Cannabis sativa
caaatgggagaatgttagaatattttttatatggtaacaaatcaaatattttatttgatttgatttataaaatatttttaattatttactaattaattaagatattctaactatagtcagatttaattaccaaatatttcagttactcgatttaattttcagaattaattgtcaaaatattttgacattatttgtggcagagaccttgatggaaggtctcacctatataaatatagggtcttgatccccgagctcactactcattctttaaaatacagtaaatccatctaaagagagtagagagagcttggaagcccgattacccacatcaatcggtttcttttgtagatcaaagcttgtgtgggatttaagctcaaaaaatcaatggttggaggtatttcgatcctataatcatatagtgtatatgttcgtttatttcgcattttatacaataattatatatgcttcatttcatatacataaatgtctagcactaggaaccacttagcgtttggttggagggaatgaaatataatgaatataaatgaaatttttttattctactcatttgtttggttttattttaaagtattaaaatattatttttattttagctatatttttattctttctaaccaaacgttacctaataagatctttgttatgtgagtttgacttagagagagtaaaattaaaagggtagacatggaagaatataaaagtcatgagtttgagggattaacaatttaacattactaccattttaattaaaaaaataagacctacttaaaaatataaatcttttgtcatttaaattttacattcatattcttattaaatttaaacctcactatgttcaaaaaaattaataaaccacccaactcgaataaaccgtccaaaccaaaccgaataaactgacaaaaaatacaacccgaataactttacgaaaaattcaaaccgtccaatgaatatattgggtgggttgaatattattctaacccgaataaacctatttacatatttttttactaaaattatttataacataatatataaattacgtttaatatttgaactattttacatttaaattttgtattttatagtgtttttttttaaattatatagtgtttaatttgaaatttagaatttatagttaataattttgattgtatttgaatattgaaattaaaatttagaatttacatatgtatttttattctattttttgaaaaatattgtttaatactttaatgtttattcaatttatatttgtttttaacattagtttaaactataactattttaat

SEQ ID NO: 91873 - DNA, 623 bp, Cannabis sativa
tattcaagctttatccatttaaaagtaagggagtaaatatatgtatacatataataatagaaatatattaataaccaacttgtcatataaaaacaaactcaattagcttagaattgaattgtgtagttgttttgcaagaaggaaaaacaaaattctaaaaatttgctagaagtaacaaaaagaaacaattgtaaaaaaattacgagtttttttatagaaatttcaaagtatttttttatttatacagaatatacggcgtaattcatgaaacaacttaaatcgcaacccaattcaaattacaatttatatcacaactcacatagtaacctaaatagcaactcatcgcaacctaattcaaatcacaatccatattgcaactcacgtaacaacctagatcataactcacggagcaactcaaatcgtaaaaatagaaaaaaaaaattaaaaagaagtatatggggtgatttctcaaaaattatacttttgttaaacaataattttttaatttttataaaaaaaaaattgataaataatattttaaatttctttgaaataaaaatagatacttataaaatttaaaaagtgaaaaggggtgtgtgtagcttctctctctctctctctct

SEQ ID NO: 91874 - DNA, 555 bp, Cannabis sativa
tagtccaaccaaaataccaaatacatcctcttttcattcaagatcattttcttttttaaaataattcatcttcattaaaaacagcaatcactcaacaaaacagacaacagaactcaattaacaaatcgcttaacaaaaattaaaaaaatattacataataaccccaacaaagttttacattcctcaattaaaagaccaaacatggagcacatttgtaaagagctacgaatagcctcctcaccaccaagctatctatttggatcaccaccgtaattcttcaaccaactcaacacctctttgatactcaccgcttcggccacttctaaaattattcgcccataaaagcacaccttgattgagccaccaccaaatagccattacgtacgataaaattattaaccaatctcatacttcccatcaaacaaagccaaatctacgctaatcttaatgtcttaattgggttcagaccaaagctctttgccatcctcttcatgcaaaggacgcaatagaggaatatttcctcacccttgagcgttcaaccattgatcaagaatt

SEQ ID NO: 91875 - DNA, 1622 bp, Cannabis sativa
agcagccaagatcaaagttatcacgccagaaatctttcctgttatatccaacataaccagctgttgaattccatcggccaagcaggacaacccacccaatcaaacgcctccttcacaactaccttaaaaacaatatagctgaagaagagatgatgatgactctcctcttcttcactacaaacagggcagctgggagtaccaagctttatatggaatctagtgaacttatctcttgtaagaagatggccatgaaccagctgccaaagaataaatttatgcttgggcaaagaaatattacaccaaatagctttgtagtacgtgtgagcatcatgtttaattagcccattatagagcctagaagcaagaaacttacctcttcgaacaacaacaagtaaattaaacttgttgaatttcttcctgagttggcaaattttcctccaatactaactaacatcctccttcaactcatactcccaaaactcagctcccttcatatagatgctatttatctatttaacccaaagaatgtcatgcttatccatgatagcccaaataaattttccaataatagatctactccaattaggaccacttttgaacccaaggcctccataagatttagagagacacaccttatcccatgaagtcaaatgaatcttgcttttttctcccttattcccccataagaaacccctacaaagccgctcaacttccttgattatactttgaggaagaaagccccaagagcacggagtggatgagttgaattcggctagcataagagagatgcctagtggcctaggtaactgtcctcattttaattttcttaagaatagcatcacaatcttcttgtctccacttggttggccttaacgggaccccaaggtatctgagagggaaagacccctcaacaattgcatcatgtccaaaatttcagctttatcattagaggagacatctccaaaataaatcttggacttagacttgttaggaaataaatcagggacttagacttgttagtaaataaatttggcaactttaagatgatgaacaacagtaggagagcctttgctaaccaacttgagactcttgcacataggatgaaatctaaaatattttttagtggtctccaatatcagccttcttgtgagacattccattatgagcacaaaaaagagaggcgacatccccttgtcgaagcccctttgtccccttcaagctacctcgaagtattccattcatcatgatcgtatatgaagtgcccttcaagcacatcatgatccacttaacaaatttggagggaaagtttaatcctacaagtaagtcctcaacaaaaccccaatccacagtatgctttacttaagtctattttgaaagcacacctaggagagacaatcttcctaccataattcttaatcaaatcttaaaagattaagatattatgagcaatagatctattcttgataaactcccatgattttggtgaataattaaaaattttgaattttacactttttatatttgtgtgtgaagaatgtttttttttcttgaataatggagaaatagagggataatagtgcataattggtcgtatcatatcccacaagtacagggataatata

SEQ ID NO: 91876 - DNA, 639 bp, Cannabis sativa
agagagatggggttacgagagagagagtgggcggcaaatgaaaatggaatcaatgactaggttattttggctgaaataaaattggggggaataatattttatatgtattaaaattaaaaaaacaaataataacataatttttcccaaaataaatgtgaaagggtaacttttttttcaatgagtgtatataaaaaagaaactggaaagaaaataaagagggaatatttaaaaaaaataataataatttaggaaataaataataaaaatcattcttcatatatttgacctgcctagattaatataattaggaaagtcaaagtcatcataccaattaagaagaaatgatttaattatgtgaataaaaatttgaatactataatattaccaaaccaaataatatacgtacagttataatgtgctagcttatcctttgtatcaattcttttttgtacagttataattcactatataaataaatagaaatatataattagttcattgtaactgttctaattagttcactatataaaaacattcttcttgatcttaatattggctgaaattaataaaattgggggaaataatattttatatgtattaaaattaaaaaacaaaataatggggtatacccgacggttt

SEQ ID NO: 91877 - DNA, 585 bp, Cannabis sativa
tggtataatgtagaataataataataaaaaatttagtaactctattttaaaaatagaatagagaagttacactacaagaatgattagttttacaggcgctttacaattgatgcgcctgcaatagaatagcaataaaggagcaatacactaagaaagcgttcataaaagtagtcacacttttgtgggggccctcagtgaatcaagatctcatgtaaaaaagtggtgttccatactgtgttaaaccaattaaaatttgacacatcaattaattttttatttataaaaaaattataattttttatttataaaaaaattaaatctataataaaattaacaaaaatagttaatatatttaatataatttagattagttgatatgtcaaatttcaataggtttaacacagtatgagacaccaatttttaaaaggaatcttgattcgctttcagctgatctatacaagtttcaaaaataacacagacatttttaaaccgtctataaatgtgtaaacactttcacggacgggctttttgatagaaatgagaaagaggaaattagactctatactctttttatattgtcctttt

SEQ ID NO: 91878 - DNA, 1414 bp, Cannabis sativa
agccccaacgatctcaggtatcgccctcattctctcgatctcattctcctctctcttctctatacccttagatctcatttttagatctcttctcttttctctcctctcttttctatatgcctatatttgtaggtgtttagatattattttttttgttctaggtttcgtcggcaggacacgggttcggggtgttggtagtagtggccagtgttgtggtacaagggtgtgaatctgttaatgtagttttctttttattcttgtttattttgatttgaaacggtttgagagatcagaatggtggtggttacctatttcggtttgaagtctaaaaattgtggatgagatctaatttatttatttattttatatttattttacctttttaggtcggttttaaaggtgtacagttgagcaaaaaaaaatataatttatatcttttagtatctgtttataacacacatttcgttcaattgcatcagactgtaactgacgctattgagtcctgactttatgttggtggcatagactttggtcctaggaaccaacggtaaaggtataaatgtcagttaaaaatggacacttatacccttttttctagtagtgttaaattatgaaaatttaaacgtacttagctacaaaaaaaaaaaaattatgtacgcagtattggaggggtaacaaaatatttaatctcataaagtataggtgcatatgtttttccatagttgtagatatagcatgtagatttatgtttttggttaatattgtatatttaaatgttcaatggtacaacaattggagctggtgggatggtcttctgtaaaggtgagcagttccatccatttttcttgctataagacacagtaaaatatttcggaacccatgtttcagacttggattttctttctttttgaagcactctctgatttttctcgatttctttctttgcttctctagctttttcccaatttttgctcatgattccttggctcacctcactccaaaccagagctgattcactttgacataccccctaacaaaaaaaaaataagaaaaataagaaatgcacacgaataaatggaaataatagaatgactatgtaatgttagtacatttagatctttcacaatgggagttttaagtcctgaagtgatttcttttgcattgtacaaaactttgacctcgccatttcttagatccttcagcgtaacacttctgcatcaatcaagaattaaaaatacaaagcaatagttatgatgttattttaaatgataatgagaaagaagatactaatagttgaaaacaactatttataaacacttgaggtagccttaagtggccataggagggtgcgtgtgtgttggaggtcttgggttcgagtatcaagttatgcaatgtaatatataaacgcttgaat

SEQ ID NO: 91879 - DNA, 636 bp, Cannabis sativa
ctttgtggtaattgggaagaaggtgttttaagacatatcaatttttcttatagctttcgtgtttattgtgtgggagtagtggtggactcttatggatatgaaatggagattgcgatgttactgttaaaagctactctactgaacatattgatgctcttgtaaaatgtccaaggagttagttgtggaaattcatgggattttatggcaacccaaaaaactcacctccaaaaagagtctttgttactttttcgtcatataaatgaattttttaatctaccatggatttgtgggggtatttcaatgtgattttatctatgcatgtacaaaagggtgggacggaccgcgatgttatggcaatgattgagtttcattaagttctcgatgcctgtatgctagatgacttggggtacgaatggccaagtttcacttggatgaataaaaggcaaggtatttcacatcaagaatagttagatcgttttgtgtgcaatcaagcttggtctgagttgtatctttcagttcaagtgtgccatggtgactttcttattctgaccatcgccctatagtcattaaacttgagaatgtttttctactgagtcatgggcaagttaaaaggacaattccattttgaacctcatt

SEQ ID NO: 91880 - DNA, 1065 bp, Cannabis sativa
tctaagttggcgatcctgacattggccgtgattctacgtttcactgttacatttcgacgaggcttttgttattggtcacaattagcctccacattcctcattgttttctgttagtttttgggatagttttgtcagtaaaaactaaaaagaccaaaattgaggcaatacgtaattttttttttcttttcttttctctttaaaaacttgggatttttttttttcgaaattaaactcaacaatcacagggaaaattctcaattcaagccaattcactattcaccctaagtgcatgtacagctaattcatgagtagctttgttggttttatgttgagcatgaattagggatgcctcaggaaaattggaaaacaaactagcaatatcatccaataaggaaccaagttcattacaaagggaaaaatgctttgggagagtcgaaaccaaggctaagcaatctgactccaccacatgaagaggaagaccaagagtgagagaccaatccaacgttactattaatgcaacaacttctgctaatatgactataaaattacctacaaaaaacaacaaacagagaataagttcaaaaaaaaaacattacaaggagagaaaataaatggtcaatcctaataaatgaaaacaacaacaaaagaagcaaaattacaaatttggtaaacaaaaaccatacactggaggaaaaagtctccctccaatccaaccataatcctaacacaactactccataccctcctatctaatgaatatcataatcttttaaagttataaactataccaaataaggatctacatagacatcctagcacattctcagtagtatctcaaactattgccccaatgcctatagtattagaattaacatccagcgacgcatcaacatttagtttatacgctcccaaaggcggcttaacccatcgttctcgagataagcatgtggatcccttagccataacattatgcctcgaacattgactgtattcattaaataacttaaagatttgtgagaccacaacatcagaagggttggctttgcgaccatggacaatttggtt

SEQ ID NO: 91881 - DNA, 1351 bp, Cannabis sativa
agatttaaggagagttaattcctttgatgtgtgtcgtatgtcgtatcaattttactattttttttttccaatacctccaattattttagtataattgtaagtaaggatcaatttcacaaggactacgtttattcaattattcacaaattagtaactagaattagataagaggggggtcttgagattaagattaaagtagcagaaataaaaataaaacaaacaaattaaaattgagattatgatatgagaaactagttaaaggttattcgtcaccatcaacaatcattcttaattcctattaaagaatgtaattttcagttttcaatcaaactattaatcccgcagataatgctaaagcagtcaattattccaatctccctattgtatgtaatcaaggcgaagcgctcaataattaactcttttacctaagcagtaaatccacgaagtatgtaatttatttaacttagataaagctttgagtgttatggagatagactaatctatgcaacaaatcaatgaagcatataatttatttaacctaggttctattattcatcacaattaaaattgcaatttatcacaaacacttagaatcctagactattaggtgaatagtaatcctaagatgacggtaggttaaagtaaaacataatttagcgtccgtctaaataagattaaaataataatcataacattgatatagaataatagaagcaatttgatatgatggaaactaaaaattaacattcaataatgaaattaagaattcatgttttgggttttgaaataacccttagctaaaaaaaaatactaagaattagacattataactaaaatcataattttagtaaaagtagaaggagaagaaaagaacttgaatgaagaacacttcgaagtcgatctccgtctcttccttgctctctctctgagtttctcactctaatttgtagttttagaatgattaaattcatagcctaagaggtcctatttatagtgctaaatgaatccccttagaattaggattctattaatagtgcttgaaaagatagatgagtctccttagaattaagattcttttttttaaaaaaaaaataaatcggtgctatagcgcccatgatatatttcctgaataatccatgtgctaaaattatctttttttttttttttgtgtgtgtatgttttttacagaccgacactatagcacaggaattgggcgctataatgcctagcacaatttctattttgcatatgattggtattttggtcataacttcttcaatacaactcgaaattggacaattcaagatgtttcgaaaaatctaagaacgacatctaaaacttttatgttgag

SEQ ID NO: 91882 - DNA, 1586 bp, Cannabis sativa
ggagcaggtgttgcatcattcttgtgtcctggtttcttgcatttgctacaatgcataattgcaccagttctccttgtctttgtgcaattcggaagcggtggctcatcaacatctcttctttgctttttcttttgtctgcgtggcaaaatgtttgcacctgcaggaaggattggattttgacttgttttgggccacttatcagggcttggcacagggtaaattgtgttcataacacttcttgaaagcctctatcttgtaccaagggtgaacataagcatgagattgatggttgcaaaactagattgcagctaaggcatgtctacatgggatgcctgtcaactggaatctcctacacgtgcatgttttcccctctaaatcgacagtgaaaccacctcctggattcatctgaatttggaacattgttgcatttccccatgttatgacacatcatttagcaacctctgttagcttagtagtaattttaataatgttgttgtgtatagggccttttcattttgatatactctccctttttgggtataaacgacacataagccaataccagaaaagtaacaaatcaaagttcagaataagtatttttttcatcaatgagcattgtagttgaagtgaacataataataaattacctaatgaactccaacagagtaataattggtttgtcccttgcatcaaaaattgtattgttgaagctttcacagctattgttcagcaacatatcacatttcaccacctctttgaaatgtgattttgtccattctgatggttgctttgccgccggccagttgtatgccttcacattcaccttctttatcacttccattctcctatcaaaatctacttcaatggtggatctggctgcattccacaatagttgcttcagcagtagtccagggaactcaatcttgaaatttccatgcatatgtctcacacaaaacttgctatctgggctgttgaaaatgttttcaactgcattttgaagccccttctgtctatcactcataaaagtgaatgagtttggctcaatgggactcaagtcatctcttaataactctaaaaaccaactctacctgttgttgtctctttctcagtgacagcataggctattggaaatatagaatttgttgcatcaattccaatagcagccatcagtactcctttgcaaaaccccttcaaaaagcaccgatcaagtcctataaatggcctacaatcatttttaaatccttccttgcaagcatgtagacagacatagcacctttggaatattcttttatcaccttgcatctcacacttaattttggcagtgctacctggattggtctccaagagttgtttgaggtaatcctccaagactgcatactagtcaatgactatgccttctagttatgcctttgctatgctataaaactttgtggtagttaccttagaatattttgtgtctttgactttctccaataaggacttgtactcaattgatggatgtaatctgaatgtgtctctgaattgttctgctagccattgtgtagtaatatgtctattatcccaaacaatgccacaattatgcttag

SEQ ID NO: 91883 - DNA, 600 bp, Cannabis sativa
tagttgttcattctctagaaaagaaaaaattaaaaatattgaagattcacactctgatttcaaacttgataattaagattttgagatacccaaagtgttgaaggtatttatgttatttttcagttattttaggatttgttttttctttttttgcgaaagatgttctgcgctctttttctttgatattattctgctcatttttttgttgttgtgtatttcatattttttgttttttattgtattcatatttttaatattttttaacggttgttctgtagttgttctggtctgctcttttgagacatgttttttttttaaaaaaaaaaaacagttaaatacatattactccaaactcattacttactgatcttctcatctccatcatcttcaaaattttattcttcctcttaagcttttttttttttttttcatttatttgaaagattgatccacattttttttaattgtggttaccattagttcttgctcttctcatctccatcatcttcaaaattttcttcagcttcttaagcttctttttaatttttcttttgtgcatgttcagtctcagatatcaatttgggattttgttcattactc

SEQ ID NO: 91884 - DNA, 1034 bp, Cannabis sativa
cttaaggttaaaactggtttcacagagttgacaagtttgaaactagttttaccggattcaacggttcgaaacttattttaccgggttcacatgttcgaaacttatttaacatgttttgagggatctgtaatgggttgctccattttatgatgttgtcgtaaaaattttaatttcaagttttctttttattatatattgtttctaggtttgaaactgatttttacatatattctatttttagattattattatgcattgtgtgttgttttgattatatttgagattagcattttttcttggatttttttgtgcgtgtgttatttttttttctttcatttggttgattgattaaattatcttcagttaactttattatttatcatttatattttgttatgattttgcataatgtcaaaattagtttcaaagggttcacatattcaaaattggtttagttttgtaatgaggttgctccattttatgatgttattgtatatttttttatgttaagtttctttttattattttatttctaggttcaaaactgatttttcgtacacttatattttgtttttacattattgttgtgcattgtgtgttgttttgattatatttgtgagtatttttggggggtttttttatacatttggttgactgataaaattggtttgagtcagcttcattgtatatcattttagttttgttttcataaccttcattgttgttatgtgacaaaactagtttttgtttggtttcataatgttcattattgttgtatgatgaaactggtttcgatttttttttgttgcttttgttcaaatggatatataattcctctagtaaaatacaatggaagatgttgctaaagattttaggtgctaactctgagaagaaacttcctccatatcaagaacaaaaaacattaaattgatccaagttctaaggattcatctttggtatatatataggtgcactcttaatgggtattactcatgaatgggtaatattagaaaattttgagtctttatgattaa

SEQ ID NO: 91885 - DNA, 552 bp, Cannabis sativa
actactcgccttttctgccgtctgaatctcaaaccttgatcttgtttccattccaagtcatatatctatcgataagaattatatttagaggtgtcgtatagaaatggaatatactaacttaagtcaaataataattagtatatcgtattaggatgttgattattaataatttggcccttaaactctcttaattattgttttacttgtacttaatttttcaagttaagattttgatggtaaaatcttctaaattatgttagaaaatttaaggtgttatcaggttaattgtcactatgaactgcttatgtgtatatttttgtacacttgacaagtttatattggtagaccaaatatttttttataagccattttaaaattaaataaaattataaaaaaatacaaataatgtaaaatttttgtaatttttaaataataatactatgtgtaccaatataaacacattaacagtcaatgttggcagttaactgtgaaacatagataacaacttaaatttactaacagttcggtagtttagaaagttttactgtcaaa

SEQ ID NO: 91886 - DNA, 815 bp, Cannabis sativa
gagacaaaaattaattctcgtctctgtcctgttccccatttagacgaagaatccctgctcattagggacaggtccctgcgaggccccatcttataaggaaaatgtacatctctaccaacaacgcttctataaccacgataaagtgacactttataattaattgatatttgataattttttataatttttttttaaagtaaaataagtgagactcaatattaaattaccaacatattaatatttctacatttttttttacttagttggagtaaaaggatttctcattaaaaaaaatattttcgatcagattccatttaattttagtagaaaatacatgcacaaagtatcatagataattgtcaccctaagtctcttaataaatacattaaatttgcatcaagttattatttcttttatacttttaataaatacattaaatttgcatgaagttttacaattttacaataaaagtacaatctaaaaattgctacaaatatataaaaaaatattttttttgtattaaatataacatattttttacattttatttattaaattctcatgttgaagtaatttctcaaaggataatgatacaacaatttaggaataagttgaagaatatttttttttgtatccattaatcaaaaatattctcatattaaattttattaaaatgtactcacttttataagtgggttgctcaatatatcttcaccctctacttaaattaaatctagtacataatttacagtaaaaattaaaataagtaaagtaaaccgagtatacaaatcaatcgaggaaattacactcaatac

SEQ ID NO: 91887 - DNA, 567 bp, Cannabis sativa
cctgatgcagcttctcccacgacagcctatccatgctcgacacgtgtccgcctctccttcaagcttccttccagcaaccaacccatgctcgccaagtgtcgtctccacattccagccgaaattccaagcttattttgtgcctgccaagtgtccacaatgcatggaaaaagtacccgaaatgccaatttcaaaaatacattataattttctattcctttgcatttatttggctcattttcccattttactatttctttcagccaataaattacacattgtatattttaccattctatccatctcatatcccacctaccttatttagccagatttttctagaaaaatattaaaataattaatttattaattattttaattcacccactttggctataaatagggagagatggagagaacttgaagtaatctttaggcaatctctagagtgtaacttttactatagcaaaatttattttcacttttcttctcatatttctctctagaatttttatgagaatgattagcataatggcctaatcttccttggaaggttagagatgattccat

SEQ ID NO: 91888 - DNA, 576 bp, Cannabis sativa
taattctctattaaattattgactaaattttttaaacataggtgaattgtagtaacaaatagagcattgctattggacaccagtggtgcttagtacccttcagacgtgttgccttatgattggctagcgatactctttaaaagctattatattaaactatatgaaacccgatactaaattagaccaataacaatattaacatgtaggagagtgattgacactactaccggtaacttttagcatttcaaccaaataatagcacttggatcgaaattcaaagtgatataaaaagtgatataaagatacatattttgtctatctttgactttttcaaacctacttagtgacatgtcagcatgtattaatttaatttaataattaagagtcatctttaaattcgatttctcattcctatttaatttcttgttcattcttgattcatttcatatagggttaattacataaggtatcattttatttaagaaaaaattatatttttacagttaaagattttttttttatatttttacagtactttttcataaaaacaacacaaaaacaacaagaaaactacat

SEQ ID NO: 91889 - DNA, 520 bp, Cannabis sativa
aatgacaaaggacaatactgcagcaaaagctactccaagctcgcatcgactttaggagttagatgtcgtcaaacgatagggttgtcctataaaaaagggaaagaagtcaaccatacactgaaaaataaagtttggacagatatataggtaaaaagttatttgttagaattttaatttgtttttgattaattcagatgttaactctaatcgtgtttgttttccttcaaactagacgggttttattgtgtcagattccttcaaacatgattgtctgatccttgctgggaagttaatgaaagacttcaagaataggatgacaaaagaaattataatgcccacaatggaagagaaaggatgtccaatgactggcacaagtccctgaaaagcatcccgaaatcgaccttactcattcgttgaaatttgttgaaagtcgactaactcttgaatttcaggtacactaattatatttgtactaagataaactcttaaatacaagtacatatatctaatgtattttttt

SEQ ID NO: 91890 - DNA, 656 bp, Cannabis sativa
ttccactagtcaattgttggtgaaaagcattaaggtatacgaagcattgcaccgacaaagcctaattggattacaaattaaacaaattttaataataaggatgcttgagaattgaaatcaatatagataagattcccaaacatgatagaagggaacaaatgtgtatatctccaattgggtatgattaagaccttggttgacgttgtgtggagagcttgaggattgtttttaggaagttgattaacatataattgtctttttcctcttttttattttactttttttcttctgaaaataattatatgtacgaagataaacttcttgttcaactaatttaagcatacaatactcttgtgtatcgatttaatatataattatctacgtgatccaattcataacatgagttagatataaatattgaatggtgttcagagaatgtaaatgaattttagtatgttttcttgtactaaaaggaaattgaatgggagggagggttttagtgatttatcataaatccgtataatagcatgatagcatctccacattaatgttaattacaactgtactaaaactatgaagataaatacaagattataatgtcatgatctattgacattttttcattaatttaggaatttggtttttttttttttttt

SEQ ID NO: 91891 - DNA, 963 bp, Cannabis sativa
  modified_base (751)..(755): a, c, t, g, unknown or other
gagggacgtttctagtatcaaggccaacgttctctatttactgccctattacggctggtagcaatcattgggtgtgtgatatcaaatgtggaatcctaaacactatataaagaggtataaggtgctcattcaaatttttatcaacaatcacttgctaaaaaacacaagacttgataattctcaaaactatttcctagagaattctcttattaagtggcgtttggttggaagtaataaaatagaatggaatggaaaggaaacaaacttcattccatttctttgtttggttgcatattaagtattagaatgtcattccaatggaatgacctttctaccattttggtgaaatgactattctattttgaaatggaacgaaagaccactcctgtaacgccctgaccctcagggacgtcacgtgtatgcttttacaaacttatttctttctaatttattagtttagaaaaaaaaaatgtggtttaattaaaaactttttgattaatttgaaataaaactttcatacttattacaccataatacggggatcccctgtttataaaattcttttacaataggttacacaatcgctgttacaaaaattaaggttacatttccaaacatagaaaagaagtcaatcttgcttcccggaagccaagacatcacaactaatatgtacattgctgggagacttccgactcatggccaaacgtagcttctaatctccttacttgcaccatgaagcacccgtgagtcnnnnngactcagcaagaaaagctactaattagacatcatggaaagtgcaagcaaatttcatgacaatataatatacataccaataggccatacatattcaatgtacatatacaaatacaacttaacgtttatgcgagcacacctgtaacaccctaactaagataggcgtattacgtgatttttaaacatgctatgcagctcgttgctaatcaa

SEQ ID NO: 91892 - DNA, 549 bp, Cannabis sativa
tagcaaaagactccatatcaatactggaatggaaattactatccaacttatcactatataaaagataactatcgaaatcacccataataaaccaaggaaggttaggagaattatagaagactttgtggagaaggttccaagtatggtgcctttgattagaaacaggggatccataataaccagtaaagtgaaacatactattatcatttaaccttatcttacagtcaatatgattacacgagaaagttaaaatactaacatagacattggacttccacaaaagcataagtccccgccaattacatttgagggacctcaaaaccaaaatcaaaccccaaagacatcttaactctatcaatagcatgagaagacattctggtttccatcaaaaaaagaaccaaaggtcgatgctccttcaccaatagggagagtcttctgaatgcacaagtgctccctagaccttgtgcattccagctaataagagtcatttttctgggcggatcactcacctgttcaaaggaataggaaaatgaagaggagacaccatct

SEQ ID NO: 91893 - DNA, 831 bp, Cannabis sativa
  modified_base (477)..(477): a, c, t, g, unknown or other
aacaaaattaatacaaaattaatacattaagcatatacattaagcatataatttcttatcttttattaattagtaaatcttattatattgaaatgagttttacttagggcacaaaatccaacaaatacaagataacagtataggtgcatacaagtctggctagtacaacgagaacttgaagtcaaaacttctacccaaacactgaaataggaacatctcgataagtactctcaccagccaatttgtcaatttgttcctctaacctttcatcgtgtaggaacccataaaagcgctagtacccacgatcttctacgcatgtcctcccactgttcttcaatggtggcctctgctttgctaagctgcgcaggggtagccactacgtgatttcaaaagtggacactaagctgaaagctttctaaaccacgtgatttcagtttcgcatgtgagctatggatagcaccccaaggaagaacccangaaaagtctgtgaaacttggtgaatagcaagggaccaagagacttgccagtatggtcgcttaaggggcatctatattgtctaatgcatcgaactagcacaaagagcttatgtagagaaattttaacgcttagaataagctactaaacatgcctctaagtcgtgtaggcatactttggcttgacatagtaaatctgaagccttacatgtgaaggccataagaagatagctaggacaatcatatgtccatcatagatggatttaaggctaaataatagtagtgtttgaaaacatagtagagcattgcataggctgaataagtatcattcctgcaactttaacattcaatctcactg

SEQ ID NO: 91894 - DNA, 615 bp, Cannabis sativa
taacttttgtaaaacacagagtccaaaataatatttacccataattatatgttgattttgttttatttacattatatttatttcaaaatattaatgttatttttttttctcctttttgagttttttttttttttctttcattaaacaattctaccaaacaatatcttatagtgtagtaattatattgacacatgtcccaatactatatgttagatggggaattggtcacactctctagacaaaagatctacttttttttttttttttctgaaggaatgtaaggtaaactcattttcttcaaataagttataaaagaaatgtactattttgaaaatgatagtgagaaataacaatgcttaaaattgaagaaatgattaattgacattatcctgttaacttgatcagttcaaattttctagttagttatgattgtattgtattgtacataaattaataatttgtggcttacttttggttcaaggtaaggtgactaataagctcatcatacactgaaagtacactttacaacttcttcccatcatgtgtacgtctcaattagttgaagttaggttatatatttggtactatcaatggatattgtgactatctctctct

SEQ ID NO: 91895 - DNA, 542 bp, Cannabis sativa
  modified_base (70)..(71): a, c, t, g, unknown or other
atttaataaattcacactaattaatctaagtaagatcataatcttacttcattaccaaaataattacatnnttaataaaatatgtccaattaagtaccattttattttctgagatattacagtgcctgcctaagaaattaggaggaattggcttctaagagggtaggaaatggaacatagcattgatggccaagtacatttggaccataacaagcaaacaagacaacttatgggttaaatggatcaatgccatctacctaaaagagaagaatttctagactgtgccattcaagaatgatgatagctggtaatttaagaaactcttgaagctgatagataccattaatgagagagccttgatgaatgcaggaaggattgggaaatttaaagtcatatccttctatcttaacttgataactgctgataatgcttattatgagtccaatgtttggcataagctgaatatttccaaacatagattcatatattggcaagctgtcagtaaccaactaatcaccagagatcatatgagcaaaataatg

SEQ ID NO: 91896 - DNA, 1525 bp, Cannabis sativa
caggtgacttagactttgagataacgactcagaaagctcgtaaatcaaagaccccttaggatcctactgtcacctttgaagctgagttgatagaatccaaagtcaggtccattggaccatatgttggggacattttaaggtaatgcggcatcaggaatgaacaaggatctcgcattaggtctgttgcccagggggaattcagctgttatccccccaaatttctggttcgagatgaaggttgcagcaccagcgagccttttaaaataggtgcttcgagcctcaacacataagggttggagcagtttttcccctcaaagattatgttaaagatttatgtaattatctcggcgttgctcattttcagttggcaccaaactcatacaggatccttgcctgtttaaagtctctctaccatatcttgaagtgggaatgtccaaccccattagagattctttgtttctagtctgtcaaggtttgtcctgcaagaaagcgcggagtaggaggcttttactaccttggaactcacactaatgaccataagatcattgtgaggttacccaacaaaaaggagttcaaggatgacttcttttggacctctggtcttttcccaatcaacacaacaaagtttcaaattatacgtaagtgaaaactaaattctgggttttgatttttagtttaatatatatttttttatactttacaaattttgttctttgttgtgttaacagcgatcactaggagacccatcttaactcctgagatcgagaaatggcaccagattctccttggccttccataggggttgtgagcagctgattttctactgaatgagaacaatttaaaggcttgcgcccttctcagtagggaacaatctacaaatgacttcaaggtcccaaaattttaagactagcagtgtaacgcccgtatttaaaaacttgctaaaccataaatttatcttattataaaatatttatatagacttaagggttgggatcccgaatttaaaacatagttgaagttacaattactattacaaaaccgtaaagtattatatttttttttaaccaacaggcattaacaaaatacaacccaaaatattgaaagatcgaaaccctcaaagttgcactgccgcgatatgtacaatcactgccaagctccaactgacttctcctccaacttagcttttcctttacctacacaaggtagcaaactgatgagtcgacagactcagtaagatatgcatatcatatatgaaaataatgatataccggctttatgcttaagccgtctcgagcccaaataccgagctcaccaaatagttaagaacgttcttaatggaagtacgaccactgtaccatatacactaaagtaccaaccctgtactcgtgttggtagggccattattgtactcttgggagttgctaagtgttgtaccacatgcacgacgtaccccttggtactcgtgttggtaacactgtaactaccctaaactcctacattgtactaactgttgggttttgtgccc

SEQ ID NO: 91897 - DNA, 633 bp, Cannabis sativa
aaatgttaaaatacctcaaagtgaaacagaatattataccatgttctaacaaattaataaatattaaaaaaataaaggaaacaaatataatctgcaaatcagctaaattaacaaaacaaataggtcttctctctctaaaaaaacaaaataaataagtcatcaagagcagatggtttgaaatggacgaggtgtcttactcctccatgtccttgtagttgttgtagaatattcaaaatcagaagtaggtaactgcagagaacagcaagccatgtcgaagaagaagatgaagagtatatagctaggtagctgtaggtcatgatcatggtcatgacaccatggccgtgggactaataccaaagagacaattgcttagaaaattgtttacatgaagcaatcaaactcgaatagtaaaacaattaaaaacaataagaaccaacttgaaagtctaaattttattttctacctggcagttgaagcaacacgacttaaaattcaatccatataaatattgtcattgctattgtccaaaatctgcaaccgatctgctgaaaataaaataaagaaattgaaacaattcatttttcgattttcatctacatttctcaacaaccaaccaaatatatatatatatat

SEQ ID NO: 91898 - DNA, 580 bp, Cannabis sativa
gcatgtttgatttttaatttgaagtctcaactactctagaacttgtttgataatcatttgaggcgaaattgataaattgcacataattttgagatatgatgtaggcaattttttttttgggatcgattgagcttttcaagcctaccctatttgttaaatcactagttttacctaatttgagcctaaatgttaacattttttttaaccctatgcaataacctttgagcctaaaaaaatccttattcatcctttttcacaccatagtatattgatgttttatttattagtaaaggtgtgagaattttgttgatgagaaaatatgcatggttgtgtataagtgatgatgagaaaaaaaaaaatattatttccttcgaatgaaaatttgcaagttgtaagtatttcaaaaaaacatcaatgaaaaataaatagataaaaaaagagaatacttgcaacgatttaagtgtgagggaatagtaagttttatgataaaaaaagatataagattgaattgttgagggaagtgattggggaatacaaatagaaattatttgagagcatgttgtatatgtatgttatggtg

SEQ ID NO: 91899 - DNA, 557 bp, Cannabis sativa
ctataataaattaattaattaaaacattattatttatttaatttcaaataattagaataattaagatattttatttttcttatgttattaagaataaaaaattaaggtttaatagaatagttactcatactcttaaaaattatatacaaaaaatatcaaaatttaaaattaaaatacaaaatttaatatagttttataatttaattatcactaaataaaatataatcccacgcgaagcgcggttggttttctaaattttaagtaatgcaaattttttttatacgttattccaatgttttgtgaaaatagaaaaattggaaaattttgtggagaatatcttgtctaaattagaaaaaaaaagaataaaattagaaaaaaaaagaataaaatttatttagtcatcgtaccatcttatcaataaatacaaatttatttagtcatggcagaaaactacaaggaatgggaaagagcagttcaccacaattaaacatcactgggaaggtaactcttttgacctcaaggtgaatttagataaccatttcgtagttgtagagaag

SEQ ID NO: 91900 - DNA, 4312 bp, Cannabis sativa
  modified_base (2005)..(2017): a, c, t, g, unknown or other
catacctaattattatatcttattattgtgttctatgttatatacaaatagatcttgggttaattaatgttaatttatctaacatataatggttgtaagatttacataatactatcagcttataataatagaaagttaaggatatatgcatgagtcgaacttgcacaaaaaagtaatttcatgaagtgatatggcatgacagaccaaatgaagtgaaaaactgaattctttgcggtagagtaaggagatttcgaagagcggaactcaaagaatggagaggaaaaggaaggcggcgaaaagaaaagagataaagccacgtggaccaatcgacacaccacaagaatcacaactttttggcgacgcaattcatgtattgcattgggaaaagtttcattttacttgcgtattgccagcaaaaacttctcctttctttgactcactagaaatcctttatcggcacataacgccccctgtgaaggagatcaattgcgcccacacaagttaatggtgggaacatgcaaaatgcgaccaattgctcacttagtatacttgtataagtagaatgtttttttcagggcattaccaaagtaaacttgtatcagatgtatcggctatacatctgactggaccgatattaatattggaagatatatcataaacttactgttattttttttctacatcaatatcacttagttgatcttaggtcaattgatctcaatcctgagatggttaagttttagttcaattgtactatacgggttttttgacttattcattaccaacttacccataggactagccatacttacatcttggaaatgcggtagtgcaattgagttggggcgataatcatagatatggaatctatagcttctataactatttagaagtgaaacaatagttttcttagagattggcttaacgcgataaatgatagagtgatcatttcagtaattatattagtttactaaaaaataatttacaagtagctaagtgttttgatgataaaatatattaaaaggtaaaacgataagtttgttcctactcaatgtaaaccgtctatagaggattattaattatttagattgtaacaatgaaaaattcatatagtatctatatttggtatatagagcgttctatgtaatctaaagtggaattccaaatctatagtggagtcaggatgaattaataagctaagaaacttacttggtaaatttttgatctacttatgaggagcttggttacataggccgtgttgggtttagtgccctaactaaaatcctattcaatgtaatcttgaatttcattatcaataaaagaacgaaaattatttttttacttgtttagtgtaatgctaggtttacatgtttatttcatgatcatatgtttgatatatacattctattaaatccctatcacattattgttcatgattattgtgttgtctacatagcagaaaataatcaagattatgtgattaaactaattagtcccatgatttatcagttcactagatttatactgatatgataatcaacaattttgtttacttacacttgtacaaaggaatatcttttccaagggattggcaaagtaagcttgtattggatgtatagttatacatcagactggaccgatattcacagtagaaaagatatcataaaacttaccgtgatatcttttctaagtaaatatcacttagttgatcttagatcaatgatcttaatcctgagataattaggctctagcttaaatgtgttacatgtgttctttgacttgtttattaaagctaaccaattagattgaccaaatatttatatcttaaaaacataatagtggacttgagtgcgagcactaattatagatatggaatctataacttctataaacacatagaaaaacagtagtttccgtagagcttggctaaatgagtttaaatggtggagtactcattttagtaattatattagtttactagaatatcatttacaagtagctaagnnnnnnnnnnnnnaaatacattgaagggtaaaatagtaaattttactacaacataatccttaattagcggcggaccactccgccgctaataaaccaatattcgaccgcaataggctattagcggtggaattcccctgctaatagtctgccactattaaatagccgctaataatggtattagcgacggaattagtatacgccgctaataccattattagcagcgggaccagaccggtcccaccgctaatgcccgcacccctaataagatttaaaaataaaaaaattaataattatttcaagctaatattatttatattatataatatataatataaaaattaataatataaataattatttataaatatataaataataatttaaatataattaatctcattacaaatattataatttgagtctaataatatttactaataatttgaaaacgtttcaaaataaactacgcaacaacatttaacgttaattcaattacaatgtctcaaaattaaactaaattatttaaaaacataaactgattattccataaaatcttcattaagatctcgagttataaagtcttgatctgcattattatcatttcgagttctcgacagctgtggaggagaaggaacatatggttgatctgacgataaaccaagtgttagataccctagctaagcttggttgagaataggagttgaaaaaaattgttgctcttacgacaaactcccaaataattcaaaattagcaaaatttgagtgaggagattctgatggggttctgtataagaactggttttctaattgcggacgagactgttgttgttgttgaggaaaagactagtgttgctgctgcaataaaattttggaattgatgttgcaaagaaggtcgaaattgttgttgcgaagtaggttgttgttgatgttgtggaggagcggcataactctaagaagaggaaccaccagacgattgcgattgactatacatttgaataaagttctcaaatcgtgagttatataaattagcacgttgtttagacgtcaaattactcccaaatgtgtcacgcatagttgagaacattttggccatagtgctaaacattttagtaggtggcgaaggaggcaccgtcgactgactttgactataggatttttttccttcaccttagaccctataacccacgcctctttgatagtcagatctttcgccaagaacttttccaaatatgttttctatggtatatagtatattatttatttaagatgatgtttagtatctattttattataaataataattatatataatttttttggtatggtctacatgttttaatagtgatatatatttttattagcatgatatatatatttttgagtattagtttaatattgttataattttttgtaatatataattttattattatagtatattaattttcagtaatacgatatattaaatactgtatatattcaataattcaatatatatttatttatttttattacaatgtattactattacaaaatttatataatttaattattatataattttttcttaaaaaaataatatataatagatatattttttataattttattaactaatttattatatttaactattgagattttttcatttttatcctataaaacattttactaaatttttttttaagaagatatttacccactttggaaactcaacattgagctccaatctattgtgggctgtgttctaaatgggttgttggacttggctacaacatatcaagtaagacacacttttgtttctctttccaactccaataatatttctgcgtgttgactgactaataattataatattcaaaaggtcaaatgtgtcaaaacatgatcataaatgataacaactacccttataaacattttttggaaacaaaaataaaaaaaatttgatgacaattatgtaggcctaaaccaaaacatggtacatgcacataatcacccaattatatgtgttacaattttctttgtttaaatttatacatatccaacgtattgcttaattatcggacgctttcgtacatgcatgcgacactgattaattaaactttatatataaaattatgaagctctacctaacgttgtataagatatggttatataacaagacttaattagctagcaagctatatttattgttttggtatagtatataattaattattgattatttcaaataatataatgggcaccttaaatgtaggagggaaattttttggtcatccataactaatatagttgtagaaatatacata

SEQ ID NO: 91901 - DNA, 1352 bp, Cannabis sativa
aaaaaaataataggtttgttaaaaaaaaaaaagattttgaataaacaattaaatataacaaaaaacatccatgtaacaaatgtgaaataagatactaaaatgattaaattattattttatctaaccaactattttgaaaatttagggttgttaaaaacaaccttaaatatcttttcaaaatttaaagttcaaaaaaaaaaaaattgagagaaactaattttaaaatatctagatttatttaaaatatttttatcaaattaaattaaatatctagtaagataaatgatttgaaaataactaaaaataaattttcaatatcattttctaatcttataatttaataaaataaaaataataaaataagccgattttaaaatagatatggttaggaaattactattttaggaataaaataataaacaaataataattatcctaattatatgttaaaatatgtcaaattaagtatttttttcaaatttctacattaatatcttggttatttaaatatttaaaataatatttataaattttcgataagtaatttcgaacttataatttataaacaattaaatttttaactaagtaacaaattttaaatttgaaaatattatgtttagaatataaaaatatctagattaatttcaaatttattaattatttaatttatcttataagagaattttaatataatatttcaaattaaaaggataaagttatctcttagttgaaaatatggctaatattaaaatatctgatcttataattaaataatatgtaaatattaaaaaaattaacaaatttttaaaatctgaacataatttaaaataaaataatcatttttttaaaaatttaaacctcaaaatatcataaaattaataataatctattaaaaataaaatatttttaatttaaaattgatatttatatttaaatttattaaaaataatattttattttgaaatttgggtttgaaaattggaaaaattcgaaatttggggaaaaatcccacgaaaatcggcttttcggtgcaaatctcctagctgcccacgaaacacgctgcaagcacgccattcggcgcgcgggagaggtgtttggcaaggtgttgcgccgagaattctcggcagattcagcatcaggagaggtaggtgggcatgtctaaatgagggaaacacgggctttagacaggattgtgtaccctgtccagcgcgcgcggatcctccttgtccaagggtatgcacgcatgtatctcgagtgctcgacactcaatgcaccaaatatttcaaaacaccatatctcttttaatttttatcggaatcgagtttcgttaaaaccaaaattgtttaattttt

SEQ ID NO: 91902 - DNA, 636 bp, Cannabis sativa
atgcagttcctagctagatagtgatgagtgtttgtgcatgattggtccgatcgttatttgtcttcttttatgttttttcttttttttttttgatgctgtaacttttattgcttgtgttttcttattgtataatggtctaaataactgtgttttcacactgtcctgttgtttcagtaggattaataatttttttgagagaggttacttgttgcttatcagattatgggattccctggattttattaaccccatgtttgtggatcgttctttcatccggattgtcttcggcatgattggttttgccatttgcttttattttagtttgaatattggagttgtcattattcaatatctattattagaaaatttttaactaataataatcattaatagctttgatttgtcatgtgatcttcatattttttttttttgatgacttgttgtaccttaaatttaatgtgttgttagggttttttctccttatatttgttaacgacttagaatgtaattaaaaattttatttaccttcaaacgaaaaactttttttttttttggagagaacacagaaaactattttaaccgaagaataacttataaataaaactagctttgtacaaatggatttgtatctaatta

SEQ ID NO: 91903 - DNA, 636 bp, Cannabis sativa
aagattaatttgactaaatctactgcttcctttagtaggaatgtgagtggtgctattcggaaggttgtttgtgctatttttaatataaatgtagctgttgagaatagtgtgtactggggtctcccaagtacaatcgatcgaaacaagtcggatgtattgggctttcttaatgagaagatgagttagcatatacaaagatggaatggtaaattcttgtcgcatgctggtatagaggtcctactttgtaataaagctcaaagtcttccaacttatgctatgagtattttccttttgtctatgagaacatgtcatgagttggaacaacttatggctaatttttggtggaagccgtctacatattcctgtcaaagaatttcgtggaggagttaagagaggatggcgtgtagtaagagtttagaatttgttttagaatgagattctaacccttttgcatgaatgatttttcttatatttttagtgttaggttctcctatctaaactttgtccactaatgggataaatacacaaaatacattgctcgactcatgaggcattaaacttttgttgacgtggatgtcacattatgttgatagttgccaatttgtgtcctgcttttatggataataaaaatatata

SEQ ID NO: 91904 - DNA, 972 bp, Cannabis sativa
gattaatcaccagggcctgatggaatgaccccgtgtttctttcaaaagtgttggccaattgttaaatatgatgtcatcaatatggttaagcagtttttcatactggctttcttcctacagatcttaacaacaccatgttggtcttaattcctaaaaagaagcagcctatggatatggggtactcaagacccattgcattacgcaatgtgttgtacaaggttgtgtccaaagtggttgctaatagactcaagagtgttatgccatctatcatatcggtactaaaagtgtatttttgtagggccgcttaatctcggataacatcatgattacttacgatattatgcaccacttaaagagaaaacgaagagggagggatggttatatggcacttgaactagatgttagcaaagcctatgacaagcttgagtgggttatctccgggctatgatggtaaggatgggctttgatggtcgttggattaacttagttatgcaatgtgtatgttctatttcctataccatttcacatggcgggacggagttggggcccattgttgctcaaagagggttgcgccaaggtgatcctttgtcaccatatctatttattctttatgctgaaagcttctctagtttgttgcgcagctatgaacaaagtggcttacttacggggtgtaaaattggttgaggcgtgccagtaatctctcatatgctctttgctgacgacaactacatgtactgtaagtcaactgaggaagaagcgtacaatgtgaaggagctgttgtatacttatgcggtggcttcggggcaaagaatcaacttctctaagtcttccgtgttttttcagcaacaatactggaagtgtggtgagggattccatttgtgctatgttggaaatttatgaggctgatgaaaatagctattacctgggtcttccgtgtttggtggggataaataagaatgctatccttggttt

SEQ ID NO: 91905 - DNA, 1358 bp, Cannabis sativa
aataaataatttaaacaaactaagtttttttgaagaaaaaatcaaatttatttatattatatcttaagatataattaaaaattcaataaaaatataaaattattttgtaaaaaaattagaaataaactaaaaaaagttatgtttacttaaacaaatctagatttttggagaaaaaaaaatagactcaagcttgttcccgtaaaatttaatttttacaataattaaaattttaatatattttttatatcttaatgaatttttccataataaataaatatatttttttaaattgcttaattagttttataatttttttttaaaatttttcttaatcattaaaaataattttttttaatatttaaattatttttttaagatttactaaagaaaaatgtagaatctttctcatttttattttgagggggtataatttgatagttgtcaaagtttaaggggcaaaattactaattaacaaaaatacgtcagtatttaaacgaaataatgggacggaacctaacaaaatgattaaatttatgtaaatgtaaaagttcaagagagattcttaacaagtcgtatattttagggagtaaaatcagtattgtcaaaaatttagaggacaaaattactaattattctatattttgttttaaaattcaaaacaattttatttgtgaaatttgacacattctataacactattaaatatttaaaatataacaatatactatatttatatttatagcattccatttaaaatgcaactatattttgtattattacaaaatacaaaatacaaaattattctattattactatatattctgtcatatttctatttttattccatttcacattcttcctctatttttatattttcatttgtactcccaattaatgaacacacttaatttactacaaaaaatcttacttttagtcataataaaatttgtgattaattataaattattattattattttgcaactaaaagattcgtagctaaaagtattagtcacaaaaattacaatttactaaatgtgtttttagtcacaatacttattgtgactaaaactaatttagtgacaatttgtatctaaatgctatgttttagttataagtaattttttgttgtgactaaacatttagtcacaaaaaatttatattgtgactaaaagattgttataaaaataattattttttgtagtgataataatttttccaaactcttacaatattaaattttacaattaatttattttatctattccgttttctattttccatttgacaactagtggttttatatgctagcaattgttgaatttaataaaaataggtgtatatatatttatatatata

SEQ ID NO: 91906 - DNA, 536 bp, Cannabis sativa
atatatatttgtctaaattaaattatattttagttagttaaaattctagtattatcactcttttgataactttaatttattaattaaccgtttgtctcaattgaaaggatttaatgtatttcatatttggtcatttaaatggtcatattgttattaatatagtatatagataaaaacaacagtcttagggctcgtttggtacgctgtataaaggtcgtattgtattggataataaaaaacactatgtttagataaaacaatgtattgtattaattattacgaccaaattttttaacacaatgtatgttgtattatttaatacataccaaatggttcgtattagcttgtattataatatttacaaaagattcggagtcaacaccaatatcgaacctgaacccagactcgaacccgaaccagacctgagatccggaacccgaacctagatcgggacccgaactcagacccggaccccggactcaaaccccgaacccaaaacctagaccccgaacccggacccgaacccaaacatagac

SEQ ID NO: 91907 - DNA, 541 bp, Cannabis sativa
aaaaaaaataatgaaaaacaaagaagaatgattaatattatatgtatgctcgtatagatttcgacactattatataattactaataaacaaataagaagagaaaaatttttttaaaaaaaaaaaagtaaaaagaaattgaaaaaacacatgagaaaaaagacggtaaaaatgtagaaaatacttagaaagatattttaaaagagaaaatagagtaaaaaattgagagaaattttttgagaaaagggagaaaaggtgaggtttaaaaaaaggacaaaaatattaataattggtacaaacaaaaaaaaatacacaactccaaacttgacaaaaaaaaacacaaattactaagataatcttatttagtttgagaaaatacaaaatagcaaaggattataggaaaagctcacctaagctgtgtgcaacaagtgaaaaaacaatcttacaaaattatgtattactggaaagaaaaagttaaaattctaattaaagtgaataaagatatatacatattaaaagcatctctaataaagagctaaaagt

SEQ ID NO: 91908 - DNA, 616 bp, Cannabis sativa
acacttacctcagagtaatacattgtgtatactgttatagctgtgctaaaggcacattttgttcgttctattatcatcaccttttcgttttcatttgtgtaaaaggttgtggtcccctgcctataaccaaattttgtaagggcttatcccaatctatatggaataccctcaacctcactattcttgagcttagttttgcaatttattttgaaaagtccctttctcatcttggtatcaaagcaaacctgctcatgcttcaatgttgtctagtaccagacaaacatgacaaggcactcaggacaatgctgatatttgtcagcaccctggaattgatgctcagtagcagaaaacacagagggtacaaaacccttatcaaaccagctcctttctaggtaaaaattgatgctcacaatttggtcttcatcctagacaaggaggtatcgctcatactctctttggtaatactctatcacaaccatttgcattcaacctagatcacaacaattatacactctggaagacaagattagatggctatgataatggactaaaacaagctcgacaagagtgtgtacctgtggagttccagcaagtcatagactaccagaattggggt

SEQ ID NO: 91909 - DNA, 690 bp, Cannabis sativa
tcgagtcctctagaagtatcatggggcccttaaaaaggatgttttgactcatttgacatttataagtcttggtcaaaatcgcaaggttgactttaatgtcttcaaagcactcttggcatgtgatgaccttgtgcaagagtagccatttattttttcgcgaaaactgagtataacaaatttttagaaaatattactagttaatcgcaaaattatatgtctagaaaatactagacactgctggtacttaataacaatcctttaatataaattttataccaaattagtgtaacacctaatcaaataaaataaaattttgtagtaacgttttttaatctgaattttccagtaacattgctaattatactttctgtacagtaacatctagcaaaaattagtggacaaaacagatggcaattagtaattgtattccggactggcatgacaaggccgccgtagacaactgtaggccattgctccgcctttactgcccttgttcacatcatttttcctataaaaaaaacactgaatcaatacgcccattatggagcctcccgcagaacaatctccaccgtccacgctatcccatgcacaagtaactgatgctcgacgcgtggcaaaatccacttcattacaccgacttcatttcacacttggcactcctctctctaaaccctcacaattatactatca

SEQ ID NO: 91910 - DNA, 770 bp, Cannabis sativa
aaataaaaaagaaaaatatataaagtaaattgtatataaaaaaattacaatacttattaatttgttataactttgatctctctctttttagaacgacttctaacaatttaaacatcaccgatacgtaccacataagcatccaataatatttatatataatataaaataataaaaaaaatgttagaatattataaagatgaatagttgaataaattaattaaatatcagtaaaatttaataactaaataaatacctgagagtattgtgttaacactaacaagtaaatgagccaaatttaaagttatgaattaaaactcagtgatcgaaatgttaactatttctccttttagtctctctactgaagttgtaataaaaaataaaattttatagtcatttgaaagtggtctgtactcatttatggttgccaaaattttaaaattttacaaatagtgcaaaaaaatttcactaaattttttcttattgttgcgtgcattagattttcttgtatgataaataatagacacgttgagtatttaataattgataaatgataaaagaagtaataaagagaaaatataaaaaaaataataattaccttctcattaattaatatttaattctctattctttttattattaagagacttctatattctataaattttaatctttatgttttaactatttgtgtttaagttggtatgaaaagaacactctatggttagagaaaaagcgagaaggtaagtagatatatatagattttagtaagt

SEQ ID NO: 91911 - DNA, 929 bp, Cannabis sativa
cctcctctttcgaaaaatctccttcaagataaatggcatactgaccagaaacaactggtcccaactccaccaacttctttttgacacccttcctatcttgcaatcgggttcctaggagatccttcaagataaatctcaacagggtcttcaaccctttctccttccatgttttgaattgagaggatattatttatggtccttctttctctgatgtatgcatgaaacattggagaattactgtctccatcttttaaccatgatagtttagccttttgctgcaagaaagagcagtaattgctatgtatttcagcatactgaattctcgccattgcttcctatcgctgtagttcatcactgacgggattattgtgcaggaacgattgacaatcagccaacctagcacaagcttggatgtccgcttgttgtaaattagaaaaaccacctttattcagctctctaaagaccggtttcaatgccttgagctttcacacaacttggaacattgaagtcctaacaatcttttccttccatttgttttcaagctgagccttgtattgtgcatgagtactccacatcttgaagtacttgaagggctttcgaccatcttaaaatacttaaaatacttacattaaaacttagaggattccatgctatgatgattctccctcctttgtgccacgatatatttgatgtgaaacaccaatcttgaaacatatttacgtataaggctccaagctttggagccttaactctcgtctcgaggagaccaactaaaccaactccattccttgaaatgaagttctttactgttttttccttttgcatactgttgatccctgggacgttccaagcaaggatcttatccactagaaagaggaggcactccccctcctcctttgctatccagaatcatccctacttgttcttca

SEQ ID NO: 91912 - DNA, 828 bp, Cannabis sativa
gttacaataaaaatgtaacaattgaatagtcacccatatatatatatatatatatatacaactgaaactaaaacttgcagcgcaatattacgtactcgaagaaaaatcaaaagcttaatttttaaaatctccaaactttataaataaaatcatcaaatctccaatcaatttaggaaaactgataccacttgttaggatttataaaacactcacgaaatatatatatatatatatatcacagatctaaacatattttttaaaagtactttactatagaaaatcctaaatcataaatctataaaacatttactaaattaaagaagaagatgatgataaaaaatgagcgaaagcactaatctgatgctattattggagattgcagagaatgttttgatcttctaagaatacactatttctaaaagtattttctctgatgggaaaagagagaatacagaagcctagtgttctttggggaccactaccaatttatagactcatcttagaatgagttttgggtatttataatttgactcctcaacaaattataaattaacttatagtctctatacattattttcatgatagtttaatacccttctgatacctataacataattggtcacttaattttgtatcacactttataatagcatatacattatacatatttgcccaattttaatccaacacaggggacaaaattactaattattctaatatttatgaagctaataaaaaattaaaaaaatgagagaattaaggagagaacaaataatactagttagagagattttagagtgtcaagctgttgcccctgatttttcccaa

SEQ ID NO: 91913 - DNA, 645 bp, Cannabis sativa
aaactattgcaaagatgtttcatttttgatatataaattgtgtaattgaatgggtgcttatgtgaataggtatcttccgaatagttatgttgttttgtaaattttttgaaaatgggtctttttcaattgtgtatctgtaatttttttcaattgggtcttttgaaggtattcgcacattgtatttttttttgtttaatttttattttttgtaattttttcaactgttctgaattatgattatgaaacattatttatattattagttaatgtattttcttgtaactttttgaagagtcacaatttgttttatttgtgatttaggagttgtgtgaatgaattggtgcttgtacaaatgacgaaaggttgtattggtctgtataatgttgtaaataaaattggtttacttaatgaattgaataggtgtctgttaaagataacttttttgtggtatattttgttaaattttttggtatattctgttaagtccacaacaaaaactgttagatatgcattttatatattattattaggtaataagtaagatatacaattttattaaactagttttacttcttatcttttttatttaaagtctcaattattcattgctttattttattataatttgatgtatttacgtattat

SEQ ID NO: 91914 - DNA, 1157 bp, Cannabis sativa
  modified_base (1126)..(1131): a, c, t, g, unknown or other
tagtagtattcaaaaatagagggtctataggccaaagcaagaacatgaaagccttgaggccggatattgagatcgattcacatgcatgaggccaagaccctgcaagaaccatgtagctaaaaaagaactagacagagctcttataggggccatgtaccgggctacgaataaggcaaagttccttacaggtttcaagccatgtcgagtcttaagttgaacattcgactagaatagactcgctactaagtttcatacagagttttcaagaaaaccatgtatgagactaaggttgtatatgcctacagagttatattcttgtcgaagtcaaaagaggacagaaaactggctacccacttggaaccaaggcccatgccggccaaggttctcaagccttgaaaaggtcagccagggtcccatgactcagtcaagaaatggccagtggtcaccaaacccaggcataaacaggctagctttatagggtaaaaccctaaagcttgccaactcccatgattaagccttaggaccggccaggtttcaagcaagacctcccaggctggccaaagtgagttttgaatcccaatgtgtatttttctttcaaaactcgaatatgtgcctcgtattctctatgacttaaggagtcaagaatcatagcaaaggccagaatcaaatatttttcatcaaaaagttacacattacagattccaaaactatcatgagaatctatataccaaagggattacaaactaacatgagaatcaaaaagtttctaaaagcttgaaacttgttaatggcatgtacaaagaagagatacccaagaagagaaaatgagacgtatatagagagagaagatcaaagatccaaaagcatgtcaggcaaaaagccaacacttagctaaacaagactgctcaacagagacaactacaaacaaaacgagagctagaaagtccctatccgactagatgttcaaaatagggacttgcggggacaaaatgttatcccaaattttttctacctgacgtggcatgtccacgtaagccaaagacagagtacaggtggtgtacaaccctgctagtagcaaaatagagtctccatacaaggtatgacaaaactgttgggttttatgccnnnnnnaaaactctatttcaatgtaatccaga

SEQ ID NO: 91915 - DNA, 715 bp, Cannabis sativa
agagagagagagagagagaccgagtctcaattttcgcgccaaaacattgggagcgggaacgatagtggattgggcctgggcctgggcctggccttttcgggctttcatttctggtactgaggccttgtcgttctgcaacgtctaattactgattatttcattaatgcaacttaatctcttaataatgaatattaccataattttagaattttatattaatactaattttatgtacattttactagaaaattataaaatcacatgttgtggataactagtaaatataaaataaccataatattcattagatgtagctaaggggtttatgtattatgggtatgccctaataagattattaacaataatatttctttagagtcgacgctagttttagttctttgtgacgtatattgtaatttggttctctttaataatgtgaatttttttcattattttaggacaaagaaatattgttgcccacaatctttttaggtatgatttatttgtggcaactaccaaagtttggtagacactggccaaataatctagattgtattcaaaattcaatcatgcttgatactatgaatttctaatgatatatacctcctctttctcttatttagagctattgctctttaaggtgaagttttagtgttttcttctccaaaaaaaactaattgagtcaaaaaatttattttattttcattaaagtaga

SEQ ID NO: 91916 - DNA, 2852 bp, Cannabis sativa
  modified_base (2415)..(2421): a, c, t, g, unknown or other
acaatacaacgtgcataactatccctattatagagtaactgaatttgatggtaacttccaatccgaatggagaattaaaatagaacttcttttacaaaaagaaaatatatctaaacttgtctctatagaaactccctagctcatattacgtgaacattctagttacgttgtgaggagagtttataaccgatggcaccataataatgttcgtgctaggtttgtcttattggcttcattcaatgaagagataagagatatgtatgactgtttagtctatgcctgtgacatctggaagatagtacataataagtattttgcactcagaccaatttacttatgagagaaatactcatcataacaagatgcatattttgacagagttacgaagctagaaaggaaggtaaatatgattcgcttttcttcatgtttataaacaatagtgaattaaattattcttaaccactgacattgtttctctcttgcatgcaaatttgtgaatagacgacgaatgtaatttgaggaagtgagacttctacaaagttcgagatggagaatgattttagaagagcaatgaagaagtcgattttttattttaaattttaaagacattttctattagatttattgtttaaaattttagttgcacatttaaagtttattttatttaaataattttattttgaacattttatgttttatcaataaagtttatttaatttcaaacttatgtgtgcaaagttaattaaataagacttcaatgctcatagtataattttgaaatcatgtttaaatatcttaattattttgactaaataatacataagtaactgtttggaatagtaacttatgtatatttctataattaagtttaaaataaattaaaatatgatttttattctatattattaaacttagaaattaaatgacatttaattaaaagctttgaatgactattaaaacatatacatggatatgaaatcattagtagaaatataaatatttaattagaattgtctaattaaataaaatcacatttaaacattcactagttgaatctatttagtaaaatagattataactaattattcaaatcaatatgagatatcattttaaataaattaaaagtatttttaagtgcttagaatacatcgagattgagaataattgattgaagttcttcatgcaattaaatctcaataaagatgacaattaaaatgaggataagtttgaagagtcaaaattaaattttactagtcatgatcatcaattatattcaaaggtaataagtatttaagtaggagtattctactaaaataaataatttaagaaaactaaattgttaattagtatttttaaatcaaatcaaacttccatggaactatacagatttcaatagatgagatttattgaactatacagatttctctagttttgatggttatatgaaattcaatttgggttcttaatcattttaataaaaatttagtttgtagaactctagttattcattttcgatatgacagagtttaaattttctctataatgtaataattttctgtatatatatctagtgtttgtgtggattttcttcttttggtctaactttaggggacgttaatttaggtcgtatgggtgcctttatttagctgttttttgttgttaggttagtttttagtcttttttaggctttctcttgaattttattttacttgttaattggcttgttggttttatgtgtattagtgtaattaggtttaatctagttttagatttgttatggaatttgctggagaaggagatacatcgagtttttggatttacggaaagatgggaggagtttagtgccatggaaagtgagaaattttgtgccttttgtggttaaattgtgcctttgttggggtttttgtgccatgttatgtggcttttttgatatgtattgcggttttgttactgtttaaggtattttgatgttatttgtttcaagtagctattacaattaggatttttgaatgtattaatttcctttatttagagtgattttgaccttatcgtataggatgatttattttaaattatcgaattttgtgggatttcaatggatttggttggtaagaatgaatttatgaggacattaaagtaggttagatgttgaagcgttttgtaaagcattatttgggtttaggtaataggtataaatatattaaggctttagttggaaagaattgtagaatttataaaataagttttaattcagtcttagtgttttggagaaaaaaaattatttggtattaagggaattgattattatgattttggtaatagtggatttgatagttttgtgttagtttagatattttggttttcaatttttttttttaaaaaagatccctaatgtatttatagaatggtttttannnnnnntttagattggtgtcccatgagttattatataattatatgtttgtatgtaattatggtatagtgttaaaagaggtatgtattttgtcaaaatattggttaaaagtttgatttcctgtagagtacaatattatttaaatgtgcatagctgtgatattggtagattttgaaggtgatttagagattaattacattaaaactttataggaaagtttcctctttggtattaatttaatgatatccagttttaatggtattaagtgtgttttaattttggtgctaaactaggtaatatatattctgattttattttaatggtatccggttttaatggtattcattgttttttcaattttggtgttaattggatcagggccggccagagggtggggcagccggggccttggccccaggccccacaattttggaggccc

SEQ ID NO: 91917 - DNA, 886 bp, Cannabis sativa
  modified_base (284)..(285): a, c, t, g, unknown or other
  modified_base (638)..(643): a, c, t, g, unknown or other
tatttaccattaggcttatcgggatattacagtactgtaattgaaagaaatcattgtagcgtgccttagcagtatggcattacagccccagtttaattgactattttatcaatcttccaaaagcatctggttttgataaaacttgtcttagcggttgattgattaacaccttaatcagatgtgtctggaagtaaggccttcatatgtgagatgcaaggattaggcataaggcatgttcttcaaaagggggatacctctattctgcccccagtaaccttttactnncatagtaaataggttgctggtgctttccatctcttacactattgctggactaatcccattttctaagacaaccaagtagaggagtaatgtttctccagttattggtttcaccaaaactagaggtgtcgacaaatgcctttttaagcttttaaaggcctcgcactcttctgtccactcaaactttttgttgcctcggaatacattgaaaaacggtaagcacttatcagttgatttcaaaatgaatctgttaagagctgccattctccctgttaaggcctggacttacttcagtttagttggtgatggcatctctatcaaagccttgattttctcaggatttgcttcaatgcccnnnnnnttgactatgaatcccaaaaattttcatgaggaaattttttgggttaagtttcatattgtactttttcaatatttcaaagcacttcgcgaggtctttcgtgtggtctccactttttatcgatttcaccaacatatcattgacgtagacctccatgtttcttccctattgtcttgcaaacatttcattcactattcactgatatgtcaccccagcatttttcaaaccaaatggcatgactttata

SEQ ID NO: 91918 - DNA, 1056 bp, Cannabis sativa
catggggctgaactactataaatccctggtgtctattttatttactgcagttttatttagccaaattaattcatcgcaatccttttattttttatgatttttttagatcagttgataaaaaattgcatcaacatagatcatgaagttgatgaacaaagccatgccatcactttgttgagatttcccccaatcgcacgccaagaagttaaggataccatcaagtatggcagagatgtgattgcattggaagatgttcttgccacacttaagagagaatttgagaagaaggagtttggaccagttcaaaagatacttggtattgaagtttcaaggaacatgaaggaagagacaatcaacttaaagtagtccgagtacatcaagaaagttatttaaaagtttaacatggaagatgaaagagtacatccgttctgttaggcagacaatttttttttgtcaaaagaacagtatctgaacagtgcgaaagagaaagaggaatgaaggatgcaccctatgcaatggttttgggatgtttaatgtatgtgatggtgagcaccatactggacataactcatgctctaagcttcttaagtcggttcatgtccaatccgggcattgaacattggaaggccctcaaatggttattaaggtacttaaaggacacttgggattatggtttgacctatgagaaagcacaaggaaaattggagttgaaagggtttttggatgtcgattatgcttcaaatagagatacgaaaaaatcaaccacttcttacattttcatgacaaaccggaactgtatatgctggaaggcctaattacagtatgtggttgcactttccaccacgaaagctgaatttatggctactatagaagcattcaaggaagcgttatggttttggggaattatgtttaaattgaaacaaataaaaggtggggtgactatgtacttggatagccagtcatccatacatctttgcaagaatatgatttatcatgaaagagcaaacatatagatataagactctctactggattagggagaagaaagaggaggga

SEQ ID NO: 91919 - DNA, 1375 bp, Cannabis sativa
gtctccacccctatggatgccaatctttcactcaataaagatgttggccctcctgtcagtgatgccacctctcatcgcagcgtcattggcaagctcttatttcttacaatcacacgacctaatatcgcatatgctggtaatagactcagccaatacattagtggtcctcgacaaccacaccttaaggctacttatcgaattgtccaatatctcaaaggaactcctggctaaggactcatgtttcattcaaacaacctctcacagcttcctatagaccgactcctccaatttcaagctttctctaatgcagattggggcacctgccctgatacacgacgttccatcactggctcttccatcttttaggccagtctcttatctcccgaaaattaaagaagcaatctattgtctccaagtcatctgccgaagctgaataccgctctcttgccaacacaacttgtgagatactttggctccataacattttgactgactttggcatctcctcatctcaaccaacaaccattcattgtgatagtcaagctgcaatacatatctctgagaatgcggtcttccacgagcgtactaaacatgttaatattgactgccatatagtttgagaactggtcaacaaaaattgcatcaagctctcctatgtcccttctcgatacaacattgcagatatgatgaccaaggctctcttccttacccaattcaacacttttgtccaagatgagtgtctcaaatctctacacttcatcttgagggggaattttagattgttagttgtcaagttgtcatgttagttaaaattagttattttcataactaattctattagtctgtttgttgctgatgtattcagctctctttgtataaatacctttagttcattaataaagatacaatgctactttcactaataataaatgtaatgcatctaggccctccacgtgtccatgagttaacagaagtggtagtaatggatgtaagagaattgtaatattgggtatttttacttcaaaaaataaaaataatgtatttaagtgtataaattctaaaatattaagtatttatgccacaatttacccatctatttttctgtaaaatttagagtttatatatgtgatggagttcacttatatacaggctaagatatttgttatatttttttccctacggttataataaatagttagaagaaaaagacttatgatttatgcaaattttaatttgtggatgcttgctaagatcttgggaagtttgcattataataaaaagtcacctctttattattatttaaagtaatttgtggcgtaaatatttaagtttaactcccagttgtaaataaatacttaagtttaatttttggcgg

SEQ ID NO: 91920 - DNA, 583 bp, Cannabis sativa
gtagttcgatcctgcatggaggcaatttttattttaataaattttgttttgttttttctaaaggattttttttaaaaaaaaaaaaaattgatgaatataattttgaaaagttacatacaattttattttagtttttccaattaacagaagtagtttcaatatgaaatatgacattaacataagcaaatgagtacaggagtgggttatcttatctttgctactcaaaaattatatgttccagccactaatataaacttagaaaaaggactacaattctaaatcaggataagattaattgagattaattgtaatatcagaattgggagtagaactatgtgtgtggtggttttggctagagattatttgagtattgttttgtagactgttacggagattctagattttgttgatactcttattggtgaagctacaacttgcttacttttcttgaagacggcaaactttttgaagcattattttatgatagtggagaaagattctgagataggtattaatcttctcaaaggtattttggctaacgagagaattgatacttatttaacatagtttatgttcaccaatg

SEQ ID NO: 91921 - DNA, 1159 bp, Cannabis sativa
ctatttgggtgtaatcaattgtttttgagctaatacaattttcatcaaaaaaaaaaaaaaatatattataacactttacctataaacgttgctaaatctcccttttattaacagtttcttttttaataaaaattctaattaattagttttttttaatttaattaatttagtaatactactatataataattttattagattttaatgaaataaaatcaaatgaagaatttacaaaaataattatgcattaatatagcgctaatacttttacaaacttagttgaatttgtagctcatattttttataaacttagttgaatatgtagctcaaattatgtacatatatagacataaaatcttaaatttctatgaaataatcaaataaaatattcagttgtgttgttcaccatcttcacataacatctaggtgactgtgtacacttgttgattatgacagtgaacttcaaaatagattaacaaatactttcgtttctgtgcgaaaccgttttcgtgcgaaaccatggtatagcttccatgcttggcttcattttaataatttaaatattaaaataaaaatatcgatatatatccatgtctgcaaaaaagggagtatatgtatcacttttaaaattacttaatttgtaatagaagaagatgaaagacataagtagaactttgtatctagatatatatacatacatttatatgtgtacaattttttgggtaggagactcgcaatcatggaaaaccttcctctatgcatgatcatcatgaattgctgtccccaaaaaactaaattattaacttcgtccatggagcgggatatgtagaagcatggtagttattatattatgtaaatgaagaagttataaatgatcactacattagtgggaagaatacgtgcttgaattggtttcagttttaataaatatcaatataaaattatattgtcaattattaattaaaacattaattttacaaaaatatatgaaaacaaattaatgtgaaattattattagaaacactttaataaaaatcgttgttattttcaatgtggaaatagatattgcaacattttattaataagtgttgtgttttcatattctaattagttattaaaataaaatgatatgggcttttgcaacactttttttctaagt

SEQ ID NO: 91922 - DNA, 701 bp, Cannabis sativa
tgttcaaacaagaaaatcagaaaatccttaaaaatctaaacttttcgagttgcttaaaaattagaaatctatcgaaaatgagttttatgcaatcaaattgaaaaattattttttcaatagttcaataatgttaaatgtgaggttcaaaaacttacggaattgaaaagtgttgaaaattgagcaagttggcgaaaaatactcttttaggccttaaaaagtccaaattatacaagatagtaccaaaaattttagtttatatatgagtatttagacatgtgcaatctttcaaaacaaattttctcaaagatatgaaattttggcaaatttcacctattatggcctaaaaaattgaaaataagcaagtagcataccaaaattttgttcaaatcatatttcaatcaaaacaaacctataggcatactaaatacttatttggacatgttcaaacatataaaaacatatactagccaaacatgcaaaaatttacatattcactagttcaaaggcatgttcaaggttcactaaaaattagcataatgacctataatctgaatttttcagcatgtatagttcgaaaatgtcaaaactcaactaataaaaactttatgcatagaaatagtatctgccgcaccaaataagcatgtatgcataagagaataaacaagacagattaaaaacaagtcaattagcaaaaatacttt

SEQ ID NO: 91923 - DNA, 666 bp, Cannabis sativa
catttcggagttgattaaccgtcatgcgttggtcgatttgcctattaaaggagatatcatgacttgggacaatcatagagacggtgctaatcacattaagtcagccctggacaaagctctagtaaataacggttggctgcaaatctttcctaggacggtcgttcggtctctcaccacctgcaattctgaccatcggcccctctttattaataccgactctcttcggtctctaacgccagacggccttttcgctttgaagcttggtggacaagggaccctcgtagttccttggtggtggatcaagcgtgggggtctgtttcacatgattgggcccctgctagagtgtttaagaaagttggtgcgacccgcctggccctgagtaactggaatcgggtgcaatttggcaaattggattcttgtatctctaagttggagggtcaattacaagctgtccagagtttgcctgctggtgaaagaaattgggctacggaggtggaggtgaggaaagagcttaatgaggctttaaggcggaaagcaatttactggcaacagagatctagggtctcttggattagggatggtgataagtgtactaattttttcttcatttctgccacgatccgtaatagaagaaactcggtggatagtatcttgaacaaggatggt

SEQ ID NO: 91924 - DNA, 522 bp, Cannabis sativa
tgtccttcatgtgttccaaatatcattttagcccaatcattggctgccactcgtatttgatggtaccccaattcagagaacaccctttctctatagagctcatccaaaagttcatcaataattggaattaggaatttgtcttctacaatctctctattccaagcatgatagtccatacaaactcgccaacttctgtctttctttttgactaataacacaggtctagtaaaagggctagtcctagaatcacaattcctatctgaagtatatcttgaaccatcttcttaatctcattgttctgaattttagcataacgataggggtgcacttagattttccccactccttcctttaacactatacattttcacgagacattttttgtgggagacccagaggcatgtggaaaactaagtcatatttgtggaggaattcctccagcataaccaaaatttatcactcctcttccctgatgtcttcttgaattgccccaaatttaactcaataaccatatccatcttg

SEQ ID NO: 91925 - DNA, 674 bp, Cannabis sativa
cggagtaactcagaaggtgtggagtgattgcattgcttactcgaacacatacaaacaaaagttacttaataaaatttttaattttagtgatggtttatgttatatagtcaataataaataattgattgtaagaaaaaatattaattttaggcaagagcagcgaaaaataaagaaagtcggggtaagatgaaacttcaaggaggttagggatcaaagcctattgtttcacaagttgtcgttggggtaactttatataatacattatcattgataaggtttttttttgtaaaaatacagcaataatactttttttgctgtggaaacttttcaaaagtttcaccataaagacaacaattggcacaacgaatacacgcaacaagcttatgtaagtttacctttatattgatttcaatttatttcttttaatttattttgtatttaaattaactatttaatttatttatttgtttttggaggaaatagttgaattagctgcaagtcaaccagcggatcagcctgatgagactattgtagatcccacacagtacccccaaaacttgcatgttatgacacaagtactcagggagcgatctcgacatctaagaggctttggccatctctcgagactgaaggcagttggggccaaaagagcatctgccatgaattcttctgcc

SEQ ID NO: 91926 - DNA, 703 bp, Cannabis sativa
tgtttagttattaaatgataaaataaacatatgtgttttctaaaattatacaaataggaccctaaactaattatttgtcaaaataaaacttaataataatcctatccagatgttatgacaaaattatattttctgtatcaattcgtgttaaaaattatcttaaaattggtcacattaaaaataaaattattgaaaattgaactcagtgtctcatttttactattttagaaaagaaaaatgctaagaggcactagtagtgcctaccctcttatgtgtcagtattgctattggttcaactaagtatcgaatttcacatagtttaatataatagtttttaggaagtatcgctagtcaatcgtaacgtgatatgtcgagaaagtactagacaccactgatacctgatagcaatgctcttaatatatattgaccgacttctttgaatttatggtagctgaagaatggtgttgtgtgtgggggcttgtttttctattatttatattatttttcttacaagtttcccttgaacgttcgtatatttaatatagatatttatggtgtgtttttaacttacactacaataaaaatgatttttcccgagaagaaatatatttctctttgaaaataaaggatcaaatctgaatgatatcttaaatactcattttggattggactgaaaactcgattatgaggtgagtttcttttt

SEQ ID NO: 91927 - DNA, 1376 bp, Cannabis sativa
aggattaagtaacttcatgaaccctgtaaaagaatcactcgagacaatacgaggatcaacttctgtagagcatacaaatttggcaacattagaaatggctttcatggcattaaattcatgacaatcatcctcatcagagtatatatcatcactgttatcgtcactttcagactcaacctcgttctgcctcatttcaggctcaatagctttatcatgttcacctttatccgacatatctattttctacacccacaaaaaatgaaaaatataatatgtacataaataaatactcatatatcgattagcagcaaaaaggtaatcaaagagaaaactcatgcaacattcattcatttcataattgcttaagagcaaaagtcttttttttttttttgtgagaaaaaaaagatttttacttatgaaaatgaaaatttgggaaaatgggtgattgaaaaatgggatttttttttagcaaacgaatagaaaactcatctataatcttcattcactccgatattcctcttttgtaaaaggatattaacatgtttaccttttttgtaaaagaaaacatggaaaagattaaacctttaaagatgggattttttcttttgaaaaaaaaaaaaaaaaaatcaatagaaaacgcatctaatcttcattcactgcaatgcatacattgtacaatatcaaaagttatgaaatgggaaaggggaaacataaataaagggcagtgtaaaatgaaaaatcatacacacacaacgaaagctaaactaagcatttgaggttgcccctaaagcaagacaagttgaaaatatggaaaaagaaaaggtttttatgaatgtaaaataagaaagaaaaatgaagaacaaaatcataaataatatgtaaaataaatgaaagatgcttgaagaatgtagtagattatattagtaaaggagttgagagagaaagaaacctgttagtgagagctgagagagaatgccaagagacaaagcaaggatgaagatgatcagatgactgatgaggaaagaagtggaaaggccaatataatctctctttctctagtctctctatatatatattaagcgggaaaccaagaaaggctttactctacacgtggatgctcaccattgtatcatttttttttttctttagaattgaaaagagaaatgtttaaaggacaatgagatatgctaacaaactctctcaaatctcaatagtccaactaagaattcaatctcatataattgaatataataattttttaaaaatagcaagacaacgtcctagacaccgctgatgttaggggtgttcacaaagtatctgatccaattcaattcgcacgatccaatccaatccaatccgcaaaatgcggatatccg

SEQ ID NO: 91928 - DNA, 974 bp, Cannabis sativa
gctctataaatagtatttattattctaaacatattttattaattgtttgaaattataatttttctttttatggggttgtatttaaatattaatattatatatttaaaattaataaatatattaacatttaaagaatcaaaagaaaagtaaattaggtaatgtaaaagtttgaagtaaaataaaaaaaaatatatataattatgataatgtattttgaatgataagatagagaaactgataagagcactctgtaacaatattcactatactgatgtcatgttgtcatctgcaaattcttttacaaaaatttgtaggtagtatacaatgttcaattcaggcacaaccattttacactgaaaaaaaaaaatacaaaaaaaataagtacctcaatgtagagtatgttttttcgcatacacatccgtagcctataaatatttttatatataattttaatttcactccaagttaaaagtttggtatagagtcttttaggcctcagcattggttaccaaacgaaattacacagaaaaaagaaaaacaaaaaaaatatgggatgggtgccctttagcatttctccctcacgaatcatttcaatctagtattttggtctattgcagttgaatgaatggactaatttgaaaattacacttctagtaaaaaaaaaagttcttaaaattatacatcttaccttttacgttgatcatatttgataatgttcaccagcaaaattatcacactatcttttttttaaaatgaaaatagtgatatagtgaactttataaatggcatttttattaataaacttctgctaaaatagaaaataaatctgccgagcaagttcatccacccattagaaaatgccaaattagttttgattgaaaaaatcaagtgtgatcgaaagcatttatgttactcaggcgacgcaactaaaattgttaaaatttgaatggaattagaaccatattaattttctt

SEQ ID NO: 91929 - DNA, 596 bp, Cannabis sativa
ttcctctcgcagaactcgtgaataggtctccattaaactaagttccgttatcatatactatcttcattagaattccaaacctgtagacaatgtttttgacaacaaagtcgaggattttcttacaggtgatggaaactagaggttcagcctcagtccatttagtgaagaaatcgactgtcaccactgcatacttggctccttcttgccctgtgggaagtgccccaatcaggtcaatcctccatatagaaaatgggtaaggcgaggttatcattctcagttccgtttgtggtatgcgaggtatatgcgagaatttctgacacttatcacacttttttacaaattcatgagtgtccttgttgatggttggccagttatatccctatctaatgatcttttttgatagacttttccaacctgcaagatcccccataaaagccttcatgaatttctctgatgatctcgtttgcttctgcgggaagaacacaccgaaggagaggcattaaatatccctttctgtacaacttgccctctactatcgtgtagtgaagcactgaatacaagagttttcgtgccttgtttttgtcagttggaagttg

SEQ ID NO: 91930 - DNA, 678 bp, Cannabis sativa
cgtttccaaagtaattacatatttgataaaatatgtctatttaaacattatttattttctgggatattacagaatgggatgtcagttctctttttcaagcattactgggatttggtgggtggtaaatttttgatacaatgtctaatttctttaggtctggatctatgcacaagagcgttaatgctaccgatttggtgctcattcctaaagtcaagaacccctagagagttagtcaatttaggcccatttctctctacaatgtcatctctaagatcattgcaattagaatcaagccaatcttacctagaatgatttgcttgactcaagcagctttcgttcctcgccaaaacatacaagataacaatgtgattgtccaagaagttattcactcctccaagaggaaaaaaggtaaagaagatttcttttccattaagatcgatcttgtgaaggcgtatgataagatgagttggcggttcattgattttgttttaaatagttttgggccccaaagatttttcacaattggatcacacattgtatctctactaccactcttaatgtttgtctcaatggaggccatgtagggagaattaatccctcttgtggcatccgcaaaggtgatcccctatcaccttatctttttatatgggctgcagaaattttttctagacttttaga

SEQ ID NO: 91931 - DNA, 520 bp, Cannabis sativa
tttgattttggtaatgataatccccccaatcttctacctttcattttgtaggtctcaagggcaccctaagatactttagaggaaaatccctctcaatgagagacatattcgctaaaatatcagttttttctctactatctacccccaccaaagtagatatgagatttttgagtattaatgaacaaccatgtagttgtactgaaatcatccaaaactgctttgataatacgtaaagattgtctcgttcccttgctcaatattatcaaatcatccgcaaaatacaagttaataagctttaaacttttacataagagatgatacctatagttaaagtcatgagcagctagttgtaaaagccgagtaaggtactccatgattagaacaaacaatagaggagaaatggggtctccttgtcgaagacctttggcccctttatagctaccctgcacacggccattcataagtaaagagtaggaagtattcctaacacaaatcatgactctattgacaaaagtccttg

SEQ ID NO: 91932 - DNA, 600 bp, Cannabis sativa
gatagtgtgaacaaccaaatttggtgagctcgttgaagatgcttttaagaatccatataattttttttcttttttatttgtagtaagttatctctatttaagtgaattatgtgaacctatatatgcaaatgagcttatgtatgttattcttttctttttcagtaaaatatgattatcattcaaaggcaaaagctataacacatacaaaatattgatatataatatgccatattatatttttcattatattattttaaacagttaattttgtcattgatttctgttttattattatttttcattttaaataaaaatctattaagatggaagaatataaaatggaaagttttatacacattctcaatcaaagtttaaagttacttgagcaagtgattgagctaaggcatactcttttcttacaacatgaatgatgagacacaatgactcaaaaaatgaataaatattaaataatataaaatattacaccattcaatcaaaagtgaaagattattatatcaaccatgatctattatattaaataaaaattgacaaattttcaataaaaagagattggcaaatagtttgacactacttagcatg

SEQ ID NO: 91933 - DNA, 778 bp, Cannabis sativa
ttcatacatcttatgtcgtttgatgggattggagataacaaataagttgagcagagagttgacaatggtgaagtttgtattcttctatttttttcccaagtatcttgcgttgttttgttgtagttgcgttatttttagttggtaaaattattactataattggtaaaaaagatcgttttagaataaaacactaaattttttcctattaagtgatgctcgcatatcaatacaatttttagttagagaatttgcattttccatttgaagaatttttatttacaatttttatattatcgctaatctccttcgagaaatctattattatttgtttgacttgtaataaatgaaattttaaatttaattcttaattatcaaaagtaaactttgattaaaagaattaattttatatatctttattgagaataaaataaaataaaatatatttatagttagaagaaactatggataaaaaaatacaaataaataagtgatgtaaaattaaaataaaaattacatgaagtactatttttttgtaaaaaaattatatttttacgttgaaagatatttttttgtatttttacgatgttatataaaaaccacccaaaaataataaaaaataaattacataaaagtaataggaaaatagcatcaaaacaataacaaaaaatcaacaccaaattaacgaaagtacaacataaaaatatatcaaaagaccgtatttatataagtaaaatcataaaaattgtaaaaatttaaaatttggggaaaaatctcacaa

SEQ ID NO: 91934 - DNA, 515 bp, Cannabis sativa
tgtgccatcttcttgatgattttgagttcttgaagcagcagattgagttccttgctggtgactcgagcctccattacccacagtagccatattcgccattaatggcggaaaaggctctgataccatgttggattggttaagtcttctagacattgcagcattaggaaagtaacaaaaagagaaggaaagaagaacagagagaaagaggaagaaagagagaaagagagaaagaactctttattgattaagcacacttgatacaagacttatatataacaagaaccaaaggcacttaaccaatacactaaccaaaaccagtaaaagactagaaaacatgttaaccgaagttaactactaaccaacttaacagacacaacagaatgacagttacatctaactgtcataactgtccttacagtaacgagttttgccataatatctttagattaaattttattttgaaaaaaaaaaatcagttcagagtcctatttgtacaattttaaaaaatacagggt

SEQ ID NO: 91935 - DNA, 1007 bp, Cannabis sativa
taatgattgcataaaacaaatatggtattcttctaaattatagtagttatgttagaattataatttagaattttctaaatttctaagggcttttaggcctagtcccttaagtgttgcatttataaaattagtaattgatctttttctaatatttaattatttagagataattaaatagttaagttatagatatcatgggaaattgtattaagtattcttttttttttattaaacttgtatgggtagtgagagaattatttaaattcccatataattatataatacgtggaagataaatggagttaaaataattatggttgagatttgtgtgcttggaagattatcttaacaaaactcaaacaaagtattgtacatgagcaataggaagagcattaggtggagtcaggtagcattatcagcctaaagaaacttagtccaaagaccaacttagtgaaggtgtaccatacataacacttttttctcaatctgttaaactcactttgaccgattcttacgtgctattacgtataatttggccgaattatctactatcccttaagttataaataggtacttccactcatcatttttcatactcatcgctcaaagaagccaagactctcaaatcattatttctttacttgataagctccaaagtcataaccatcttctattattatcctattttctctaacttggctcctcacacaaattcaaaatagcttggcacttcactctctctttctctcatccctattgcgtatcatagccaaagtcaccatctccatcatccacttatatcccatagttttgatatccatatccccaaacatcataataatcttatatatatatgttctatcatctcgacgccatcaccaccattttcacattcaagttctcgtgctttgctagttttctttgaaaactaaggtatcattttataattttgagtttgtagatttaagattaaagtttcatatatatatatatataccattatgata

SEQ ID NO: 91936 - DNA, 684 bp, Cannabis sativa
agtttttaaactgtaaagccaaacagcctctaagcttctgagagcggatctcagtagccagtacctccagctttgaatacagaggctacttcaaggcaccaagcacagatggcttgtctacttatatcatcaatctgactgcacacgttctgatcatgcaacctttgagggaagttccttttgagaactctagaggggacaactctgattacgataaaccaatcgtgatcaataagaaatggcgaggttcctcaaatgatggggcaaacaaaaggtgagcgtggagaccaaggagaaggtcatacaatcgacaacttcaaggaggcaggttgtggtagctcagtcttggaagagatttgatgtatctgatggcaaaaggctgtctagacaaaacaccaaaactacaagggatagtcaggatcctcctcctccacccccgacatctgagatcattccagctattgctactcagctgtctagggagagaactgatttaccttcgtttcctctagcgcctttcaaccttattattagccccttgtcggtgacagcatgagacaatgcttgcttggaggttgagcagttctaccaaaaaaggtgtagtatcgaatacaaagaaaagaagaaactgaccagtagtatctccacgagatgtaacgctgaattcgctgattatgacaaatg

SEQ ID NO: 91937 - DNA, 792 bp, Cannabis sativa
acgtacacgaatatgaaaaaaaatcagactaaaaaattcttccgtataccgaaataagtaaagggtgcatcagtatatctcttttaagggagtgcactgtagaatcaccttggaaaattctttaatgcaccccttaaaatggatgcacctatatatctctatcaatttttgtaaccgaaataattttttagtcaagttttttctcatgattatataaattatagttatttaagacattctgcaaaattttatgaaattcgaaaaaatttaacacaccgaaaactgctttcaaacagtgtttgtaggatatcttaaatatctataacgtacatgaatatgaaaaatatcagactaaaaaattctttcgtataccgaaataagtaaaaggtgcatcagtacatctcttttaagggggtgcattgtagaattaccctattaattttcctaaactattataattagcaaataagaaaaaataatataaaagctgtaactttattgtttatttatatggaaatatgaataattatatgttgattttattttatttacattatttttattttagagtattaatgttcttttttttttttcctttccgagctttttttttccattaaacaattttaccaaacaaacaatatcttataatatattaattataggctgattctataatgcacacccttaaaatggatgtactgatgcacctttaacttgtttcggcacctagaataattttttagtctaattttttttttcatatttatgtacgttatatgtatttaagat

SEQ ID NO: 91938 - DNA, 742 bp, Cannabis sativa
aagaaggacttccactagctccacccctattccacctcatgaccaccttgtataccacaaaaagctttaactacaatgccttgacaaatttctttaaaaatactagaaaggaaggtttcctgttagcgtcaagaaaagatctcctaattccaacctgtatctagtagctttccaccgtgaaggagataggcgtcgaccattgtcaatcagccttgaatttttgaagaaaaaaaaatctcgtcctccctgaaatccctgaccccgactcttcccatgtctctaaggctattaggaaaatcccttatgggtccaaatccacaacatcccattcacacgaagatccatatcgacgaccaaacttgttggccagattgtagggttcttctggaaatccatcaaccctccctcctcgaagcgtggggatcttttttaacagtttgtattatgttggatgtcaccaagcctttcccaagaagtgaccctattctcttccctgggatggcttccgccacctagcttgaattgaaatatgaggatcagcctaacccctactatcattgtggacgtcttgggcacacttataatgggtgcattgactatatgagaccctccgatgtatccccacacccaccaccactcccatatgagaacattttgagagtaaccactcgaccgaaccagggaccatttggaatctcaccttactataaccaattgcgtctcacaggagtcatgaatcccc

SEQ ID NO: 91939 - DNA, 647 bp, Cannabis sativa
tactatatatttcccaataagtttgttttttttttttcgcgggagttgaccgtgttgaaaagttcatctcagttaatcgggttgaaattctatctcctatttttcatttttacagctcattcatgtttagtatgaatactacaataattgtttattaatatttccgatctaattaattatatattgaatgttaatttttattattggatttgatccaattaatctcaataatttaatcgattcactattcaatgaatattggattgaatgtattttgtatatatctattgttttaatttaaatttatccaatattttacttaatatttattagataagaacaaatctattcaatattttacattttgtatttattagatttttggatactccatccagcatttaatccgatttaattagacattcaaaaataacatttaatctaattcgatcacaattaaatatttaatgtttgacaatctattgtaattagataagttaattattattggattggatgaatttattatttatccaaaaaaaaataaatttaaaaatagaaacaaattaatttagcataatttaatgagtattgctaaatgtagaaagcctcacataaaacagtctcttacaataaataccttatag

SEQ ID NO: 91940 - DNA, 1129 bp, Cannabis sativa
tgttagttagggtgttacagtttagttctttgaagaactgagtaggaaccaagtttgccttggttgtcaaggcgtcactacctagttgaacgagtgcgtcgtctgttgtgccgtctttgagggctttccttctagtatagcctttgggctatcttagcagctctggtaggccatcatcttcttgtattgagctgtatatttacctaagacaccatctacgactatctaagagtcgtggtgcatgtctaggtggttagcccatgcttcatgtgctagcctggggccagcattggagcttcatgttcagccttgttggtagaagctttgtatctgaccttgttgcctggtgcctcagttttccccgaggtgctgtgggggctaggtctgcattgtgtaagtggtcaatgcacctcctggattgttactctcgattcttctttggttcttgcttttctcctgaactttgagagatttggggagatatgcttctatgattagccgtgaagtgggtgagagcttggcctttggtggccatgcttggttgtgagatgcttttatgttggccgagtctcaatggttcacttgagtagttggcctgatgctctaggtttctgtagaacctactgcaactgctaatcggtgtacacctttataaggcgtatctagaagtatgaccttagcgttttggaagccaagatcaagctttcgatcagcttctccatgagtgtgaactgacttagtatcgatgagtctcttgttggcgtcgtatatagggtgatgtacattgtcttcttctcttgtgagggcagcactcacaacatgttctgtgactgcttggttcatggttaactcttctttgtctagggatttgtgcaacgcaagtggctgagccaatctatttcttcagctcttggaatgcagtttcacattcctttgtccactcgaatttgctgttgcttctgcttcatgttgaagaagggtacacatttgtttgtatacttggacacaagtctgcttagtgcagtagcgcatcccgttgggatttgtacttccttgatatttgtgggcgacttcatgttcaaaaggtgtaacgccctaatctatagggacgccacgtgtgtgattttat

SEQ ID NO: 91941 - DNA, 628 bp, Cannabis sativa
cccttgaaagtgtttatgcatgatatttggccctagggcaaaatggtcttttgacctttattttcttaatttaataaaagtagaattttgagagtaaatgaagttagaaaattatggtctattgcttccttttggccgaccctctctctctctcaaaaaccctctcttgttttcaacttgaaattgatgaaagtctagcttgattgttggtaaaatttgtggtggaagcttggtgtttgcttttggctcaagttgaggtagtttctctactaaatttaaatgaattccttgctgaatttcttgtggaaaaacatgaaatagttgaaatgttcttgcttatgcatgtgtggaaagattatgttgtttttggataaattaaagtgtaaattttataatcttgttgtgatttatgttgtggagctttgaagggatttttagggtatctctggattgaaatccttgttatttttggttgttgctgctagaaaatgttagaaatatattggcttgaagctcaaactcttgagcttgagtgtttgtgggtttagagcttagttatgagatttttgtgtaatctgaaattggggtttaatattgaaattgatgcatgaaatatgtttatttgagc

SEQ ID NO: 91942 - DNA, 986 bp, Cannabis sativa
tcgcagagcttttactccccatgaagttctcaaagtgcttaatgaaatgattcaccactttctcatagtcatctataattacatcccccttcatgaacgtggttattctattttctagtcttcttttcctcataatagcgtgaaaatagctggaattttcatcactaaacttgacccagttcaccttactttgttgtctaatcgccaatgacattctgacctttgctgtcaaaaataacctctgcttttccttaaccgactgctgaataaacacatcatttggaaaattggctgcttcctcttgaatattgcaaaaggtttccttagcctccttgtaatccttccttacatctcccacttcagctctatgaaaagcttttaagcatgcttaacccgaaaaagctttctcattatcttatcaagaccatttcctgcaatctctttgttccaacaatccatcacaagttgcttgtacccaggataagaaggccagtgattcccaaaacgaaagggtttgaagccaaccttgttttgcacctgacacctaataatgcaatagcagtgatccgaaattacctcccatttaaaacaagcctcagcatttgggaaatcattaagccagatattgttcatgaaaactctatctagcttagaatagattatatctcccacctcatgcttattcgtccaagtaaagaacgaccccgaacatttgaactcctcaacttgacccaaggcaagccaagcttgagcgtccaaaatgtctttattccgaataggcctccctccacttctatcttggtaaccaaacattgcattaaaatcaccaataatgatccaaggttcactcaaattcccaaaactagcaagcttgtcccaaagctctttgcgaacctccatatcattgctcccataaactgccgtgactataaaactcttgatctgaccactgaattttatagtacaatgcacaagctgatttgtct

SEQ ID NO: 91943 - DNA, 4448 bp, Cannabis sativa
aaaatttgtactcgaaaaaacctcgtgaactagacactgttgcggttgtggttgtgattgtgggtttttagtttttaggagagacgcagattttggtttgttctgagaacttttaaatttcacgtccagattgattgtgacattacgttttgactgacttcactatgcatatttattgcttacatgttttgaacttagatgtctgagttcacaatggtggtattagttggcaacaggaaaaaccaataagatgttcttaaaaataaaatagaaaaagtaaaacaaggatctgcttgaaatggccacttttaacaaatttaacgaacaaaaagaacgagaggctattgcaatattgctattaacgacgtagtagcgggtctcttattaattatggtggaattcactaaacaatatacactgttcaaaataattaaaaaaaattatatataatccatttaaatattcagtacaaatatttgacaccaaattattcatactaaaatgtatgttgatatttttttttggtaaggtatttgttgatttgtttattaaaataataaaatataaataaacatttatcttgtaagattgtcttagaggcaatcttttcaactagcatgttacctattgttacaaaattcttgtggtacttttttttttttatatgctttagtattgacaattgctttagtattatcacacagtaatactattagtttattcatgttaagaataacaccaagatctatatagaacttccttagtcaaatcaattccttaacagcttagtggtagctatgtactcgacctccatggtagaatatgaaactatagattgcttaatgcttcttcaaatcacaattccacccccaaatgctcacctgaacaccacacacttttgtggaagagagaggaaccacacaaaaactcacctcaacaccacacacttgcccgctctatcgccgtctgagcagagtcgagctaactagtgtggtgtgcaccttatttttaggagtcacataaatgctcatcaccacacacgcacgtgctgctgctgtctggtcaatccgagtcgagctaactagtatggtgtacacatttttttagagaaaaattatttattaaaatattattattctttattgtttaattaaaaatatttttaaacgtatttaattagttggtaaacaggtgttttctcctctaaattttagtcacgatccaactttcctaccatttagaacgaattttttctcgatttatttttctgtgcatttttttatactgcatcaaaactagcgggagaaatacatccttttttactatcagttttcccatccgatataattttttagcagtgatattattagagaatgtacgaatgggctattctattctgaagacgaccgacatttatccgactgcttgcacattcttaaacagtgtcgccaaaaatctgaaaaaccagtcctcaactcaacttaaaaattttattcagtaatattgttcctcttttattttctatggcagtgtttgcgacaagatttgattagttgtcttattcaggattaatttgtatcatcactattcttggcgcaatttgtgacttggagcgatagcgtatttgatctgtattgtaatccttgttaaccaagtttttgcctttaaagaagaataaaaacagtattagaaagtgcaaagaatggaagagtagagaacaaaataacacttactatttttaaatacatgtaacacacgtccttgtcaaataataattacaagaaacatcattagaataaaaaacctattcaattgaattttcaaaattattaaggataaaaaaaaatgttgaacgctaagaaaagtacagcaagtcgtacagcttttgtgggaacttgatttcattagctttaaattactactttaaaaatgcacaagccataaactcaaagttagaagagtattcaggcgacccctattatacacccactcgtaagggagtatatatatatatgtatacagtccatggtgtatacacaattacacatcccaacgattcacaacctaagatcaaacacaaaaacctcctttcctatataaacgccctaattattaagcttcatgttggatagcgtgtctaaatcgcagcccaccgtcttgaatcagagccataccttgttgcatatcaaagttttccatttcagttgaggtttcagcttcagcttcagttctccttaattcatggtcttccccgaagttatgaagccgacggccaatcaaatagcggtcatcgcgaattgaattgtgcaggttggtaaaccagacatggaatcgctttgcacaaaagcaaaagacgctcaaacacaggcatcctaaccaggcaaaccgatagactgcagaattaacaactaatgggtacccgagcacaggaaacacccccctggcgagaacatatgggacacaaagggcagtcaacaacttcatgacaatcgggaaaacaatctcacgtagcacccatagaccttgaagcctcgagaaaccatcttctctcactctttcaaattttattctccaactttcatctaccagtggcatcatgtgatccagcattacctaaccagcaattaccaatccatgtcaatattcatcctttccacagtttctaatagtattagttaattaaaaaggggtcatcacaaagttaaagacaaagccaagtaaggataaagtaaatttcttacagaaaacaatattcagctaaaaagaaaaaggtcttatatctattaagtgcagctaaactaattcttttaagtttcagaaccattgaaagaataatgcaaatttcttacagaacacatactcaattacaaagaaagatgttctatctcttaactgcagctaaactaacttttttaagttttagaatcattgtgtgtgaaaagttattatcctggctacattaaataattgctaaaaaaaactcaccagtctagtccagatcttaagaaaaataagacctagtgcccagtcctgatacaaaaggaaaactgggctttcatccacaggcactcgcattggtacaatcaccagaagctcaaacagtaacccaattaatactggaatcacaaatatctgcagcatgacaggttatgatgacaatgttaaaaaacaattaagacagcaaaatctgaattgtgaagaggaaaaaacactgatgatgcatacccagattgatagaagtgcaaagctcttagtaacaatgccacaccacttccagatctgaccacacagaactgcaattctttttgtcttaacatgctcaatggaatatctgactccagctatagcagtccaaatgacatagcttccaatgatgaaagcatatagatctaacaaaaaaattaagaaaaaattaaaaatccagtggcaaagtggtatgaaacaaagcaatcatatattaagttgtaatcaatttaccattgcatttaattccatgtgttattggaagaacaggaatagtgttaaaaattgtccttccaagtgaaactggtacaactatcaaggcagagttgaagacaagtagagtcatccatgccaccaccagcaagaggacaatgcgaagaacaaagctgtaccttctgaaatggtacggaatggaaatgaatattaacaaatctatattccgataagattagaatcaacaatgaattcgactaattcattgaaccatggatgcaagaactatagttatgaaaggaaaagatgttcccataaattttactagaattcaattaagataaaatgtcaagggatatagtcaaggtaataacatgaaccacatggacaaagttaaagttgcatcaacttactccgagtcagattgctcatcaacatcgtagtcttctgcaacatttgcatccgcagatgcaaatgttgctccattcagatcatcagcacctgggagtggcaccagtggctggtcctgcccacctagtagtctatcctgcctccctggctctgcatttcctgtttcctgaccaccattagcttcaggactgggcaacaagaaatctgtcaaaccaagtgcccagccaactaccgtaaaccaatagcgaagaagagacttaattgatgtccgtaatttaaaatgctcaatggcaaacggaatgcatatttgaaacagaagcatgtctgctggaatttcagtaaatggatcagataccctgaggaagacacaaaaaggtggtgcaaattaggtataggtgaataataaacatcaaccacggttaagacaataaaacataagtgccatcttacgatatatctagtgggaaaatggagggtgccatccgcatggcaagtttgactggtagaaacaccaacatcactataagactcccatatactgcaacagataacagcaccctgcgagcatgcttgtgaacagg

SEQ ID NO: 91944 - DNA, 963 bp, Cannabis sativa
ccacaattaattgtcatatattttaacaattaattcaagaaattaaatcaagaaatcaaatattttataaatcgtaattttaccatatatacaatatcaaccagttgattaggttcagattcaataaatattaaatattcatttatcttaaatcaattaattaattctattcttaaaaaataaattattctaatattcacccgcttggtcattatttagatttaccacttaaacccaacaactatccttgctatataacaaacatatgaatcatggcgatatgtcctcattatatgtcgagtattatcttccatgtattacgatatatttattacataacaatgtactttatgtggcaatgtacttaagcaaataaaccataaatcttatgtttattctggtcttcttacgataattttctcagataaaattaaggtgtacataaatacgagaaaatatcgaaattagagtttcattgaataattttagttgtaaaaccaaaaactgcatacggggtaactgaattccatatttattttacgatccttgaattgtgttgcgacttgcctttagtcaaggatatacaatcacccaattcagtattgcatacttaatgatcacttatcatgcctctttatagttaaatacttaatataaatatactagcttcgaccagtactcttattatagttcttagccataaatactgtagttgaatttgtcacaaattttttttaattgcctaaaatataattctaaactctaggcctagtatgaaactctataatataccatactacttgtatcctcaaaacaatatataaatttaacttttataatagaaataacaattaagattcttcacgatacaacttagtgataatcttacgaatgtaatcaaaggttcatttatgtgaatcaatatagccagtaaagtatgttggaatctaattggttaactat

SEQ ID NO: 91945 - DNA, 721 bp, Cannabis sativa
gcacattttttgtaatataattgtttttgttgtacactaatgaaaaaacccctatatttatttgggtcctgctatttctctacatatgctctcgtacctttaactttgatcatatagaaactccaactccttatttttttttgttaacttcaaaagtttcttgagtttatatcattttattgtttctaaatagaccaaccttcttaattttattaattaggataccttcaatttgctattactctttacttgttctgcacaagtatggcatttacatgagatttgtgtaattagttgggattttcaatgaaatgatttagggttgaatgctggtgctatatgttgtttaagaagctaaacttgttgctaatgctacaatgaattcattctcatctgctatccatatacaatcactaggctcctatttttatggctgcttccattgcctatgtgccttttgatgatgaaatcttgtttattttttaaggtgtcatagcattaataatggacactaattgaatgtttatgcgtacaatatgtaacacgtgaaataattgagttatgcataaaaatatgcaattttattgccaactacttgtacaaaattcagttgttttggaaagcattttattaactaggggatatacgtactcttatgttatatttttatttacatgcatatgtatatacatcttttttttcatcatcatgcttggatttt

SEQ ID NO: 91946 - DNA, 761 bp, Cannabis sativa
gcaaggagaatataatattctatccattatatatatatatatcctatacaatatacatattttaacaatactttctccttgttattaatgtggccttagtaggcaaatagattagaaaacaaatagattatcattagattagattagtttggctctgttatgaccattggacattatagtcttcttcaagtctcatggacaaattttttagctattttagctaaaaaattaaaatagagtgatatttttattattttggctccatgcttaaaatatttaactattttaataatattttatatttaaatttgtcaaatataaattaattcaataaaataataaaaaataatagtgttttagattaaaatattactaaaaaaattagcaaaaaaagagagctccctatatttagagagctttatatctcttatgtattatacagagccatttatgtttgagaactcattcttttaaagctgactctctaagttagtattggacatcaaccaaaatacgtctgatttcactattaaaaaaaaaaagcaagagctcaatttcagattttgtttgtgctaaatatttttcgattattctccaaaaattggagagcactgccatctccatatggcactgggcgcataggctttattctacggggatcttatgtcattttgactttatacacaaatttaagcattttcatgcccaaatgagtaaagtccttgttagtttctttagcggattgaggtctctagggtgaa

SEQ ID NO: 91947 - DNA, 554 bp, Cannabis sativa
aaaaaaaaaaaaagagtacagcacatgatcaactttgattaaatctatgtctaattttgcttttatgtggaaaaatatttaatttatcaagtcatagtatattatatattttagaaggagtcggtgatatgtatagtatataactatataaatttattattaagcatagaaaaaagtatataaatttaataaaagaaaaactatataaatttatttatatgtatattcattatgtgtttaataaagtaaatatttttcttggtgcttgataatgctcaatgacactcaatgtctagctcgaacaaacattaaaaataaaaatgaaaaataaaaataaatatttttgcttgatagtgttagacttcgacattctcgtagttttgacagtttttgtcttttctgcgacatgattttgagtgttttaatcttgttaatacgatatagttttgtttttgttatttgttcttctttgtttttcgatgattcgttatcaaatcactgttagtggttaggaataacaagttctttgcgactaaagagattgttagtagtgc

SEQ ID NO: 91948 - DNA, 681 bp, Cannabis sativa
  modified_base (312)..(317): a, c, t, g, unknown or other
  modified_base (554)..(554): a, c, t, g, unknown or other
tttttacaacactaccacaaaaatgactttttttcctattaaccgatgcaattgattaatatagagtttttgcgtatggtttataacagacgatgtatttgtcgtgatttttaaatgatgcaaagcaaacacttcccaattttcgtgttgcaatagtataatatatacacgttcattattagaagtgacacaataaacgaatgtattagctcaaaagcgacgccaatggataatagtataaataaaaaaaggaaaatactattctggatcctgtgttttgcaaaaattatcaattagactctctattttgtnnnnnnataaaatagatcttatatttttcaaaatagtaaaaatagtaccctgagctcaattttcaacaattttattttttaatgtaaccaactttaagataatttctaacacgaacagatatagaaaatataatcagtcttgtcataatatttttagatcagatgattattaaattttgttttgacaaaaaatcagttcaatgtcctatttgtaaaattttaaaaaatacatggtctattttntcatttaacaaaatagaaggtctaattaataatttttataaaatacaggatctaaaatgatatttagcctaaacaaaacaaatcacacaggttaatttgatgaatatctactttctttttaacccta

SEQ ID NO: 91949 - DNA, 663 bp, Cannabis sativa
atgaatgcgagccaccaccctccgccttcctatgcgactcaaacaaacctccttcacctctcccttgctcgcattgctctcagatcgaggcaccacaaatcctctcattcttctcggcagcccaaacaaaccatgtcagatctctatgtttcaccgacatccatggcagatcactttttcttgctcgtttctgcatgttctgcctgtgtccatgactaatccttcattgttatttcttttttgttttgctctttttagctagtttgggcagggatcgagagattaaaaaatgaaaaaaaaaattgattatttgtttttataatttatttacaatatttataaaaaataataatatattcataattatttttcttatttttaaaattagttaataaattttttaaaagaaattatgaagtggaccaatacttgagtaacatgtggcataaaaatattctcaattatatttaacagaaaagtagtaacaggagtgagtaaaactaaactttagatatttaatccgttgaaataaaagatgtggtatttaagtatataaattgaaaacatttatgacatgtttactaatcaggattgggagtgataggtatggtaatcactccttttcatttgtttactttatttaatggttggaatactctaagg

SEQ ID NO: 91950 - DNA, 746 bp, Cannabis sativa
acagggaggttaagacagtcattactatgggagaactgagatcactcttgaggaagtaatctcagcttttaaatcaaaagattcgaaattaaaggttgaaagatcggggcatactaatggggatgttaacctaagtaagggaaggcatacacaaaagaaaccaatgtaaaataggggtagaagcactagtaggggttcacaaaagggcagcaatcatcatcacaaagggagatcaaattcaaagggctctaaagatcctaatgggtgttatcattgtggaaagctagggcatttcaagagagaatgctacttttacaagagaagcaatgggaaatcaaattcagatcatcaagaagaatcaaacaagcaaaacaagagtaagaatgactatcaaaatgcaaacctaagtgatggttatgatagtggatgtctatgtaactgcatcatcttttaaagatgattggattattgattcgggttgtacatttaacatgactaacaacaagtcttatttgtttgattacagggaatctagagggggcaaagtcattcttgggaatgatcaaatatgtaacattgaaggttcatgttctataaatttttgaaatgtttgatggcattattagaatcttaactaatgttagatatgttactgatttatctagaaacttaatttctattagtgtacttgatgatcttggtgttgttagcaaaattgaggcaggtacaatcaaattggccaaggg

SEQ ID NO: 91951 - DNA, 2325 bp, Cannabis sativa
  modified_base (76)..(76): a, c, t, g, unknown or other
  modified_base (534)..(536): a, c, t, g, unknown or other
taattaaatgctatgttttagttaaagtaacattttgttgtgactaaaagtcacatgtaatcacaaaaaaattatnttgtgactaaaaaattatcattaaaaagtagctattttttgtcgtgttactatttagatacaagttgttattaatttaattttagtgattacaataaatattgtgactaaaaatagtttagtcacaacagattatgatttttgtaattaatatatttagccataagccttttagttacaacataaaaatgataatttataactagttacaattatttttacttttaatcataagttttgttgtgacgtttaaaagtaaaaaaatttatatagtgtaactaaattaaataagtgataattttgtatctaaattttactttttaatataatgataattaatttttgtaacaatttataatcttagttgggagaaatttttaacataacacaatttttttagcctattattaattagaaggagatacacacataactctggtatatatatatatatatatnnntatatatatatatattgaccaaaaccacaagtttactatatataagtaggaattcaaagtacaaaacgcaaacatacatatatagataggctacacaatcactctccccaagatcatggaaagaaaatggagctaatactaattaaaaataaaaacacacacaaaaaaggaataaactctctctcccctcttacaaagtaagcaactattacagataaagctccatgaaaccttacctattattaagatatcattgtcataacttaatttaattaattagctagaagtaaagggctttcgaacaagaacaaccgagttgataacctcatcattgggatgaaacacacaaagaacctcaaaaccaaccaagtcatgctcaacctcaacaatagggtacaaaaaagccctagctccattggcactcctcacaagcaacaaccctccttccttcatatacttcctcaagtgccctaaaatcttaaccttctcatctctactcaatccaacaagagcagccaagaatatgcaatcatactcaccaagacactccttcaactccataacatctttagtcacaaacttcattctcttctcgagttcttcatccgatgcaacgatcctacgagcaaggcgattcgccttctcgtctaggtcaaagttatcaaagtgagtagttttcatgtgtttatttgccaagactagggatgtcaagggcataggaccggaccccacgaacgccaccttcttagggctcatcgagccattttcggccaagatgttgtactccattttagctaactttatgtagtttccatagtatgggaagaggttgaggttgttgagtggttttggtgttttggttatgaaagtagagaattctagctccattaaaccctcggcttggccacaaaggttgatgagactctctctcttgagttggagatcttgaggcaaaaccctaacatcgattgtagaaggaatggtacacaagttgaccaactgagtgaagagtgcgttgacttgcttggagggtcgaagtgactcgagctttgatatgttagtgtggatttgaaacacataagatatgagtaggtcaactgggatcatttgactttccattttggagaatatgattaatttgatgttatatatagctatagatatatattgaagatgagttctttgagctttgatggaagtttaagttggtctctcaactatatatatagattcaagaaatttgaataaagcatggatttgaggaagtgtgtatattataatttgataaatcttattattggtaataaagtcagcgtgctgcttcatgcaactttggtttcaattttgactgatatatcttcgttgaatcccatgtttatataaatatgtataatgattgtttctattttcatatttttcaattatgaataataagttatgattatacgtcattttgtttttgggacttttttatttttacactttattaaaatagatttttttgtatttttacggaattctacatagaaacttctattgcaaccagcgttgcaacttaatttgcaacaaaaaatcgtataaaaacctctattgcaactagcgttgcaaccactttaaaaacccaaactataaattttaaaaaaaaaattaaaaaaatagtatatgaggtaattgtcttaattttttttataatttttgaaaaaaaaaaattaaacataatttgcgaccaaacttattataattgtgccaaatttagtataatatattgctatgtattaaatttacatca

SEQ ID NO: 91952 - DNA, 1280 bp, Cannabis sativa
tatttgtcaaaaaattgagaaacttatggctcagttttggtggggttcttttgggaaaaactcaaaaactcattggaaatcctagtctacgctttgcaactcaaaattttttggggggttgggttttcgttccttaattcatcataaccaggctttgttggctaaacaagcttggagagtttttaccacacctgattcccttgcttctcaatccttaaagctagatattttcgacattcttcttttttagaagcaagtaaaggtcatttcccctctttctcttggactagtttgctctggggcagggatcttcttaagaatgggctcatttggaaagtggggagtggtcactctatccgtacccttcaggattcttgggctccaaatcttaggatccttaggtataaagataattgtcttcctccttctgataaagttagttttttcatgagttctaatggtacttgggatataaataagttatcaaattactttgataatgacactgtggctaatattctccaagtccctattggaggtcatgataaagctgattgtcttatttggaaaggagatccttctgctcttcttactgtcaaatctgcatatcaccttgtaaatacttcttctttgcctccttcctcttctaatactagtttctataatagctggtgaaattttttctggaatctatgtattcctcccaaaattaaaaactttggttggagaactttttatcacattttgcctacagtctataatcttcatagaaagaaaattgttccctccccttcttgctcttcttctagttgtcctttagaaactgtaattcacgctctactagactgttccagggcgagataggtttggaaactttctcctttatatcatttttaccttatgcatagaaataaagatataagagactttatgttatttggatatactgatctaaataatgattatttttctttactgttgtgtactttatggtctatttgggaacttagaaataaaaagcttttcaggaatattcattcagatgctgcagaattagtgcaatgggccagtagctatttgcttcaatacagggatgcacaggctaggaaaattgatgctgtacgagcttgccacttgcgcacaaccatagcggtaactcaagccaaggaaggatcttacaaattgtacacagattcagccattaatgacaagaaccataagattgggcttggagcagtggttaaggattagaatgaacaggtgatagctggagtttcttt

SEQ ID NO: 91953 - DNA, 1047 bp, Cannabis sativa
gttatttaccttatataaatcgtttcattcatcttaataaatctttatatatataaatataaatcgtcttcttcttcttcttcgtttcctctttactctccaattccattaaagcacactgatttctccggcgagcctgttcatcctttctttctttctcaaattcaagcaaaaaccctaaattctctctctctcgcctttccagttaggtttgtagtctctcaacttcatttctgtaggtatcttaattttcatttctgcgttacaaaattagtactgagctcagattctaagcgaaaacgaaatcctggttagcattctctgttcgaacaatgaactgaatcattatgtatctatttcttctcaaatttgatcttctgttgaaattgaaaggtttatgtttgcttctaagattatgagttcttttgcttttctggttttaggaatatatatgattctaaatacccatcctcacatgtgtaatatacaatttagatgctccgctactgaacctttcattagctctgccactgctttctgtgttgaattgtgaattagataggtttattatgaaatttaaaaagctggtactagggtttgaatgagtaagttttgtgttctttattttcttatattcttacatttaaatatataacttcaattttcgttttgttttacactttgttctagtattctttggcaagaaaaacgggctttcttatgccttgaattcttgtttaggttgtctcagtaagcgtgtcttcacaacatgggttatggttctgatagcggttctcaagatggaagagatgaaggttagtttgctgctattcttgttttttgttttcttttttcgtgaaaacttgctattggaactgcttaggcaacagaacaccagtaagattttattgtggggtttcaataatgtctatcaactctcattcattctttaaatatattattgttatttaaatgaaactcatttgttttaatatgaggaataatacaaaaaaaaaaaaaaaaaaaaaaagaaagaaaaatgaaaaa

SEQ ID NO: 91954 - DNA, 805 bp, Cannabis sativa
ctaaattataattctaaatatctaattaattagtttcaaaaatgaattaatagatattttattttagctgctaaattatattttcttaatattaattaattaacaataaaaattttcatacataataaaattcaaccttcctataccaatcctcctaaacgatttagataccaactgaaaaaaattatcaaataagatttatagatattttgttttagctactaaatattattttctaaatattaattaattaattaacaactaaaatcatcatacattattgaatccgatcttcatattcggtttagaatttttaacttatattataattaatttttctctccgttttcttatatttaaagttaaatcaacattcaattttattgattaatttgttctttatttcttttatatttttcttaacaaatttattatggtgatgtttgataacacttttgtttaaaaaaatttaatcacaaacataaaagtaaaatttttatttttaaacttttaattttgaaaaacaaaaatgtgttctataaccctttttctttttcaattttaaaaacaaaaaacaaaaatgtgttttataaatttcatttttattttcatttgttgattttatttaagtcgagtccagagctgggtccgtgatcgggaccgagggcaaatctatgtctagggtcggggtcagatacggtgtctaaggtctaagttgggatcgtagtttaaaatattaattaaaaaaatgtttaagaaaatattgcaagtgatttttttttgtttttaaaatttagatttttaa

SEQ ID NO: 91955 - DNA, 920 bp, Cannabis sativa
gggaataactacattggattggtcgttatttcccaatacagactatgagattttcccttgtttgaaggaaatctttttagagcattgtgggaacataaatgtggcattacctatctgtaattttccatctttggaacatatcatcattcgagattgtgatgaattggtgactatatttccatcaaatagtaatggtattgacattacatatccctctcttgaaatattgagcatatatagttgttcaaggttggagtcattttcagaaatgggattattattgccctctactttgaaacgtctaggtatctcagaatgccatatgctgatggagaatcgcatgaaatggaatttacaaagactcccatcattgactattgtaacactttggcgatatcaaggagtgctagattcatttccagaagattggttgttcccacctactttaactcatcttgttatcggtcgatttgataaggttacaactctaaacagcaacggtttttgccacctctcctcacttcgacagttggatcttcatcacttgaaacaactagagtgtttaccaacaggactcccacacactcttactactttgtcaatagaagaatgtcctctattggatcttcaacacatacctaacatacatgcaacttttctttagcccaactttcagagggattgagtttgtttctaattggcgcttttgaactcattgtctgtcatttgccataaacagtctctattaacattgatcataggctaatgattgagtgatctgttatatagtttactatttgcactttttgtttatggtttgtatgtggttaagtgaggaatatgtcactcatggaaatagtaaaagaaattactcttctctctattgttcaatactgttacaaatgcaaacttcatccata

SEQ ID NO: 91956 - DNA, 701 bp, Cannabis sativa
tttgaaaatcatatagctatgattttcctgcttttaccgggtcaaaatgatcgtgtatttaaacacgactttaattgttgtacccgaggatttctcgatagaagcttacttccagtgatcataatagcaagctggggccattttctcttctgaggtcgacgatgcgcctcttgctgcttctttgtgatgatcgcggttcttgtttacaaagagttctttgaggctcgtttgaatattagcttctgactcgttaggattgtaagactcactaagaaaatgtcagaagtttgatgggtgaggttacaagaagtcttcccatagtgagataggcaccttgcttactaggtctcaagctaacccgactgtcacacattgtttgaacattatacgctaagggccttcacagtcgattagtgttgcttttgtctttctagatataatgtacttgatgtctcgctattcgcattcaacgagatatggtttctcgctaatatactaagcaatagattgtgtattgattcctcgcataagaccttacagtcagcaggtaacaaatatactctgatacttatgtaataaatgagttttccataagaaacgattgcatcggtccatattccttttatcctgacacgtgtactattggaatttattttaccaggatcttagatctactcacaagtagatcggaagagcggttc

SEQ ID NO: 91957 - DNA, 676 bp, Cannabis sativa
tattttatcatattaattatatatacaaggatggaagagtttattccatccaaaaaagtttaaattgtataattgtctaaaaagtttaaactttaaagcgtctaatataattgtatatgtttttccgtagtattaaattgcaacataacataagaaaacaatatacatttttaaaattagacaacaaagtctcaatattagttaaaataactctcaactcattattataaataataaaagctcattattataaataataaaagctcgtttgggaagggttgtattgtattaaataataaatatatagtactatattttaataaacaatgtattatattaattattaagacaaaaaaattaatacaatgtaagttgtatatatataacaaattgtccgtattagattgtattatataatatttacaaatgattcagggtcaactccaatctccgacccaaatctagggattgggattcggacttgacttgggacccactcgaaccagaccctcgaccccaaaaccaggacctggactcgaaccctggacctgacccagagttggtgttgagtcgagcttattaaaaatatattttctttacacaatctactaatacaagtcaatatcaaacataatattatattaaataatactaatataatataacacaatacaat

SEQ ID NO: 91958 - DNA, 768 bp, Cannabis sativa
agtcatgtagtatcccatgtttggtaaataattctttgaatgcaagctcgggagcgttgtcagatctgaatctcttgaaaacacaattgtattgagtttgcaaataagaaataaactctggaataattgaaagcacgtcagatttttgtttgaggagataaacccaagtaaatcttgaatggtcatcaactaaattcaaaaaatatttatggttagaatgagaagtgatatgataaggtccccaaacatcacaatgtataagatcaaaaacatgagaagtaaaatttgcattattaggaaaagggagtcttttctgttttgcaagaggacagatatagcatggttcattactgtgcagattctttgtattacagtgcaaaacattttgaagtaaatctaagtacttatttgacaagtgacccaaacgtttgtgccatatttcagcagatgcgagagcattgatggagacggttttggtatccaaaacatagagaccattatccgaatcacctttgccaatcatcttcttggtttgggattcctgtatatagaatttatcagcaagaaacttaacataatgattgtcatctctagttaaacaactaactgagataatattaaatttaaaaatgggtgtgtacagaacatcacgaagaattaaatgtttgttaagaaggacattaccacttttgtttacaataatgtgttcattatttgggagaaccaatttagttggccttattgtgtgaagactttggaaagacttaa

SEQ ID NO: 91959 - DNA, 901 bp, Cannabis sativa
atggataacatggaaataccataaatattgcaaaaacaggaaaactagggttccctaaaatgcctcaaccggtagacgggttccccaaccagaattttggttttacggggtttcttggggatcaaccggaatttcggttcctacaggtccctctgcaccagaatttcggtttagtgcagaaaacacaaaaaaccacctacacacttcaattcaaacccaaacctcacaaaaacttccagatcacctaattataccataataaacataatccaagcaacaaaacaatccaacacaaccagaatcaaaatccaccatgtgagagcaaagtttgagctcttaagctcaaaccttgaacaaacctcacaaacagccaccaattcacctcaatctaacttagataacctcaaattaacttcaaaaacgaactcaaacatcaatcttatcacagaaccctaattctagaaaaacatgcaagaactcaactaaaaacataaaataataaaagagaagagtctaggggttataccttcaactgaacactaaaaacttcctagaaaaatcccataattgagctgaaaatcatccaaccctagctggttgcccaagtgctcgagaaagaaagagagagaaaaaaaggtttgtgatttttttcatgatttttctaatttgaataatttgggatattctaggtattatctaactaaattactaaaagaataatcaggttataactcacataaaattccactagaagtcaaaagaaacttagggcaaaaaaaccatattgcccttgcacacaccaacaagcacacttatcacttaggggtatttgtgttatttttaaaatctcgactattctcgacattcccaatatctgactatattgccccgctactactaa

SEQ ID NO: 91960 - DNA, 641 bp, Cannabis sativa
  modified_base (562)..(570): a, c, t, g, unknown or other
ttttggtagtgtttcggtgagtgcgaagtttgagattttcgtgtttcatggtttttggaatttcataagagatcagaaatcgtatttttgtcataacttttcacttgagtgtccgttttggacgttctatataccgtttcaaagcttgcaatgagctttacgatatggtgtttgttttagagccaaaatataaattttattttagtgtattcgtactacagggtttggtaggaaatcctcggttgtcatttgcaactcttaagtactgttttggggtaaacacttattgatttatcattgttatgaaataggatccgggatcatagatcgttctccaagcaggtcagccaacgtacctgaaacaaaacttgaggtaaggaaagtataatgtaccacatagcatgacggttctgaaattatcgattgtctaatttggcaatgataatgtgatgatactctgaacataatatatgggctcacgtgattaggtgatgcgatataccttgcgatgtaccgattgtaggtacaggcgttagtgacatatgatgagtaccgagcgtannnnnnnnntcacctgattaggtgatgcaataatattcctggtgacgtatagggcttaggtacgggcgttagtgatatga

SEQ ID NO: 91961 - DNA, 526 bp, Cannabis sativa
atgaaaaaaattagactaaattttttttctggatgccgaaacaagtaaagggtgtattagtacatcccttttaaggggtgcactgtagaattacccaaaagtatttaaagtgcttaattattaatatgagagagctcaatattgaataattagtcacttaatttgttgaaaattctagtccaaaattgagctctagcagaacatacatactctaacgtttaatcagaggaacaacatgtatcataattacattatgttaatccttaatcctgttaatcgaatcgataagccaaataatttaaaaaaaatactaaattatataaaacaactagtaataataaaatttacctttacttaaaaccaaaataacaaaattacatatttaagatcccgttaaatttttttacaaaatattacaaatcatttttatacaagccgatctaagcaacaaaataggattttatacaatcaccatgttggacccaaccctcgtggtctagcttggccgaaacatgtacaaccaggg

SEQ ID NO: 91962 - DNA, 1188 bp, Cannabis sativa
ccatcccattatggttatgaacaaatattgggcacatagttaatgattgtgtttatggtattaagcttatgattatattagtccacaatattaattctaacaccttacaggcatctgatacggttcaagattggttgtcccacatagagtaaatggtagaaaattaagccatatataagaatatgagcaactccattcattgtcaattaattttaaattgggactgaccgatgcaatcacttgtttccgtcgatcgacattctaaactgacacatatatatggtcccaattttatggcggtctcgcctgtatcacatatgcatcagttttagaaaccgatggtaaatttaatatttggacggaaatagagtaatattgtagtagcattgtgaaatatacaacactactgttacagaaacataaaaatattattgagagagagactatatgtatatatttatagactataaatataggggatagctatattgtatccattgttaggaataatgactgaacaagaaatttgatatatgacaataataataatgttggatatatgacaaactctgtgcaactatgtaaacttgtttgaccttttagttggctttgctcaatcactcattttattttcttttaattttaacaatattacaactcatgcatgtatatatgattcataaatatagtatttattagaatcaagtgaagcttaccattactaccaagatcatcacttgatgacttttttacaattcattaaatatcttttgactttactagaaaggaaaagacctatatatatgtgtacaagttaactgcatggtttgtacgtgctttgtaggttgatgtagaacaaacttttgtcttgtgtggccaacgtatatataaattatccaacaactcatttcttaacactaactcttggttactacttactagagcattcctcttctctataaataattcaaattaaattacaatttttttttttcttttttatgtatttaataaactaagctttttatgttacaccattttcttctagttttttttttcaatatcatttaaatattatatattttttagtatgttatgattattaatatgttataattcaaaataaattaatttttttaatataaatttagagtaataaaaattatgtgagtagctaatatatcattg

SEQ ID NO: 91963 - DNA, 599 bp, Cannabis sativa
actgaactagacctctttgcggatagcaagagaggtgaaagagggaaattccttcaccagtgcaggtccatcttgagtccatatgggaaatggactagaaagccaacgactttcaatcttatgggatgttacaagcgtattcagaaattgatggcttccgtaatatccctggactgatgtggcacaggcttttcacccttggggaatctgtatccatcagtgttgatgggttaagtgcatggagttggtctcatatttctagtggccctcagcttcctttgagaacttattttgcgaatctgattgcaaaaattgggattgtgcccttccagctgattccttcatcgtacagactcttggatgggtggtacgtgttctacaaaatcaacaaactgaaggttccttccctgaaggagatcctttttctactgtgtcaaggccaatcccatgagggcaaataggtcaaagctggggttcttctcactagataagcgtccggacacttactgccccattttccaagaagatcatccccatgatctctaagaatactggttcttttcctctagtttttataccagtagggtgccatctctgca

SEQ ID NO: 91964 - DNA, 506 bp, Cannabis sativa
aatgattagattttccttaccaccatattcttgtttctgcagcatgttagtttcatcagatgtcacatgattgctcgccccactgtccacaaaccaggcctcactatccacagtttctggtgtagctgtatatgctgctggtgactgagttggtttctgacttgtttggccatgaagcttgggatcagatcccatataagcttcatcatatctgttgtaacagatagctgctgaatgaccataacggccacatacctgacaagttggtttaggtccattggaacggccaccacgtcctcttccactgctactgcctccacgattttggttgctgcgaccacctcctgatgtgttctgattttgatgatgattcccttggtttgagtagaagttgtttccacgacctctgttgtttgggaaggagcgattggccagattggcatttggagatgcaggaggatgagtcgatttgttgttgctactgagactaagattctgaagtctct

SEQ ID NO: 91965 - DNA, 685 bp, Cannabis sativa
aaatactaactgcatttttcatattagtggctgcagacaaagatctgatcccacgttcacagccctataatataatagaaacataataagcaaccaaatataacatagaatttatttaaatcaaaataatatttttgtcatatttgaattaattcacatttattaccacaacaagcttatcgtccttattacaagcagatgaaacctccttcaaaaactctgaatttttcaccctacctgaaatgaaataaaagcagaaaagaaataataaaactcaaaaaattattatacaaattttcctttttaaaaaagaatattaagaaaataaatatgtttttatttaagtaaactaatataattgatataacgttacaaataacaatatgaaatacaaatctactagactgcgacaacctgaagaatgagagttgaaaactaccactaggaaaaactacaaatacgaaaggacacaccacagcttaccaccttaaactgataatagtttttttttttttttttttttacgaaattttacattaaaactcttattgtaactagggttgcaaatgcaacttaaatcacaataaaaactacaattgctctagaaacttaaactgtaaataaaaaaaaaaaaagttaaaaaaatagcgggataattccccaagaaagaaacaagtaccttgtg

SEQ ID NO: 91966 - DNA, 1035 bp, Cannabis sativa
ataaccaccaccaccaccacttttcggcgaccattctccggccaccgtccgatcccacatgctagaccattcgaacccccaggtgccgacgacctcaacctccaagcggcgctgcccctttgtcgtcgttagcccagaatttggaggttcgaactttgaatgaattttttggccacctctggtgtttgtttgacgagtcgtattgaccataagactcagctcatcaagaagaacaacctatactaagccattttgcccaacctgctactttttctagtgatatttttgaagctctgccccttcccgatgactttttggcaatatcatgtactattttgataaatggttagcatgagtgtgatctactcattgagatggtcattttgatatatactacccctattttcggtgatgtttcctgtataccaatttttactaccaccgatagttaatgtgaaatgctcaggtgaggtttcgaaactctaaactttaaacataatcatattatatgtcattggactcgcttttgaatgtagaatgcagagatgataattatttagccatttgatagtataagtgagagtaatacttaagattggactaaacaattagagctcgggacttgagagcttaagatcgtcttttggaaaaagtttaatgacttgagagaggtagggactcaacttgattattggacttgatttttatgtgtgaataacattaggcgtatctaatttttatgatttgtaaattgtttgaaaaattaaaaacttaatctgcacatttttcttgactgttctggggcactgagtgccaaatatatttttgtacaaataattatgcaagttatgatttttgggtttatttaaaatatagtcgttatgctgccagattttttagaaaataaaaagagaataggttcttttattattcttattactttgcctgcttttaaatatatttatgagagacatgttgatcatgatttgtgcatattgttgttccacgatgtaatctctgtgtcatcataggtag

SEQ ID NO: 91967 - DNA, 585 bp, Cannabis sativa
  modified_base (38)..(47): a, c, t, g, unknown or other
aaaccaagaattaccgttagataagcacttttaatatnnnnnnnnnnatatatatatatatattattggaacacatttttcttgaagtaaacatagtacatggatcaagaacaatatataaaaaactaattatgataaatagtataggatgataaatattttaatcgcttatgttttgagttttttcaatattatttaaaattatttatctataacatattatttatcacgtgaacataacatcatactatatatgtattgtataggatgataaatagtaactaatagtaaacatattattagttttttcaatatgttcaaaaacataataaacatatttatcatctcatactatcatcataacatcataatagtaaacatagtaaacatattattagttttttcaatattttaatcgcttatgtttactattatttaaaataacatcatactatttcacgtgattttaaataatattgaaaaatagtataggatgataaatattttaatatgtctctataattttaatcgcttatgtttttgagttttttttttttttttttttttttttttttttttttaaaa

SEQ ID NO: 91968 - DNA, 2354 bp, Cannabis sativa
  modified_base (1876)..(1898): a, c, t, g, unknown or other
cctaggactgttttgtttacttgtttttatttttgctttgctgatgtggatatatattgtaaagggactggttataagtggattttaaccaacaataagagatcaagatcaagatgataaatagattttttaaaaaaatgatgatgaataaagagaataaaaagtattgataaatcctgtttagtaagggttctcctatggctgttcatcatctaaaaattgccttggaaagcttctctgaggtaacgggtttatatcctaataaaaataaatctcttgtttactttggaggagtgtctacaggtgataaactggtgatcttggaagatttgcacatgggagagggaacttttccactcaaatatcttggggttcctttaagaccaacaaaatggagacgagaagattgtgagactatcattaagaaggttaaattgaggctaacaacttgggcaactaggcatttgtcttatgctgggcgcgctcagttaatccattcggttttgcttgggcttcgtaattattggatgggcctttttatccttcctcaaagtgttataaaagaggttgagaaactttgtagatgtttcttatggggtttcaaaggagagaaaagtaaaatccatttggcttcttgggatttagtttgtatgccaaagctgtttggggtctaggattcaagaatgggccaacttggaatagatctattcttggcaaattcatttgggctataatggataagcatgatatcttttgggttaaatgggttaacaatatctatatgaaaggagtagatttttcggagtatgaattaaaaggggatgtaagttggtattggagaaaattgtgccacttgaggaagagatatttgaagacgaatttattagttgttgtcaagaaggggaagtttatagcagcaaggctttacatggggacaattcaacggaacatagatagtttctacaagtcggtttggtgctatgcattggtgcccaagcaccgttttatattgtggcaggtagttcatggcaacttactcactagagacaattttgcaaaatttcacattactcttgattcttgcatctgtccggtgtgtggcttggaagaagaaagccatagccttctattcttcaactacaggttgtctaaagaggtgcttcagctggtgttttgctggtgtggggctgatctttggccttcggacttcaccagatgtaaggtgcggctggccaattcaaaagctagtgtgaaaattcttattactgctgccactgtgtatatgttgtggaaaaataggaatgtgtgcataataattgttgctataccaagttgagaattgtagtattaaagatatagtcaagtatagattgtatagtttaaagaataggaggaagattcttgctgaaaaagccttggttatgaggctcattgattaggaccggctggtttttttgtgctggctttttgagcagatgtagtgtggagccggttggttgtggcttgggtttgtattggtttagtattgattaatgaattctcttctttagtcaaaaaaaaaaagtattgataaatgagaattagataaaacataaataaaattaatataatgtacttttttacttcgttacatccttcttatataatataagtgctcgtttattattaatttagttgaaaataatttttgttgaagtatttcctaagggtaatatgtacatggtcggtcctgagttgaaatgagtcatagaaaaaaaaaaattgggtccttaatataaagtactcaaaatgtttgacgtgcaagttaatattttaagtatttatgtcacaaattttttaataataaagttaaaaattttaatataattttattaannnnnnnnnnnnnnnnnnnnnnnataatttatcttttatatataatttaaaatattttatatatccgccgccaggtgcgggatgtttactagtttatatatataataatgtgtgagattataattataacatttttaaaaaatgttatattatttagagtatttttaaaagtaagggtgccaaaaataatatgtaagaaagataatataaaatagagaaaattacactttctattggattttaaaagttcttaggataaatatgacactgttaagtttgaccaatttatgtggtatttttttatttttatgtctttttatggtatttgacatgttatatatatactaggtgaatgtacgtgccgagccacgtattgctagtttcatttaagattttggtcattttaagattttgaacatattttatttttaaagattacaaatcttttgtttgaaaaaattaaatatttatatttgaaa

SEQ ID NO: 91969 - DNA, 881 bp, Cannabis sativa
ataaaaaagaaaaattacgtatgcaattatcttagtataaattaaaaaggctaattaggatttttactctcaaattttgacatatatcaaattatgtctcttgaatatttgttaccgtcgaaaattcccctgaactattgatattgttagatttaaggaattttgtctaatttcatttaattttactattttaataattatttatgtactaaatcatgctctcaagactttgatatctaataaatcatgcttcctgaactttcatacttgttagacttttttttacaaattggataaaagttcttaaatttaacaatctcaataatttaatggacatttttaatgaccttaaaagtttaaggaacatgatttggtacatgtcaaaattcgagagtaaaaatcttaattatacaattacaaatatcaatcttatatattcttttaattaattatttttactatattattgttatttatgaatgataaatcatatataacattatattgatagaattaaattgtttttataatattataatcatatattattcttccagtataatgtttttggattggtttcctataaatttcaaggtttttaagttggagtttttataataatattaaattttagataaaagtttacaattttattatcatattaattttattataaaaatatttttttttataaaacaaccgtaaaataacaaaatagaataattaaaacaatagtaaaccaatgcacaaaaaaaaaacaaaacaatagtaaaccaattaaaaaataagaattatttcacaaatacacaaaaacaacaaaaaaattacaaaaatatgattttacggaattttaaatgtttttatgatttttttgattttat

SEQ ID NO: 91970 - DNA, 691 bp, Cannabis sativa
  modified_base (332)..(351): a, c, t, g, unknown or other
ttcttgatatttccagtttttgtcaagcatttacattcccagttcgagtactcgccgttctaggttgaatactcgcaattgttcatcgtattttttctccttattattattattcatttttggtgttgcaaaatttgctcgacaacatttggagccgtctgtggggaacggaagaagtacattcttgctaatacagaaagaaaatcataatggttggaaaccaagtaaacggaggttttaacaatgaatccatcaacatcagaatgatgaacgttccgttgtcaggaggtagagaaccaccagtggatgtcatcaatggcggagtaggtcgnnnnnnnnnnnnnnnnnnnnacctattccctgaaactactggccttcaagctggggaaacgtctacaccaacagcaacaatggggaactttccacccttcactccggtggcagtgtctgaaggtatcgtccaactgaccaccgatcagtataccgcaatctaggaccagctgcgcgccctgcaagctgaggtggatggacagaacagggcccgacgtcctcctcgagcacccactgctcgcacaaaaaaccctcaggtaactaactctagacgtcgtagtaaccgtacttgcagggaatggaggaccaacccagaaggactcgacttgaatcaaccaacctcgagggaccaatctgcgag

SEQ ID NO: 91971 - DNA, 1531 bp, Cannabis sativa
  modified_base (1470)..(1470): a, c, t, g, unknown or other
ggataaaactttctttgtctctatcaaatgtcaattttttagtatgtttaatactagatttaacttttttttaataaataaatgctacaattaacttgaacacaacatcactttgctattctatatttttatttttttttatttactatttcatatatttgttaatgtatgagtgagtcttaccgtttaaaatattaatttagagatatttgtaacaaaaactcaaattattatatttatcacttaagtatctaagttattttttaacagcaaaaataccaaaattattatatttgtagcacataaatatccaaattatttttttgtaatcaaaaacacctaaatcattacgtttgtaacacttaagtacaaaagttgttattttttttttattgttaaagtacttaaattattaacagatttgacactacaatgtaaggcacctaaaaaataatagaagttttgcacaaaatactcaaaattgtaatttttcatttttttttctttttttttttttacatttttccatatgttttttcagtttttcttacttaccctttcttcttctttccgaaagataacattatattcaacttgcgggaacatagtatattgtagcaacaacgtgagaacaaccataaaataattgttactacaaaaaaatcataaaataattgtttgtatttatataaaaaaaataaggaaattagtccttgaaaatattaaaaatactgtaaatccgtatttttgtaattttttttatagttattaatgaaataatttagttacttaagatctataaacatatgaatttgaatatctttgatgttaatcaaacaatttagtacaaatattataatttaaatatttttactcctaaaagaataatttgagtatgtactttaagtactacaaactattttaagtatttttgttgtaaatattctttatttagttttataatataactatttatgaaatagtaaatcttgttaaactaaaaatattttgaagtttttttttttttttttgaaataattttattttttttaactcatatcttatttaataaaaatattatattataattatatatatacaaaaattaatatactcaaaatattagaaatatatatacaaaatatttgaaatttatttctagcgttataaattatttataattttttaaaaaatttacatatggtcctaataaataactataacatatacgatcatgaaaaaaatagactaaaaaactctcctaaatgtcaaaacagataagagagtctacaaacttttggagtggtgaactacaattttttttaattcttttttaaatgattacaggttgactaatagtagtaataggaaacttctttggtgcaccaatgcacttccttaatattttttcatttagaagaatattttagtcaattaaattttttcatggtagtgtacattatagttatntaagacatcctacaaaattttaaaattaagaataagttataatataaaaagtaatgttcaa

SEQ ID NO: 91972 - DNA, 1238 bp, Cannabis sativa
taattttaataatgcaagtaaacaaatgtaagggaatgattaccttactattgattcccattacttattatgccaagtccactaaattacctttgaaaatgaaagtatataaatatttagaaaaacataaatgaagaaaattataataaaaaaaagctggggtatgaatgtaaaaatttacataaaatggactaaattgtaaatacatataacaagtgaggtcaactgcctccatttagtgtatgtttacatgtttgtacagagtaattaaagtattaatgttaaatacaaaataattaaaaaaaatatattaaatacaaaattagccctattttaattcatctcaagcttgttggtgttactatagcagtgagaatttagagctctaaaaaaaatataccataatatgatcaagtggggattatgtaattgttgatattcacttaataattactccaactttttgttttgtttgctttgcacaagtagagatatacatattaattttctcacatttattctcttaatataattggttataagtgatgtataacaaaattttgtttgggcctaaaaatgatccctttcataagtagcttttttaattttaccaaaaaaaaaaaacactttgttccataatccattatgaaagtaataaaaacttgagattattttagaaactcaaaaaaaaaaaaaaacatttttttacggaattctgatttttttacatttttaaggactttttttctacagattattgtttttaggttgttcttaattacgttgtggaaatataatataacgttgtaacaacatgaaaataatgttattttccctctaaaaaattacaaattcgtacaaaagtaaagaaaaaagagagagaaaattagtctctataccttttttatactgtcttcttttatttttactctcttttttaaaacttatcatttttacctctttttttaaacaggattttacccctatcacctcaattatatcaggatattttgggtacattacatataaaaagaggtatgtttcaattaaatataaaattaaatgtagatttggttaattgataaataaaagaggtatttttcaatatactccgaaaataaatccgtaaaaatataaataaaagtgtgattttagatatttgtctaaattttccttaaaaacttctcgatttctctacttggcccattaaaaataggcccaatgggcctatcttctca

SEQ ID NO: 91973 - DNA, 621 bp, Cannabis sativa
taaccattgaatagtcacccatgggtatgtgtgtctgggaatataatacatgtaaattttagcagtcgaaatttgcttgtaggtccattcacaaggcccaaataaattagtagttcggtccaaaaacaaagttgaatgggaatccgaattcaaccacgaacctatcagaatagagtcagacaagtagattcggaagtttgacacaaccaaattattgagcctattcgagaaaacatagacaaatagtagatatccctagggatatcccaaaggagtactagaagggtatcacagagcgtctaccctctgagatcaatctgacgtgtcatgcctctgacaaaaaatccttaagaatcaggggcttgttccttgtgtcagacctagaaaaggcgcacgcaaaagaagcaaactacatttttgtacaatatccactactttgatattcactgttcacgatcgacggcgcacacacagctatgaccatcaaatggtgcgacaccgtacggacaacggttacccctcaaattgggcctcacttaccgacccgaagtcaatctatattgtaatgtatttttacattttaccccatcagtaggcttattttacacatgcaaatcctaa

SEQ ID NO: 91974 - DNA, 723 bp, Cannabis sativa
cccctgcacccgagccttgctcattggatgcaccatccacgaataacttccaagtgtcagtgtctcgatgaacagtctgattttcctctagagttattccttctattaatcagtttgccaaagcttggcccttgatggatgttcgagcgtgatatgttatgtcaaactgccccagttcaattgaccattttatcaatcttccagaagcgtcctgttttgataaaacttgtctcctgggttgatcagttaacacttttattggatgtgcctggaagtaaggccgtaacttatgagacacctggatgaggcataaagcaagtttttcaagagggggatacctcgactctgcccccagtaaccttttactaacatagtaaagaagttggtggtgctttccatcttctcgcacgatagctgcactaattgcgtcttctgatattgccagatagagtgagtaatgttttttcagttactagttttgccaaaactggagatgtttctaaatgccttttaatcttctgaaaggcctcctaagactcttctgtccactcaaatttcttgttgcctcgcaatatattgaaaaatgtcaaacccttatcaattgattttgaaatgaatctgttaagggcagccatccttcctgttagggcctggacttccttaggctttgttggtgatggcatatctatcaaagccttgattttctcaggatttgcttcaatg

SEQ ID NO: 91975 - DNA, 822 bp, Cannabis sativa
atttgaaatccaaattgtctttaaactaaaacaattaattcaaaaaattgaagagcttcatcttcatctggacgatttaacctgaacatcttcatcattcccaaccaaattttgaaacccgaattgattacattccggatctaatagtaattcttcgactagttcggtttcttcaagaacaaggcactgttgaatctgcagcgtttgatcagtgatgattgatgatgatgatccctcttttcgtgggttacaattgtttgatgaaatgcttgaatgaactgctgctgctgctttattagaactggactccagattttggttcaagaagttagcaaatacagctgccaagtcgatatccgaacccgaacccgaactcgagtcgccattagagctttcggagagctcagtggagtctggagaataattattactcttccttccgtgattaatcttattagaggacttagaacgacggtttttccggtaacctccgccgacggggacgtttcttaaggagcctcctttggtccagtaacgtcggcaacctttacagaagtaacgaggctgagagagactgtagttgttgtagtagcagaatttggtgttggaagaagcacatcgagggcaattgggagcgatttcgatactgggtttccatcttttgtcgatttcatcggttagtgtggtggggaattgaagaaacatctggttattttgatccatatcggcaatggtgaacatcatgttgatagtgattagtataattactgtttgtttatgtgtgtgtgagagagagatagttgagaagagatttgtatttgt

SEQ ID NO: 91976 - DNA, 805 bp, Cannabis sativa
  modified_base (457)..(472): a, c, t, g, unknown or other
caacaagtccccatctttggtcaccaattgttgaagacgttaggtgatgaacctcacccttcctctctcggtattggtatttttttttcagatctatatttttttgtttaatttagagaaaaaacttgtgacggtaataatggtgattaaaattttttttatgtttaatgaaaatatggtggctatggtggtattgtggggataatagtagtggtgataatggtattgtggtggtgatgagggtggtggtaatggtgggacagtggtgataataatggttaaggttgaaaattgttgtggtaggatggtggtggtggtaatgggagaaggaagaagaagaagttggattgctggtttgagaagaaagagaagaggaaagaagaaagaagaaagcagaagaaaaagaaaaaagaagtaaaaaaatatttttaatattattttttttaattttttaaannnnnnnnnnnnnnnnttaaaattaatattacgtgggccattaaaatttaccacatgtacaagtgtgtacacatgggctgtccactgtggcacttaattgtaattttttagacggaagggtacagagcaaaacgaaatgagagtagtgttaaaaaatttaaagttgaggtggtttagctgtaaatattctttattttattggttataattaatataataatataaacctaaatcaatagatacgtattatttaagaaatctaaaaggttgatcacttcatcattttctctctagaaaacattttgctcatgtgttgaggtaaaaataagatcataattatattgtgtat

SEQ ID NO: 91977 - DNA, 707 bp, Cannabis sativa
caataatccttggttggataaaggtagaataatagttgcttggcagcctagtgtttatactgtggatattagatattgctctagccaattaatacattgctatgtacaatcaaagcagcaagtggggaaattttttgtgtctctagtatatgcttttaatgatgaaaggaagagagaggatttatggggtgatctataggaattggcacacaaaatagatgaaccatggataataatgggagatttcaatgagatcttaaatgcaaatgagagggttggaaagagagctcaaagactaccatctcaaagatttcgagacagtatggagaattgtaagctggctgacttgaagttttcaggttctttcttcacatggaacaataaacaaaagccagaagagcggattttttctaagattgatagagcaatggtcaacaatcagtgggtgaatagttttccttgttcagaagctgtgtttctgcctgaattgacttttgatcatagtcctatcttggtatctatttacaaagacaataactatgggaaaaagccttttaggtattataatatgtggaaaatggctccagattatgaacagttagtgacacagtcctggaaagaagaagttgctggttcgaggatgtttagaatagtgcaaaagctgagacgattaaaggaggtgttgaagcagattaataaggcagggt

SEQ ID NO: 91978 - DNA, 561 bp, Cannabis sativa
ataaatattggatcgattgaatgactgaaattaattagatcggatggtaaaatctaatattcaatatataattagatcgaataggcttaaaaatattggaggaacacccttaaatggttatcttattcaaaaaaataaatgtatattaataagactgttccaattaattggcacaagccgtcttagctcagccggtagagcgcgtggcttttaaccacgtggtcgtgggttcgattcccacagacggcgtacaatatttagaatttcttttccaaacgtaagtgataaagacgatgcatacttctttttgcacgaaaccaatataaccaaacggataagaatgggatctaattaatgatcaataatcaatcaagcctaatgtgaaacacaaagctacatactataactgttaatctcttattttgacagtctaattgtacctttcattttttttaaatggtgtaattaaagataacaccaaataatagagtgtttaggtaataggtgggactcacctcacatggtgtatgaccccacaatcatcatgattaagagattaaa

SEQ ID NO: 91979 - DNA, 557 bp, Cannabis sativa
aaattataggaaaaattacatgaacggctattttttaaaatttttttacatttttatatttaatgatttttttatatatatttttacggtatttcattaaaaaaaaataagaatatcaaattaaattaatagaaaaataacaacaaaatataatatacaaataacaaaaaggaataaatgtacaacataaaaatacattaaaaatcctattttacaaaaataaaattttaaaaacagtaaaattaattaaaattctgacgaccgtatttttctaattttattttattgtttgtatatgtgtgtggtttttttctttttttttttttcttaaataatccgaaaatcatatatgtatgaaagtttcatttcatcaaatgtaaggtcaaggttgggctaggaccatgcctagtggcaccttagccgaagagttttattttttaaaattatcatttaaaataaaaaaaaatacgagttttatacaatgtaagtaaaaatatggtttttctgtaaccaattaatttatgcagtttcacttatttttttaggaaaattacatc

SEQ ID NO: 91980 - DNA, 714 bp, Cannabis sativa
ggtataagagtaaaatcctacagtatcaaagtataaacataaaggagttaaaccttttttatttgaatatttaatttttacaaataaaactatatttagaaatataattagtatgtgatgttttaatcaagagaaacaatgggaaggaaacagaacctaaatcaaagcatgcaacccattaaatttagggaaaaacaagtcacatggctcttcattcacaaatgaagagcaatactatgtaatatttactactccctagccctaatctaaaaggtccataaccaatgatcatgtcatctttaatcaataggaaggaaatagagcacaaatccaagcaagcaacccataaaaatttgacttttacatactcaggagattgctttaaattaaattatatacattaaaaagtagggtacttaattatgtgttttgtaaaaattatcaattgaattctctgttttgttaaacgataaaatagacatgtattttttaaaattgtacaaataggactcttatactgactttttgtcaaaatataacttaataataataatccgatatagagatattatgacaaaattagttacattttctgtatttgttcgtgtatagaaattgccttaaagctagttatattaaaaaataaattgttaaaaattgtgttcagtgtcctatttttaccattctagaaaatataaagtctattttatcatt

SEQ ID NO: 91981 - DNA, 715 bp, Cannabis sativa
tattatcaccaaaaattatggatcatatgtgcatatagtatcagagctaatggtaaatgttatgggggcaacaaaatttcttttattaaaaaatgacacatatatttttatagaaaaaaaaatataaatattctggggacataaataaatatattagaattaaaattattttttttatagaataaatatgaaaatatgtaaaattaaaaaaattgtaattttagaaagaaaaaaatgaaaatatatgatggcaaaaataaaaaaaaaaaaaattgtggaggaaaatatgaatatataaaaaaattatacaaaaaattaatttattaaaagttgagtgaggttatgtgcccctcatccggccatgtgagcatgagaaggagacatattcatgttgcacttttttttctcttagtttaggtttcatcccactgagtttttctaacaagatttgtaacgagacaacttaaaaataatgatggatatgaaatatatgcatatatactgcactctttttttttttttcttaactcaagttttgtctcagtaagtgttcctagcaaggattttaacgaggcaacttgtaaaataattatagatatatgtatgaagagaatgtatgtacatattgtattatttttttccttttgtcctactacaaggattttcctgacaaagtttctaatgatgtaattttaaattatgttgagatacttgt

SEQ ID NO: 91982 - DNA, 1121 bp, Cannabis sativa
aaaaaaaaaaaaaaaactgcaaaaataagttataaatcagttgttaacaaggctaaaggaaaacgcccaggggcggagctaaaattaaatagtagggggccaatattaggtggcatatacaacaattttaaatttcggtgattaaaattcacttttaagagtgcgtatcaattgaagaaaatattaatagtttttaattttataaatattttagaaaatataaatcaaataattaagctaaaaataaaatgtgagtggtctcaatttaatattatcaaaattaatatttacttgtaatgttttattgaaaaaaagaatagtgtaaaataaaatattaatttaatatttaagagtggtgtaattcaacaagtatagtaatttaatatttacttgtaagtttttagagaaaacaaatagtgtaatacaaatattaatttaatatgaataagtatagtaaaattataatacaattatcatatcattattttattataattgtgagacctacctttaatatatatatagtatattgtatatgtgttgaatatgtaaataccaactctttatcatttttttttcatatgttgtatcaactcttattcattgtatatgtttgtatatgtgttgtatatattattatatattataaatattataatttattataattattatatatatatatatatctaataggtacataatccttgtaagggtacatgtggttttgcctttgaaaacgcctaattattgacgatgataactccgatttcgcttcttccgtggctaaaggtggtcgtcatctagtgaagaagaagtcaaaggtgattttgcctaaagaaaattcaactttgaaggccagaagagaaagaagaagtcaacttcaaaacaactgtgatgaaactgtgatacaaaagttatatttgttgcaagccaactaacataaaactacaaaacaactaataattccacatatttaatacaaacaaatattacaacaatcatgttttatctgttcatgtcgcatatttgacaattctgagccctatttttataatactatgatattatagtagcaaaaccattattcaactaacatgcaacttaattacaactaaaaa

SEQ ID NO: 91983 - DNA, 817 bp, Cannabis sativa
ataatttctgattttgaaaaatataatattaattataattataagttaattttagtaaatattattttaaatttatttgtcaataatattcgagtgaaatatttatatttatatttatgttatattaaatgtcactataaaataaaaaaaatattattcttctttctttttatattaatatattgcaatttaaatttacattataaatatctcttttatttttatcattaaaatgttactattcaaatttaaactcacatatctccttttatcttttatcttacattaaatgtaattatatatttttttaatagtgcaattcaaatttaaactcatttcccatatctaaaatttttttttacaattattattattttacccaatccacatatcaagaaaaatatatttttattattttttttttaaacaataaaatataaaaagtagtgtttatatttcttaaagaatcaatgacgttactaataaaatatttttttttattaatattttataaaataaaataaaaaaaaagtatgatatttctaaaaaaataaaagtgttataaagtcaaaaggactaaaattataaataattaacaataagttttgaatattattatattttcttttataaataaatagtacttaaattaaatatttttttttagttaaaatgatgttatttaatgaataaaattaaaagaaatattaattatataattaaaaatatatataatttaaataaaaattaaaaatataactaagtatacatatcaaacgtgatattaacttaatttatcaatttatatataaatcaa

SEQ ID NO: 91984 - DNA, 517 bp, Cannabis sativa
aaaataactctaatttctagagttatcactaaggataaccctatcgataaataggatgctaacaccctaaacaacacaaaaacgggaaaaactatggttttgaaaaatggcccaaccggcagaccggttctcaaccggaagtccggttcttgggtaccaaccggtcgaccggttctataggtcccccagaaccggtcgatcggttttgtgctgggaacacaaaaatttctccccacaactcaattcgaccccaaactcaaccataatctccagaatacctaaaaccactataataaaccaatcccaagcaaaagaactcatcaatttactcaaaatccaaagaccccattagagatcaaggtttgagttcttaaactcaaatcttgccaaaacctcaatacaatccacaaaattactcaagatcaacctaaacaaccttaaacaagttttagaactttaatttaaacatcaattatccccacaacatcaaaattcctaaaaccatgcatcaaaacct

SEQ ID NO: 91985 - DNA, 719 bp, Cannabis sativa
  modified_base (640)..(645): a, c, t, g, unknown or other
cacccaaaaacagaccaaaaatagatgcactgttgtttgtccaatatacctaatcttcagtagtcccaggacctgtattcctcaacaaatatatgaatgagcaaaaagctttcccctttaggaaaaaacgcaaagtaaatatgaaaccgcaaatgcataacattgatagctatagtaaagagactatcatatactaaatttaacaaccttaacctaacaatatcacaacaagcaatataaatgtccacatacaataacagttggtatatatgctctattttcatcatcaatggataatttctcattttattgttatagtttaaaacaatttcctatttatgatttctcattttagtgttattctgtatcagttaagaaacttaaattgtggtgaataaacaggaaaataaaataaggaattaagaaattagatttttattaaaagctctgaaatgaagtccctgatattgcagcacatcttaacacatggttgttttattttttattaattaaattaaagctcagtggataatttgacattcccaaaagaccaacaaaacgatctcttggtttttctccattgcatacaaacaaaatactgtatgattcagaaaccctcacttaatataacctagtttannnnnnctaattttggattaaaaactctcaatctaaatttctaacattcagaaaccccctaattttggattaaaaactct

SEQ ID NO: 91986 - DNA, 2036 bp, Cannabis sativa
tctgattagttgaggttcatcatcttttcacatacacaaaaatacattacttatgtcaaaatttgtatcaaaataatgttcgacagaaaaatgagctccccctcgcccctagttgttgggtgagtttatatgtggaattcaatacaaggggtgattttcccttgcgtaactccctgttaaaatggcgtcgagcaaaccctaagtctcacgcttttgaagattgatatgaagacaatactctaaggcaaaattagttttggtattagagggtgagatctgttccaaataactcatggctgatttttgaggaattcacgtattggtattggggtttgtaagaatttcatacttcattttccaaagatgtatagtggaagcacgttactcttgaaacttattctttaattggttactcatgaatgatgcaataagagtaatggtttttttttttcaatttttttattattatttttaacttgctatgaattttttattgaatatcgttaattgcaatcagggacaacaacaaattataataataaaccatttgtgactaacttaatctaattaaagagaataaattttaagaattgtttgatgaatgcaaagatgagatgttaatattggaacgttgtaagtgtggatcagcatcaccatgagtagaaggtgtaggaggttgttgttttagatcttgattgatgttttttaggtgctaattagtaattactatgaagtttataatcttttagttaattttaagtgaggtggaaccctttgtttccaccacaaaccttactaatttgatctgaacttaatttgtgtttgcttagttagattttaaatatatatgttcttttgtcaaaaatttgtttcagatggaatttttaagtgtgacatatataatttcatgcataaatggaggctagctatgatttaatttataattggtacgatatttgtgtcctaatgtgagtcctaattaaccatttaatccgagtttcaaaacagaagtgtaaagctactcgaattatctaacttaacagaaaaaactaattactgactggtaaaacagttgaggtttttgcaaagagtgttttagtttcacgagtagattattgtacttaaaattagttgcttcaactcttaatcttcaattctcctcgtggattaatttttgatatagaaatgatttttttgtattgtgatgtaattactttgaggaggtgttttaactttacaaatggaagaggtttacataaaggagcaaataatcaactggatcatcatatggtaattagtttgggaattcttctctcaagggttcgaaacctactacattaaaaaaggcttggccctttaaaagttaactactgtaaggagtgtcatttgtgtgataaaaactctaaaagtgattagcgatgactcaattaagagaagctaaagtataaaatctctatagctgatacgtagttctcaggattgacaaaataattagaggggtggagaagcgatctgcaccacgtgattctctttttaattaaagaaaaaaaattagtttgaggatccaaatactttaattaatttgcattatttttgtcccatcttttcaatcaattttatatatcatttgggaggttctttgctcattttacttgttatatacttttatgcttatatatgtttgcattatttttgtcccatcttttcaatcaattttatatatcatttggcaggttctttgatcattttaatttgttatatacttttatgcttatctcatatttgggtgaaagtcccaaattttagcttcatttatattctgccatatataataagtagcaatcaaagaaaatgtgctctattgtttcctcatcttttccacatactaactagtcagtcatgaactctgcctgttaaccaaatttttaaacttttcattcacttgcacaatatacacttccaattaggtcctccttgaaatttaataagacataacaaaaaaaaattgagtacttatttagaaaattctagtattt

SEQ ID NO: 91987 - DNA, 7514 bp, Cannabis sativa
ttttatgtctaaatatgctcaccttcattgtttttattttctcagttctattattttatttttggtgatcaacatttgttattactttactcatcataacgtattacaagttcatgcatgtaacatgtacaaagtacctcaaataattttttagttattataaccacccataggaaaagcatcttattgtaaaatcttagttgacaacaattcaattaagcttctataaaaaaaaaaattgacaacaaataaaaaaaccttattttagatatatattttttttaaaaaaaaagttcagttttaggcggtttgaaccgaccaaaccgcagtttacatcaatcggttctaaggaagttttggattggtcagtcagttttcggattgcaccaatccggaccgaaaaccaaaatttggatttttatatggaaaaaaaccgaccaaaccgaccgatgctcaaccctaacttgccctcgagtaaaggccaagttaaactgacaaaaacaaacacaacaacgaacaagttaagccaccattaccatttacacttactttgccattactcgtgaaattccaattgtaatattaaccaaatttcagcctaaccacttcaaaatttaaccttattgctcaattaaggaaattaacaatataattcacaaatgaccacaataattagactccactgcatatgctcaactcaaactaaacagatccacagaccaatttttaatatacttgcatcactgaacttcttcactaatgtcaataacgcaagatttgaaatcgaaaggactttcacgggttataacactaggcttatgtaagggtagatgaaaatatcatttaggctcagccataccataagatttacattccaatcaagccacctcacaaagcactcaaataccaccccaatcctctttctttgcaacaaatgagagattcatttactaaattttgcaacaacacgatttctatttttctttttttatattgaagtcgtgaagttgcaactcataaactttttatattctctcattttttttatttcccacatatcacatctaaattaccccattacaatttttctccatacttattctaagcttatggtatagttagggataagtaaaaataataactgagttatttctagctcaacaaatacatgtacaaataaaaataacagtttatagctcaaaaagggcatataaggaataaacatacaaaggtgggcttgaaaggcacaaacgttctaaacaaatcagctaaattgtttttcaaagcatatgtcatcaagaatttcgcctcaaaagccaaataatgcaagttctttccaattctaatgaacaaaccacatccctagtcaagcatataaaatagaattcaaatattacatttgcaaaacatattatcaattttccacaaaagttgcaatcaaactctaaaatggttaagccaagcacacagttattaacaaaattattttataagtaaagataaagagacaagagtaatagcttaacaatttacactaaacaaaaacaagacaacaaaaattaaataaaataaacaacaaataaaagtaatactttataagccctccccgaactaaagatacgcatcatctctaacgtgataatgaattacaaaggaagatgacttacctcaagccacatcagtatggcggtggatggtgtggtggtaagacctttcaatatgttgaaccctcaaagtagtgtctctgctctaccttttttctcattttttatttatttatttatttatttttttaacatattgcacgattcaagaattacaactaaacaacaataatattatagaaaaaaatgagtaaaataaaaaaataaataaaaaggaattcaacaaacaaatagaaactcatactgaaaataacattgagttgcctcccaaaagcgcttactttaacgtctttagctagacactcactccttttcaccactcaactcggatcaagtccaccctgtgcatccttgagagccataatatcataagtagaagttcgtcttgtaccattgagaatattgcaacatcccgaatgtcatcaaaaccctcaaacttttcataaaacaatgacttcacacgacgctacacaaaataaagtcattcattggtcttcttttttttttctctctcttttaatcacagaccaacatccaccacatcaactctaaaataagtcacaatatcagttgctgcaaaaatattaaatgttacctcttcgtattgcactcccagcttcaattctcccttttgtacatcaatcactactctccatatggctaagaatgacctccttaatataattaggatatttacatcttcctccatgtcaaaataataaattcagtaggaaagataaatttaccaacctttaccaggacatcctcaatcactcccctaggatacttaaccgagcgattcgccatttgcaaggagatggttgtagggcgagcttttcccaattttaacttttgaaaaactgatagaggcattaaattcgcattagcccccaaatcacacaagacttttatttcaactgagcctcctatagatcatggaatattaaaactacctggatctttgagctttagaggtagtttcttttgcaagatagcattatactcctcagtaagtgctaccgtcccatagtccttcaatctccttttctttaataagatttccttcataaacttcacataacttggtatttgttcaagtgcctcgacaaaaggtatgttaatgtgaagctttcaaaaaaaaaatattaagaaactttgaaaactgcttgtcaagtgtcttcttttaaagtcgttgaggataggaaatcttgatgtggtgctcataactgatatgcggctgctttttctcaaggttctcagtaaccttttcttcaactaaaccatcatccttaacctcaacctttagtgaatgaatagacttcttgattgactcttctaactctttaccactccttagagtgattactttgcactgatctttaggattcacctctttgttacttggaaaatttccttgaggtttattttaaagaagattggtcaactgtccgacttgtgtctcaagatttcgaatcgatgctctgatctcagtcatgaactaagtttgcatattggtgagagttaacaaagaagcttttaaatcaattgttggagcaggtggagcttgtaaattttactgctgagaagtagaagcttagttttgattctaaaattgaggttgttacccttgattatttctccatccattattaaacaaattgaataaatgattgttgaactacctctgaaaattggctatggcttgaacttgagcaggaaacatcaaaatgttatcaattgatgacctccacaaattttacacccagattgagcttggatagcattaacaactacagttgtctgctgtaactttttagtgatagttgcaacctgagcagtcaacgcagtaatcgcatctaattcatacattccaactgttttcttcttcctagatgctctctcataagaccactgatgattattcatagccatatcttctagaagttcataggctccagttgcactcttactcatgaatgtttctccagcagcaacatcaataatagttctagttgtgggacacaaaccattatagaagctttgaactaacatccacttctaaatgtcggtgtggacatttcctcaccagttccttaaatcgctcccaagcttcatataccgattctccaccattctggcaaaaattattaatttttctccttagtttaacaactttagatggaggaaaatttagacaagaatttctgagccaaatcttgctaggtaacaatagaatttgcttgcaaagaactaaaccaactttttcttctgtccctcaaagaaaattagaaaggcctcagtttaattgcatcatcactcaccccattgtatttaaaaatatcataaagctccaaaaaattagatagacgagcacgagcatcttcagtagacgatccactaaactgaatagaagattgcacaatttgtaaaatagctagattgatttcaaaattattggcttcaacccttggtggtcttatacagttttgtaccttcgtcagagtgggcagtacatagtctctcaagctcctttcaacattattctgagcctgacccctttgtataactgtaggaatgagatcattcctgtgatccccatcattttgtgccatcaccacagacttctagattttcctcttattctttctattttgcttacaagacttctcaatctacggactcaaatgaacaagattgttggctcctcttttgttacgcatataaaaacttcacctcagataggcaagaagagcaactaaacaagttagaaataagagaaaaataaattaaattagaataaagattaattagactaatattgataattttttagtcctcaacaacgacgccaaaaacttgttgcaaaattttttctatgcaagtgcacacagtcataatttataataaaattagtgaaaccaagtatcgtcctcaaggacagagttaccaattaccagtcaattatttttttatttatttctatttgatcaaataatattcaaaattttcaaataaataaattaaaagcaattgaaatgaaaatattaataaaataacaatgagaaagacattaggacaattatgatcatctactatccactcttttactttataatgaaagaactcaaattctcttcttcttattcaatacaagtttcaaaatagttcataatctggttaagatttacaaactcaatctaaatgataactccttatatttctatggcaagttaaatcattaagaaggcattaaacatccaaacaaccaaagcatatcaaatttcacttttcaaattttaatttgattcatgaataacaattataaatggacagtaaataattacaaagttaaaacatattgtaatgaattgaataagatatgaagaagaaaataactactgcattaatccataaaagaggtttaacagaatgacataacatctctaaaagagatttagccaataacaagcatcttaaacatctgaagattaaattaaaaacataaaagatgaagaggatgagaaagaacactaattggagtcctccaatgtcctcccctacccccaatgtccaaaaaaaaaaaaaaatcatgaaaatctagcctccactcatttttaggtcgaatcaggagagttgccaaaaatagccaagagtcgcgacctttgatagagagtcgtgactcttgaattttttaaaaagacaaggcttttttttaatttttctaaagctcaggacttccaagggaaggtcgcagcttttgctcaattttaaaaaattgttgtaattctgaaatcctactgcgatgattgatagtgttttgatcataaatctctcgatatagttcggaattggacgattcaaaatattttaaaaagctaaaagagagatctagaacttttctttcagaatgtttttcctggaaaacgaatcctagtcaaaaattagcctgaagcttcagattttattttcgatcacaaacgaagcgtgttgagcatcaaaaacttgtatttttcactcattgtatcttacaattccaaacttcatgctaaatccataacattcatcttatttagaatgttttctcttatttcaacctatattatgtatcttatcattaaaacttgaaacaagaataaaataagcgtaaacctgaataataaaacataacatactaaaaatacatactaaaatagaatctaaaaatgtataaaatttaaacctaacaacatgtcagccactatagtttctagcctttggttcttccaacggaggtcatttatctcctcttcatagttgtgagtttagaagtttgagctcaccgagtacactcgcttctcctttctaggtccacatcttgaagtgtcaaggtcttatggtacaaatggtggagggtgtcgcactggagatggccttcttagtggttgaatgcttccattgaccgggttagccatcaatgttgtcatcaagtcatgttgtgttgggggctctttttgagcattgggattgtggttcacactttggttattctccctttagtcttctctgatgacgagaggtagatgttctcttatgatagtggccagctggttgtcatctaagtaaaatccattttcttggagatgttgtgaacgtctacgcatggtggctagttaatactcaaggaaatacatagctatgggtttgccttcccgcatacgacaccaaacttttgatggtaaaaactcgtcaacaagataattataaacaagcaaatgctaagaacttgagcaaatatgttttagaaagttaaagaactcaaatgacaaatatgacactcttctattgattctccaagctctcttacaaacaattttccaacccattcttcaatggaagagaagggtatttatagggagctctaatggctccaaaatacaagtggtcccaaaagttgggggacaaaatttcttttgtaccatgaagatcagcgcgttagaggggtagtggagaagtggtggtttggtgttagttcgtaccccgagtgggacaaaagggggtatttctactacttgtaccttcatacatatcgtacgtttgttcccttctcagagttcccacatcattaaaatctagttaagtgttgacaccatgagacatgagccttgttgtttagacttagtaagaattttctccgcaatccctttggtggtccctccattgtaacatatactctaagtggtattggtcttttgtgtagagcaagtggtattggatggtaactaggggagtgagtgggaggataatggtaaaaatagagatggagagaggtaaaaaggagagataaagatatagagagatatggagaggggagtgtgagggagcgaggagctccctttgggtgtgtaagtaaggagggagcggggagaagagagcaaagaaaaagaagagaggagtggggagaaggagaagataggagagacgagcagggagaaggagaagataggagagagcggggagaaagagaggagagtgaggagagaagggagagcattgagaaggaggagaagagaggagcagggaaaaggaggtgtatgctgtgaagagctcctcatgcgaggagctccacccacgggtaccttcttcggggcgtgccttttttttattatctttatgcgcttttattaagtgcattttgagatttttcctccttattattatgtaatttctagaaaatatacttcgtaaatttttgggatcaacaattataatcttaagattcgtttggtatgccgtattacaccgtattgtattgtatagtattatattgaattgtactttatgtaatatttttatgtaaaactatatgcggta

SEQ ID NO: 91988 - DNA, 999 bp, Cannabis sativa
gttgttgttattcactactcagagtgaaaaaaatatcgactgtaggagctgtgctgggccatgacattaatttatgtctaaaaacttattacattgaatgtattaggctacaaattgtgtcaatatacatcaaatccttgtatgaaaggaacaccattatgtaaatattattatatcaaaatattgaaaaaaaaaagttattattttgccaagacgtttgatatctaaggttcataatcaccaatatttgttgttaattaattaagaatgtaaaaagtgtcacttttagagaaatgcaatacaaacactttatttcatttgatagaaatagatgattttgaaaaatatttttattttctttttaattttgaaaacaaaaaacaaatttaaaaaatattactaaaggccacttaatattatgtttttccttccttcaaaaaaaaaaaaaaattatgtttttcctgagtcaaaccatttttcattctttttccaacagaaaaaacaaatttttattccaacaagtacattacacacatttaaatttcttattatatgcatgtaataagaaggacaattttatttgttttaaaaaagagcaaatttattaatgaagaggaaaaacttcaaatatacttaattaaaaggttatgcactatatatttagtaatattctcaataatatgtatactagtaggaacttcacctgcattgcacgtgaatgacatatgaaattaagaggaatgaatatgaatgtacataaatgcactccaataaatatgtaatcaaacccatatacaagaattttactattagtctttcacaaatgagttaacaaaatttatattccactgataaatccaatatatacataattaatatgttgtaatttcagcggaaataaccttgaggattcaatcataaaatctgcaataatctcaacactttgacagtaaaatgaacataaactaattaatttccacaatgaatcaaatctgaaat

SEQ ID NO: 91989 - DNA, 937 bp, Cannabis sativa
  modified_base (47)..(65): a, c, t, g, unknown or other
  modified_base (161)..(170): a, c, t, g, unknown or other
ctaatttagttttagtcacaagtattgtgactaaaaacacatttagnnnnnnnnnnnnnnnnnnnttgtgactaatacatttagccacgaacattttcacaacataagaatgatgttttataattaatcacaattgttttacttttagtcacaaattttgnnnnnnnnnnaagtaagattttttgtagtgatagacaactatagctactatatatcttttacaagattatagctatagttcatttgtatctatgctaatcacaatatatataaatttatcacaaagattatgttacaaaattataaaactaattaataattttttctcttgaattttaacgtgtaccaaattatgtttctgaactttttaagtcattaaaatcttttccaaactattaaaattgttacactgaaggaccttcatctaattttacaaatagaaatttgatgtggatgaaagttcacagagcatagtttgatatatgtcaaagttcgagaggcacgaaatggtagatatcaaaagtttggaaaacatgatttggtagatggtcaatcgtcatttaataaaattgaatggaatttgaaagaattccttgaatccaacaagctcaataatactttgtatatactttttgtatgaatttatttagatgatgtatatatatatatatatatttttttttttttgtaaggctttagatgaagtatattattttttatttttatatataaatcttatgatatactatatcatataaggttttattaaataaataaagtataaaatgtaattttatataaatgaagcctagtatgattatatgcctgttatattgtacttcacatgagtaagcagattataggcttgtttcattgtagtgcttttgtagtataattaattataatttacgttaaaattctaaattatcatcattat

SEQ ID NO: 91990 - DNA, 1232 bp, Cannabis sativa
  modified_base (693)..(697): a, c, t, g, unknown or other
ctacagatcagctatctggtgcaggaattgcccttgtcacgcctggggggcaacacctgcacgctggagtcaaatttggattcaaagcatctaataatgaagacgagtttgaggctctaatcgctggcctaaaactagaccgggagatgagagccgaacacattgaaatctgtagtgattcacagctggtggtaaatcatgtatccaaagaatatgaggctcggggagaaaagatgatagcatatctgagaaaaatacatgaattgctcgcacaattcaaaagctacggtctcagacaaattctaagggaagaaaacacaactgcagatgcgttgactcgattgacaagtagtaatgtaagtgataaggcaaacttggttcctatcaagtttcgcgaagagcatagcatcactggcacgaaagagatcgaaatggttaatacttccccaaactggatgacactgatagccgcctaccttaacactggggaactcctagataatagaaatgaagctcgaaagattagaaggaaggttgcacgatatatcatagtagagggaattatgtacagaagaggattctctatgtcgttgctcagatgtgttactcaagaagaagctgcacgactcctatctgaggtgcatgacggattctgcggaaataatgcggccgggcagagtttatctaagaaannnnnaaggcaaggttatttctggccaataatgattgaagattcaaaggcctatgttaagaaatgtgacaaatgccagagatttttaaagatacctcaagctctgcccaacgagttaactcagatgcaaagtccgtggccctggggaggagtgcgatatgcagtggtagcggttgattatttcactaagtggaccaaagccgaaccactcgcaaccattacatcaaaaaaagttcaagagtttattgtgaacaacataatctgtcggttcagactgccatacaaaatagttttggataatggcaaacaatttgacagccaatccttcactaatttttgtgcaaacaatggcatcatcaaaagtttctccgcagtggcacatcctcaagcaaatggtcaagttgaagcagtgaacaagaccttgaatgatacactaaagaaaagactcaaagatgccaaaggaaattggccggaagaacttcctgaagttttatggtcatatcgaacaactgagaaaacgacaaccggacagactccattt

SEQ ID NO: 91991 - DNA, 1059 bp, Cannabis sativa
  modified_base (1028)..(1030): a, c, t, g, unknown or other
taatggggagatcggcaccgttgccggagccaaaagcaccagaagtgggaggatcggatcgaggaggaggggctgcgatcgtgtccgacgaaggaggagcagttggaggtaggggtggcggagcttcgacgtcggtgatgatggtttcggcggtggaaagttcgtggccggagacggtggtaggttcggagagagaggcggcggccatggagtttctagtccttagagccatgaagaagaagaaggaaggaagggaggtgaagaaaatggaggctagggttttttgtttacatctgataccataacataataaagaaactctttattaatactgatattgctttacacggctatatgccaaaaagaataaaatgatgaaaacaacttaagtatatatagggaaaataaggcagctgccctagaggaatgggccgagtatgaggcccagtgggccaataactttaatactccgttaaatgctgtgtttggtagactgaaaaagtgaaagaaaataaaaattaagagagaaaagtggagagaaagagattatcatcaagaagactgttttaattgcacccctaaaacttattaacagaaaataaacttaaatttattttaaatatcactcttaatatttgttttaagaaaaaattcatattattttgggtaagttttaataattattttaaatttttttcatattcattttaaaatcatttatatatatttttttatttttaaaataaaatttcatatattattttattttgtttattttgtcttaatatttaaatatttgttatttttattctatatgtgtatatcttaagattataattataaattaaagttatatatttataatattaaagataagaaaatcactttatatactattttttttatttttttattttaaatttaaggtttgagtttttccggtagtttttactatacatgtgatttaggtttctctattagttgctatagggatttttacgtggaattctataaaaatgcaaaaaaannnaaaaaaaaaaaaaaaaaatggattttaag

SEQ ID NO: 91992 - DNA, 874 bp, Cannabis sativa
agaacggggaacatttctagaagataaaatgcctttgacaggtatcttggaggtggagttgtttgatgtttgaggaatagatttcatgggtcattttccatcttcattcagcaatttgtatattttattggctatggattatgtatcgaattgggttgaaactgctgcaactccagctaatgatggaaagaaagttctgtctttccttcaaaagtacacattcactcattttggaactccctgagcaatcattagcgataaagggagtcacttttgcaataaacagtttgaagctctgctatccagatatggcgttcgccataggactgctctaccctaccatccacagagcaatggccaagctgaaatttccaagcgagagattaagatgatattggagaaaacaatgcagagatcaaggaaagattggtcacgaaagttagatgatgcagtgtgggcgtacagaacagcgtttaaaacatctatcggtatgtcaccgtataggttggtgtacggaaaagcttgtcatctgccggtggaattagagcataaggcctattgggctatgaagaccctaaacatggagttagcagctgcaggagagaaaagattgctgcaattgaatgagctggaagaatttagaaatgaggcctatgaaaatgcaatgatctacaaggaaagaacaaaaaaatgacatgaccgaaacttagtcaggaaggagtttcaacgcgggtagcaagtcctactatttaactctaggttgaaattatttccgggtaagttgaagtcaagatggttgggaccgttcacggtggtcaaagcattcccatatggagctatggaactaaatggtgaaagcccagagacttttaag

SEQ ID NO: 91993 - DNA, 658 bp, Cannabis sativa
acattctaaagaaaaataattaataatatttatagacatttaatattttattgagatatacaaaaatttattatttaaataatagtaatatagtaaataaagaatataaagttgagtgaaaattaaaaaatcttaataattactagcattatagtaaagaaatataatatttattgagggctaaattagcacaatattatatgttgtgtcaaatttgatataacttttagcatgtactaaattcaatatattttttagaataccattagagtaacaaatattttttaagtgtgctaaattataacactacaccacttttttgatattctaatagagatactctaagaccatctccaatagataatttatattttacattaaatttgactcataatatactattaatacacaatgggcaaattaattataaaaattaatattactattaatgcttattaaaaatatataacacaattaatttcatttatattattttaatatcttattgaaagtcaataaatagtaataatgagataataattaaagaaggtagaatttattaggggctaaattcagcccatgctatattttgtgtcaaatttaacacaatgtttttaaaaataatactataatgtatttatagctcactattaaaaat

SEQ ID NO: 91994 - DNA, 636 bp, Cannabis sativa
tttaaatgtttatacccgagtcagaaacggggtgagagcgggagaataaatacttgcaccaatatgatatatgtatatatttacgttttacataattactacaattaaaataatttcatgctttagactttttattgattatagtaatgagacattttaattttcatgaaaatacctacggtgatgcatattaataattacacttaattgcttttaaaaaaatgacacttaaccaattattttttattaccaattttgtattactagcttcatttactatacatactccacttatgtttattgttttaccgagtttatatgattattttttttaaaaaaaaaattctctttgagacatcattttttttaaaaaaaaatatatatataatgggtaattgataggaatccttcccccgtcgagtaattcctgttccgctcccgctttaatttgaacggatattaaagtggatatgagggtaaatttacaaagcaggtatgagagtgggggagcaatcaccgcacccgccctgtatatgagaagtgttaaaccggatcaaatcatggtcatgacttttggtagtgctcgaataagattgccttcttattatacaggcaatttacaataatttttctact

SEQ ID NO: 91995 - DNA, 690 bp, Cannabis sativa
gtcctctgtcgaagaaccaagccagcaaatgtatgatgttcaagctaggggagagacatctctccttagtgagtcgacctcgatcgaaaaaccagctgagtaaattgatagtgtcgcccttcgcgtgcagaaaaaatggtaggacagtcgctgttgtggctgcaaagggtgctcctgaaagccggtcgagaagagaaggacaaaaaactgagtttgccaaaaattgattatgttcaggattcattttcttgccccggtcaaaaacccagcaacaatgaggccccaagaatgaaagagaaacattacacaccaaaaattgatagttgtacttccataaagcaacttcaatgtataattcatctagttggtgttttcgctcccacccctcccaggaataagatgcaaaagagagagaaaattcagcaatcattgttgggaggatagagttttgatcttgcgctaaaagtttaattgaatcatgttgcaattccttaaccctttcaagtattcccgagaacaccaagtaattggttggcacattcccacacaagtattccatagcatctcctttagttaagaattcacaacagaatttctttgtgtgacagaaataaaattcagtgaacccaatcaaaggttgagagcttacctcatttaatatgacataagagagcttttccaatagcatca

SEQ ID NO: 91996 - DNA, 1652 bp, Cannabis sativa
attcagatgaaactgcactctctatagttgaagaaactgtctttcttttatggcccatagtatggagttccattcaatctgcataaacacatacacaaaagaaactccttgtatctacagccatatacattacaattcataaaatatatatatatatttgtatatgaaattatgcatactacagtacaagagaagcaacacaagtttcctctaaaaaaaaaaagaagagagtatataaaagaagcaaaggccaagagcatgagcaatacggggcaaacaaacatcatgacaggccacccaaatcatcataaggtattattcaatctccatatacatatttgtctactcataacattgtagcatttttttttttttgctaaataatcctacatcatcaatccactttaaacgataagtacgaagtagctaaaagctttcaaaagaattgtgcgatacacacaatacagtgccacaaccaaaattaaaaccaattgtttaaaaaaaaaaagaacattgtcatacatatgtatcaagaaagaaattaaaaaaactcaaaccatatatatgtagttaagccaagaatagctatctaccaatgtaaattatataatctaaattacattggtaagtaaatgtattataacgtgggtatattaatgcgaacttgggaattaaaattcaatatatatgtatgtatattgcaatcttaaaaaaaaatatggacaaatttgcctcgttcctaggtgacattgtatttatatgtatttaaaaatcttatttcaaaagcaatatttatatgtgtttaaggatgcaaccttcttttgaaaaaaaaaacaaaaaaaaaaaaaaagaaataataaacaaagtagcaccaattttaaatcttgatacaaaataataaaaaagcaagcacctcatactagcagaggaaagaagatttaaatttctgccttatgtctcttatttacatgcaataataaaataaatagaagcatgatattaaaaaaaataataataaagaattttttttttagataccaaagtgtagtcttctgttaaaaaaaataataatcccttggggattaatgagcaagtgtactttgttggcatttctgctttagtcttatatctcaaataaacaatacaaaaaaaaaaaaataataataataatttttgtggtggaagaaataactatgagactttaaaagtacactgttggtgtaaattaaaaaggacatataaaacatcagcctcttttaaataagcgaaaatccattcattttctaaaatgttgtttatataaatgagatcaaatacacagtacgacaccattattttatagagcaaacaagaaaaaaaataatacatttagaaagaaacgaaaaccattaattgatataactactctttaataagacgaatatatatatgtacggaataaatcaattgaatcagaaaagacatacttgtatcttcaagctctcaaacgtaaaaaaaaaaaaaagggattttttctataataaattaaaaatggaacaagtttacatttatgtcctcaaaaagggaaataaacaaaaatagaaattaaaagttgttaaattacaaaaataccagccaaggaaaatggaagcctccatcttcttcgtgaccca

SEQ ID NO: 91997 - DNA, 506 bp, Cannabis sativa
aatcttctatgctttgaatatatcagaacttgatggtgaggaacctagctcctatgaagaagctatggtgtccatttagaagttagaatggaactcagcatcgcagcaataaatggtatccttgaggaagaatggcacctggatagtagtgaagaaaccagtagggtgtaaggtgataagctgtaaatgggtgtacaggtacaaagaaggtattcttggaattgaggaggcaagattcaaggccagattagtagctagatgtttcacacagagagagggaattgattacaatgaagttttgtctcctgttgtgaaacacacctccatcagattactcttaagcattgttgctactgaggatctagaattggaacaactagatgtaaaaacagcttttcttcatggagatttagaagaggaaatctacatgaggtagccaaaaggattttgaagaaaagggaaacaaagaccatgtttgcctattgaaaagatccatatatggccta

SEQ ID NO: 91998 - DNA, 1729 bp, Cannabis sativa
gtttctttgccagctcgagagaagagcttttcattccaagcattaagcttggatgaaactttctgaatgaggtagtgaaaaatagaatttttaaccctgccaacacagtgaggaacgccaagatatttactaacgaaaccttcaccattaaggagtaaggaagatcggaatgtggattgagagtcaggagaggtatttggggagaagaggatggaagatttatctctgttgacagattggccagaagcttggagatacaaatgcaaaatattatttatagcttctgaagattgagttgaaacagggacgaaaaccatgctatcatcagcaaaaagaagatgggaaaaggagggggctccacgacaaattttaatacctgagaaaagggcagcctcctcatggatgcgaatagctgcagacaaaccttcagccacgattaagaaaagataaggtgataggggatcaccttgacgaatgccacgggaagaagagaacacatttgataagttaccattgagggataattggtaggtgacagtggaaaggcatttagtgatgagagaagtaaacataggaggagccccaatgtgatgaagaaagtgagagatgaaggaccattcaactctatcaaaggccttttccatatccaacttaatcgcaacccaacgtaatttgccagattttctagaatgaatggcatgaatgatttcattggctataactatattgtcagtaatttgcctgccagtgagaaaggcactttgattggggctaataacagagtgaagcaccgatttaagtcgattagccaagactttggaaaggcatttgtacaaagtgttacagaggctaattagacgaaaatcacgagcagttttagggttcttctttttagggataaggaccaagacagtgttattgatttgagtgaaatccccctgattattaaggatatgaagaagaccctgagtgagatcatatccaagagtgtcccaatttttctgataaaagaaagaattcaaaccatcaggaccgggagatttgtctccagagagactgaacatggctgattttatctcgtcagcggtaaactcatcagcaagaaaagcagattgagcgggggagagagagttggtaaccccctgaagaatggaagagatagcagatgaagaagttccttgggaggtaaaaaggttagtatagtaggaatggaattgagtgaaaatggtttgtgtatcatgagtgatggaaccatcagggagggttaatccacgaatgtagttattgcgttttcggttagaagctctttggtggaaaaaccgagtattcttatctccagctcgaagccaagcaacccttgatctttgtttccaatagatttcatcttttaggagaagtcggttaagctctgattggaggtgagatatttgttgagtagaatggggcattgactgattgttatttaacaactgatcgagctcagcttgagttctggtaatttggagcttaagagaaggttgagaagcttgccaggtcttaatggtggagaggcaggtggattgtttgttaagaaaatgttgtaaagggtggggagatgaaggagaatggaggcaccatgagtcactgaccataattggaaaggaagggtcattgagaagaaagttctcaagatggaagcgagattgtttttgattcctggaagaaatgtcttctaattggagtttcaggg

SEQ ID NO: 91999 - DNA, 617 bp, Cannabis sativa
aaaaataaaaaaaaaaaatatgtattttaaaatcataaaataactttttttctttttcttttttcctttgtcttctacctctcgccactccccgacccccaccttagatttcacttcagccgcaccccattcttacccatccctagatttttctatatgtaataaatccaaatatatgttagtgtagaaaaaaatatagtaaagagtcaaaatagtctaaagtaattgaatcaccaataaatatatcatttttccatttagtaccttcaaaaaatctctcccatcaaacctctaacaataacacaaataaactaaacacaaatagttaacatctcaaaccccaaaaaattataatagaaagaaaaactaagaaaaaatcaaaatggaaaattaagctcccattcctaataaatccaaacctagatcttaactcacacatcaaaaacaaaataaaactatacccgaattgaaatctttgtcttcatcttcttcttctccatctagttctcttttcaaaaccttcaatcccattaggagagagacgaaagagtatttgggcttcaatggtctcgatctaatcaccgtcggggaccaatttgtgaagatgctctataaac

SEQ ID NO: 92000 - DNA, 553 bp, Cannabis sativa
tagttaccagtttcaaattaaggagctgggttttagtaagaaggtcaagaacatatttgtttgtgatagatggagaccagaagtagagcgatgaacttgaataccaaggaagaaatagagagaaccaaggtccttaactacaaacttggtgttgagaaaagacaacaaggcaacaatgttggagtccgaaaacccggtaacaatgatgtcgttgacatatataagcaagataatcactacagtgaccgatctgtaaatgaaaagtgatgtatcggcctgtgaagcaagaaattcccattcaacaatagcaaaactcaacttgagaaaccaagcacgtggagattttttcaatccataaagagacttggacagtttacacacatggtgagggtggtcggggtcaacaaaaccttcaggttgggtcatgtacactatttcattaagatcactgtggataaatgcattctaaacatcaagctgtttgataacccaattgaaggacactgccagagaaagaacaaggcgtatggagtttggcttgacaatagggctg

SEQ ID NO: 92001 - DNA, 554 bp, Cannabis sativa
cccatatttatatttaataaaaaagtaaatttttataatttttccatatatcgtgtaattttactatattgtttgacttgtttttaaaatcaaaaaataaaattaataatgatgataaaattatgaaataatataattaaggtatttacaaacagtaaaacaatgatttttataaataaaattaacatatttattaatttttatcattttttactcaataattaataatttgttccctaaatttttgacaatactgtttcttccccttaaaatatacggcttttaagaatttccctgaacttttacatttacaaaaatttagtcattcttttagattatgtcatattattccgtttaaatggtagtgtatcttgattaattagtatttttgcctcatataccttgacaattatcaaatcgtaccctttaaaataaaaatgataaagattcaacgtttttttttttttgtaaatcttaaaaaagttatttagatcttaatcattttaaatgattaagaaaattaaaaaaatattaaaattttaaaactaattaag

SEQ ID NO: 92002 - DNA, 599 bp, Cannabis sativa
ttcaattttttaattcgattagttaacttttaacttaataaatatcgtgtacttaaaatttattaaaaagagagataaatatcttgtttattattattattattatttattttatatcaagttttaactatgtaaatcgaatagtgaaaaaaaaaaacactttataattcaaattggttgacggagatagaaattcatgtattgcattataaatagaagagtaatttgcattgtaaatacttaaaattaaatttctatttacatataaatatttaagtttaatttttgaggataataacaaagttatatttcttgaacttattggtaagtgttaagaaaatgaccacatgtgttaggctattgttaacctaagttttttggtcactttttataattattttttttttgttattatttttaaaatagaattacgcttgttttctttagtttcaggtttcgacacttggaatatataaactagtcaaatttaagaaaacgatgatctataaaatagagaaaattttacaagaaaataaagctgaaatttcaagcctaactttgactatgttatgttcagattttgagaaaagttaaaacat

SEQ ID NO: 92003 - DNA, 836 bp, Cannabis sativa
  modified_base (776)..(800): a, c, t, g, unknown or other
aggtgctcttttggccccaactgccttcagtctggggagatggccaaagcctcctagatgtcgagatcgctccccgagtacttgcgtcttaataggcaagtctcgagggtactgtgtaggatctacaagagtctcaacaggctgatctttagtgggcgccggttgagttgcagctatttcaaccattattaaatggttaattttaatacaaaataaattgaaagaaataaatagaaatgaattaaaatgtaattttacgtaagcttgttgcgcatactcgttgcgccaattgttgcctttatggtgaaacttgtgaaaagtttccactgcagttggaagttctcctgtgtcggggttagcctatttttaagaaaaaaaaaatattattattgttattttaccaaaacaatttaaatgaatgataatgtgaaataataggctttgatccccaggctccctgaagtttcatcttacccttactttctttattttttgctactctcgcctgaaattaataatttttctaacaattaattatttatgattgactatataacatgaaataaatactaaaattagaatacattttattaaataccttttgtttattgtctatgctcctgtaagccatgcaatcactccacacctcttgagttactccgtcaagaggtaacatgtcggccctctcctgtccaagctcctcaatgttttgtatctttttttttcttacaatctgatcactagtcacgtaaaccctttgacatctcgtacttacnnnnnnnnnnnnnnnnnnnnnnnnntcgtgggaggacaaacttggtctgcaaaaagttaca

SEQ ID NO: 92004 - DNA, 1183 bp, Cannabis sativa
  modified_base (54)..(57): a, c, t, g, unknown or other
atgtgggactaaagctcaaagattcaattgttggaggtatttcgatcctatatnnnnatagtgtatatgtttatttattccacatgttttatacacatacatatgtttcagtttatacataataaatgtctaacagtgatatactcataatctcattcgtatccaatatcttggaattaggtatgtctttcatcttattgattttatagagtaatcttaataatttgagatgaatttaagatccatatgtatttctagatttaatttctatcaagtggtatcatgagccttgcttatgttggattattaaaattaatcatattgatggtgattattaaaattagatcaacatttgagtttgtattaatttaaaattttaattcatttgtgtaatttattaatcatgattatttgatcgttgttgaattaataaagtttattatatatatttcagtaattttttatatgtatatataagaattagactaatatagtatggactgatatatgtatgcatatacgggacgaaatcaatactcttatttagtttcgcgaaatgttgttcattttgtagccatagttttattactatgcatatttatttatatgcttttctgacagttttatggtttgagataaatgctatttatatatgataactgctctctttaattttggtatatgttttaattttggtactatattttgttcctgaattagtcaattctctccatggcaaagagatcttaaaaaattcctctacgaaacgacgataatattcagctaaatcaataaagcttctaacctcagaagttgtctttggtctcagccaagctctaataccattctcacagaaaatatgacctaggaaggacacttaggatacctagaacttgcacttcttaaacttagcataaagtttattttctctaattcgttgtaagacaatttggagatgttgttcatgttctacttttgactgagagtatacaaggaggtcattaataaacactatgatacaattatcaaggaaaccattgaacactctattaataagatccataaaggttgccagatgttaagtagttaaaaatgcatatttattagtgtaaaaatacaaaataaaattaattctatataatattttcgtgaaattaatgtaatatatttttatttgaaaata

SEQ ID NO: 92005 - DNA, 1381 bp, Cannabis sativa
aaaaaaaaaacacgactagtgttgctaaatcataaaacttcataaaagataaaaaaaaaagaccaactatatcttcttaacagaatgaatgcattggtatgaaaatatcctagaggaacatcttcatgattctcagccactgtctacacaaatcaacaaacagaattcaaagaaaaacaatccattatagcatacagacaagctctatgcacgttcactcaaaaaaccaaaattgcttcaaaagagaatcatcacaatgcactcgtgacagacaacatataagatacacaaacaaactaaacaaaaaaaaaatgtttcatcaaagccaagaaagttagaaattcaaataacaaaccagcacttcactaatcccacttcagcaatactccaaaaatcctattcctctaccaatacaatccacagttaaagtaattagagagagagagtaaaataataaccaagtcttcaaattattttttcaagaagaaaaagaaggggacaaggaaatactgtttcagtttaaaacatgaaaagaaaagtggaagaaataactgtggcagatacacgtcaaaccgattgagaatatctatttagacagataccaatgttgtcttcaaaaagggtaatgactaatcaccaaactttgtgcataaacaggccatatcaaaaaacatatacataaatcgtatcatgtgcaatgtttgattaaagtttaatggagccacatcccctagatgattggaacaagcagatttatagcaatggtgtgagaaatctcaaaaaagaaaaacagaattgagaaacagcctatttatcaataagaaaaaggggctaaactattatttggtaagagaacataaagtcacaagtaaagtaattgagaaaaagggaaaatctgagaatatagcttgcgaaataacagacttaggcaaagagtacagcgctggttcccttgcaaagtacggtcactaaagcattgaaaagtgcttaaaacccaattttggattacaaaaaacagttgtgttaatatgaggatttcaatgacggcttaaacaaaaaagaggagttttttaagagaaatgatccaaagaatgaaatacagaatcaaatgttccactaaatgacttactaagaaaattagcaagatttttgtgggtgactgttatacaagaattaaagaggtcggactaattggaaagactttaacaactccaaacaaatcaacaaagcaaaaaataaaataaaaataaatcaactgcccaataaacaattaagcaaaataaacaaaaaggtttaaagtaactgagaaaagatgaaaattgattagaattcgaacctctctcatagattagccattagcacagtagtagcaaggagcaaa

SEQ ID NO: 92006 - DNA, 705 bp, Cannabis sativa
tattatattaaattataagacacccgatacttagttagaccaataacaatattgacacataggagggtgttaggcactactggtgccctttagcatttctcattctaataatatcatgttaatatttactatttagagaagaaagttaaggttggaaatgaattgtagtggggaaaggaaaaatgttggaaacacaattggtgctaagttaaggttggctaggcccgtgtttagaatccaccaaaactcggagtaaaaaaaaaaaagagaaaattacacttacgatggaattttaaaagttcttatgttaaatatgacacttttaagtttgaccaatttatatgatattttttatttttaggtctttttatggtatttgatatgttatatataggtaaattaggtttttaaaactcatatttaatgtttttatttatttagttaattttatttgttactgatgtcagaaaagtagctggagtttgctgtcgggaaaagtagccggagtttgctgccggtgccaaaaaaatcaccggaatatctatcggtgccgagaaattcatcggagttgctaaataattatgaatagttaaataattattttgatatattttaatttaatatttttataaaatattattaactattttcaaaatattactttattagtggtgttggacactattaatgcctatagcaatgtga

SEQ ID NO: 92007 - DNA, 3085 bp, Cannabis sativa
tgagattgaaactgattctttggttgttgttcaagcaattcaaagtacggttactattccttcgccttttggtcttcaggtggcggcttgttattctcttctggccgatctaccgttagtcacaattacttttgttaaacgttctgtaaacaaagctggacattagcttgctcgtagctcttgtttgtatccagatcgtctttttaatgaggataatgttcccgctgattttattgtaatggctgattcttcttattaataaagtttttatttttttcaaaaaaaaaaaaaattactttaacactaataatatattttaatctttatcaaaggaaaaaaaaattaatattaaagaggaagtaaccctttataattagttcataatatttcttaaaaataattagattaaattattaaattatatagatctgaatggtagctatagttgctcatctctgacacgtgtcacggaatgttaacatgcagattgaagtggtgtcatctgggtttagtaccgtgtcatgctacgtgtcaagttccaacctctctcgctttgccaccgtttaaccctcacactattaatataaattaaaaagaaaaattaaaggattatattatagtactattacttgaccatccttagctgataaacgaaatcgagatcaacttagaaaaccaagaagaaggaaggaaggaaggatgataaactgggttgccctttcccttgttctaacttcacttgccacggccgctctttggtctccggccccaccaaaaaataaccacaaaagcaatgatcacgaccaagtaattgtcaaagaaggccaccgtgttgtggtcgtagagtacgacgaagaaatgaaaccaaaaacaagggtttcaatctcacctgaagacgacgccactcgctacgacttccccgagcaaaccgtaacgacgtcgtttctcggaaacgcaaatgataagcttaaagaagtttcttcaagctttatcccaaacctaggccaacaaggaggtgaacatcatcctcgaacttcaagagaactcttttgcgacgcttacgggaaatgcaagcacaaaatcgcagtggctattgacaagaccatggggttagcccacgatgacatcgatatgaagattcgagcggcccatacagttgaaaaggctgctgtgaaaggcaaagaggccgtagtaaataaggcccgtaaagtcgaagaggctgccgaagaagcatacgataagactaaagagagcgtacgacatgtggcccatgaagtggaagaacatgcaaaagaatcggcccaagtgacgaaggcagctataaagggcacaaagaatttggcaaaaacgatcggcatcgacgtggcgaagaacgttactgggtttttggggtatgcggggaaacacgtggccaaaaaagctgctttctttagtggccttgcgtctaccaaggctttgagtcctgttccaggaatgatgtatttaattggatacggtatcgcgtacgggactagcgtgtgggtgacgttcgtatctagccacgtgttggctggaagcttgcctatgcaacagttcggcttggttcagagtaagctttacccagtttattttaggactatggcgtcgagtattgggacagcgttggttggtttcgtggttagccatagagggcgggccttaacccgcgacttccacaaaattcaattttataaccttttggcttccttatctctcgttttgattaatatgctctacttcgaacccaaagctactaaggtaactctttataataactttatttgttttcatagtttttgttaaaaagtaaataacatgtatatttaagaaaataaattttaattatttatgggttttgctcttttttttttgttctattgacctcattttaattatttttctttacctatatgtgtttgtgtgtgatatgaagtcatatgtagaaacctataaatataaatatatccacatgtatgtcaattcttaaaacaattttctctcttaactttatgaaaactcgtatacacgtacgagtcttgtcttaacttgataattcataagatctttgtactaaataatcattaatttaatatgcttatgatgatgaagtaatgagtaaaaagtcaatgcatatacatcgatcattgaccatataatgttgcttacaatattaatattgtttgaaggtaatgtttgagaggatgaagttggagaaagatgaaggaagaggaagcagggaagaagagctaataaccaccactgaccattcgccaatgtcatcaactattagccctacactgaggaagaaaaccgctgccaccacggcttcggtggcaatcgaaactccagagcaggaggccgatattcggaatcgacttaaggcattgaatacgacgttaaagaacctaaacatggcttcatcatcggttaacatcctatgcctaatgtcgctctcttggcatgtctattaccttgctcaacgacttgacctgacctgacctgattattcatgaaagtaaaagcgacagtagtagtgattttggtgcattttggctgtgtttcttttctgggtgcatgcttcgggtgttatttctagctagtattaagagtagtaattatgtatgttttggttttgttagaattattaagtgatatacatgcttggaagtttccttttagtattaataatattagtaagtaaatatatttcctcgagtttatataaaaaaaaaatgtatagtgttgtgattcggttggtagtgtatttgtttcctcctgtttctagttttatttagtaaatattattttagatttatgttttcaaaaaattactaattagattttatgttttattgaactttatattttttaaaataattaaaataatatttaaacttgttataataattaagtaagaagaaaagaagaaggagatgaagagtgataggaaaattgaatgataatttcttagttgtttattttaatggggtgaatttttatttatataaatacaagagttaaatattaagaaattaagaaaaagagaatgttcattacaattaatggt

SEQ ID NO: 92008 - DNA, 919 bp, Cannabis sativa
taaatattaacagaacatgagtttcgggagtttggctactaaaatttaggttttggcggttaattgctagcgaagtgaaagtattggagtttttgctgcaatttactcttaatgaatataattttgagtgtaaatgataagtagttactacaatcaactatgaataatggaatttttttttggagaaaaatgaataattccattaaaaaagacaagaagccaaagagatcatgagatcaatacaagcataaaccatcaatagtaagttgggcggaagacccgaccaccaaacttgagaagtttctaataaaagagaaaattttgctagagaatgggcaaaaacattactagctcggttataatgagaaatagaggcatgagaaaaagacctccaaacgtgaaggatatcagtaagaacaataccatactcattgcaatcattcttcttgtttgaaagagagttcactaggcactaacaataagagaatatattgatacgagtatatcccaaccacacacaaaggagaagcccatggagaagggcggaagcctccgccacatgcaagcaaatccgagataggagtgtatgggcgtctggttataattatgtttatttttatgttatggttatgcttttcttactgagtctatcgactcacatatattgtttatgtgtgtaggtaaaggcaaagcaaaggatgagcatcaatgagcttgagctatatgaagattgtacatatcgagacgattagacttggagtgttcaaatctttagaacaattagacactatttttatagtcactaggcgacaactaatgtaactgttgtatttcgaaaaatgatttaactttataaatgagatctcgaaatatattatatatttatgtattcaagtttatttatgaaaattttaattat

SEQ ID NO: 92009 - DNA, 829 bp, Cannabis sativa
  modified_base (342)..(342): a, c, t, g, unknown or other
tataatatcatgtttaatagtaatttatataatttgaatgtttttaaaatgtgatattattagtagttttttttaaaaaagttgtagtatatatatatatatatatatataaatgaaaaaaaaaacttaaagtgtcgtaaaaatgattaaaaaagtctctataggtattaataaaaacatcccaaagtaatttaaatatgccattttttcgtattctttttgttgtttttatgaattgggaaatttacatggtatactaatttttgctatttttttacaaaaatactgtcaggcagtattttttacttttttactgtattttttataagtttcatactgcantatactgtgttaagtttttactggtgttctacgggtgttttactgctattttgagttaaactgctttgtgttttactggtgttttataaaaacaaagcatttttgaaaaaaaaaagtgtgtgatagtatttttgtaaaagttaacccaaattccagtattttgtaagtttcgctatgaatttgtgaaataatccttaaatatttttgacatagtacataccggatgatttggcgcctatttattaatgtctaattttatggaaaattttataatatcatatgttcttgatagggacaaaaatataatcttacatagtttgaatacataagtaacatcaactttggtgattaaaattaaactatatgtagaagtaattaagagagattgataaaaaaagaaaattttatttatacttcaaaaaattttaaacgcactccattttaataattttaagtttagataaaatttatatctttagttgcgcta

SEQ ID NO: 92010 - DNA, 628 bp, Cannabis sativa
tactataactgagaactactcaacactgggatgtgttctttcttgccacatatcaaacattaacgtatacgtcatcaagacaagtttatggattaacaagtacaaacctccaagaccacacaatgtaacgtgcatgccaatatggcacgttacaagctaggtgatgcctacaagcaggccaagtggtggtcaagtggtggcgtatgttggtgtgcatgctggcggcatgctgatgcttagtttgtacagcagtggcatttttgtaaatatcttcaatattgtccagatcgggacgggacttggtattcactatttatttgggtctatgaatataatagtgcaatcagatttgagaaacttggtgatttgatttatggtgatgaccatatgtctacatagtaaaaatcatatatcttccttgtagaagactaaaagcttagaatgctttttaaggggtgtacctggtgtcagctctccaccaccccttggcaccttggcgccaagtgagctactacaggtcagtgggactagtagattgggcatatgaggaggacaaggggactcatatgtctccatgacttggaatactcatggacactagcgggccaacccggtagtgcatctaaga

SEQ ID NO: 92011 - DNA, 581 bp, Cannabis sativa
gttaaatttagatataatttttgtatcttttctgttataattttacatattcagatataatttacattatattatttgagtactcgctattttaagtgagtactctcataattattttaaatattcaaataacctttgattacacgcatgttttgttgttgtctaaatttttccaacaacaattatcctgcaatttggttttgatttaattgagaattgtacaaagtttttttgttgaattattaagcttgctcaagcctctcagatttatgttgatcgtgttttggtggaaagcaatactcctacatgtttttttatgttgttttggattatttatttttcatatatgttgataactattatttataataatttattaaattttaataaatatttttaaaacaaaaatataaatatataataatatatgtatatttctattaaaattttaatagtaaggaatgatcttattttgatgcatgaggttttctttatgtatacattaatcgtgcatatatttagtaaggcaaccctaaaaaattacaatgtatatagcgtaaaataaaataaaataaaaaagt

SEQ ID NO: 92012 - DNA, 633 bp, Cannabis sativa
gattccaatactgcatctcgatcaactccccataccatgcagacatctactacttaatctgattcacaaccccctcaattaactactgagcaatgccatcatataatttcaatgctaacccagcagctgcaaccctcttcttcttctacaccagaaaccaatgcagcaatcactaatttttctggtaatatcaatccttttccttacaatttttgggtaattgatagtggggctacccaccatgtatgttgtgacattagatgtttttctttttttttgtcaataaaaaacatgcttctgctgttacattaccaaatggacattatgtcaacatcaaaaaagttggaactgtaattcttaattccaaaatcattttaaccaatgttttatttgttcctcaattccatttcaatttattttctgtaagttctttcttgaatgataacaaacatactttgtgcttcacctctaataattgttctattcaggaaacttcacagatattgaagattgggattgctaacaagcttggaaatctttactatattcagcagcaaatccatgacaaacacatttcaaattccatttcttgtaacatgcaacttactacaaaccaatggcatactcgccttg

SEQ ID NO: 92013 - DNA, 617 bp, Cannabis sativa
cgttcaaagcaaatacccgcatccacaaataaattaaactcccacaaattcgaccccccctccccgcgttatagtcgtaaaaaacttaaaggggttgtgtatcataatggtgttgggcatcttgaaatcgagtccatctacttaccatatcttgagaaatcaacagaaatcatgcacaaaggtattgcgacgatactaaattctccaacaaaggaccagaaattattcaacttcttctttagacaggatatccataacccgaccaagagttcatagaagttaggcaccatcttcaaactatccaaatccctcaactcccatcttacaaagttagggactattgatttacattattatatttgttatatgttgttttcttattgtttctataagattctgtaaaattataattaaaaattattttcaccatataaatattacatttgtgtcaaaaatgacaacttatgtaaaaatccatttttctttatataaatgttagatattattgaatccaattattagtgcatctagcattattactctgctatttaattttttttttggggggggggagcattattactttgctatttatcgtaggaaatgagggcaatgat

SEQ ID NO: 92014 - DNA, 536 bp, Cannabis sativa
tattgtaccagaattagagtcctaaatacttacgttctaaacattaccattccaaagttattacttgtgagtattatagtgtcattaaggatatcccaactattttgactgaccaaccaaaatttttttagtcggtttagtactatttggctcacacacagtataaaagataaattaaactgggatagtataaatgttaaattttttgtgttcagtaattttgtaaagtttgactcattttatataagtttcacaaaacaaaaccccaacacaagagagaaagttgttatatcttccccctcttagttataaaaaagatgtttttaacctcacataaaacaataatattcataaattaaaatgaacagattactatattcttcttaaactcattattttaattatcccactttcaaaattacaataattaatattaaaattaacatattttaatttaataattattataaaatattagtaactattcgaggcactacccaatgctctttgaggtagcttaagagttaagaactaac

SEQ ID NO: 92015 - DNA, 617 bp, Cannabis sativa
tccaatccaatctgcaatagtgcgtattggattagttattttggatcggttatttattttttttaattttagattatttaatatttcattaaaatactaaaaaaaaaaatacacacacaacaacatagcacaaccagaatttaagaaatactagaaaaaaaaaaaactattatttcttaatctccaactctaacaacacattacacttccgtaaaataaaccataacagtaaaaaaaaaacaatggaagaatctccttttgaaactattgtttcttaatctccaactctaactcaaacaacacggtatttattttatagagtgaagagaaagtggaacaattaggtttaggtttagaaattaggtttgttttttttaatattactatatagcaatataatattatacatattataatttttttaaaatatatatataattaagtgtggattggattagatccatcactttttaaggtcaaacaacatccaattcgcacaagtgcggatttcaaattttttagtccaatcaaatctgcacaagtgcgtatatccgcattttgtgaattggattggattggatcgtgggaattagattggatcgaatactttatgaaca

SEQ ID NO: 92016 - DNA, 592 bp, Cannabis sativa
  modified_base (339)..(355): a, c, t, g, unknown or other
  modified_base (404)..(405): a, c, t, g, unknown or other
tcatgtataacccgaggctgttgtatgtgtacatttattctgctcgagtggatgaatatcctctttttgtctatgtattccgaggctgatgtatttctcgtcaatatcagtttaataatttttattcttgtctcgcttaagactatacaatcaacgagtttggaatattatctattaaacctttatgaaataataacgagttatcgtaatctctatttaatgacataacattattatatcattaaagttgattcatattctttttgttggacatgtattagcttctgaagtgtaactgaatttcgggtataacattagttatattaaaaaaaaaaaaannnnnnnnnnnnnnnnntcagggtcctatttttactatttcggaaaatacagggtccattttgtcnnttaacaaaatagaggatccaatcgctaatttttgtaaaatataggatccaaaatagtatttacctaaaattttgactaaaaaattattttggataagaatagagatgtatcagtgcatccctttcaaggaattgcatcatagaattttcattacctaatcaatgacaccttattttaccgaacttag

SEQ ID NO: 92017 - DNA, 823 bp, Cannabis sativa
ataataataataataatagtgggtctgggtgcttttttagagaataaattgaagaaggaccgagttagtgatataatgaactttgtgtttcatgactgggtttttattgcaacagtgttactgatcgggacaattttaataatttggcaaaaatcttttgttagggttaatattcttgaagagaaccaagaatttgttcactgtgtggtcaggatagtggggtcacaaactgaattttgcttgactttttttatggatttaatacagttgagaagtgtgttgatctttagatggggcttacgaatacaatgtttccagtaaagccttggcttatacttggagattttaatacaatgttttattatgatgacataatgggaggtaaagcaatatctgctgctgaaattgttgattctacaacttggttagctttaaatcaggtcgatcctctaaaagcgtgggttcaaaatatacttggatgaataaacaaaatgggaatgatagggtctattcaaaaattgaccatgcttttacaaatgaagattggcttgatgctatgccaaacactatagctgtttatcaatgggaaattgtttctgaccattgcctttgtctcattaaaactcagaaataagaaaacgtgggaaggaaaccttttaggttttacaatttatggacagctcatattaattttaaagttgtggtcaagagtaactgggacaaagctatgactggacaaggtttgacttgtttcatcaggaagttactaagacttaaacatgtccttaaggtgttcagcagagaagagattggggatgtggaa

SEQ ID NO: 92018 - DNA, 628 bp, Cannabis sativa
tagttaatatacctaattttaaatctataacaattagtacatgtaataaatgggtagatgtaattttaaatgtataacaatatagttaatatacctaattttaaatatatcttcccacaatttgatgaaggattgagatttcgtgaggctctaagttggatcaaagagcgttactggtagcaggtaattatagaaacagattgtttgaccgttgtgcaggctttatagagtttcgttcatataatttcggtattttgacaattaattaatgattgtaaaagtttactttctgttttgcaaaatatttatattatctttgttaaataattagttatgattcataactttgctagagtttttatattatattctggtcgttgtttctatttgaaaaatgttccaactgacttactacgttgtttggtagctgaatttgatggttgattttaatataagaattttcattaaaaaaaagattttttgtcacttaattgtcatttttaaccagagtatataagtagcttatgttttcatcttaaaactaattagtaatgagtaaaattaatttatattcttacatatagctcaatatgttgattaaaagtaattcatatttttatatataact

SEQ ID NO: 92019 - DNA, 635 bp, Cannabis sativa
tggtaatagcctactccctttgtattgtattaacttaagagaaggaacaaagtgttcttcctctttgaaagctcttacaattgatctttaagtaaccctcatagatcactattttctctctagaatctctctctgaagcaattcttttgatccctttcatagtgaggcagggtcactatttataggggcttaatgcatgagggatggtttcccttttgcttataatgcataaaatagaaaattacaatgactacataattacaatacacgaaataggaaactgaaagaggttaccatatttctcttattcaatcccacgattgtagtgatttttttcgtgtctggacatggcaagattattttgaagtaattaactcttgtaagtagctcgaaataacaaacttctacctaatcggatgttttatctaccaccctactcaggtaatcaacaattatagatgttgatgaattatgcacaggctattagggacatttacctctgcctaggtatcaaaaatgtgagagatgtgtcgctcggtctctcgccacatcaatgtgaaaaaaattggataacacatactataatattagattaatttaaaatgtgacatatgtgacatgttatataaaatatg

SEQ ID NO: 92020 - DNA, 622 bp, Cannabis sativa
acaagctcctcgagcttggttcgaaaaacttcagcaatgcctcttgtctctaggcttcacatcatctaaatcagaccattccctctttattttgcatacatctacatctgttacacttatcctagtgtatgtagatgatatattggttacagggagtgacaatgccactatcgaatccattgttgctgcactcaacacacagtttgcactaaaagaccttggtcctcttgcatattttcttgggatcgaagtgacacaaacagaagctggaatccacttatctcaagctaaatatgctaaggaccttcttcttaaggctcacatgagcaatgctaaaccttctccaacacctatgactagtggtattcgattatctgcatatcaagaggaaccattggaagatgttcagttgtataggtcagttgttggggctcttcaataactgaccattacaagacctgaactctcatttagtgtaaacaaggtctgccaatttatgcaaaagcccttgtctacacattggtctgcagttaagcgaatacttaggtatattagtggcactgtggatcacggtctgcatctgcaaaaacctgagaacttggatctggttgcttactgtgat

SEQ ID NO: 92021 - DNA, 739 bp, Cannabis sativa
atgttggtgtttaggctatatacacataaacctcataacgcaatgataaatcctcatagttatgtatgatcatccttacaaatttatggtcatccttcttagggtcgtacccaaaatcctagagaccaaagtgacaatagagactactaggaagtttattaagttaagacatgagtacctttctatactttatggtggatgggttccaaataactgtctcataactcggattgaagcttcagaatcaatgatcacgaagaggttggagttgctttccatggagcgattaaggtggtttttgatgaaatcacgacttttgattatcgagcaccattgcttggacacacacttgtagtggagaaaatcttgaacgggtatggcttaggatgtagacgatcgtgtcccatgggaggtccgacaatgcaaagttagggaaatttgccattgttgtttctgctgctgagttagggaaactcgagtgacaagctacgcataaaatagagaaagagtaaattaagaataattaaaactaatttaaattgattgatggcaaaagacgtatatgtatagatttgtatagggaatcctataagacacactatttttatttcatgctagggaaagaaattaaaccaatcaaaagttaaccacaattaattgtacatgagtttattaattgatcttgttatattgataggattttaatataataatagcaattataggataaaataagttg

SEQ ID NO: 92022 - DNA, 584 bp, Cannabis sativa
ggtatagtcctaagggggagaatccattaccacccaagctgtttgcaagcttcaaaagtcattgtatggtctgaagcaggcttctagacaatggttcgaaaagttctccactgccttaactgaggaaggattttcccactctgctacagaccactcaatgttcattagacattcttctagcagtataatcatcttgcttgtatatgtagatgatgtgattcttgctagtaacaatctcaaggagctagagcttctcaaaatcagattgaataacaaattcaagctcaaggatttaggggatttaaaatacttcctaggccttgaagttgctaggtccagcaaaggaatttttatatctcagagaccttatgccctctaactccttgaagagcttggatatttgggaagcaaacctgtcaatagtcccatggaagcaaatcttaaattgtcacaggattccaaagacaccttggccgatccaacattatacaggaagattattgggaaactgcaatatttggttataactcggccagatattgcatactcagttaataaactgagtcaattcctcacaactccca

SEQ ID NO: 92023 - DNA, 619 bp, Cannabis sativa
  modified_base (62)..(70): a, c, t, g, unknown or other
attgattgcagcagaattaaatgactcattccactcagatctttaacccttgttcctttctnnnnnnnnntattatcaagatctgagctcgattctcttttaggtgttggattatttacagtcttacacactaaaattgagtactagacttgctatgagtggccatgctctctttcactatgtggctcaaaaattgaagagaaagagagagagagaaggattcaaaaatagatagaaagagagaatgctgaaatttgactgaaaagcttatgttgcatcatttatcagttttaactatctatttatagaaattcttttaggtttaggtttgaactatatgacattaaaaaattgataaataaatggccaaaaagagcttaagaagcaggccatagtatgtgggctccactaattacaattttattattttatataactatttatctttttctttcacaaatatcatattttttaatttcaatcctttaaatgtcaaaactatttaattaataattaaaattaattatcaaataaaattcctatgtactttatttattaataagacttaataaagtctcttaattaacaaatgaaccctgaaacctcttttcttcacaat

SEQ ID NO: 92024 - DNA, 682 bp, Cannabis sativa
agttgataatgttttaaattttcttattatatatagttgatatagattaaatattatttttattgttattatagaaaaaattgaaaggtagaaaactttctgctagagaattttttattatagcttacaaaaataaggataaattttgcgttgattctacctcagaaaatatcatggtatgacctttttttactcatacatgttgagaaccagcaacatataatttctcctgagttatatgctacagcattatcagttgatttttaaaagatatatatttattcaatccgtaattaaatagctcaaaagttgatatcatattatgtattgtgattaagagttttacatgatcaattccttactctgaaagcatacttataaaattgtgtatatatataagcctagctagctataatattatttctttaaataaaattttttatttagttcgttcatatggtcctctgtttctaatattggttacgagtttaatactactttttataggcaattaatcgtataccatcatatggcactcctctacctacactttcttaataataattatagacgattaaaagttggtaacttattttatttgggcagctagtattcaaagttgattaatagtgtaaaatctttttttggcaagttagttgacaaaataatttttccttttatg

SEQ ID NO: 92025 - DNA, 809 bp, Cannabis sativa
  modified_base (167)..(182): a, c, t, g, unknown or other
tttttccagggggagttgtgtttttggtacttgtgatccttttggattaaaagttatcttgttattttgttatttttgttttcgattgtgtttctattattttcccttgctaactttgatttgcaggtacttgtttgttaaaaaatattttgttcatctaaagtgcnnnnnnnnnnnnnnnnaaagtccttttttggcaagttagatgccaaaatattttttactttatggtgagatttatttgcattcataactgattttctcaccttgtttatttggtttttattgctcttttttatgttaggaaaaatgtatttttcagcttgaacttttcttgtatggaaacttcttgtaagagaaccaattctcttatggaaagtttgtttttaaaggaaactttgatctttatcatttgccttgttaagttcaattttatcttgattatatttgatcatattcgttgtttatagcaggtatctagacccaatacaagattggactcgtttatggtaagtttccttttctagtcagatctgttgcgtcagaatccgtttctgatgctgcagatcatgtttatcttaggaaagttttgtacagctgtagattcgatcttgtggctgtctctagggtttctatgttttataaatagaacctagagagcagccatttgaataagctcttctagtattcatttttcgcttttttcttatttgtgagaagagactttttcttttgtgagaaactagttgttcatctaggttcaagtgttattcatatatgttcttactctgtcttagagtttattagaa

SEQ ID NO: 92026 - DNA, 539 bp, Cannabis sativa
caaaagtaatgaaattgggcttgggcagtacaaaagttgtttttgccgtgtcccagtataaatgtaaacttttggtcaaaaagcagtatttttgtaaaattcccttttcttttctaacaattttagagtcatggtttagaaaaaataatattacatgtttgtgtttattattttctttatgtattttttttctaggtgtcatgaaataactcttcatgaaattttacttttaatatctagtatgactctttatcatttcagtagaatcataaaaagttttgtttgtaatgttacatatgggtttcattgattttaattatttttttttactcacctatatattatttaataatattgtattgagatatattgagataatattgtgctgaaatatatttgttcattttttattattatttacattttactttcatattaattttggattctacaaccaaaaataaattacattataaatatatctagtatcactactacaaaaatcccttttagaggcagtttttaagccctttcagcgt

SEQ ID NO: 92027 - DNA, 537 bp, Cannabis sativa
tttttcacctttttttcttcacaataaaaagatttcaaatttaaatgctccttcgcctagtatcaatatatatatataaattattgtaaacaaaaaaaatcaaatttaattgtaacaaagagtaaagaaaaaagaaagtaataaacatagccggacttacataaaagtaaagaatttgtcacctcttgaaacaaaacattatgaaggatacatataatttagttagttacaacacatatttattaacaaaatattaaccttgttttaatagttaaactacaacaaaggcgccttctctaattctgttgaccgtcaattatttcttctaccatgcacacctatctcttctagtggacaatatttttcgatagaatctagcactcttatgtaaattctatcaataattttggagaaagattaagggcaccttaagggatcaaacactataaaaagtgatatattattattggtgtattttattattggaccctacaaattttaatataaatatgaaaaattgctaataacttattaggt

SEQ ID NO: 92028 - DNA, 587 bp, Cannabis sativa
aattatttaaatagctataaataatttcataattaaacgtgatgaactgctattttctaaattaaactaagcggtctttacattggggatttttgttttaatctaaaaattagggctttgatcttctatttgttaatttgggttgtaattttatgattatttgataaaccgtattcagatttcaatatggataatatacatttaagttttttttttttggtattcagaacacaatacattcgttataaatatttatatatactgtcatgaaatatattattttgccattgtggagttcgtgtgtaagtgatggaatcaatttattttgttttcttctttatttgttggtattgggtggatgattttggatccaacgaatgattatacattattttttttttaatcgatctattgattccttaagtaatataaagatgtttcaagccattttattttggataataaattatgtgtgggtattttttatgtatatttgatcttttgtcttttagactttcggattaagtgaggtatggccatggatatagtcatcttctcttattaattaagatattcaattttttttt

SEQ ID NO: 92029 - DNA, 576 bp, Cannabis sativa
accttattaataaaataaagatattaaatattattattggtgcaatttattatcgagttatacgctatattggcctaatagcaataacaataatcctaactcatatttgattaatatatgctgttcaaattcattgacacaaaagttaagttgcaacaaaaatataagaaaacaagtttactaaccttagtctcatattcaacactagctttgctaaggaactcagccttgagcttctcagtcattgtcaaagcattcattttctcaaccatttgttgtagctcagcctcccttagtgccaccgccttggccgcctcgacctccgccagttgtgcatccttagtcaaacccgcctttttcatagccagctcagcattagcctcagccacctcagcctctctcgcattctcaaacaccttcacttcactcctaaccctaatctcctccttcataccctcaccgtgcctttgcgtcgacaaaatcttcgtctcggcatcaattttcgcggcattctgaaccgtctgaccttctctgagtttagaaccaatctcacctttcatcttagcctcagacaca

SEQ ID NO: 92030 - DNA, 630 bp, Cannabis sativa
ctgccaaaactggctagccagtttcacaggtactggtaaaattggctagccagttcacaccagttcacccgaaaatttccatatcttgctcaatcctccaccaaatgcaaccatacttttcaaaacacctttacaatgcatatacaacataatccaaccagtattttctagaaaaactcaatataaacaaacatgccattagagatcaaatttgaggttactatgctcaaacttgtaaaaaacctaaaccaaacatcaaaacttgctgctagaaactaaattcaactcaaatgaaccctataattcgaaccacacaaaaactaaaccctaacagcccctaatttccaaaatcacctgatcaaaccaaagtaaaagctttaaaaacacaagtctatggattctagggttaccttagcttgaatcccacttgaatttcttgttgaaaacaccaaagatcagcaacaactccccttgtttttggctggttcgaagagagagaagggaaataagaaattaatcttgaagttttggctttttccttatttttctctattttcttcaaatgaaaagagataaactaatttgatctcttgctgaattaaaatagccaggtgtccacaccctaggcag

SEQ ID NO: 92031 - DNA, 4744 bp, Cannabis sativa
tattctttatgacacgttaggtgggtagtagtgataaaactccaaaaatttcatataaattgaatctatccttttatactttccattattttctttaccagcaccatatagttcttttgttaacttttctatgttttttgatcgacacgcacgacaaccacgtgggtcacactcacagggagagtggttgtggtgtagggtagtatgactagcgaattcttttttttttttggacaaaatgatcagaatcacagaaggcaataaactatttattaagcagcaaccatagaagaatacgattacagagctttctttcatgaactaggcagcaaccagcaactattgaactcgttttcaagttgctaaaactcaactgcgtttaatgattaagcggtaatgagtaattatcactcaggcattcccacaaacaacctttatatgctgaagtaataataaacgatggatcagactattatcattattcaaatatctatgagaatataagccgccatatcgtagttcaccaaaaaaaactactgattagagtttctgcaatctgcccttttcaacacaattctcattgggaagaagaaaggtagcgagttattttccacatgaaaaaaggatacatacaaagaggatgaataaaagttcttaaagtagttggttactctagtagacagtaaaccttcaaccttgatcctacaacctgaaaaaaggaggtcatgaagatttagaaattgagttggtcaaaccaagtaagcagaattaagtttgtggcttacgtgaacaaatgtgctctgttacgagagagttcaggcctcttgataggtgagagtatcaagttcctcaaagtcattgaggggtttcctgttccacttccagttccagttccaaatatagaatgagcaccgggtcttctgtttccaccatcgacgggcataccagtttgttttgctggtgaaccaacagagatatcaaagggaccaccagagtttgaactattctgccgtgctgtccatacatcctctcgaggccctggagtttcaggcataacccgccgatctgcaacaaataagtcaaatggttttggaaatatttaagcaaaaacagggtacttagtttagtgtcaagacagtgttaacaagccaaaactataagcttttaaatttgaaggagtttctacagtaatgtttctttcccttctcagcatgcacttgagtctgttaaatagtaattttgtaaacttggacattaggtcaggtcttaggaagtcttctgtaactttgaagagaaaagaattacctcttcgcggaccttctctgttgcttccaatgtttgttgggttggaaaacaaatcaggctcgtttcttgaataaaagttgtttgcaggttggatggcagatcttttcatagactcgtactcacttcttaattgatcatacagttcatccaatttcctcttctgtctgagaagatcagtttaatggaactcaaacgtcaaggttttcaaaatggaagcgttgaccctcaagaaatgttaaatacataccgggatttttctgcaaatttatcctggagctcctgcttgtctttagataagctctcattctcttgctccagcatttggcacctttttaccattttctggtatgcagtgtgtacctgctccagtttttctgtaaatttttcctgcattgcttcgcatttttgcctgcattgagcaactaatctgttcatcttgtactgcatttccaagtccctttgtccaacatagaacattatgcttttgtatgtagccttcatcactaggattggtcaaggaatgttccccagaatcctcttgaaaaaaactgtactcaagccggacaacaaacctcaattggtttgattacttccagacaaagaagttatataagacatgcaccatatactttctcactgttctatccaaggagagcactttgtagcaatgccttcaatatattaattcttttggaaaaaaaaaacaataagcattatcagactacagaaaggatacatatctgaggattcaatcccgcgagagccatctgcaacatataagttccaaagattaatagcatagccagttaacataagaagtgagttaagagtcgagcagaaaacaagcttaagcatgcataagtaacaaaaaaatccactcaagtgcatgtcgctttgaaaggaataatacttacgtttacccattcatcaggtggactgacgtccacagctttcataagactgccaaagtaaatcaagaattagtcaagttcataaggatttcagaactgctgaatgcagttgaggaaacatagtgcaagtgacatctattttagcatctgaatgccattaaaacagaggaattttcctaatatgtatagtagctaaattcttaaatatttagctttacttgacaatctttgaggtccaaaaaaaaatcatctagaattatacagactgaaacatttcaattaagacaagaaaaagaaaaacttaaacatcatcattgctactcttttacctcttagagagcacttgatcacaaataggacatgctccatcgttgctaagaattttgctggcatcttctgtgcctttcagaaagcatacttttataaattaatatttaacccaagtttccacaaggaaaaacgatttacttgtaacactgaggcagagttcactatgcatacataaaaaatgaccacatgtggtggaaacggctcgcccttccagctctcgccagcacgcattgcatctcatttcagcctttaaagattaccaacaattccatggcattctgtggcatacaaaagcagggtagcttcaccagaaagagaatcaaaacaacactccgccaaactaagtgtatcaatgacaaagtgtatataatcaagtataatatcattaaacaaacaatgatattccacataggaaaatacatcaacagaagatacagaattggttcattcaacataatacttagcatatgaaggtggaaaaattcatcaatttgaaaaatattccataactataacatagaagtatcaaacatcaatctggtggtgttaaaagaaagaagaaaaaaaaaactgaaaccagacaagatataaaccggaattcttctcaaaagtgcaatcatgaaattgaatttaaaaaatcaagattccattgatctttctgagtttcagtaagtgcttttgtatgtatcggtttgcaacaaaagtttcttatctagataagtcaaaaaagtaccaaaaaaagaaaaaagcaatactagcagtcaaataaactttattaagctaagaaaaacaaagtaatttcaagtttaatgatggcatgtcttgaaaccgcaaggaaagattaattagtgatcatgttcatctacgtatttcattatgctttatcaccctaaacagtaaagaatattttatgcttcagggatttaaatgcatttccgttttcctaaatattttcagcaaccaaacacatgaattatctcttacactttagttagactaaccgaaaagttaaccataatctgattcttcacaccaaaactataaacacactatctgaaaattaagcaaatattttacaccagaatgaacacaatcttccattacctgaaattttccaatttatcttgtcttcagaatcagagagatcaatcaggcaagagatcaagaaagaatgccgtaacgaagccagcgattttttttattcagctgcgacgaaaaaagggaagcaaaattcgaaatcaaatcaattacacaaaatgaaaaattaaagagaaagtgatagagaactcacagagagatcaacttgaacaaattgttggcgattgaagcctgtaaagaaataagaaccagtgccagatgactcaggatcgactagcgaattttgtggatggaggaactacgaagaagcgtagcgcttgacgattatattttcgcgggaaaagtttttctgcgaattctcgcggctgaactggaaatgagaactgtagattcgaatcagtgatgcatagcggtgtaaggactattaatttgggcttttaaagcaacacataggctggtatttttggttgggataatttcacaaatacaccaaaataataaaacaattacaaaaatacggtttacggaattttaaatatttttacaaatttttaattttatttataaaaaatacgatctttttatattgtattcatattaatttgttgttaaatttttgttattttttattgttattttcatgttacttttatataatttttttttttgttatttttgtgttgtttttataaaaaattcattaaacataaaaaatataatttttttaccaaaaaaaaatataaataataatatcttatccaattttatttttttttatcaggatgaagtggtgttttatttaaatacatcataataaatattacttttttttttacttaattctctctagttcgtattttaatgaaaataggttaattattcgtaaaggagaagtacgaaatttttgttctcaaaactacatgaaatatttttttagttttttgaacaagtttaaattgaaatattataaattttgtttttgataatataaattaattaaaatatttaaaaatttacaagaataatattataactatagggcgcatttggtacgcaaaactagattggattagacaggctaatttgtccaatccagtgtt

SEQ ID NO: 92032 - DNA, 2335 bp, Cannabis sativa
atatattttgaaaaagaaacagtttcaattaagagtactattttgtctaatttggcatcattctttctcagtcgagggttagcttttaaacctctcttccactctactctctcactctctctgccattatacatatatatgtatatgtataatagaaaaatggcggctcttaacaaagtagttggctcaagacttggtttatcccactcttcccttcttcctcctgctcttctaatctgttgcagaggaattacttctaagctctttgttggaggtatcatttctctctaatctctatatattatatatctttatggacacatacataatatatcattaattttatttgttaaataaacattttttgttattgtgatcagaaaatcgcgttgataaccttttatgttaagaattatcttcctgcaaatactaggaacaaaaccaacgactagttttggtgttcactcttattgataggttcagaaagagcacaaagtgtttgacgaaatgcctaatagcttattttagctcctagctgtgtgaatttcaaacctaaaattaaattaattgctgcagaatttgacgataactgatcatgggaactacttggttactttcgtctactgtatccataaatgctaatgttatatacaaaaaaaattgaagtgattattggaccatttagaaacaaagcgagtctccacatggggttttgactaagttgtaaagcaatggtggacttgagattgggcataagttggagtgtgttttgcttggtaggcagggattaatggaaatattttggcagggtagttgtttagaaagaaagattttaggaggaataagcctataatcattttttccggttgagtatgaatacgatatgaggtggtggtttttctaatttctcacattcagttcttgcgtgtgtcattttttcccctgccatttttttaatcctctcacagttggatggtttctctcctgctcctcatgttgaacacaaaagcgaagaatcttcgcctcccactttcttttattaggttttgtaatgttggtgtcgttcataccaaacagccttagagtttgagcaatcaataagatagatcatctatcttttatgatacgtgttcatgtgatctaacaacttataagcttttcacaatatgttctgaagaatgcatttgtaaatatgttttcagggcttccgttttacactaatgagaagggattatcagaggcattctcccaacatggtcaagttattgaaggtgattagtatgctaaactgatgagccactctctacgtttatcatctgcctaacaattagtcttgtgttttcagctaaaattgtaatggacagggtatcggacaaatcaaaagggttcgggtttgtaactttcgcttcagaagatgaagcacaaaaagctctaacagagatgaatggaaaggtaattctctacggttttcagtgctccatttttttccccctcttttgttagattataacaaccaaaaatgacaaaactgtaatttgcaggagctaaatggacgagttatctttgtggattatgcaaagcccaaagctgattttggtggagggatgccaatagcaaggggacctcctagacctgcaccttcaattggcaaagacgatatagagataatgtaagtttgaatattctcttccatcaaaaagattcaacaaaatctattaagtatgcgcagaatctctcactaatttttgagacgaaatacgtccaacttttttatgtcattcatacatacgtttcttttactggaagaataattttgttgactttgaattatgtttggtaaagtttatgtcagtggacgaaaacattgtgtgtagatagaactctataataactcctttatttgattcagtatctacttagtgtgacatgttttattgtgacataaatgtttataacgagcttgaaaaaccaatgaggcagcacttgagcaccattacaatttatttttgtagctttctctttaatgaccaccaatgagctggtgaagcagtctttgttgtaatatctataatatatattggaaaattttctttggtgtaatatctatctataatatatattgggaaattttactgcagggatgtaatttgtgtccctagacatttttatttttagcgactagagatattataattaaaattttaaaattttcttatatgactatgagacttgggttgatatctaacactcatagaatcactacattttggaacattgcttttgaagttttagatttagctagtagttttctcagctgtaagtttatctataaata

SEQ ID NO: 92033 - DNA, 1174 bp, Cannabis sativa
caggaacatgacctgcaggatctttgttggcacatggctggcaagaccctagcaggcccatggcaggccagaccctagcaagagcatgacgggccaaacctaaacttcaagagcttgcatggacagacaaacctcatcctgtaggtgtatggtcagccaacttctccttgacaggacaatgatgtgaacctttatctattgacagcaagacaagctgcgagttgggccttgacagcccactaagatgctacaaaaaaatctccttttaagaggcaatttggtcatttgtatttattaatttaatatgtaaacatctatgattttatttgctaactagggttacgctcttttatataaagggccttaactcaaccctagaaagctaagtcttatctaagtctcatttaagcctctaagtcattacctctcaactctaagtcccaaaccctagttttctcctctctttctcttctacaaacacaaagggctttctctcttcctctctcacacacctccaacgccatatctctctctcattagatatctgcctattgattcatactttgtaaccttaaggagagctatatcagatcccacctatagtgtatgaatagtgttatctcttagtaccaatacaacaaaaaggggagtaggtcatcatccgctaactaagggggccaaacctctataaaaatccttgtgttcttttactttatagttcaaattatataactcgtggcaagcatcattattagtacaactctgctgtcagttggcccctttttgcggtaaacagtttggtgctttagttgagagcaagttgatatcatatctaagcaaaagtaatggttaacacaaggagaactccggttgcaccatttgcatcatcaggtcttcttcaagaccctatgactgcatatcttggggtccatgttccacccacgactggaatttccatgaacattgctgatgtggtcaatcttgcccttttagctggcaccacaaatcttgccacaacagcttgccagatggacaaaaccatcccgatggatttgaacaatagggccatgtctcctagggaggacccgtcactggttccttccactaaatgaaagatccacgtggagcaacccctaggtgccataattgaatctagccccttgtattatgttgt

SEQ ID NO: 92034 - DNA, 1192 bp, Cannabis sativa
taacaacccaatacccttaacacggcccctcaaggttacaattcaagggatctgtagcagtagagaggtcttgaattgtgagcttggtatgaaaggagggaaagcgttcactggagattgctttggtaagaccatctgctaattggtcaagagctggaacatgtttgacatgaaccagttgttgcagcactttttcacgcacaaaatataggtccaattcaatgtgtttcgttcgtgcgtgaagtaaaggattagctgtgagtaagatggtgctgagattgtcacaccacacaacaggtggtcttggaagttgaatgcgaagttctgtgaagagtgaatgaaaccaggtgagttctgccacagtgctcgcgagacttcgaaattcagcttcagtgctggacctggaaattgtgtgctgcttcttacattgccaagctacaaggttgttgccaaagaatatagtgaaactagaggtagatcgacgatcgtctagatctgtagcccagtcggcatcacaaaatgcaacaacatcaagatcaggtggccttttgagatgcaaaccgtgagtgagagtgccacttaggtaccgcagtatgcgtttcacagcaagccagtgagtgaggagaggtttatgcataaaatggcagaccttattgacactaaacgagaggtctggtctagtaatgagtaaataatgaagagcccctacgattgagcgataaagttggggttcagacattggttcactaccatgagcagagaggcgaagaccactcgtcattggagttgagcacggtttagcatcttgcatttgtgcccttgtaagtaagtcccgtgcatacttagcctgagataaatgcagacccgatggtgttggatgaatctcaatacccaaaaaatagtgaagatcaccaaggtcttttagagagaacttgacattaagagcagcaattaattcggatacaacagtggggtcactaccagtgacaaggatatcatccacatagactagaatcaaagttgtgtgtgtggaagtatgttgaatgaagagtgagtgatctgatttggagggtatgaatcccaactgaagaaggcattggtgcaatttgtcaaaccaggctctaggagcctgtttgaggccatataaggctttgtgaagcttgcacactagtggaggtgttgatggtatttc

SEQ ID NO: 92035 - DNA, 825 bp, Cannabis sativa
cacttatgttggagttggcgttatgtaagttagcacatttattcttgaattatagtttagtgttgagattattttgaacaatactttttatgttcctacttttaagaggaatttagttttgcttccgcttttagttaaacaatgatattttttttcttttgctaatcataatgttgacattatgtttgattctggattattgaaaacttttattcaaatggtctttacaaatttcattgactttcttagctttctcttttatattaaagaaacattgatccttattgttatggcacaatatattgggtcatatttctaaagaaagagttgaacgattactttgagctaaaattcttcctcctcttgatgattctggttgggatacttgtgttgatagtactcgtagaaaattgactaaaaaaagaaagaagactgccaaccgtagacaatctttaatagaaattatccacattaatattagtggactttattccaccacactatgcaggaacaagtattttataactttcatcaatgatttttctcatcatggcttcacttacttgatcaaagaaaaattcgatgcccttgataaactcaaaatctttcaaaatgaggttgacaaaaaattaggaagagtcgtcaaaggttgttctttcagatcatgaaggaaaatattatggtcgttatacaaaatctagacaacatatgaggccttttcctgagtatttacaagaaaatggtgaagttcctcaatacactatgcttggttcacccgagcagaatgacgttgctaaaagaaaaaattgcactctcatggatatg

SEQ ID NO: 92036 - DNA, 505 bp, Cannabis sativa
aaaaataaaaaaattaatttttctttaaaaattcaaaaaatcatttaaaaaaaaaactcaaattttccaattccctctttctctttgaaaccacctcaccattacacaaccattacataaccatcaccgaaaccacctcaccattacacaaccaccattacaccaccaacattgaaaccacccccaccacaaccacaccaccaccattgcagaccatcgcagccattgcaacaatcactaccaaaatctagatttgaaagaaaacccatccaatcccaagaaccacaccccacctctatgctcatagcatttctttcaacatgtatgctcgttctcatcatcatcctcctttatgctcgttctcgtcatcatcctcctgctcatcttcatctgtagaaaacaacccatccaatcccaagaaccacaccccaccaaggtaacagccaccctcattaccgttgacgaaggttgactcagccaccgatggcttcagccacagaagaat

SEQ ID NO: 92037 - DNA, 608 bp, Cannabis sativa
ttagcgctcccattcaattgtgctattatgtttccaagatgtaagtattcgatcgatcgagctttaacgaacaactctaagaacacagataatacatttaagtagaacctaactatatcaaaattaagatctattgacctaagatcaactaactgatattgacttagataaatataacagtaggtttatgatatcttatataagtttaatatcggtccaatctaaatactccatacatctgatcctagcatactttgtgaatgctctggaaatgacataatacttattcaaggtgtaagcaagctctattgctgattatcatgtcagtctaaatctagtgtactgacaaatcaactttgaaacatataatcatgattatatttcactgcgttgacaacactataatcatgaataattatatgttcgggatttaatagaatttatacatttaacttataagcatgaaataaatcatccacccacctctcattgtgaaaaacatgatcaatacgagagaagattctagcatcttgcttgttagtccaagtaaaagtagagccagaccttttcataggaccaacatcagcttgaacaacccagtttgtaga

SEQ ID NO: 92038 - DNA, 584 bp, Cannabis sativa
aaaaataaataattaatattactatttgattttgtctctaaaatataaggtttgctaaaagttactcttaaaatataacagtaatataattatgctctttctattaagttctgtttattttatttttatttttttttgaaaaaatcgttatacaaataaatcaaagttagacttcatggtcattatacaataagcttgaaggtatggccttgatacctaaccaaccttaccaattatgagaaaaagctcatttcgccacattatgggccttaaagttacaagaccgattaatattagaaaaaacacaacccacaaaaacataaaaaatgcttaaacaatgactcgagtaatttttaatctcccatctagaatccaccccattgagagagttaatcaccaccttagaataacaaatttacaccccttctcagctgccgccttcaaagccaaataataagtagccacctctccatgcaaatcatatgtgaagtcaagtcttaacgtaaccacccaacacaccaaaccctagtgatctctagtgacaacagtgatacacatgcgctccaaacccactcgaacatcac

SEQ ID NO: 92039 - DNA, 1129 bp, Cannabis sativa
attatattttaaaatactacaaagaatgtttagatattctcagtcaaaatcaaaacacataactaataaataataaataaataaaaaaaaacaaaaacaaacaaggaaaagcatattaatcctaaatacgagtaagacaatcagattaaaaaatctaatattttataatttatactattgtcatgttgtagttcttgttcaatttgaagaaacaatttggttttgatttttttaatagttgaaaaaaaagggaaaaaactaatatgcttcctttcaagaagcatagataggctaaaggtaacctttttattttaattcttttactgtgattttgattgtttgtttcccaagaaactaagtaagaaaattctaaaaggaaatggttcaattagggcaaaagatctaataatggattactaccaccaccatcactatgataatctaatcagtaaattatcacactatgataatttaattagtaaattattagatgatattctagttttggtagtcaagttcttatctttaagaaacatgttaggttttaatttgtgatattataagtgtgttttcaaagtatttttaatttagttttaatttcattttgagcaattttatgctttaatttattaatgttttcaagtttaataaaaaagaggaagtgaacaagttgaaagaaaaatgatgaatcaattaaagttttgtcgctagcaacaatccatggaataatttaaaggattcggtgcgatttgaacccttgaaggtgaagaaatagagaaaaatgagtactgtcatggcgaaaaaatccaatgtgagggcgctaaaataccaaaaatggacagcgaggtcatgtttcaaaggtatcaaggcgagactcaacactggaatctcatgttaaggcattggagcgatcgtgtcattctgcaaaaattcttcttcagaagtcgtgccatggagggccaacgtcacgacccactatgctgaagatttaaaaggttggtgtgtggattttgtacatgggccgcggcatgcatccttcaatgaagatgagtggaaacatgatctacaattatagaagtttgactttattaaaagatcgaatgtcagttccctttatatgttaattctg

SEQ ID NO: 92040 - DNA, 637 bp, Cannabis sativa
cctttattaattgattccactcatattgatgaagtaatgtcgaaaagccttcagcacaaatcaaaaacagagaaggagacaaagggtctccttacctaatccctcaagaaggaatgataggccccatcctatgaccatcgtgaacaacttgatacctcactgtgaaaaaataacctaaaaccagttgcaccaaatgttgtgaaaaactaagtttttgaagcataaacttgagataattcaactctaccctatcatatggtttactcatatcaagttttaacgtcataatcgcctccttcccaaaaaccttacacttcaagaagtgcataatttcaaacaacaccatgatattatcaaaaatcaactgaccatgtattttgttgctaataagtacctatttttttaaaattcagacattaatactcaaaacttcattatcttaaactttcatgagtacccactaacttttgctagtttatttacaagtggacaattcaaataattcctgttttttttttttctttacttaataattagtttaaaataaatcttatttgttaataaaaacataaatcttcaaaatcactgattcttcttcctcgtcgcatcacccgagaaacccttcccaaatcaaaca

SEQ ID NO: 92041 - DNA, 5315 bp, Cannabis sativa
ttccatcctaatttagttcctttcaccaaaaattgatgaatagtcaagtggtgtttataagtgtcgttttaagggtattcatggtcgttttggtgtgtgttgtcgatgataagacaaataaaccccagacccaaagtaaaggtcgacttttccatattccaccagaattagaaagaaacaacagaaacacaaccaaacgagaaaatctcagatagaagagagaagagagaaagagagagaagaaagagagtgagaggaccgccgtgcgcgaggacgaagatgctccggaaatgtggagggagatcggagacagagaagagggcaaaactcgcccaaattggttcgcgaatcgcattaagtggaaccgcgttgagaagctcaaattatccaatcacaaagatatcgtctcagctcatagaggttctatcaattctcttcaggtaaacttttcactgcccatcaatctttttattttcaaataaagaacattctgttgatgcccagctcttttgaattttgaatcatgaaaccaggtcgatttgactgagggccgatacttgttgtctggttcttctgatgcttcagctgccgtttacgatatccaacgtcctaccgagtttgaaggaggtggagttatagctaagcataagtgtttattcgtggttgacaagagccatgaaaatggtcataagtatgctgtttcctccgccatatggtatcctgtggacacaggtttgttcatcactggttctttcgaccatcatattaacgtttgggatacaaacacaacgcaggtagtcaatacttttaagatgcccggaaaggtttataagactgccatgtcttctttatcaacatcccacatgttgattgctgctggaactgaagatgttcaagttcgtctctgtgatattgcttcaggggcatttgctcatacactttccggtcaccgtggtatgcttaattcgtttcactttctttcactgttcccttattcatattgtaattccattgctccatttgggtttttgttaagttagaatgttttgctagttgtattaaactcatgtgatatgttacttgatccacttaataaggtgagagcttgagttaggctcaataactctcctaatatagtatagagcgggttcagttttgcaattttggttgggtgcccttaatatcgatttgttcacagttgtttggcatggtccatgctgtgggttcgatccacttaattaggtgaggaaatcctctcttaacaagccgcttttgttaggttgagttagcccaataactttaattttcacctttcttcgactgtttccgtactttgttatttactcacataataaaatggaaaagattagttcaaagtttatgataatgaaaccctattgcaggttcaccaactaagctagtagttttgtgaattatattctttttatagcttctgaaattctctgtatctatcaaacttatgtttaactatattaattcttgcattcatgagcggattatattatttttaactgtagatggtgtgatgacggtggaatggtctacttcaagtgagtgggttttggttaccggggggtgcgatggtgcaatacgtttttgggacatcagacgggccggatgttttcttgttttagaccagtcccaatctcagctggggagacgcccacccattctggaacgatctgctgctattaaggtgttcattctctcatatttctctgagtaggttaggaataaccatttagcactggagaaaaatttatggcctttttcacaatgttcttgcttatatcattgttttaatgttagtatttgctgctttttgttaagtattagctctaatttcaattttgagagatgtgctcaaagaatataaaatcagtttattaatagtaactaaagaagcaaatattcataatgttttttgtaattttttaaggtttctacatcaaagtctgccatagtcccaagttcgtcagtaaaaagccgagcagcacaaaagaaagccgccaatggttatagtatgaaactgtcacctattaataaaatttctgcaaaaggaccattaaggcagagattacatccagggatgttgtcaactcaggatcgtgccactgctcattacggtgctgttactggattaaaagttactgaagatggcatgtatcttctgagtgcaggttgggttttgttcactttagtagcgctcaacatacataccgatattagtgtgttaacttttaactattatttgatatgatttaggtgtttccagtgctggtttggaggaatggctttaatagatccatctagctaaatttttcttgttaattttatggaatggaatatgaagttgaatttagaataaataagatttttacccccacatttaatgttgggaggtgaaaatcctaattattcttcattttttttttttataattatttattcttcaatttaatacctttttaaacacttgtattacttcatttcacttgtagtttcatgttcaaatatctaataccttgttcccgaaggatgcaaaaatatagaatatcaagtgatatcgtaggcaaagtatatggtttgtttgattgtttcacagtgtgaactaaacatgcactcatctgagtcggaaatgcaaactgcagaagattttggtttggataatggcatttccgatggtgaaatttttacatctgtgctgcttatagaacccattattaaaccatactttttagtttttaatcgcttcacacatttacagtatgttatgtatggttgttggagtgactacattgaattgacatgaaattttattttacttcaggttctgattcaagattaaggctgtgggacgttgaatctggtcgcaatacactagtgaacttcgaaactgtacggatgcaaaccagcaagccaatacagttagctacaagtcagaacccatcccttgtttttgttccatgcatgacaactgtgaaggtcatttactacaactgaattttcgattatgcatactgtaagcagtataagaatagtctcgaatactcatttttctgcaaattttatgtttgagttttgaattttggattttcaggcatttgatatgtggtcaggcacgacatccctgacattttgtggtcactatgaatcggtaaactgttgctggttcagttctcaagatcaggtaaaagcttagcattcttaatttaagtttgtttctttatgaagtagaagggacaatgaatcgaatgcatgtttctgatcgtcatgaatcagatcgatgaaatacattatctcagcacacagtattctccattttgagaaagagtagtagaagaaggaggaataagatataagacaaattaagtctgattcctaatttgttgaacaaaatgatatgtttcctccgaaaccttaccagaatattttgcacaatatttccatgcaggagttgtttacaggtggcaatgatagacaaattctcgtctggtcgccgtccagattgcttcctgataaaatggtaccaaacattcaaacaatacttctctattgtttgttctgtatcatagttttataattcattgttaatcgcttagcgaggatcatacaatgatacaattataatgttttggcatggaaatgcaggatgacggacctgttgaggataaggataattggagtgactgacattgctctttgcctctttcaccaaacaaagatcttcatctttgacattcaggcaatttaaaacatcatgcattccagtagaagtgtcatcattgaaattttccattagcatgtgaaaatagacacttcagcttttcaagttttatccttttcctggattttatgtaaatatataaccattctttctatgattccatgcttttttttcttctttttcgccacaagtcatcctagttcttagattaaacatacaactatggtttgtaaagctgaacacttgtaatatagaagttcgattgtgcatttgatatgttgatttatgcattcttctaaatatgattgtccttgtgaaagagtaaaatatgagaggcatgagtttcggttccgttgccttctaatacagatgcacattcatggtaagaacgatatgcatctggttgcctggggataattggaatcaatgaaatgaaccgtgcccttggggttggcaatatgtgtacacagattacacacacttctgtggcaagaaatttaaatcaatcatctttatttgagttgggttagacctataaaaaatgacttactacataagtatgtcaagtttgtgtgtttacatatatcattattctgttggcaaatcttatcaagagggagtctaaaatgtaaggtgcttagggtgaaatatcttaaagtgaaaaaaatttctagccagctttaaatccttggttttagaaatttctagctagaggacccctggttttagaaatgggttgtgatgttgtgcattcaatccctattattagaaatgggggagtggggattttgtgaacatttggaaagatacttgggagacatatctccctaacttccatcctatctccctttcctccatatgacttttgtttgtttttaatatttatgtgtgtacatatcgttacttctattttttttttagataaatgtattttccatttataatagaaaaggactaaatctaaatacaatttcaaagaagatgagcataggcacaaagccgttacaaacttctaaaactcaaccaaaaaatctaaattgcttatagcaagtatataaataaataaataaaatcttagctagctctcaattaagtaaaatttagaatgcctcacaacaactagaagaaaacaaatgtttatgaggaagaatagtccaactatcaaaatgtcataaactcattttttttagttaggcactaattttgtagcaaactttctctgactctcactctgtatatataccttatttttgggtcaatgaataaactaagtatttcatttctaatatggtaccagtcgcttaaaaatccctctcacgatcgttgccatgactagaacaagagctactggttcaaggaactccgaccaaactcccatgctaaatatttcctcttccgtaccagatgctcctacaaatcctttgatcattcctttggtctctgctgtcatcgaagatattgctattacacagcccaacgtgacaacacgacctgtccatgaagatagctccagtccatacttcttgaattcttgtgaacatcctggcctcaccttagtcactcctct

SEQ ID NO: 92042 - DNA, 527 bp, Cannabis sativa
aaaaaaaaaaaaaaaaactagatgctagtagcacaagaaggtgaaacatctgtccacagtagacacttgggttaatctagcccacctaactaaacaattatagccactttattacaatttctaagataaaaaataaagtctattgtattaaaattgctactgatatccttaggatattatgaaccaagttgccccagtccgttggtaaactctctccgttctttagagctttcacaaccgattgacagtgacctccaacccaaacatccaagcaagaccaacgcaaagccagatcaatgcccaactgaatagcagcaatttttgccaacatcactgaaagaagcctagggataaaccgagtttcagccgcaactaaagctccattatgatcccttattatcgcacctagggctaaacatcggtcggtttggtcggtttttttccatataaaaaatccaaatttcagttttcggtccggattcgtgcaatccggaaatcgaccaaccaatccaaaaacttccttagaa

SEQ ID NO: 92043 - DNA, 737 bp, Cannabis sativa
ggcatatgtgaaacttgggcgaaccgttggcatttatcacatttcagtgcacagttgagggaatcagctctcatggttggccaatagtaaccggtagtaagcgccttattgctcagacttcttgaatctgagtggttgccacactcaccttcatgtaatttggtaagaacataatgagcatttgttggattgagacacctaagtaagggcccagaatatgaccgtttgtacaacttaccgccataaagagtgaaccttgttgccttggctctgatcttttgagattgactcctatcttacgggagtgtgccatcagccagatactgattatgggtgtcatccagctaatgttctgtaacacatccttgacttcttcttgaggcttccaaactattggccattgcatgtcaatgactgaaactgtgactccactctttgcttgaattactgaccctaggtttgcaagtgcatctgcatgactatttttgatccttggtacttgattgattgatatttcagtaaagctcgacagtctttctttaatagtttggaggtacgtcaccatctttaagtgtttagcctggtatgtgccattgaattggttgaataggagttgggaatctgacgtgatctcaagagctttgatattcatctttttggtgaggtcgagcccggtaaggagcgcttcttactcagtttcattatttgttgctttgaagtcacacttgattgctcgt

SEQ ID NO: 92044 - DNA, 584 bp, Cannabis sativa
tgattatattgaaatgacttttatttagggcataaaacccaacacatagacctacagggaagtctggccaaccattgtcctgctaggtcaatcttggctggccatggtcctgccaggacctgtcgggttactatagctccatcaagaggaggccagcctttgagtttggaggccagccttttgcatgttgaggacagctttgtacatttgttcccttgaagaggtcgggttcccttggtcgaacagagtctccttaggtccagaagtcacttcttggccggtcagcttatgaacaggtcctggacagcctataggctcaccctagctggcctataagctcctcttggctggccaaggatgttggtacatctccttgagggctcgcttcactcctttcagttgttgcttgacaatttttatatcttgcatggagtctctgttctgctattggtggggctgtactcaacccatactctatctttggcttatgtggacatgccacgtcaggtggacaaaatttgggataacaaaaataaataaaagtatatgtaagccaaaaagaaaagtctaacattctcccactt

SEQ ID NO: 92045 - DNA, 654 bp, Cannabis sativa
aaaaaaatatatatttgatttatttatttattttgtaaggatttatttatttactataaataaaaaaaaaaagcaaaagaagagaagagaagatatgaaataagaaagaggaggcaagaaagcaaaagaagctaaagcccttactcactgtcccacactcatttcaaatcacaatcattactctcacaaaccctaaaaatataagatatatccatcttaaaaaaataatcaaataaaataaaaaagccaacgattcatttgtttaattactaagatcccatcatctataatgtatatatatagttaattaattaattaattaattactaggttatggtgttaatcatggaatcctaagtctattggcaaagctaaaagatatatattatagggattattttacaaatctaaaaaaataataataaaaatacatgttatctagaattttaaattttttttttacgatttttatatttttatttataaaaaatacaatttctttagcgtcgccttgatcagcatcggtagcgaatttcgtcaaaactaacgctgaaagggctaaaaagccgcctctaaaggaggtttttgtagtagtgcgtatttttgttatttttttttttatgttatttgaatattttttttttgttttttttt

SEQ ID NO: 92046 - DNA, 800 bp, Cannabis sativa
  modified_base (126)..(128): a, c, t, g, unknown or other
atgttagaatatgacataaagaaactggttacattcactacaagaaatgttacttttaccagcacagttcgctattgcgctggtaaaagttacttttaccaacgcacatttgcagtggctaaaatnnnacttttaccagcgcatttacgcgctggaaaaagtaatttttgccagtgcttttcattttgtgctggcaaaagttctaataccaatgttgatttaccaatatcttttgccaacacatcagtatagtaaattctattttaccagggcaataccaaacttttgccagcacaaaaatgtgctaggaaaagtaatattttttgtagtgatttatcaactagttaaaactttgagataaaagattggttccataaagcagccaaaataaaaactaacacacaaaagtatgttatataaaataaataaataaaaaaaaatagtttatttaattaactaaatcaacaatttctaaattaaaaagcagtttcttgaattgactaaatcaaaaactggttattgaaataaataattcaagaaccagtttctaaaataactaaataaaatactagctacgaaacaaagcaaatagaatacaacacagcctttgcaacttaataccaactcatggttttggtcaatcttcaaatatgttagctagaaaaaaaataaaacaacataaaaaatattaggaatctgttaacattaacaaaaaacataatatacaaagagtaatttgctgcataaatatctaagttttatgccgagtaacagataagtacttaagtcgtatttttggc

SEQ ID NO: 92047 - DNA, 597 bp, Cannabis sativa
aaaaaaaaaaaaaacttatacaatcaatccatatatatatatatagaattttaaattgttttattttttaaaaaatattattattataaaaataagtaaatatgatagtgtaggaataattggagtgttcttcataatgtattatttttatatctcgatctttttaagttattgtcattattaaatctcactcgttatcatcatcatatttcacctgttgtctcaccgtatcttacccattgttatcaccgtaactcacttgcccatattttgtgcaccctactcacctctgttcatgcattgtaaacttttatatgcattttgcttattatatggtttttcaattaataattatcagtttttttgtatatttaatattatttaagactcaaacaaaccacactaatattattattaattactaaaattcataaaaatgaaaaataaaaatggaaacaagagattaacgtgataattcaattgtgttaatatgaaatgcacataatatataaaagaagggatcaaattaccatgtataacatttgatttagtttcctaaaaaaaaatattacacatcaaagaaaaaagaaaaaaaaa

SEQ ID NO: 92048 - DNA, 641 bp, Cannabis sativa
ttgagctatatatatagctcttttcctttgtaatcattttgagataatcaataatactcttaacagagagattcatactctgttttcctcttccgcaactaataacctaaatcaaaattttgacgggaaaacctattaaactcttattctattttgctctgaacactttcatccaaagacctccattaaagtgccatggtagactgtctacgtgtatactaatatacacatgacacattttaagtggtccacataatattaataatttaaatattataatttttaaaaaaattataaaagattttcttttagacgtgacgcattttcctttcttctggctgcgagacccattgccccaaccctaattccgtctcttcttcctctctctttctttctctctcacccttctattgcgcgatggtcgatacggagatgaagcttgtggtgatattgcattgtcatccactccactttgccataaattgaaactgttgatctgatatgggcatcacgtgttgtacgtatgacccagtagcattatactgtcatgcttcttattgaaggactgccacattgatacaacattaggttcttttagtggatttcctaaagatagctagctataaccaattatatcatca

SEQ ID NO: 92049 - DNA, 635 bp, Cannabis sativa
taaagatgttaaataagttgttaataggttaaggggtcgatgtgtttgatccaattatagaaaaaatccatttatgaaaggtttacataaattgtatcttatcgtgtcaattcgtttataaattagtcatgtttggttatcattttttgatacaattattatataataagtcgtgttaatttgtgttgagcatatatctatattaatatatatggatctcgacataacatcaatataaacacaaatggccaccctctacacaaggccactaggtcaccatctcgccaggctgcaagatcaccatctcacgagactttatttaggcttggaaggtccaaaatgttaagtttcccaataattagcaataaaataataaataacttaaaatccgagatgtattgagaaagtaaaacgccagaggtacaccaacattaaaggacatgaacgaacaagacaaatcaaatctacgaccacaccacataacaaggcttcaaatgaggagtgacatcagtgcaagaaggtatacgaaagttgtagcatctcgacgcttctaatagcatgcatgcttgaaacccgactaccactacctttttcgctctattagtatctccagcaaagcctcggatctaatagag

SEQ ID NO: 92050 - DNA, 2898 bp, Cannabis sativa
  modified_base (49)..(65): a, c, t, g, unknown or other
aacacagtaaaaaagtaaaaatttccgcctggcagtatttttgtaaaannnnnnnnnnnnnnnnnataccatgtaaatttcccaaacttgacctgcaccacgctctgggttcgagctgggattatggcccgagactggagatgggattcgagtctaaggctaaagtaaggttggggttaagtttatggtaaatatagtataattttacattatttattaatacaagtctataacaaatatgatattataatataattgtgcacaaaactatacaatataatgcaatacaacagtgtactaaataagccctagatattatgaaaactcttaaccactcgaaaaatttcacttcataatagtattgagcaacatgaggtaatgacatacagtaaattccatctcaaccataaaatgtgttcaagtaaaaaattattacctaataccactttgagtatcatactattattgatgtaatttagaatctcgtaattttaattttataccactcgtaaaatgccacctcatgatagtattgggcaccatttagtcattgtatttacttacacataatcaaaataacttataacgaattttatctccaatcaatttaattaatcaaaatttaatgatagtattttaattttatatcactcgtaagatgtcacctcatgatagtattgagcaccatatagtcattgcttgtactctaatcaggcatttacacataatcgaaataacttataacaaaatctatctctaatcgaattaattaatcaaaaatcaatgtgtttacttattaatccttataaaattaagtaaaacacaccataatgattagtgggaatggaaaaaatataaaatttgaaaaccagaatgtgatactacaaagctcaactatacctacacataatagagattctaataactcatcagttgatgagtggaatgagagtagagtagtagtgtttttcatactattacaacacatgacaataactgtttttttctttactcattaacatctgcaaaaggagttctgataggcgaaaatggcggtagaagcagacaagggatcttgctttctgttgtgttgttctttttgttgttctttatattgcttctcatctcttctattgatttcaagctcgggatttctaccacgcgtttcttaggcgtctcgttactatgatcatcaatctgcagttcacaacaatcatgtcattatcaaattatttcaatatgatgcaaaaattggttgaaattgaaacttctcaacttaccatataatctttggtaagacatttctctgtttgactttgaatattcaatatgccttgcccatgattctcttcaattgaattgagttggtatatacacaaggctgtcattgaatctatttccttcttattttcctcgtcttgattgagcgaatctgcccgagttttcttttgagttagattgatttttggaaaagaaaattgtattacaaagtaactcagtaattaccattaatagttgtcaatgtatcagatgctctggtgttgaattcttcatcaacagtttgagatgctgaaacgaattctttgtgtgcaacgatattcgcagatatgtttttgctattaaagaaatgaacactaaatttagaaaatatttaacacaagaacaagaacaaccaacattaaaaaatttggtgtaaagaagacttacttcacagtagatcctatctctgctaaattgttcttgttaagattgcttatggatgattgagtgttctcccattgttgccttgaatcatccactctctttgaactgaatacccaaaatgaaagaacggaagttttagtatctaaagtgttcattggaccacaacattcaatgtttttaggcctatctagatccgatccaattatatattggaggttagattttaccatccgatccgatccaattaatttcattcatctgaccgatccaacatataatcgaatccatctaataaaatctaacatccaatatataattggatatagtattaagtataataacataaaatttaattacttatccaattgaatattcaagataatatccaatctgatccgcttataattggatatttaatgtttggtggttggttgtagttggattggatcgatttatgcatacccctaatctgaagtttgtgaaaattgaccaaataacatgtgtaaaaattgataatttacttacctatggtgcaggctatttttcataaaggttgtatgttcagcaaccgaaaatgtgtcttccatgtaacgagtttccgacttttccaagaattcggtaacttcctttctagcacaaaccgaaacttgttccatgttcaacatctcttccaccaatctagtgttctcctgtttattcgagtccaagatttctctagatgcttctgaaacctgaatacattatgtgcatgagttttaaggcaaaaccgctttataatcttaaaatcaagaagcaaagaaagatacttaccatagcaacttttttcgatgttacagttgctaatatggctgcaatattttccaaagctgatctttcctctctagcagcctcttccttaaacatcctctcgaaattaactaattggcgggatctttcattgtagctttcttctataaatttaccaacttgagaagcacggttatggaggtcgttgaaaaagttcatacttgcacttgaaatgacttgtgctgcaatcaaacttcgtttcagtccctcctcctgttgtttcgtcgaaaattccaatatttgttgctgctcacttagagacttttgcatgtcattcaacacctgctcggcatccataaccatagtggcaaggaactgcaaagagtagacaaagattgatttacaagc

SEQ ID NO: 92051 - DNA, 3873 bp, Cannabis sativa
ctaaaaggcaccagtgatgcctaatacattcctacgtgtcaatatcgctattggtttaattaagtatcgggtcctatatcttttagggaatatcgctagccaatcgcaacgcaataagtcgagaagttgctagacaccactggtgcctaatagcaatactcattctgcatctttaatctcatccactaacattaaccacatttatttttgaacattaaaattaatcacattcattcacggttaatatagtttttttttaaagggcaaaaagaaaagaaaatgatttgttatcccaagtctcaaaatagatttgcaagtctactcataaaattaaaaaggttgaaaggactaatatgtaattccattatttatttttctatgtttagctgtgtctttgaaattgaatgcatttactctaaatcattattaatcattaaaatctaatggtgtaatctgaaatctgatacatgtgaatttaaatctcatgactaaatattccataattatcttccattttaagattcaatttcaacggaagaaaacatacgaaatttcccagaacatcacctttgcttttccaacctctttccttgatttctccgacatttttaaatcacccaaaataaaatataaaaatccattttttttttatttaatttgatttgttgtttgtggtcttaaagaaggaagagtctcttttactgtttctttcttcttctctttcatctcttttggggtgatttttaaggctaacatccattcaatgtgagtttttctttattttttttattgggatttgattcaatcttggtgggctttggctgcaattaatgaattttcaagttagaatctttggtttgtttttttttttcctacaatggaaagaaatggattgtgatcttgggttgtatttgtttattgttattatatatattttggatctaaaagttggttcttgttgaatttgatgcagtttggttcaaaccagagatatctctttgtgaagttaagactattttaattgaatttgaataagaaaagtaggcattaatggagttagcaaatggggggtcaatccatggaagagaaacagaagaagacatggatagagagacctcagcagacactccattgagagagccttctcctctataccattctcattatgctggtactgttagacagagagcttatatatttgatggttcaggaaatttttacaataaagaatgggatcttgctgaagggagaggtgaagagttttgttggtaccatgttgagcttccaaaagggagtcagaaactctctcaatctgctcagtatctcattggtgttctttgcccaccattgaaactccaagacattctttcactcattagcaatggacccttttgtggacatgttgatggagctcttgtgtttagagttaactcacctggtcctgcttctagtgattttacctttaggattgctgctaggattactgagaattcggttattactgtttcgttggggcgtgttcctagattgggattttctaggatgggccagtctttgctctctgagattcctagtgtggagagtccaacttattatagaggtcagcaaaaggaagggagtggaacagtgataagagagcatgttcttgagttcttgttgactatgaatcattctgaagaggctgacaatcctgtccccaaatctgtctcaaatcttgtggttcatatcattgacactcatgtggatcaacttcaagatatggtgactaaacttgagattgatttagatgctgttgagcttgagttggataaaggtactttaacacttgtacacataattttttaagctctttaactgcaaatatttcactataattaatatgttaggaaggtgataatcatttaaggagggctacatttgcaaatttaatcttcataatgtgtacaatggcagttggttagaactttagatcaaaatatcttcttgtatatcttcttcatataagtcctgatataaatgacttggctttgttaaaacttgttcatccttccaaccattattatcaaaatagaaactactttaaatgaaaccaaaggaagaaatgttgacagaaagttggaattctgatatagtagaccttaaagtccttatggaaagctagtccttctacttgactcattctcattctttcattaaattaaccaaattaaatgaataagaatgagttatatgacagtatgtgtttgtgcttgacattgttgacaatgctggaaaacttgattgaatatgaaaatgggctgttatgtatttttgaaaaacttgattagaaagaaatgttttgctatcatcattgactcgaactgaattctgttggatttccttggaatcaaagtaagcaaagttttcttgtaatttcaggtggttttgctctaaagaaacaaatgctagatgatagaagattccccaaaatgcatcttaatctgcagcgccttctgcaggtaattcttaggccttgtatcatttcaatggctggatatgaaagaacagtcatgagtgtttctgaatagcataataatcggtgtattggtagccaaatggtgcttttaattctactttctcaggtaattgcacatggagagcaagtatttccccgagtcaaagaaaaatctacatcgaaacgttggttttgcagtgaagacattgttgcccttgaagagttaattggacggttaaggagactaaaggaaaatgtaggattcatagccaatcgtgttactgctcttcaggccggtctagatagctggcaagccgagcaaatcaacagaaagctctattatctttcattcctctcaataattttccttccattgtctgtcattacaggaggtattattagttctctacaagtgttttagttagtagaattctgttccatttcaagctgaggcttttgacaccagcccactttcttcggttactttcttgcagtgtttggcatgaatgttggaggtgttccatggactggacagagagatcctagaattaaagatggttttcgtaatgtaatgatactctgtgtagctatgctatttcttgttcttctttgcttcattttcccatatctttattcccggatagctgcatggagtaggagtagggccatgaagaaaagttggtctctaaatagaagatcattcctcaaaagaaccattggtggtagcggtgtatctcaggaaagaggcggttaccttaggctttgattaacagttgaaaattccatattctcatggtatgttcattctcttctgttcctcatattgtcatatagttataatacaaatgtttatcatctctttctttactttcccaggaacttttccgaaatttcaacagattagtttgattaaacgaacgccagtggatggtaactcgttcaatggaaccgttgattttttccctctaaactagaacaccctttgtctgaatttgataaagcaatggggggttttaatttgaggtgagccaattctttcaccgaatttgtctcgaataagaatagctcagttccttttcatttttagaaatcttcttgtaactttgtacagatcttaaatttcgagttgtattctgttctgtcctccaagtgttgtgaaatactagagtccagttgttaaggtgtaccatcaatttatttgtagtacaaatttgtatattctgaaagatcaacacaaagcataatgttttctttccttttctttttcattattattagatgaaacttcaacttcaacttcaaccccttaactaatgtatcttgtggactaacattgaagacttcagagaaatgtgcacacactattcatttcaaacgtt

SEQ ID NO: 92052 - DNA, 586 bp, Cannabis sativa
aataaccattctcttagagaggagtgccctaatcggaagcgcatccgagagaatgctccaccatagtactttatggcactccaagatctttgaattccacagcttgttccataaagacggagcaacactacacaaaggggcccgacccaaggcttggatgagataagctgacttaggtgagaaaaaaccattagattccttagtccagacccaactatccctaccttggccgtttggtttaccgaccctcaagatattttgtttccctgtcaaagagatcattaagcttccggatgtcccaattcccatcaggagcaattaaatctgccgccagatcgggcattccttgggggttgttcttgggtctagggtaaaactcagacccatgtataatccaggggtcatcccagatccttgtatccctcccattggtaataagtttgcacgcccctttctttaacatctctttagaacgcaccacattcctccagaacaaggaatctaagctcttgaccgtacagtcaaaaaattgtctaccccgaaggtatttagctcttagcaccttgttgttggaatttattttacc

SEQ ID NO: 92053 - DNA, 1096 bp, Cannabis sativa
taaaggatatttattcttgatagtaagcttattcagttctcgatagtcgatacacattcgaagtgacctgtctttctttttcatgaacaacagtagagcaccccagggagaatagctcggtcttataaatcccaagttattaactcctagagttggatctttaactctttcaattttgctggaggcattcaatacggtgcctttgatactggttctgctcctgaaactaactatatcacaaactcaatctcttgggaaggtggtaatccagttaagtcctctagaaatacatctagaaattcgcacaccagtcttatattttcaggtccaaatgacataggttggctagtatccactgtagttactaagaatcccagacaacctttacgcattagatctttagcttttaagagtgttattctaggtatgtgcgatccttgtactttacccacgaacaccgctgggttggtactgtcgggttcaaacaccaacattttttgttttacagtcaattgttgcctcgtatttagacaagaagtccattcctaggattatatcaaaatcagacaattgtagctcaattaggttagcggttaactcacaatcgtcaatctaaaaagacaaagacctaatccaccgagtagatacgattaggtctcccgagggtaacagggttccaaaccctgaagcatacacatcacacggtttatgaaaactttctattactctactcaatacataagagtgagtagctcttgaatcaaatagacaactgacgtgccaccactaacgaactaacatctgcgttagcctgagtcatagtgaacagatgccccgggttttggttatttttcttcttttcttcgtccttcttagcctgtggatagtctctgataaagtggcccaccataccacactggaaacaagtctcagcccgacactcaccctgatggtgcttcttgcatttgggacactcttggtaagatctgaatgtagacccgcgaccttgacgaccgcatctgtttccctaaaactttctattacctctcggtgttccagaagcttcaaccttccgtttgtgatccgggttaccact

SEQ ID NO: 92054 - DNA, 817 bp, Cannabis sativa
caatgggctaatgttaagagtttcgacatacactacataccacacacgtctataaaaggacaagcactggcggacttcataacagagtgcaatgaaacagaagccagcgcaaacgtaccggtgccaccaaccccagtatggaaagtattcgtggacggagcgtccaacgaaaacagattaggagatggggtagcgatgatatctccgaacgggctctgactctaggcggccctacgtttcgaattcacggcttccaataatgaggctgaatacgaggccctaatttcgggactgagattagcaaaagctgtaggtgccacgagagtagaagtcttcagtgattcatagttggtggtaaaccaagtgtcgggagaatatcaaacgtgtggagaaaaaatggtcgcgtatgtagcaattgtccgggagctgctccacgagttcacggactacaaaatggaaagaatccccagaaaaaagaatgcccacgaagactatttggctaagttagcttcacacagcgagattgagaaactaggggtagtgcccgttgaacgcctcacggaaccaagcattaaagccaaaaatattatcgcaacagttgagccagagcccaactggatgatccccatcatcaaatacataaccaaaggtgagttgccccaagaaagggcactgtccagaaggatacagtaccaagcgcaccgttatatgatgacggataacaatctctaccgaagaggactcaacatgccgtacctaaggtgtgtatcagaccttgaagctaagcaaattatgctagaggtccatgaggggttct

SEQ ID NO: 92055 - DNA, 655 bp, Cannabis sativa
gctgagttgtcattgaccaaaataacatgctcttttaaggttgattgctgattcccaaaatcacgtgatagagaattaaaacgtgatattggttgtctatcatgaggatcacaattatctgcattaattcccctaatatccattggagcattaaacattggagatgctgatgtcgtctgtctcgctggatcttgacctcccttgcctgaccgcagccatggagaggcagtcaagaaactctaccgccttgtcggagccttcatctctatactgtatggtttcacaatgttctcgatgggggtatcgtatattctctcacagaaacgttcagcatgtcccataacaccacaaatgaaacaaaaggtcggaactctttcgtatttgaaatatgcataaaaagcttctccacttcggctgcgaaacttcattcgtcttttcaatggatcattaacactcactctaactcgaacccttagatagtcacgccatacgccttgaaaattattaggatcggactcaacgtattgcccaatatagcgagccgcttctcgaattgcccattcaggttgaaagccagttctcagatcatggatttgaacccacatgtccaacgtatttatagcaatcgtcctaggatttccacctggtttaagcc

SEQ ID NO: 92056 - DNA, 625 bp, Cannabis sativa
  modified_base (28)..(59): a, c, t, g, unknown or other
ttgtttttcaaaaataaattttttaaannnnnnnnnnnnnnnnnnnnnnnnnnnnnnnnaaattaaaaaacaaaagtattaccaaacgacaccaattattgtcttaattgaaatataactttttttctttctctgttacattctgcaggacaatgagaacaagagattccataggttagatagtccacattcaaattataatcattgaacacaaactgaattgaacaatcttcgaagattcaatttacacacaaaattaaattcaaacataagcaatcataatcacaaacataaagaaaggtaatgcaagaaagaagaagtgaacacacataaattttcccgaggtccccaatcataggattatgtcctgttgaactcgccatagaactggattgctcttgcactatataatcaatcttagattacaacaatatcgtggaaatttcaagtcacacactgactagctagtaatttcaagatccggcctctctctcaatctttcttttacaaattgtttctctcacttgagaattcttctctcttgaatttcttagagcttaattttgctcaatctccgatcattataaaagacattaattcattgttaaactaaaatggacatata

SEQ ID NO: 92057 - DNA, 538 bp, Cannabis sativa
ttatagatggaggaagctaagaaacatgtgaaacaacctcatattaacaaattactatcccaaatatataaatatatatatacgattaaacctgaaaaagtcttaccgtatgcaattaaggaaaacgaaaagaaattacatgaaatgggcatgtaattatgaccagaaaaaaaaagaagaaaaaagtaaactttatacctctgaagataggatttgtaggaagcgagagaagggtttgatttgtagcgagtgatgaattgctccaattctgccaatttcacaaaatatgtgtcgtttgcgagggagaagatgtgtcgttgttggggagggaggagctgtgttgtcgttgggggagggaggagttgtgtcgcttctgtcgttggtgaagatgttgtcggcaacttagggaggagatggccgtcgttgtcagcgagtagggaagaagatgtggtcgtctccgtcatcgtcaaattgttgtgcagcgaatcaccatcgtcactctctgcgcagtgggcaggtttggcggcttcaatgaggg

SEQ ID NO: 92058 - DNA, 501 bp, Cannabis sativa
attaaatataatttaattaattgaatgttaactactataaatataagcctaatttgaagaatcggaacacttattttttctatactatttacaaatacacttagagagaagagaaattatttttatctcaagaacagttcttccttatgtgttgagaattcaataagaacaaattatacactttatcctagtagcccacactactccttgtgttgtgtgtggtggatcgaatcggaagattggattcaacttacgagaagttttgagaataccctgatagtcatcaagagatatttatttcttttatataatttatatttcagatttaatgtttatacatacagtgatcctttaagatataatacaatgataatcagattacaataaatatttgtagcgtatgtatatttagtatataaagtgttctatgtaccaagaatctgagttggatctaactaagtccaggtgttagctggcatctctcctattaactaccataaa

SEQ ID NO: 92059 - DNA, 524 bp, Cannabis sativa
ttgttttttttttttttttatcaactactttttacaattctcttcagaaacttagtatgtttatcatcaagtggagatcactaaatacaaaatcaaataattacagggccggacttgacccattaatgttcaactatatttatatttaaaaattactcaatgaaataaaaatacaaacacaaataaattcgaaatcaaaattaacaaaaccgaagaataacatataacaatatataaatatatataataccgaagagatagatgtacgaaggagaggtaggcagtcagcgaagcgagctaaggttcgttgacgccttggcgtagggctgaacttatgctgaaaaaagagagatataagagagaaacgagaaacccatgatatttacagaaaatagaatcttgttggggttttttgtcgaaacccatcaaagaagagacttaccgatgggaagataagagacttactgttggagttttctttgaatcctgtaggatttttgtagaataattgccacggtccgacg

SEQ ID NO: 92060 - DNA, 1004 bp, Cannabis sativa
aaaataaaaatgtgaggggctaaaattttctctagccattatatgagtccgctagtgtttatactctgttttcttattaataatatataaaatatattttaaatattttaaaaaaatatattattataattatacagtatatattataaagtactttaaaaataaaaataaaatatttatataattattgtttattaaagtattcaaataaaaaagaatttaacataaaaaaataaattaaagtatgtcacataaataaaaattaataaatgtcaatatctggagacttaatgttactaaagaaataagagtttgggggatcactttgttaaaaaataaagtttagagactaagttgccaaaatttatatagtttggagaccaatttcccaaaaaaacaaaatttagggactaacttactaaaaattatatagtttaaggatctatggtacaagccttttttttttttactctttagtgagaaagaaactaagaaaggaaagaagatacataaaatgtataatattgtagaatagaaatttttacatcaaaaatataaattgatattttatttacaaaaatacctctataaggtgtgggtaacaattttatttgtaatgagttttatgtaccaaaataccacttacacatatccatttatttcagcccaaatatcaactttgccttttttatttttctcttttttctttcatttttcattttcaaatttagcattcagtttctttttctttctcagtttttcatttcaaaactaccttccaatcattaccctttcgaaatccacgttcaaaactcacgaaaaccacctcccatcaataacatttaccatcttcttcttccaactgtatcctttatcatttttttttttattatttttcatttcatatatataatggtgattacctgtggctctgcttctccatctctattgcaaaaaaaaaaaaaaaatcttcaaaaataggtcataaatcagttgctaacaag

SEQ ID NO: 92061 - DNA, 801 bp, Cannabis sativa
gtcttgtctctgtgacatgattttgagtgttttagtcttatctatgtgacataattttaagtgttttagtcttgtttgtgtgacatgtttttgttttgttttgtttcgtttcattgttggctcttctttgttattcgacaactcgccatcaaatcgttgttattggttggaaataacaagttctctatgtctgaaggggttgttagtagtgcaactacttaccttgcataacagtgttgttgtatattctgagtggtagatgaaacttaatatacgtgttcttaagattatctatgatgctgcaatctttttgatattattttatttttaatttttttgtcaaacaatctgagaattaagcgactgattatttgattcgttattctaattctaattctgatcatgtttttaatagagagatgtctcgattaaattacatattattttacttgattattattaaattgtataatttattcaaaaaatctatataaatttttattttgaaaaataaaacaaaataaataaagatataaaaaaagaaaactttgtataacttaatatatttgtgtttataataatcaaattataatattattataattatcattaaaattttaaatgacatgtttagtttagtgtaatgggaattataatgcaatcattattatcattacattgtttgttttcaatcttaaatctttgtaatgactttatattgtaatggtcattacattatgtattgtaatccccatcaatatatcaatataaaggaaagaataagagagattatgtggcaac

SEQ ID NO: 92062 - DNA, 547 bp, Cannabis sativa
ctctctctctctctctgtatttgatgagttcaaacaaaatcttgaaaaaaaaggcttgaattttagtgtgaattttgtgtattctcttggttggagcttgaagaacttaaggtagctttctttaatctctttggcttactttaatttccggatttagatttgataatggagttttatgtgttcttgcgtttgtgtttgcatgttgacaggaattgagttatttatggtgactattgtatgaatttactatagtttatatgctcgattcatcaatatagtcttgggatttatggattggattttgatattgaatttctagtgaaaagactttgagtttttaggtttctagcttgatgatttatgtgccataattgtgtttgtggatttattttgagctattttgttgaactcaatttcttactaatattatattggttattgttaggctaaaattagtctaagtttcgggacgtattttcggttagttttcactctttgtttctagttttaggactatttttacgcttgattcttttgtgtcaggtcc

SEQ ID NO: 92063 - DNA, 549 bp, Cannabis sativa
gggttaattgttaatttatctaacataaactataatagttgatgtcaatgtttatttggttgtttttatttatatttataaatttcttacataatggtcaatgtttttttttttttcacataatggtcaatttttgaatagttttgttgaatgattttttattattattattattacatcaagtgcacaagtgtgcagtgacaacatagactttagatatagagatataacacattacaaagaaatacttattttatatatatgagaagaattacaacaagataaaactaatgtctaaatgaacgagagaattctttttttttttttagttatatatgtgtattttgactattcacttattaatttaacatattaaataatacttttagtttattattttgaaaatatacgtcgggttcaccagtttgtatacttaattacttttcaaaaattatatgagaaattcatacgttaaaatttaactaggtgaatgtacgtaccgagccacgtattgctagttttatttaagattttggtctttttaagatt

SEQ ID NO: 92064 - DNA, 1683 bp, Cannabis sativa
  modified_base (358)..(360): a, c, t, g, unknown or other
aaccatatttttaactttattattatttattttatattttaaattgaaatggttgtaataaagaattgattgctttccgttttagttgtagtaaaccgatttacgcaccatatttttcataaaatttgggaataaaaaatttttatatcaaatttacgaattcagcctatatataaatacactcaaatttagttatttgagttttggttaagattatggtaaattacaatatatgcattattagatatgttacctaattaaaaaaaatttaaaaattttaaaagtcactacaaaaaactgctacctttcgtgacaactttttagtcacaacatgatttttttgtgactaaatgtgacnnntagtcacaacaaaaaattatttgtgactaaaacatactatttagacacaagttgtgccactaatttagttttagtcacaacaagtattgtgactaaaaatacatttagtcacaacaaattttaatttttgtgactaatagctttagtcacggaccttttagtcacaatataagataataatttatatttagtcacaacttttttacttttagtcacaaattttgttgactaaaagtaagattttttgtaatgagtacgtatatatataatcatattcaaatgatacaccaatgcagcaatagctgttttttttttcttaaagatcaaaatctcaaatcccatttaaaaattaaaaaaatacattacctaattaaaaaaaaattaaacatgtattgcacttaacatcaactaattgaaccaaataaaaaaaaaaaaaactaattatacgtgcattgcacgtaacatcaacctagtttatagatagatatataaattatttaaaaaaatcagaaaaataataaaatttctactataattataatgtatattgttatttaaaaaaattaaaattttttaagaagttctaaataaaaaaataattactgcatccattttccctatatgatgaaaagaaaagtgtggatgatttgtggtttgtagtacctttttttcagtgtacatatcttcaacccataataaagttttaaactacatcgatatggaactcaatgctgtccccgaccactacggcactaccataaaagtttctaaattaaattgcttgcatccattatagtcatggaaataaattttcttaatgcataaatttgtgtttttctctttctttctttcataaaagcatgtcaatataagggctactatgaccccacaccaaatccaatgtattattcataaataaacatgtcatgtgttctttaatatatttacgactgatatcatcttatttaggtaaactctattatgcctaacatcctataataacatggatctcaattaaaaaaaaaaccctaaggtcatgtttggtttggtagaatagttaggtaattataatggtaatagtaataaagtaaaataagaactataatatgaattaattacgatgtttgatttgttgttggaattagagctcgaaagaatttgtgaagggggcaaagtgaaaaaatgataatggggtaagttggaaaataccactttgtttaatcaattaatcaaatttatctctaattttatatttaattgaaacataactctttttatatgtattgtacccaaaatacgctgacataagagagtcacatggag

SEQ ID NO: 92065 - DNA, 806 bp, Cannabis sativa
cctgtgatccgttttttgatccagcaacatcaacataacaatccacttcattatccacctttgattgagccttatccccactgattgccaccttttctttccccatacgtcttctcttatgatcaatgataagaagcaaatcatcctcatttaaatcagctacattacctcctttgatttggctttgaccctccccaatatcctgtccatgatccactcctccatctttaatgacatcatcttgattctttcctaaaatcatgggatcgtgattgtcttcatcatcatgacgatcaacttccataattttaggcgagtaagacgcttcacatccggcaccagaagctcgtgaaacaccacctcccccgacagctccactagcctcattcctcgtctgtaaccactgtgctccgatcaagtaattcttttttttttcatctgcgccttcattccaatcccatatggcttaggcaattgatctacaggctgatcaaaacgcttaggacagaaacgttctgaatgacctatgattccacacacaaaataaaaagttgggagatgttcgtatttgaaattagcccaaatccattcaccattttccttgcaaagcttcattctctgttttaatggtttattaacatcaatggttgctctcacctggagataatctctccatattccattgaagttctttgggtcagacttggcatatccaccaatatattcaccagcactcttgaccaccctctctaacataaaaccagactttagatcgtgaagctgaacccaaaaatccattttgtgta

SEQ ID NO: 92066 - DNA, 605 bp, Cannabis sativa
ataaatatttagtactgtcaaaagttcagataaaaattaagtcctacacaaagtgataattttatttctatgacagacaagtatggatgaaatccacaattgccacagcgattttaatcaaaaaatttagaggaagagaataagtgagaagaatcattttgagctaagatctatatgtaaatatatagatagatatatgtatactttaattaacttcataaatagacatatcaccttcatgttataaagatttttgttggagaaacagaataacagaacaaatatctattaaagatacatgaaatttggaattatttaatcgaactcaaaaccaggttttaaattatcttgtcaaagtaatattcatgaaacctacaatatatcagatagagcaaacacaactaaaattccacattcaaccagtaaaataagtacaatgcaatcaccatagaatctctctatacacaaacaccaccctcgatcgaatttattccaaagcaaacactcacacacacatatatatacacacattatataacaacacattaattccacacagaattttttaaaaataaaagggtttggtttttaagagacggaagcag

SEQ ID NO: 92067 - DNA, 503 bp, Cannabis sativa
ataaggggccatcttgatagttgactgataactattattataagaaagctcgatcaagggaaggtactttacccaagatccctagaaatccaacacacattcccgaagcatgtcttctaagatcttaattgttcttttagattatccatctgtctgaggatggaacgtcgtgctgaatttcaactgtgtacccacgacttgttgtaatctgttccagaatcttaatgtgaactttggatctctatcaaacactatagactttggagcaccgtgaagacaaactatttctttaacatataactcatcatattgatcaatggagaaattcgttcgtataggaaaaaagtgagctgactttcgtgtgttggtaagtttattaagttgatcacaccgcacgtgcagattatatatgtacctggaaagttgttagatgtcactgaggctacaggaatacaagccacccaaattagaccgactaacaaaaaaaaaaactatggaaagaa

SEQ ID NO: 92068 - DNA, 1044 bp, Cannabis sativa
agaagtagccttcgtgtactcaaatattcgaagcactttatccatagatagcatccgtaagataatggacaccttcagggtgcgtgccacaaatgatcttattcttcgtagcacttggcaggatgagtttgcttttgtcccccaccgagggggagttgcctttagtaggcacatcatggcggcttgtgccactttgcctttacacccactttttgtcgatgtcttggcatattttggtctggcacctctccaactttccccatggcctatgcgatcttgttgtgctttgatattgccttcaaaggggtgaacggttgcctccccaccgccaatgagttccaatctgtcttcaacatccaccatacacataaatctcctcgaacctatcacttctcgaagctcccctagaatgtcttcaaagatcccattttagccttcagagttttttattgtcaacgggatgcctactggcatgtattctgggttcaaggttccaggtatgggttgtgttggataccactttcttcctttttttcttgttgcatactcgcaaattttttctcctaactcgctctttcacctttgtcttcctagtcaccaaaggaatccctgttttgagcaatgagtaagtgcattgcaaaaatattttgacctttccgagaacgcgagggctaccaagaatctcctagcttcgcgatgcctaaaaaaatggccttacagacattctacttcctgcaggggctctcattttaattacagagctcctttctcgaggggatggtgcctattctcccaatgtccctcatgggtcctccgctgactcgcggtgcaaagatgacaacactgaagaaatcgtgacccctacatcaatcgcggctattcgacacgagggggttatccttaagagcggcccttgcttgaagcctcgttgcatcgaagaaaggtgtacctccttcctgcacttctgacaatcccgctctagaagccagcccatctctcctttccaagctcaaaaagggcctgactaccaagcatatcattggc

SEQ ID NO: 92069 - DNA, 1042 bp, Cannabis sativa
ctcacccacaatctagattacatgtaacgtaccaaacaacagtactagacttcctaacgaagtagtcgaaccctttcttcattgcttggaagccaacaaccatcttcaaatattttttgtctctaaaaaactttactagatgtaactccccacttggtatgtcacccatagatgtataatgactattatcctcgatgtcttctcttgtaaatattttctcattgaatttactgtaacttgtcaaagaagaaaatggatcactatatctagaattattggtccctctagcatcactaggatctctaccattagtggtccctctagcatcaccggttcttctagcatcactacgatctctagcatcagtggttcatctagcattactagttccatctaaacgactactactagtaccaagtgtttggtgatcttctctacggggttttcttctatgtgtttcttgcctaagtatttggtacaataatagagtcatgttcaaagctacagtagtagggacctctgtatctcggtcatctcttatatcattattacctctaaaatttcattcaaggtctggatcatcaccaaatcattatgaaagggcatttgtgctacaatatcaactgtcagcatcatattgtttaattcaagtaacacatcaaccgccaacacctccagatttgtttttggaacgaaacttccaacctcgctacgagtatccttaacagtacttggtgtgggactaggatcgatagagaaattcttcttcaccaaagtcacaaacaagggaataaattcatctggcttctttgcaagcatagagaaaaataaccttagatgcttatcatttctaataacttcagggcgatacattaaccctttcatgaacttgtaattcacttctaattttaagtcatactgcactttgtcaacatcgagttcttcatacaaaagatcaaccaaacgtgagtaggttacgttcgtatcaatctcgaatgttaaatttttagctcgggtataaactcaatctctacccttaagc

SEQ ID NO: 92070 - DNA, 710 bp, Cannabis sativa
ataattttttgattaaaaacctatttgacgggaaacaaaaatcaaaaattataaatgagatataactcataactcgcgtgtgaagctgaatactaacagctagcactaaaggaaagtattaagcaagacatcaaggtgtcttcaaaaaaattacttaaacctagcacatcggaataggatctaactattcatctaagcaataaaaatttataaaaaaaaagtgacaaggtcattgaaaatatattcaagtttgcttgaaacagattaatctaactgattattgggaggcgaaatcaatgactgctcgcaaatcgagtgcatggcagatgataaactgctcgcgagtaaagtaggcttttaactacttaatgtcaaagggatatacgagcaatggaaacccctaaaatactttctgtatgttcaaaatatgattgtttaaattgtaaataaaacgcaagcaaacaagcacatgtcaaagttcaaacataaaagtacgaggcattaaaagataaagtaaaaagcaaagttgcccatccaacttcacaaatttgtctttacaaaaagtgccacaaggggcaaaccattgtcttggctctaaagccatttccatacaaaaaaagagaagaaagagataaataaaaaccaagcctacattgtaggagacttggatggatcttcttctaccactacctcggcctcttcctcctcct

SEQ ID NO: 92071 - DNA, 728 bp, Cannabis sativa
ttttattattattacataagaaaaattagaaaaaaccacaaatttaaaaaattagaatcctaaaatattaaactgtcacattattgtgcttaacaacataattgtgttgttaggataggtgaggtggagttctaacttttcaagaaaccaatttttttttctcaatatttcactattttatttatttttctctattaattcatactcccattaattcttagtgtcttttaattgacatatgaaaaaattattatattattaaaaaaaaaagtattttcagttaccaaatgtaattattgtgatcatatgtaattattatgatcatgactattaattttatttagttacaaaataaatatgaagagtaaataatgagaaatattatatacatataagttatctatacataatgtatattaatgtaatatatgagttacaatttataaatgagaaagttgaaaagacataaacacatagtaaatgaatgaatgtatatatattcctatcatatactacatctgcagatgatttaaaattgttagcatttctattcttaagttacaaaaaagattgttatatcaatcacatctaatttacttttactatttcttcctcccaaacattttttatgtttttgttcttcactctctcatcaagacctcacaacatcatattttttaattatattattacaatatagaatgagattatcacaacgatctaatgta

SEQ ID NO: 92072 - DNA, 725 bp, Cannabis sativa
gcttttcctttacctacacgaggtagcaaactgatgagtcaacagactcagtaagataagcaagacatatatatataagtaatgcaatgccgactttgtgtttaaaacgtcctgagctcaatgattgagctcaccaaatggataagaacgttcttaagggaagtacaacctctataccaaatgcactacagtaccaaccctgtactcgtgttggtagagtcattattgtactcccaggaattactaagtgttgtaccacatgcacgacctgccctctggtactcgtgttgataacactgtaaccctactaattatctacactgtactaacattcttaaaacacatacatattagtgttagttgtacaaacatacaaataagcattcattcacatatatgtaatatttatgctatcttacctcgctccgtgctcaggggtgccggtcagcctgactggaagtgtagctcgacgctttacagggccctaaaccataatatttaaaattcaatgagagacacgctaaaacatctattggggatctaaaattaaaactaaggataaccctatcgataaataggatgcaaacaccctaaattacataacaatgggaaaaactagggctcgggaaaaaaccgcaatcagtagaccggttcccaaccggaagtccggttcctggtaccaaccggtcgaccggttgctacaggcccccaggaactggaattct

SEQ ID NO: 92073 - DNA, 759 bp, Cannabis sativa
ccattaatttatttaagtttgtagtgttcctaaaaaattgtagtatttggtgtggtatgtccataattgagacgtttaaaatattttttccttttgtcttttttgattgtattgtctttaaattttttgaatcaaattagggttcaaataatttattacatgtaggcaccatatattataagtgcatttggtaatatttttttaattagttttttatttttaaaattaataaagtgaaaatatttctaaaatcatgttttataaatctgttttcactttttaattttttagttgaaaatcattttttttttttttaaaaaaaacacttttaatttttttttaaataattttttattcttaatcaatattttggacttcaacccaacatagaccttggaactcagacccgaacttaaaaccccatctcagacccgaaaccgaatcacagaccccgacctcgacccgaaccgtaaaaatgcaaaaaaaaataatatttagaagtgtaaaaataaaaaagacccattaatttatttaagtttgtagggttcctaaaaaattgcaatatttggtgtggcatgtccctaattgagacgtctaaaatattttttccttttgtcttttttgattgtattgttatattgtttgaatcaaatcagggctcaaataatttattacatgtaggcaccataaattatgagtgcgtttggtaatattttttaggctaattagtaattttcccccccaaactttgacatgtac

SEQ ID NO: 92074 - DNA, 790 bp, Cannabis sativa
acaaatatacctaactatgaataaaaaatagagaaattactttatatattattttttaattgttttttcaaatttaatatttgagttgttctggtaattctatgtgggttgctatgtggattttggctgcaattttggttgctccgttagtgtctatggaggtttctatgtggaattccgtaaaaatgtaaaaaaaaaaaaaatgttttaaagtgtgaaaagaaaaaaattcttaaaaaataattacatattttaacaatgacaatttattaaattttagcattttattatcttttctagacttgtaagtaaaataaaataattttgattttatcttttcttttcaagtatatatttacatatatatatatatattgcaaaaataaccttcattaaaatcaaattagtgttgggttcgcctattattgttgagcttggaccatttaagggtttaaggcccaattttatttggaacaattaaaagaaaaaaaaaaaaggaaagggactgtaggcaataggcatagtgagcagcaggcagccaaagaaaaagagaggaaaagaagaaaaagaaagaggttttgccactttgcattgaagattaagtggttgattctcatccattttagttcaaattttgggtgcaaggtgctcttcaaatctaccagtttctatttggcgattgtcctctctaaggtgattttctataatactcacttggtgagacccaaactttttctatttgtgtatccatcttttgagatgatgatgatgattgtattggtgatccaag

SEQ ID NO: 92075 - DNA, 535 bp, Cannabis sativa
tattggaacctatgggcctccggcatatggggaaaatgaagctttttggaagaatatgggggatttcattgatcagtgcaaccttcctataatccttttgggtgatcttaatggaactctaagagatagggaatgcctgaactatgcaaattcatctagcccaacacgctactcttttgatttgagacgaatggttcatcacattggattaattgatttgggttatcttggggtcaaatacacttggttcaagaaaagtgttgatcctttggggggatcttctctcaagagagcgcgtctcgatcgtgcactagcttctacggattggagaatagcgtggtcgaatgcagttttatctcaccttacagcctcctcttcagaccataatcccattcttttggatactttaggaggaaaacactgcactaagccccaattcaaatacgaaatgatgtgggaaagagaccaacatctgttctgggtggttaaaagagcatgtcttgagacatctcatgaccacccgatggttaacttg

SEQ ID NO: 92076 - DNA, 644 bp, Cannabis sativa
ttctcctcttcgagttgatcggctatgggttctagatcgcctcaaagtcacacttgcttcttcacgctctgttctttcctcccgagagcggtttgttgtattttcctcatcagggtatgtacgagtccttgctctatgggtttgggaagaacgttggtgattcctagcaggtgatctctgttctcctagcaaagttccaagatcctcctcattttcatgagggatttcttgttcatcagtctttggttgtctccattctggctattcatcctgattctcagggggtgtctcattttccctgggttgttcttcccgagccttttcctatctcttggttcgtgggccacgaggtctgtctcgtggtcttcttactccaggttcatgttgatttttagtgttcgtcccctgcaccgccctggccgaagctgcctctcgttctaacttagcatttcgacgttgcgcctcttccagactgcgtctcaggcggcggatttttgtttcataagttttttctcccacagactaggcaccttcacggttgagctcttcatccctcgtcccgagattctgaccattcccacgctgagttctcctcgagcgcattgtccacgtactaggactgttccttggcgcagattgcgccg

SEQ ID NO: 92077 - DNA, 862 bp, Cannabis sativa
taataaaaatattaagataattgtgtgtatgtgattcatgaatttattaactaacccaaaggtgagttaatatttggttgaatttcatgcatatttatggtgataaatgtgtgacaaatataaggtattttgtgtgaataatatgttagtttaaagattgcatattgtttgacataatttattgtcaatgtttgatcactacaataagagtaccacttacaattaatattactttctaaagacttaatattaatattgtgtttggtatcttgagatggaattaactattatttgaatttattattttatttgggttcttatatgagcatgttatttatgtacttgtattgttccttttagttgttgctagtgtatctggtaaccttacttccgtatcagtccttaatggtaataactttaaggactggaaggagaacattttgattgttcttgactacatggatcttgaccttacattaaggatggatcgtcttgctcatcttatggataccagtacctccgagcaaaggatgatttatgaaaattgagacgtttcaaactgcatgagtcttatgatcatcaagtgcggcatacctgaggcttttaggggtgcagtgtccgaggaggtcactgatgccacaactttccttgctgaaattaagaaacacttggcaaaaagcgataaggcagaaacaagtactcttttgaagaaacttatttccatgagatttaagggcaaggaaaatataatggagtacattatgaaaatgtctcaccttacgtccaagttaaaggcaccaaagcttcagctttcggatgacttgcttgtacatttagtgcttatatctcttcctccacaatt

SEQ ID NO: 92078 - DNA, 3008 bp, Cannabis sativa
  modified_base (67)..(74): a, c, t, g, unknown or other
attgctattgaatattagtggtgtttagtacattctaaggtaatttttaaaaattattacattaaannnnnnnnaatttaatatttaattataacaataaccattttaaaatttacaatttcgagactggtgctgatagcaatgctccaagttatttaaatagtagttgggaatgaatactaattaacaagtagttgggtatgattactcttctagtatttgtaaggcaaagggtattattgtcaatctacttgagcttttcatcagtttcactctctcactcaccttattattatttctctccgcttcatcatataacatcactcctatttacttttctttctttcaacaaactctctctctctctttcatgtagttctttactattttaagtaaaataaatatcttctcgcttctccttttctctctctcatatatatatataataaatatatataattaatccatggaagatgatcagcgtcgtatggggaagaagatgaagaccgatcatcatcaggaaaatgtgagaggcggtgatgatttcgatgaagaggaggaggaaaaagtaaaagagttttttgctcttattaggagcacaagagaggttcgtaatcttcttcgtaccaataatggatcacaggccgatataaatccgattagcggtgtttggaatcccacattccgaccagaggattttcttgattccgatcatcataataagaacaatacagcagccatgatgatgatgatgaagaatcctccaccacctcctcctcctcctcagccgtccgatcctaattttaatcttggtagtattgacggacatgatcgtggagcttgtaaacagtctctttcagttgggcctgggattgggcttgggtctgggcctgggcctgggccttctagaaccagaggaggaggtgatcaaatttatgacaatgaaagtggtagccatagtgggggaggcggtggtacgacatcaacaactgatttagacttgaaactttctctgtaagacttaatttgtttcttgttttgactataaataataaaatatatatttatatttataattatttataatgagttttcataaatgtaatgaactaaacttattattatgactatatagaaaattaacatctatttggctttacaataatgtcgtctttaagttaagttaggtcgtctttgatattagttgtaaatgtatattttttattaaagtaatttattacataaatatttaaatttaacttctcatatttaaatttaaagttaaatacttaaagttatacttttgaaacttctatcattgggttgggtcgaatcggagcaatgacctaaataaaactcgattatcacgggctgaagctgccccattgggttggggcccgacccggctagctctgaacgttgagttaatcaccacaagggtggacccacatagaaatgaggtgggacaactgtcctttcaaaaaaaataaaaaaatataaattttttaattaattacgacatatatttataataaaagataatattaatgtttaattaacttccatataaaataaagcagatcaaacttcaaattctactaagagtattttttttctttttaagtttacttttacccctattttaaaaaaaattatgtcccctcactttaaatcttgggtccgccactgaatgattacatattggccgttaattgtcaagttaatgaccacatatgatagtctttgattgatcctagtcattacatttttttttatttaaatatactaataaaaaaaaagacatgtgaatattgacttgacaattaagtacttggaagttttagaatattagaagttgctagacatttctacaatagtaattattctaaacatttctacacatttataggaaaaataaataactatcgaagcctagctagaatatttagaagagtttagaagaaattaatcaagaaaaatctaaagtaattgtaaatcatatagaactaaaacaatctaaataaattgttgtagccacaaatgtaggaagcatagccctcaaggttacatattgtaactaagcttgagaaataaatcaagtctttcactaccaatgatactactcactattttatttatacaattattcttatcaactatcaactattctccaaacatccaaactaaaactacaaacgataagtacaagttttactacttcctacatacaattctctcttctaacccaaacttaccttcattttttaaaccaacaactacttttcaatatcattacttcactacattatcacaacaaccactaaacacaatcctacatatccaactactttaaactaaactaatacaaatttattctcaaactaccagtgtatcagagccaagtatgatcatcattgggcataatctttttcgcttatcaacattagtttagagtctaactgcttttctccacctcttcaattttccatggagaaaactataatttttggtccatgaaaataagaacctatttttaatcacaaaatctataaaaatttgttgaagaaggaatcactattccgaaagatattacatctcttttggaagatcaaaagaaggcactagaggataatcaacaaaaggattctcatgcattatactgcttgcagcaagctatgacagacaatctttttcgaagaattatggtcgcattaacgacaaaaaaagcatgggacatgttgcaaaatgagttccaaggaacagtcaaggtatgcacagttagactacaaaagctttgaagagattttgaaaatcttaaatgaaagataataagactataaaagattattattctagaattaaagaaatagtaaatcaaaagggagcctacggagaaataatttatgacaagaatatagtacaaaatatactaatttcttgtacagaaaaatatgattcaatagtttctgtgatagaggaaactaaagatttagaaactctatcaccaa

SEQ ID NO: 92079 - DNA, 573 bp, Cannabis sativa
tgatttatttccaggaatgctaaatactgctttcttcacttcatctcttgtaaactctttcataagaccctcagattgctcattagaaagaatcggacctctggccaaaatcctgatatctaccttccttctttgattcaatgttgtcccaagcagaccttgatagtactccaggaaagcctctgtaatcatctcaggctcatggactcttctaccatctaaattctcaattgatagtattcgattctgtctcaatctttgtttgatacaagcatggaatagagcagaattgcaatcaccctgctgaatccaatctgctttggacttctgttgcaagaacgagctataatctccttgaactttaatcattctctctcgggcttctttctctaacatgtgcaagttactgtccataggattcttgtgaagttggttctgaatgccatctaaatcatttctagctctagttaccgaggcctgcaaatccataaatccctctttgtttatttctttaagtctcactttgaattgtttcatcttagtcacaatctgaaacattttagagccattaac

SEQ ID NO: 92080 - DNA, 759 bp, Cannabis sativa
tagctatattggaggtagctttttcagattttaattttgaccttcttgctgaattttcttgttaatggaacatgaaattggttgttgagaatgttatgttgcatgtggtgatgttctcttgtaagtttgagtatcttttgttaaattcttgttgtgatggttgtttgagctctagatgggattctagggtgttctctaagttgaaattaatgttttatttgttatatatgctgctggaaaaaaaaaatatttgagattgaaggtttaaagctcaagtctttgaacttgaagagttgtgagtttaagcatgattttgtgttgaattgtgggattggtttttggtaaattcagaggaatttttagggtttcattgagtttaaagtttgattgtaaactctgattttggttgtgtaaagcaagcttgagttcatgaactcaggcttggagcttcaatggcactctttgatttttagtgaaattattgtgtttgagttgtggaatatgtttaatatgtcatatgttgatgctttggaaaatttggtggtgtttggggaagattcgaatagtcttaccctttcctgcacaatagagaaaacgtgagccaagcccaacaagacagtataaaacatatcattaatatactcatcatatattataagaaacattgccattcaaacctgcatgtgtgacacagacctgcatgttgcgctcacatgcctctttatgtttacgtggcgtaaacctacgtgttgctctcac

SEQ ID NO: 92081 - DNA, 655 bp, Cannabis sativa
cataaaagatacttccactgtccctctctctttgggacctttcggccaatgtgtgctagttttcattgttgggtctttgtcctgttttaaaatttataaattttcgatatgtacacccacaaatttttcgatatttggccttgtgggattctttcaaattaatgtcacgttcggccatgtggtctcctaaaggtcgttcgttatacccaaactttccaggcccaaacgtgaggaaggtgtattatctaaattttcggatatttggccatgtgagattcttttaaatgtcacgttcggtcctgtggtctcttaaaggtcgttcgtcatacccaaattttccaggcccaaatctgaggagggtctttgacctgttttaaaatctacaaatttttcgatgtgtacacctataaatttttcaatattaatttggccttgtaggattcttttaaatatgtcacattcggtcctgtggtttcctaaaggtcgtttgttatagcaaaattttccaggccttgtggtgtcctaaaggtcattcgttagttccacattgtccatgtgtggaaataaattatcatatataagatgaatgaactactccttttattgtcaattagttttgagatgtaactttattcattttattttaaattctaac

SEQ ID NO: 92082 - DNA, 757 bp, Cannabis sativa
tttttcaattacgaataaaatttacagaaatggtaagaccatgttttattttttttttttggaaaaccagcatcatcattcaattaacaagataaaatagttagaccttccgattattacaaaacagttactcgaaaaaaaagagacctaaaaagattcatttggtgagtaaatgcccactttaactattatgggcaacataattacaagttctactaacaatgaggatttaatacaaaaagagacataattttcaatagcccaattagacttcttctcattgagagcattgatcacgtgtctcgagtcactctctacaattacaaatctaacacctaaatccaacgccacagtgatagccaaacaacaagctgctgcttctccacaaaccacatcaacgaaatccaaccgaactgtaagagcatgttaatgttaaggtgtaaatcatgataaatgctaaaaggcatatggtgtttggtaattaaattttaagtcatatataaaataatttttaaaaaatataattagttaattgtaagattataaatataaaaaatgttagatatcactagtgcccactcgtaatacttgtaaaatattgtatattattattacaagtttcatataattaaatttaatttatgatatgaaaaactaataacaaactataaaagactatataattagatgtttaattagatatccaattaaaaaaccgatgagaaaaaaaatattaaaatggatcggatacccaacc

SEQ ID NO: 92083 - DNA, 596 bp, Cannabis sativa
tgcaagctttttgtgccataaagaaaaaagattacaagaagattgagaactagaactagcattattgtgctgaatgttatacagagagtgagtatgggaaagattggaagcagtggacatgtgaaattgattagggtcaatgacatataatccatgcttaaggtgtccttccagaaatgtctccttcgaaacctgatccttcacaaaacatttgttaggatgaaattcgaaaaaggcatgattatcagcagcaaattttgagacagaaagtaaattcttttgaatatgtggtacatgaagaattcgatttaaaagtaaaggtttattggtagtagaagtgtgaaggagagtgttaccaatgttttgaatagggaagccagcaccatcacccatatgcacctgttcttggccaaagtacggctgtttgttggtgagattgttctcattggcagtacaatgagcagttgctccagaatcggggtaccaagcctgatcagcaacactatctgctgtagcaatgttgacagattgtttagaaatattggctgctcctatgcctggaaaatcatagttgaatctttggtagcatcgggctg

SEQ ID NO: 92084 - DNA, 950 bp, Cannabis sativa
agcaattagtaatgaattaccaatagcaatcaagaatcttgattgcaagtgagttcgtcttcgacacttcttcaatctgaaatcccttcagatctgatgatgaagttgacatggaactcccttcagtctgaactcagcaacgtgaggctctgatcgttctgccattgatgaccatcttcaagctatacaatcagacctatagaaacaataacaagaacaacaagatacaaaactaacacccacgatgaaactgaacaaactaacaatatcgattttttttttataatttgtttacagaatgaaaccgactatttatacccaacagaacagtctacctgacactaactaactcctaacgataagtcataacagactcacaccaacttaacattacgcaagtgtgcagatataacaggctaaaaatctagacatggctagacattctattaaaataatctgtcacaaaataacgacacttacaacatttttgttctgaaaaaagaaagaatcaagcagttagcccccaaaccaaaccctaatgttaaaagagggaatgggggtccctaaccgctggaaagaggccccctccggatgtttgccaaaaatgggaacccaaaggagtttccttagcaaacatcgggtgcaaaaatctaaaaggcagcgaaagcagaagaaaagcaaaaaacgcagaatgtgggaacaaaaatcgcctcatgccctaaataatctttcgacaaagggatcgattgcaaagaagaatggaggaaaataacgaaacacaaataaaagagattttatacatcacataacagactcagtcaaagctattccctagaaatccaacacttaaccagaaacttctaccctagcatgcaaataaacagtaaagacatagagtgtccaagaaacttacatgaaagttgagaactgggggttggtgttgatcgacg

SEQ ID NO: 92085 - DNA, 1038 bp, Cannabis sativa
gcctgattgatttgcgaggcagagttgcacgaaacgataggcttgatgctcaggtacaaaggcctaacgtttggggatggaaaaaatttccctagtaattttgttaactagagcgatggggtagacaaagttcacccaattccagaagactatatatcaacataggacctccgggaacacttaaatggaaagaaagattgagctagaggcgagaaggaaagacctcatggaaacgatctcagaaatcacattaatgacaaagttcatgggcatgaattccaagaaaaacactaagcctctagaagaccaaatagttgaatgactaaggtcatggaacgtctagcccgaaatcaaagtggggccgtatatgactcaaaagaagaagatccaaaaccatgtgtaagaaaaataatagagctacccttgtcaaaatattttagaatgcctcagaaggaactatatgaagccaggacggagtccaaggcccatctatctaaatatattcgattgatgcaagtggaaaaagcaagtgatgatgcaaaatacctctatttcttattaacttcgtcaaaatctgctgaagattggtaaaaaaaattatctcccagatccatccgtagctagaatgatttaaactccatgttcgaaaagcaattcatagccacaaaggattatgacatggagatcagttcattgactaatatcaaacaacaattgggagaaagcctcaataattacatccaaaggatgatggatccaatagctatgaagaaggtcaatgataatatgaatttggtggcattaacttcatggatatctactggatccctattataaggagaattacaaataatgaggcttgacaccttgtctgatttcttattcatgccccaaggcttcataaactttgaagaagcttatatccatgcttttggagtgcctctaacaccatcaacaactgccagtagttcaacttaagctcctcaattctctacttcgactattgctctgtttgtaagtgtataacagtgtatggac

SEQ ID NO: 92086 - DNA, 503 bp, Cannabis sativa
gacaagattgaggagcacagcatctgctaccaacacataaatgattccaaaccttacataccatcgaaattcccggatgtaagctttagtttccagtccaatcataacaaaaatggaaccccaagaaagaaattcaatgatcaaagatagtatctgtgagaaagaaagaagaaaaaaagtaagtttgttttcaagttttggcaatccacattagtctctatgcactatataatcactctcacatagctacaacatgttttgattacactaacaattcttagtcaactttaatcaaagacaaaccccatgaaaaatcaagatgaaagaaaagaaaacccacctcaaaaggagccaaaccagagtgaacagtcaggttaaagagtgaaataccctttaacaacctcagtaatgggtcaacagtacaataagcagccataaaacccaacaagtaattgtagtaatttgaggtcaatagaaacctctgtgccttggaattcttgctc

SEQ ID NO: 92087 - DNA, 764 bp, Cannabis sativa
  modified_base (653)..(653): a, c, t, g, unknown or other
atgcatcgagaaaggtcttgttcttaattgggaaaaatgccatttcatgctatcttcaggaatagtcttaggttacattgtttcttaaagagggattgaggttgacaaatctaaaattgacctcatctctaaactgcctacccctaagactgtgaaagacattcggtcattccttggccatgctggtttttataggaggttcatacagattttttcaatgatttctcgcccattatctaacctcctagccaatgatgctacttttgagtggacaccaaagtgtgaggagtccttccgaacacttgtgaactcactcacttctgctcccattatttagtcacccgattggactcttccattcgaaatcatgtgtgacgccaacaattttgctgttggagctgttcttggacaacgaagggaggggaaaccttttgttgtctactatgcaagtagaactctaaatagttctcaaatgaactattccactactgaaaaagagttgcttgctattgtctttgctcttgaaaaatttcgagcatacttgattggatcacctattatgatcttcactgatcattctgccctaaagtatctcctttccaaaaggatgctatagcgtgcttaattcggtggatcctcctcttgcaagaatnttacataacaatcaaagacaagaatggtaataaaaatgtagtcgcagatcacttgtcccgacttgaattcaatgattccgccaatttgacataacaattgtttcctgttac

SEQ ID NO: 92088 - DNA, 781 bp, Cannabis sativa
  modified_base (152)..(155): a, c, t, g, unknown or other
ttgtaattttaactcgagaagggtaaaacaatgaaattaatttaattacatgcttatggaactatattattatatagtgtaactccctaatactaaggcacgctacagtgctttttcaattacagtattgtctttgctaatcaaagaatttnnnngaaaaacgtgtcaaattaaaacatgttctagccaataaaccacagaaaaacccactaaatcaaaacatgccattaaagaccaaagtttaggttttcaaacacaagcttgcataaatcccattccatacatcaaaatcagcttaagctaaaaccaactcaaatgaacactacaattcgaactacaacttaacctaaccctaacagccactaatactcaaaatcacatatttaaaccaagtagaacttcaagaattaaggggtagagaagatagggcttaccttggctaagaaatcctttaatccctgctgaaacacccaaaaaccagcagcaattccccttgtcctgggctgattcgaagagagagagggaaaggaagagagctctttctattttttttttatcttttatttgatttttccattaatttctgtaaatgaaataaaggttaaaaccttaaccttggctgaaataattaatgctaggtgtcatctattaggcatccacctaatcaccttaaatataaaattactaaattgccctccaagttacgacttaggtatttcgcaaactaggggtaaaatggtcaaattccataatcccgcacaacctcgatatttattttctc

SEQ ID NO: 92089 - DNA, 724 bp, Cannabis sativa
ttgggataattttaaaaaaatacagaaacaacaaaaattacaacaaatacgaaaatacagtttcatagaatttttaatatttttacgattttatttacataatttacggtattttggtatatttttatgttgtactcttattattttattgttgattttttgctatttgtatattattttttttgttactttcatgtaattttcttgtatttttatagaatactataaaaatgtaaaaaaaaatctttaaatgtaaaaatataaaaaaaattataaaaaataatgttttatataattattctaaatattatttatatcaaatctcgcaaaatgtaaaaatgatgatatattatacaaatatagtttggaaaaatagtatagtacaatgaattactcaataaacagtatacttttattttattgaatactataaaaatgtaaaaaaaaaatctttaaatgtaaaaatattaaaaaatttataaaaaataatgttttatgtaattattctaaatattatttatatcgaatcttgaaaaatgtaaaaatgatgatatattttataaatatagtttggaaaaatagtatagtacaataaattactcaataaacattatacttttattttatgtaattttttaaaaaatatttatatgttggtcatatattctaatatttttgtgtgtgttttacattattttatttataaccaagttgtttttttttt

SEQ ID NO: 92090 - DNA, 1185 bp, Cannabis sativa
ccaacaaacaactttttgttcgacacacaccagcctgtgatcaaatagctgacatcctaacaaaggccttgtcctctacacggtttcatctgcttaggtctaaacttagtctggtgtctttatccacactaagtttgagggggtgttagtactggtgttagttaggtgtgtttagttgcttgttgtttctgttacagctgtatatcgttatgtataactgtaattagttattttctgttgctctttccttcctttctcgcactgtatatatactgagctattggctccattaatgaatagagttcattctgtttctctctctcaatccaacacaccccacctccatctccagccacgtcgagcctcaccaccctattctcagctacggtcgtcgtctaccgtcgatgtcgaagacaaccaaaaaaccaaacaaaatcttatctattgcacctgctaatcaaatcaaatctaatttacacaaatcactaacattattttgacccaaaaaaaaaatccaacatatataaaaataaatatgtatatatacatagatgagaataaatggaagagagaaccagttggatctaatcggaacaccaccagacactggctctccattacacttttttaaaaaaaggacaaataaaaaactaagaaaaagagatacatatacttaaaaatggagctccttcacagtcatcaattatctagatctctacccccgtcgaacacgaacagtcaagaaccaccagttgtcgaaggagggtagggcaccgacaagtgaaagaaagggagcagagagagagagaggaccattgcgcgactatgaaggtgtttcgtgtttgagatccgagtgtggctggggatgtgtgaagaagagaaagaagaaaaagaaaagaataaagaaaaaaagaatagttaattttataatattaaaataaatttttttagttttttttattttaaattaatttctattaaaattatgatctagactaataaaaaattaacatgtgacatgttattagtatttaacagattagtttaaataatgaagtaacagacttacgagaaaaggaaccatggagactattaccatcaattttgagattaaaaacttatctacatcaaatatcaatttttggatacttataccgcaatttttttcattatgttttaatgtat

SEQ ID NO: 92091 - DNA, 749 bp, Cannabis sativa
tctgatgattggatttgagaatttaaaaggatgcctcacttcccaacgggtgactcccatcattacatgcatcgtaaaaaacactcgaggaaaaactgcccatgtctaatcaccgccatttcgagttccctagagatacgcgctcgacacgtgcgaagaagtccataagtcagcattttaaactctgacaagaaaatgggagaaatcatgcctcccacaaatgacgttttggtttgacggctgatgacatatagcattaaaagacttgtaaaaaattccacgtgtgtgaaagatcgcccaggagaagatactgcaagctcccagaccatggcatatcctggaagcttggggtaaattttattcgtatttttgcgagcgtgccacgtggaaaataatcaagaaaaagtcaagagatcattaaggccgcccaaatgccttgcttcgtgctctaggagggtaagagccctaatcttgcggaacgagtttcggcgagataagtcttcccaaacgcgggccacaagagagatgctcgggagccagcgactcaatacactctagaaatcgagaccctatgctcccgcaagtaacatggatcttcaaccaagatacaccggtctggagtgcgccttttacccgcagaagatccattaggtgggggtttatccgcatgaagagctttaccattaggtatgtagccagtacaatctgacatcagtaaagaccacatggaaaaaatgccacctaccaat

SEQ ID NO: 92092 - DNA, 867 bp, Cannabis sativa
aaattttacactccatcttgaaggtaactgttaagatagttactttatttagttaagtattgcagttagattgttatatacttttatgttataaatgtcatcatttcctctctacttatataaggttttcttttccactttgtatatttatccaattcattaataaagaattgttctctctttgtaccttcctaatactttcaattatttttcttttaaagagattcaaggtaggaggcagaatgtgggtgttcttatttagattttttggtgttatcttattatccttccaaaactatttcctaattagagttttaatttctttcgatttaatgttcatcctaataaatcaaatttgagacgaaagccgattcgaatttcttaaaaacataaaagaagagtacataaatgcactagaacaagctgcaagtgcaagtctgttcctggaagtccactacaccaccggtctcaactgttcctctagggtgaacctgcagcgtgtaaggtccacatgtgtcaacgttcaaataccgagatttttcaaattacaatgccaagtcctcctccatttcttgtgctagggtcttcgtccacttgtcagctttttctttttgtgtagcaaaccactgttggactttggacctcaggaatgctacatcagcagtgatcgtgaagcctcttttgtccttagttgtgttgttgaagctctcaacccatttgttcgtcattacattgtaacatacccctggaaagtacgacataacccattttcaaatccaatttcctcaagatattgtgcaattgcaatattcattgcccgaatgttctcaaattctctgtgaaactctaattttgaatacgtgtagg

SEQ ID NO: 92093 - DNA, 685 bp, Cannabis sativa
tcagcaatatcagcgcgaactaggccaagtttgcttgattggtgagctttaaggaagctgccatcatggtctcttgccacaaaaccccagcattcgaagacatgttaatataaacagcatttgccacacagtaaacacataaacagaggacaatcttaatatatcatgcttctactataagatgcatgataatataactgtgtggaatttctatatatgacatgttatttacaaatgcatgagcatgttattaatcaactattaatgaacatttatttaaaatgaatacataaacaatgatgatgaactggatattaataattgggtaattctaattttacaacctttgaaaaattaaaaattaaattacaaaactaatctccatcgctgcaagagtatttttgtaatttcataggatcgtcgtaaacctctaaattaataaaaatatttttaattaatcattcttaaatataattttagttaagaataaagtttttatttaagacatcttttaaacttttttaattaatcaaaataattttaattaatttattcttaaataaactatttatttataacaagtttattattttgtcttaaaataataatatttattattttagttgggatcaagacaacttttgtcatggttatagatttcgaattgaatttcaaatctataata

SEQ ID NO: 92094 - DNA, 1035 bp, Cannabis sativa
tgtgtttattatgttatttatgataatgtatttgtggttggcaagttatatttaagtttctcattatgattattctgtgttttggaggtttccaaatttgattctttttagctccctttaagatttaagattttttttttctatgtaatgtatgtagaacatttatgtttggttgttaaatggtgtttaggttagggtttcggtagtgatttaaggtttgttattttattctctgatgttgtttttgtgctttatgttgagcttgagtattttttttttatagtttatttgctttggtgtgttgtatgcagattatatgtgctataagttactaatttagtgctttatatatattttagagatttatatcatcacatatgtataatatgtagttattaatttatcacttggtagatttttttttagtatagtttttttggtgtgttgtttgcacatcatatatgctataagtttctagtttagtgcttttttgttcatacatgtataatgttatcatatgatgatatattatttatatcaaaatatatgtttctcatatattaaataattattttattatttatatatttgtaaaattctgaaataattttttactcgaaaaataatcaattgatatcttattcagatcaaaagtaacaaaatggttactttttccaaaactcccaaaaagtaaaaatttctaaaaactaagatttttccagctttttccatttttggtatgtatactgacgtagcacatcagtatttgtgcaaataattttcttaaaggtatttttataaataaaattaattttatacataaaatcaactttaattaaaatataatatatattatacataaaattgattttatttaataaggtattataatataatactgaaatacatatatacgtaatgatatttttttaaatctaatgtaatatgatattaattgtagggtactaatattagtaaaattatacatataaggaaagtgactttagagtttgtaatattttatttaacttaata

SEQ ID NO: 92095 - DNA, 1088 bp, Cannabis sativa
gtaaaataattccaacaattacaatccttcaaaaccaagtccgtaaatataacccactcatccaaaatacattgggctttggttaaaaaacaaggcccaaacgagcttagtagctacaagagcaatcaaatacaaaggatatgaacgagtttataactaatccataagaatcgatccttcctcccgcaaaaggaaaagaccacttcccatgttcgttcttcaaaactgatgaatttaaccatcaaaggctctataaaaggagaacccaagagtcctgaaggatcatctcatcttcactcactgaacacttactcaagcattcacgcaatacattactattattattaccagcccttttccattaatctactgtggaaatatttattttctatctttttgatttacattcggctattctttatttgaattatttattgacttgatcatcagagtcccttctgctggcaccatcccagtgtcccaaggtctcaacggtcctttttcctttgttctacaggttgtcaatgcttgcgatccttccatttcgatcattgaagattttaccctctacaatttggcgcccactgtggggccctggaaaactgaatcgggagcaagggacacatatcgaataccatggcaaatttggaagaatgagagatcgacgttcaagtccagatacctactcttatgtctcaaatgagggaaataactgaaagcctcaaaatggtacaagaagagaataaatgattctgggaagagaatgctcttctgaaatcaaaggtggagatactggagtccgttcaacatagtacgacggaatctcagtcaaggtttcgtgttctagaatccattgattccactcttatgacaaacttaggccaacgtccagcggtcacaggaatgccaccgaaccaaacaacacaccagcattcaactacaacgactactggagcagatggatcggaactaggggatctacttgttggaatatactttaccaggatctagatttactaacatgtatgtttattaatatcctaaatatgaatttctaaaataatgaaacttaaacacatataaagttt

SEQ ID NO: 92096 - DNA, 1371 bp, Cannabis sativa
aaaaaaaaaaaaaaaaaaagatagtaatatgctatacattaacctatttagttataatctttcatttaaaataaaatattttacaaatacattttatattataccactattctaattatattgtacatttgttgtagctggttgggtggatatattccagtaccattttcaagactacaagtacaaatacaaagttaccaaaaaaaagtacaaatacaacatatgtgttaccttctggtggcgttttatacgtagtagtgttgtaggttggttcggttggtttgctgcatttttctcaatttccttataagtgttaacggtgacaacttgtcaagtacattgtaatcataacttttgagtaatgacacataaaaatgacaaaatgatcttaacgtaaaaatgttagagaaaagatgtaagatgtttttttatttaaaattgactctaaaattactaggttctcaatacccttttaatggagtgaaggggtatttatagttgggctatattgaccttgtttataaaatgagttgtaagtgatctctatagggaccatgtactattataatgaccagtggtagtgggatggagatattgttggttaggtatcaggtgatactgttacaagtacgactccactacttcactacaaaaaaaatttgaattttagttacaaaaataatttggactgaaagtgaaagatgttgtgaccaaaagttttagttactttttttttgtgacgttgtgatgtgattaaaaagtctgtagctaaaagttttaatcacaataaaaataaaattatcactaaaagtcactttagagccaagtgcaaggaagttgcatatatctatatatgcagtgattcaacctccaataacactccatttaatgcaccattttgagattttcttcacagtgcacggcatataggcatatatgtcgtgcactgtagtcacgctatatatatttaattaatatttatatatatttatatcattatatttataaaagtgaaaatttatttttaagaaattttacaatatatatttttaaaattaatgtaaaaatatatttttttttatttcaacactagacacagttttttttagtttattgtctttatatatataattgtgtatgttataattatttgaaacattctataaaattttggaaaattttaaaaaaaaattacccaaaaataatacacttttataaaagtaacgcactgatatactactacctattttggcattcgggagacttatttaatttttttttcatggtcatgtacattatagttatttaagacatcttataaaatttcgaacgccaaaaataaaattgagtattattatttttaatctaatt

SEQ ID NO: 92097 - DNA, 635 bp, Cannabis sativa
aaagaagtacaaaatttaccttttttttttgataagtgaaattttattgaagaaaagaaaaacctacatcaaattaccaaacaaggaaggatcacagtcctcaaaacgacccttacagaccatggaacactcccttgcccacttagccagcttatcagctagcaagtttttctcacgaggaataaaagacacaacacagctacgaaagtttttacaaagtctaagacaatcgcagaacaaagggtaaacatcccaacagaaaggcatatgccctgactcgaaagcattcactgcagccttggagtccgtctcaatgatcacagaatcaattccactatccttagccattagcagagctagcttaatgccatgaagttccccttccagaacactaaacactaaaccattgctgacagcaaaaggtgtattcaacaggggcaaaccagctgccgccacagacgaatgaacctcagagatagaaaccgcagcaaaaccagcagcctcttcaaccacagaagcatccacccgaaaacggcaaccatctaaattcacactttggtggggtttctctgtaacgcccgtacttttataaaaatattaattttatttacaagcgttaaacgcggaaaattata

SEQ ID NO: 92098 - DNA, 574 bp, Cannabis sativa
aatatttataccacaaattatttaataaataaaagttattcactttatctctttaatttaggtggattgtaaaatctttcgaggattatataaacaatgaagtcaaagtaactttaactattttttacggatttgtacgtcaattaatttcttgttttttgattgtagtagtgtaaaataaatattatataagtactcaatagtggcaaaaaattactattcatatttttagggaaaaattctaaaatatcttattcctttgtccaaattggaaaacttattattatttaatttttaaattaattttaatagtctttaattacttgttaacaaaattacaataattaacttgacacatatttataccataatgcaatcttgcatgcattcttataggaaaatttgattatgcaagcttaaatttgtttaaacatttaaacaaaatattatacatctgtttttttagtaccaaatttacccctaaaataataaaactaaactcattcccttatcttccttctctttctctctacaaagtctcacacacgcacacacacccttgccttactggagt

SEQ ID NO: 92099 - DNA, 928 bp, Cannabis sativa
actctcaataactctatcaaaatatctatttttaagtgaggtattcattgatttcccttcctattattatgaaaatttttctaacttcaggaagacaatgaatagagcaaaaaagaatgacaaaaataactaaaagaccaaataaaaataggacataaaaatgaaattaggacaaacaatctacttggaatgccataagaattgcacaaatcaatttgacataagaaaggacaaaagcatttcaaaataattaaaaagatatttattataaaatatacttacagttagagatggtagagtgattctcttaattggagtacccaacaatcagaccaagaagctttagaaaaaaaaaaaggtaaaacacacttaataacctataaatcataagagaagaaaaggagatattcacactatgaaattagaggctacctattcttaacaagaaaacgccctttcttatttatatatatacgagaatcaaaaaataaaaaatctatgagaaagaaacaaaaataaggcacaaataaagacgtaatgtattatcaaattcttttatgatttttatttattatgcagaaataattttgtttgaatctaaaggggaaaaataaaattaaaaaaaaatgaaagcataaaataataagaaaaatacctcttatatgaagagagagctttcaagagagtcaaggtttcattcatgtaagaaaaatttgataaggaggtagagatttgggaaggtagtggaggcgtcagaatggtgaagtgtaggattttttctttgtttaaaggtttctatatatgcttcttttttctttttcttaggttgacttttttttttatttaatttgttttaatctttaaaatacgtgtaatgtttagatatctatacataataatattaagaaatatgtatatagtgacatat

SEQ ID NO: 92100 - DNA, 1197 bp, Cannabis sativa
tccctaaggcaggaacttctaagtttggaatttttacctcgggttctatttattctctttgttatttattatctttttattttttgaaaaaagaaaaagagacctatttttcctgtatattttcttttttatgattgctgatgttattgtactctttgtttgatcaaaatatttggttattttttatttgttgagattaaagatataatcaagtagtttttctgcccattatttggttatgcattggtacttttattattggccacttgactattagcaaacaaaaatagaaggtgatctttccaaaatttagttcccaaatcatacaaatattatttgatggtttacaaacatggatttagattgatttgttggtttaaaaaattatagattgtttctataaacaattttggtatgtaattagttaatagttttattgttatcaattgtagaattaataatcaataaaaatatttatataagttttataattattattttaatttttttgtattatgtatttactgttatatataaaatcattctaaaatataaaaaaacatgtagggaaaattgcatggaaatttacaatttttctttacttacatttatacttcattttataactgacaataagtgaaataaaaaatgtatttcagcaagttatgcgtcattaaaaaactgacggtataagtttttttgtgtcagttttgaaatagcacaaaattattcgtgtcacttccaaaccaatacaaaatggtaaaaagaacattgtatattttgtgtcggtttcaaaatgaaggaaattgttttttgtgttattttagaaacgacgcaaataaaaattatttgcgactgtggcttatacgccagttttgtagaccgacgtaaaatctttatatgtcacttaagacgaaaatactcatttttgtagtagtggtattaatgtagtcaaagttgccttatttgtttatggaaattttgctaaaaaattgttcaggttcactgtacctgtttgaacggactaactgtttatttaaacagattttgagcttgttgtcatcatttagttgtttttgttgcctttttaatcttaatttttttaaaagaggaagtttatttgagctgatcgtgtagggtttattggaccctatttttgtggtatcttttttgttttttttttaaagaataaataaa

SEQ ID NO: 92101 - DNA, 832 bp, Cannabis sativa
agacgtcactttatgattggttaccgatattcttacaatttattttcttaaattatatgtgacccactacttaattacaagcggtataatattaaagagaatactttagcaaaaaaaataattttatttgccccctttaattttttttctctaatcgtttgatcctttgatgcttatgcctccgtccttgattccaaacaacctattggatttttctatacaaccaacgattattttataagaaataaaaaattcaataaatacaaaaaagactcatatatatatataaatatatagtttattaacaaaataacatggattatatcgttgttaatcttgattcttgagattggattatatgtaacaaactttagccaatgtggttgcagttacagtacaaaacaaaaatttgattagtttgggaacttttagagcttttctacatagaaaattaaggtaatacaccattgatagtgttgtttgtttcaatgagtcaaagacacacaacactgatctaatagatatatttacatcaacaaaacaagaatatgaagatgctgagctcaacttcacttaatttagttcaatttacaactctaataatagtaaaaagaaatcttcttgtataaatttttaaatgttcttttctgcctgcatctgaatccaactataaaatgtctaatgactaagactatgttatatatataaatatattctgtggtgagaatagaacatgaaaatacatacatatttaagtttttttcttttcaaatcagtgatcataaggattggagcagacagaggagagtggctctgttactcttagagatcc

SEQ ID NO: 92102 - DNA, 680 bp, Cannabis sativa
ctctctctctctctctcaagattatttttcttaatttgtttaaataaataaataatgtaaaagtttgataaaaaaaaaaataaaaaactgttagtgatatatttttaaagaagagtgttactatcaatcttctattacaatattttaatcaattttcgagctcaaaaatacatgtcgggacattttttttttttttttcatatatagtggtattcgttatagttcaatatgtaacttttaaaaatttttaaatagtttagcgtgttgaaaatagatttaaaatattttgaataggcttggtaagctagaatatcaggaaatttatttttggtactgtaaattatttagaattacttcaaaattttattaggataatattgcaactataacgaatatcgatatgaaaaaaacttgaaaaataaatattctaccatgtgatttcagacgtagagattaattaatagattgtaataagaggttattattagtactttttatttttttaagataatgagtgtaaaagttatttttttttttttttgaaatgagtgtaaaagttattcttagtgttaccaatgtgattagttacattttattttcaatcagcaaattaattgcacaaaatgtattatttttttttttggttattctcactgaccaatgtttttgataggaaggtt

SEQ ID NO: 92103 - DNA, 701 bp, Cannabis sativa
gacaattggtcacagattttagtcgtaaaaattaattgttgtaattaaatgtatttttagtcacaacattaattgtcactttttacaaattataaaattttaaaattgtcacaaataattagttgtgactaaaatattatttgtcataagttgtgactaaaagatacatttagtcacaaattatttttgttgtgactaaaagttgtgactaaaagtcatgttttttctagtgctcatcaaaataaacaagtgagaaattagtttatttttctcttttcatcatcttcttcttttctttttatatattttatattactttataatatattatactacttactaaatattattacaagtacctcacaaaatgtagaaaagtttttcgtcttaatgcttacaaacaacacttaaaatgaaaatccttttatttagcgaaaaatcatgtagacccatgatttcatttgacgttaaatatcgctacaaatgtttttctgtttacctatttttatactagctaggctacaaaaagctggcttcctcttgagtgagtgtgaaattaagcttggtttgtgtttcgatataaaaaacacaattataagatgattgtagctgtaaatcctaatcttccttgctttatatcaataaataatattagctagctaactgaggtaacacactattatggtgctttcctgtattgg

SEQ ID NO: 92104 - DNA, 571 bp, Cannabis sativa
tatttgtatcaagtttgtatttatgtaaaacatatttatgtatagtttgtattcgtgttttttgctttatgaagcaattgattgttaataagctttcttactgtgatgagtttctttctgttctgatcattgagtatgatactgctaggtctttaagattaaatgaatgttaaatgtgctatggctaagtaggaggatttattattgcagattgacaatatttttagtatgaaactgcaaataatttagtatgatattgcagattgaaaatatttggttaagggataactatattttgaaataatttagtatgatactgcaaattgtcccgtttgaattaaatgtcctgtaaattaataagtgaagaatatagcagtgagaattgaaaacatttttttatttaggatacatatagtttgaagaatttgggttttgttaagtgtgtgtggaaaccatgtgataatgatacgaatgtgaggcctcctattaagtttacttatgctagaaggggtaagcaaggtaaattggcttaggagggggtattttggtaattgtctttagtagtgagcta

SEQ ID NO: 92105 - DNA, 1497 bp, Cannabis sativa
taaccataggatgtgtattagtagcaacattggttgtaagggctgaatttgttggtgtggtggtagcagcagtgacagaagctactgctgtgggagtgggactggggttagtgggatttgagtcaggaccaacagaattgaattctaacatagtaggtgagtggagaggtgaattggtgggagatgaagcagagatggatgaatcagttggagagtgtgtgaggatataggatagacagaggtggattgaggaataaaagttggcacactagattggttagaagcagtaggaaaagattgtgagtatgtgctaggagagtgtgtagcataaggaaagaaatgttcattaaagagaacatctctcgaaatatagatcctaccagttggtgagagacattttaatccttgtgtttgatgttgtaccccaaaaaagtacacataacaaacctatactcaagcttgttcttattatatggtctaatattggggtaacaagcacacccaaatactctcaattgagaataatctggtgccctgtcatacaaaacagtaagaggattaatattaaggaaaataggtgtgggtagcctgttaatagtaaaagctgatgctctaacagcctcatcccaaaaagacaaatgcatagaggcatgagcaagaagggtaagagcaaattcaattaggtgtctatgttttctttcagcaacaccattttgctcatgtgtagtagggcaagacagtctatgtgaaataccattggttaaaagataggactgaaaagcttggtattctcctcccagtcagattgaagggccttaatagagcattcaaactcttttacaatctgggttttgaaattgacaaaggtttgaatggcttcagatttgtttttcaacagaaaaacccaggtgtatctgctgtaagcatcaatgaaatggataccaagcttactgtgaggagggaataggggaaggtccccatagattactgtgaataagttggaaaggctttgtgtattcagtttgagaaatgggaaaaggaaatttatgtatctttcctttgcaacaagcatcacaaaaatcaacatatgttttattatttcctgaaacattacactaagacatgttctgcttaacaactctagtagagggatgagccaaccgattatgccataaggaaaaattggttggggaattattacaatggctcacttgtgcattatttatataaaaagaaaaaaactggttgtaaagattgaaggctgttggactgaagctgatttggaggaatgatatagagtccatgaataagatgtccttccattagaggttgcttggagtccagatccttgacaacacaatgatcaggataaaattcaaaaaaaaggcattattgtcattagtgaacaaagctattcttatgggatttttggtaatattaggaacatgaaggagattattgagactaagagttttagaagtataaggagtgtgaaac

SEQ ID NO: 92106 - DNA, 663 bp, Cannabis sativa
gtgtaatgtcattatgttgtgtataatatgtttaaagaataaagttgtaaatatagtaacctaaaacaatcacgtgtaataaatatgcactctttaatgcatgattgggttgatgttacggggcgggaaactagcgttgagcacctttccgtctttgttattattttgccaaaatccctttaagtatacttttatttgttagttacatttcaacataaaataccaattgtaattgcctttgtgaatatgtgtataggtgatactaaaaccttggatccaataaaaacacaggtatacacagtggcaattcagcatatatttaacggtaaaatttagctggcactttaaaattacaaacaaaagtatacttaaagggattttgctgccaattaccaaaaagaaaaagagttttaatattgggcaccagtggtgcctagcaccttctagacgtgtcatcttgtaattaattagcgatactcactaaaagattatattaaattaaaattatatgatatatgaaacttaatacttaattaaactaataacgatattgacacgtaggagtgtgctagacaccaatattatcttttagtatttctcaaaaaaaaaaaaaaaagctaaaggacacctaatgatgtatagcactcttgtgatgtgtaatat

SEQ ID NO: 92107 - DNA, 518 bp, Cannabis sativa
atgcataaaaaaccagctagataccacatttttatgagaaaatcttgatagttattattcactcgagttagaaatctagcattttttgtacttctgtgatactttacctttggcgacatacttagttctttagcttaaagtactatcaagattttcttccttattattgtaaatggtgtagttagtctatttttgttgattctgttctcaatgcttcatttatataatagactattttttctgatttacattccatttttctcaaacattttatttcatacagatttgatctaatcgtgtgttatcgtgtttaccccactttacctacatattcacttatgaaaaaaatcctctcgtattttagtacgcaaaaaatgacatttttttaaggtctttctcaccgtcacctagtctattattattatttattattattaaacttgacctagttattattattagggatattggcggttaaaccacttgaactttatggtttgtaacacttaaccacaaaa

SEQ ID NO: 92108 - DNA, 512 bp, Cannabis sativa
tgatctatcttagggatatgccctctccacatttcttgtggtgttctgaacttgtttgcaacagatgtacatctgttaatgaggtagcaaacaattttgagtgcctcaccccataacttcctttctaaaccaacttcaagtaatagatatctcactctttcaagtagtgtcctattcattctttcaaccaagccattttttgtggagttttgataattattttatgtctctctattccctctttggcacagaaatctttgaatagattttagcaatattccaagccattatctgttcctaacaccttcaatttcttgccagtttgattttccagcaatgttctccaattgacaaaagtttcaaatgcttgatttttaattttgagtgggtacacccatacctttctactatagtcatctatgatgcttatgaagtaactagtcccaccaattgtctccaccttagaaggaccccataaatttgggtgtacataggccagtttctcagttgta

SEQ ID NO: 92109 - DNA, 515 bp, Cannabis sativa
atggtaaaagcctatgcatagtgggcggccaaatatggaaattgggcctcactggctaagctgtattgcgtcctcatttcatgttggggctaagaacaagggctcaggccattctttggattttggaccgggctcaaaatatttctttgttaacctcaagaagaaatattatttggtacggtctgtacccttctaaagaggttgaggaagaagtccctatggctgaggcccttgctctttaaaggaatgtgtcggagaagtaagagaagagccaagagaagaaacaagatttggttaagcagcccattttgataagggaagtcactgaggaggttgtacgtcctgctgtgcaggctgttcttaggaaagggaaagggctaatcgaagaagaattgaatgaggattcttcaaatgatgctgccctttcattcttagtccgaaaatgttcctctctatagatccagggtagaattttgaaagcacttaccttccttatagttatgtatttttttata

SEQ ID NO: 92110 - DNA, 8935 bp, Cannabis sativa
actcaatattgattcgattgacgcgattcaacttgcgttttgaaactatttcaatgctctatcaagtcatgtctcacactccaattacaattctaaagttatcattgtcaaaattcactccaagagagttgcaaaaataagctccaggttacccgcagcaggaccccctgagctccgaaaattggtcgtcaccaccaaaagctaattttcacagtcagagcatcatcaacagtagaaaacatctaacttttattttctcctatttttgtgggcctccttcacttataaaaagagctcccttagcttcttttttacattcagaaaactaccgacaaggtcagagcatctctctctagaaattagagtttgaacatcttactctgaacatgccagagaggcatcctgctcggttcccgagcagatgttccaagtggagtccacgtgtcaccattcccgtgatgccacgtcagagtgcaaaatttaggataacaggtatatttaaactattttattttttaaaaaataaaaatgtaatgatttggaccaatcagggattgtcacgtgacaatttacttaacacttaaacttaggtatttatttgccgttaaacttaagtatttatgctgcaagtcaccaaattttaaattaaagaggaaaatctcactctaacaaaatttaaataactattaaaataagcttataatgataatcattcaaattatattattatttgcatacgaactatgttagaaataatttataaatcaagaacaattgaaattaatgcaaattaatgtttctaaatataaagacttcgttttaagcatttgtaaagaagaaaaacagaacatgagagaaagaactttaagagattgagtttgggaaacactttcaagaattttttttttttttttttttgaataaaacactttcaagaattttaagggaagtgaagaagagttttgagtcttgaacatgtgatggttcaagaactctagagtaaaaagagtcttatatatcctttatttttgctcttaggttaaaaactcaagctataaacttaatccgtgttctaaagttgtaataacaaaagttgatgaagataatagaactcatggagggaactagagtagaccattggttaagctgaatatataagtataaatttgggtattgtgtttttgctttgagaaattattttcactttagattatctttcttattcttgttcttgcctatttttgagttggtgttgtgtgtttccaacataatctcacaaccttctcaatgggttttaggatttccacttattttgggtattgatgagtgccttcaacgacattacatgagtactgttagtgactgaagagttgttactagtggtggttttccatctttgaagcttagatctaagtttgctatattattgttatttggtttttgttggttttttttttggttttatgttccaattttggattttcccttattagggagtttgggtatgtttcttaagtttgtttacttatagtacttgttaaagactgtcattccaaatagtgttgtaaatacggattagattttttgacatgacacgaaattggtacgagttcagaagggatgagcacaactaggtacgaaaaaatacgggcttgaacacgacacaagtgaaaaatatgtccttaagcacgacacgacactaaaaacatgaaagacatgacacgtaagcacgaatagactagcttaaaaagcacaacacacaacaagtccgaaaaacacaacacgacatattaaaaaatcttataatatattaataataacaataagatatgaatttatcaattataaataaattataataataaaacataaataaaatattgaatattataattctataattaagacatgaaaaattaagattatatattaatttatttatagagtgtaatataaaatttgagtatttataaataaatatgtaaattttaatagtaataattttttaatatgattatttgtaaaattttgttcaaaagttatataaatataattaaaattttaaaatatatataatttaataaatgtaaaaaaaaaatataaaaaagtaaagtatgaatttaaggccgaatacgaaaatgaactggcctgtttaagaaatacgagctgacgcaagcaaagcacatcacgaatcagagcacaacacgaaaatatcaaacctacgggtcgtgctggacctaccctttaaaactgttagcacgatacgacacaacccatatttttctgtaacatggcacgacacggtccgttttttgaaaagtatggataaatacaagccgagtcagcacgatacgcacgaacttattacaaataatgtttgtgtcttgatatgttggtcatttgatcttgttgtttagcttgcttgctcttttggggaattattcactattttgacttcatgagttattgtatcaaaccccttcctttattctcttcatgaaactttgaacttaccctctaaaaacaacctcctctaccaagtggcacatatatataaatgtatcattactactaggtaattttgttagaaattaatatataaataaggagaaataaatagacaataataatatatatattaattaaagaattgaaatataaatacaaaataataacatacaatatcaataattgaaaaaaaatcaaggcacattaaaaatactttctttaaagcaaatttactgctctacttgaatgatgttacatttttttttaatttaagcgtttatatattacaactatattttacctgagactcgaatccagaactttcaagacacacacccacctatggccacttgagctagcctcaagtagttgaatgatgttacgtaatacgtagacaatcacttctcacagatacaatgattattaaatagacaaatacaccactttcacttctctaacaaactcaaattaatacttttactatgccattttcactactccaataaattcaaattaatacttttactctaaccttaagatttacgagaggaagacagagaaaataagactagagtttttaagagtatgatactttgttggtatgtatagaataaaaggagaagtctttttttatagacttcatatggagtgtaaataacaagtgtgaaagcaagtgaaaattctacaaaattaatgcaaatcgattaatcacaatattcaccataatttctcatatcaatcactatattaactattattatagttattaaccaaatttgcatttattagcccttatcaatagaccacaaatttaggcattaatttagcattcattcactagtctcaaattaactatttatcatatattttatatgatttttcaacaaattttataaattggtaagatttccaataattaaccaattatttttcttttcaaataaatcaaatataagatatattattattaaaatccattgtttgatctaacccgagaagaaataaataatttgtgtttacattttgttcaatctttaatcttaatcccaaatctaatcaatgtgggactcacatttttatttccattcctaaacaaattttagcaagtaaccaagctaatcatatcccttattaaaaaattaataaaaaaaaaaaaaagctaatcataattcataaccattctttctatttttattcttcaatacaccctaaaagttaataaatctatattttttccttaaacaaattattcattataatactatttttattaaagtaagtgcaaaattatctttttttccctacaaaattataaagaaaaaagaaaataataaataaataaaatttttgcaccttgaattatgatttttgtagagttttgtccttgaatttttcagttttacgaaaattcccctcaaattatgcaaattgttacaaatatcccctctaattacatcctgctcattttttaaaataatttacttatgtaattatgagttacaagtataattaattatagtacaagggcttatataatatatttaagctacctaaaatttaatttattgacattaaacatacaaacaatagttctaagaatacacatacatactctcataatttattattagattgtaatttgtgtatttattttatgtttgaactcttaactaagctagattaatgttagtactgcgtgaacaaattattcaaataaatgacaattatgcaactgcagagagatatttgtaataatttttatagttcaaaaacgaaaattaaggggtcaaaaatttacatggggataaatcatattggataattctaaaactacatcccttaaaaggagtctatcagtgcattctttctctattttgtcatctgaaagaattttgtagtctaatatttttcacggtcgtctatgttgtacttatttaagtcattttgtaaaatttgaaagattcaaaaaaatataacacgccgaaaatatgattcaaacagtttgttatacgcgagactcttttatcctataccgatgtgaaatagactgaatcttatttatagcgtgttaaattttttaaaatttctcaaaattttataaaatatcttaaataacaacttaaacgacatgaaaaaattaaactaaaaaattttcttaaataaaaaatacatcagtataaccgagacgggtacattataaaatttttcaatctaatttattaaaaaaaaaaagggcccatggctatcatttgagagactatccctatctgttttttccttttaaataattggaaccatatgtaagctcaccttttctttttcttattttttattttattttatttcgtaattttttgattttccagttctctctctctctctctctttttctttctctatctcaattcctcggtcggcgactttttcatttttcgggtccattggggtcgcgatcggagaacctctaaccgccgtttggatcattccgccgccgattaaatatccggctgatctccttcttcaacttctagcttttggtttgctttcaggtaggtacgatgtaattctctttctttgatctgattttggtttcttgtttgggttggttctccaaaagagaagaaaaagttgaactatggactgtggttgtttgttttctgaactatatgactcagctcagttatatgagctagttgcattgtttgtatgttatgtgagaaatattgagattcagatattgaatgtgtttcactatatatatatatatatatatattgttttggttagtgatggcttttatagtaaaataataattaattgtatgattttagtaggagtttaaatgctttggattttagctatttttttccctatgtggagtggagtagtaaaaagagcatgattattaattcttacttattgatggagctctctgaagatgtatttagttggaaaacttgccattatgtgagtgatttttatacttaatttgggtttatgattatgtgtggaagttttatattgtatgaacaaatgaggcatacttggaaatgttggggatgtcttgaatatttggttgtgtcatgttacttaactataatgacatttttaatgccttaacatttcgaggatatgatccaacactaaattttttttaatgttatcttaacaatcttctgcgcaatgtcaaaaggtagattattggctggttcttgttgtggaggacaactgtaaagaagcaacctttgatgtacagatgagcagaaccaatgttattggcagtagaaggaggaggattcttctcatcttcggcttctgggtatagcaaaggtctggcccttcttctcttgggtcagaagaacaaggacaaacccatgagagttgcgccgtggaatcagtaccagttggtggaccaagaatctgaccctgacctccagctggcttctacgaagaaccgactcgcccgcgggtgtgcttcctttgtctgctttcgtcgcacttccgctgggcttgacactaaatctcctcttaaagtaggtcctgcccaacatcaggatgtcttgccagattctcttgcttctgatagtgataagaacaaagatcatgcagccaatacagttgacagtgacgatgcaagtaaagtttatcttaaaagtagcttgaagaagtcatcaaacactacttcagtttctgttgagactggaaatgacagtgtaaggctcagtgaagcaggcagtgatatacctggcacagaaagaagaaaagtgcaatggacagatacttgtgggagtgagcttgctgaaatcaaggaattcgagcccaggtatggcattcttataatttgttcaaggttttgatgctttccctttattaatttatgctttaattgtcctttttttgttttttttttctttctttctttagccttttctttctttctttctttctttctttcttttcttttttacctgtttgattttgtccttttgttagttgattggacttataataaattaataatgtatgattcatgaatgtatgtgtgatttgtcattgatcatctgagtttcattggactgtttgcctttaccaaactggtgattgtctatttataattaagcatgttgtgtatgattcatgcaaataaaaagaaggcttttctgtaggctttgttttattgttcaccataggtaggaagagaagaacaaagatagataaaggaactgataaaataaagggaatgagaactttggactgaaagataatttcatcttatatatcatggttgttatgttatgtgttgtcatatgtgagacagatatagaagttcacaagtgtttttttttacacaaaattttatgttttgtttggggaaaattgattgtagttatgataggtgtctgtcgttccatgtcaaggttttagtgttattggtagttaagttttaagaaaacaagttattataaatactgaaaacctgacaaaagtaagctcagaaaatcaataattggtctgtctgtgttggagataaatgcaccaaggtttttgttggattgctcattttgagaattttgtttgccaccgttgtgaagaaatttttgaaggtacaaaatcaatgattatagtgatagaaaatgtggaaggtctacaagagaagtatgataataatgttgattaaagtaaacaaagagtttaaatgtgagattccttgctacaggaagaggttgtatagatttatgagaaaaagccaagaacacaaaaatcaacgtgggtatactgtatattgcggaagtgaagaagttaagctgtgttggagaatatgggtaatatacattccataaatcatgatatgcaattaggtgtgtggctaacgacaatgacaaaaagttcttaatagccttatggtttcagagttattagttttgaacattttgaaattgaggtaaagttaaaagtaccaactcttggagttcttatttgaacctagtattcccaaccaaagtaatgaaaactaggagatatgcatatccatgctcttttctttatcattcaacgtttcttattggagttgtttcagatatggaaccatacatggcatgattgaaaattagtctctagctattaaggtaatacactcaggaatctaaacctaattcatatttaaaaggtgattatgtgttcaagataataatattcttcttttcacaagcctttttttttaaaaaaaaaaaaaaaaaatctatatcctatttggtcatattggagtttttttagaagttggagaagagctccattaaaggaatgagtttgtacatatattgagagcatgatactattggtgatccacctcctatttgttttagcatttggaatggattggtattttaaatactagcataatagcctgttgggggcatgaacttgagtttgaatcattgcaatttgcatctcaaactaagttcttcatatgttttatcaaaaaaaaaaaagttcttcatatgttggtccaattgtttgtttgtatttatttcttatgaaatgaattgatcatgtaaacagtactgcatttcccttttgtttcatcatcctaagaaacaccaacatatttcgatgaagaaagtcatttagtgtgtttttgcgtgttctcattttgtttagtgtttataccttattatcattccaaaagatctgttgtattgacataatcccccaagttcatgatgctgtttctctaccatatatcccttcacaacatgtcatttagaaattaataactcgtgatcagaaaaccatgctcactggcctttgttcaattcttgttcgatattatttttgtacacatcaatttctgtagtctttgttttaatctttgctgacatgcaaaaacattgatcacttggcagtgaagtggacctatcagacgatgaatatgataacgggactgaaagaagttgttcgtgtgcaatcatgtagtttggttttagttgaggtgacatggggatttgcctcggttttcattgcaacgatgaaaaaagtgaaattacacagctgaaggagcttgttcatcgttcctctgagctagtcagattgattgatttctggatgaagaaacggggaaaccaaacgagtttttgatccgatagagcaaggaaattcgcttcctatttgtctatattcagttgctgagggttttcaatattttttttttcctcttgtgggcatattagccatttatggttttgtttattttcttaagctcatgtatgtgtgactgtcttgtttatttcctttgtcgtatttattgtgttattctttttttggtttctttcttttctttctacttatgttttagaccaaagtttcagtcattcccctcttctgtttttggttctcttctcttcttatatataaatgaaaaaaaaaaaaa

SEQ ID NO: 92111 - DNA, 980 bp, Cannabis sativa
aataaatagttgaaaaaaaatttacctctcgaatcttatcagggtatcctttgtttctttttgtaagttgtatcctcggataataatgaagaactcacaccgtagtcttccgaatcttccaccacacacaaagaataatgtgggctattagaatatgtattgtatattgtgttcttatttattttcaacacacgagtaagaactcttagaagtggtgatgatagaaaaaagtttaatcaagattaattctttttaggcttcctaaatataatatgtatctatttttagatgtatatgatatatattaaaaccaataaaacttttatttaaataaatatttaaatttaaaataataaatttagtcatatttaattatttgaataaatatttataattaaatttgttatagatatttattttgaaataaatatttaggtttgaattaaatatttaataatcaattgagagaatcttccgactactttataggaacatctcaaccattataaaaatctataaatactttttaaattaaatataaataaatatttaattttaaattagttaacccaaaactaaatccagtggggatatccctacattaggggcgcctatcactgtgtcttaccacagtgtaggtggagccacctttgtcttaaccagacaatagtggtgtctcttgttcacacaatttttatctttttcctaattaatttaattaataaatttaaaaataaattatttattgcaatataaataattactattttgacaaatcaaaatatattttctgaacatcaatatacaacttctatcgctttccttgataatgtttcaaggtggtgatctgagaactatggacctataattctaagctgcaataaactagattatttattgaatctcataaactaaataatcttgtttattaattccatgattactccacaatgatgaatatagaattgaactcttagtaa

SEQ ID NO: 92112 - DNA, 1057 bp, Cannabis sativa
ttctaggttatatatagataactattttttcactttaatttatcccaaagttagtattatttatttatttttatgtgggtgattgaagaacttaattatgctcagttagttgtatttcttttattaaaaaatgaatgcaaaatacaattttgcatttttcgatatttgtatatgtaaagtattttcgaaaagttttctattgtaatttatttaaatatatctaaaacaatatatataaaggatgacctaaataaaattggggtgacatgctataaatctttctttgtattttctcttttttctccttttttcacatttttttaatattttttttttatatctttagaatatgagagttatttttaaaaagtcccacatagtttagaaactattgtagtgatatagatctagcttatatatagatcactattattttactttagtttatcataaagttattattatttacttatttttatgtaggtaattgaagaacttaattatgcacatttagttataattttttttttatttgaatgcaaaacacatcttttacactttttaatctttgtcaagtatttcatgtaaaaattatttttttaagaattttttattgtaattttcatttaactatagttaaaataattaaagataatttcttagtcacccttattattttttttagatgaaagcaacacatatctttgcatttttcaaaatttttcaaatattgaaaattaaaaaaaatcattttaagctttttaacaaataaaaaaaaattataacttttttattttaaattattaattttagttgaatatatatatatatataatattattatataaaaaataataaaaaattattccattttttattttgaaataaaaagaaaatagcaaacacataatttgtaatatttcacttttttagtaacaatattaacaactactaaagatatgaatttctaaaataaccaaataatcataaatgaaattttatttttcaatgattataacgatcgcgtgagcgctcaactaggggtgttcacaaagta

SEQ ID NO: 92113 - DNA, 1701 bp, Cannabis sativa
ttttggctggtatgctaaataaagttgcaataactttccataaagaagtttagactgctcggctcccaaaatgtttacaattttaccagaacccctgattttggggaaaaaaagaaaaagaaaagaaaagaaactgaaatcatgttaatttaaagctaaaacattattcaaaaaaaaaaaaaaaacatgatcagacaaagtacagaataacacatccttacagttagagtcacagtaatatctcccaatcagatggtaatcactagtttttcaaggtgctattttcagtaattagtgattttctttctactaaaaattaagttaacttgcatgaatgaaaaatatgtaagatgctattacaatgcattcctttaaaaagagtttactaatatagtatttgagataattttatactttaatttttttcatgagcgactacgatatagttatttaaaacattctataaaatttggagagattcaaaaaaaaaccttaacacaccgaaaataaaattcaaatagtttgtacgtgtgaaatagactgtttgaaccttatttatcggcgtgttgaatttttctaaattttttaaaattttgtaggatgtcttaaataattacaacgtaaacgatcataaaaaatattagactaaaaaattcttccaaatactaaaacagatagagatgcattaataaactttttttagggatgcattgtagaatttttcaataagtacccaagtaagtttgtaagcggcataaacctagtaatttttttagcggcataagtaccctacccaatgtttataaaactgtaatttttctctagtttcatcagtacagattctgttattatcttaaatagggcaagtataatatactcaaattctaaattatttaatctggatgaaaatatgtagtattagttacttccaaatcttcttttaataaattcaaaatggaacttgtatcgatgaaaatagaaaaaaattattgtttcacaaacattggatacttatgtcactaaaaaaattattatatttatgtcacttacaaactcaaaaatttgagtacttataccgttatttaccttaaacataattataaataaatcactatttttaccaatatcttgtaactaatggatccaatcaaattaataattgaaatactattatatatatccaatatatataagcgttaaaaataaatctaattaataattagattggttcaacttttctttaataattgaattttaactttagaacacatttttttaatattagttaattaacttcaatatatatatattaaaaaattcataaaaactaaaattaaccaatcattaatacaataaaagtaacaaataaaatatcttaaaatattcaacacaaaaactaagaataagattagttatttttagagttttcttttaagtgtacaatcacagccggccagagggtggggcagccggggcataggccccaggccctacaatttttgaggccccgaaaaattaaaattaatatacataaattaaaattaaaattaaaatatataatatatataaatatttgattgaaaaaatatgcataatagtggtacagcacaaatggtaaggggttcgtgaatgtgaatgttgtgttggtgagttcgatccttcactctctcattttgtggttattttacaatttaaatggtt

SEQ ID NO: 92114 - DNA, 1096 bp, Cannabis sativa
cagtggacatccaaggaccaaataatggatgcaaagaaccatccatcgactccaccgtaaccggcgaagctagtgacagccccttctctgatggcccagacgaccacagttgtagcaaaaaattccaattttttcgaacttaaactgaagccatcttttctcccaaaaaattaagtcaaaataacaacccgagaccaacggattatggaagttgagatcaactaagattctgaaaaaacatccccatgtcacaggcttcgcctcatacaactcaactgtaacaaccttgcctatcattcctcctaaccgattaccattagcagtcgaaaagaactcgtggggaagattatgaacctgtacccacacccttaacacattcacagagcaagatctttctatgccatgaaaccaagcatacaggataaaggagtatcctctaaatgaccagggacttttctccaaagcccattctttatcttccacacattcaaagcttagtttgaaacagttatacacatcaggggcttcggatagagagcagacagccaccggtttcaaccaatttttagttacaaactctataatagcctcagcgtcaacattcatgggcgccaccacctttccaaataagcacagggacgacagggccttcagcgagttggcacactgcgacaaagttatcgaggcttcggcacacgtaaagcttttccccaaacgagaagcattatcagtagtaactaactccattaaaagcacagacaacaaaagacaaaggggagtaaagacactcactgtaggaccaactaccctactccaaacgcaataaagaatcacaccccgacaaagatagagcacaaaacaaagacgaccaacccccacccacaggaatacagctaggaaaacaagagaaaacaaactaacctttgactaaacaaactcactaagatgcacaccccgacaaagtaagaacacaaagaaccgagttcaaacagtaggaagagaaaacaaaaaaccagagattaatagaagactaatctcaaaagaaactcaacaaacattacgatcgaaacacccctcactcatacattcattcact

SEQ ID NO: 92115 - DNA, 1114 bp, Cannabis sativa
  modified_base (1045)..(1047): a, c, t, g, unknown or other
tccttgtctaattgatattttttagacagaactttgccgacccgcatgatccccgcagaagccttcatgaatttttctaatgatttcatttgcttctgggggaagaacacactgaagtaggggcattgaataccctcttctatatagtttgccttcgatcattgtgtaacgaggcactgtatacaaaacttttcgcgccttgtttttgtcatttggaagttttcagttgagtaaatagttaacgataggcgtcatccatgttagagagctatctatcatctcaacgtcttctgtttcacatatacttggctcgctcatcatttctatcagaactagatttaattcgtctagattattctgcgaggccagttttgctatggcattgacattacagttctgttctctcagaattttttcgattttaaagtaatccaatctttccaagttcttctgaaccttctctaaatactttgccattttcaagcctttggcctggtattcccggaggacttggtttacgatcaattgtgaatcactatgacagatgagatttttgactttcaaggcctcacctatctttaagtcaccgatcaaggcttcatactcagcctcgttattagatgtatcaaattggaatctcagagcatagtgaaacttaaagtcttctagtgatattaatatcacccctgcacccgaaccctgctcgttggatgcaccatccacatataacttctaggtttccacatctcgctgattagatgggatttcttttagggttataccttctatcaagaagtcagctaaagcttgatccttgatggatgttcggggatggtatgttatgtcaaactgccccagttcaatagaccactttatcaatcttccagaagcatctggttttgataaaacttgtctcaagggcttatcggttaacacttttatggggtgagcctggaagtatggccgtagtttgcgagacgcgtggactaggcataacacgatttttctagaggggatacctagattctgcccctagtaacctttnnnttacgtagtaaataggttgctggttcttaccctcttctcgcattatagttgcactaatcgcatcttc

SEQ ID NO: 92116 - DNA, 1309 bp, Cannabis sativa
atataataacacgaatacataattattttttaatgacaaaattaatgtccttttttttaaaaaaaaaatatgtgcattatgataaataagattaacctatacatccttgtaatagtaatatatctgaactgaacttttacacagtaattatgtctacacaaattattattagagagtcgagtgaaccaaaacacaactaattttaatagcccaccttaacacacagtccttgttcatccatacaaattataatattatttagtgagttttaattgttaaaattgctcaaaaacaatgacacaaatgagttttctcaatatatatatatatgtacatatatttataataatgttataacttaattataatcccaccttcagattaaatacaacaacattattttcggtatatatgtggtgaactgtctttggcattatgagctgtatcatatacctttaacatatgaaaatcattagaaaattgcgcgtataaacaacagtacttgttaaaattatgaaaataaaatgacaagagcaatgagacgtactatacagatgaaaatcatttgagttaatagggaatgaaaatcatttgagttaatagggaaatatatgagcttctactagctagctagccacccattgactacctaataataataattatatataatataatacacatgtctccaagtatagctagtggagtagtacctagtacagagaatccctctattttggcatggtggtaggcctaatagcccactttttcttttattagcttgttaggaaaaatgagaaaaatattatttctgtctaccactttatttttggtatcatactctaattaaatattatgtcttatataacttaaaataataacttttaaaaaaatatggctaactaatcacttataaaaagtactaagtatactgatgctcaatatcaatacttgcttattagttgattcaaaaaccatttgccaaagcagattagttaattaactagcctgcttggcaacatttaaaaaaaaaaaataaacaattaagaaataagcacacttgacttgagcaccatcaaaagccaatataagttaaatattatacactcaggtttgccatttctagctaagcttgtactattaatttagtgattagtagttcttcactccacacacttaaatttttatatatgtgcactaaaaaaaatctcattatagctatatagctgggacaagcaaatcatgaacaaatatttctttcccttcccattaagagatgtactaatattaatatatatctatatatata

SEQ ID NO: 92117 - DNA, 678 bp, Cannabis sativa
agttaaactcaagaaaacaagaaaaaaagaacaaaacaaagccaaacttggtcataaaaggtcttttgcatggatcgttgtcgcccatgtgtgtatagggtcgtggcatccaccgagtccacaagcaacgaaaaatcgtggcttgtatggccacatatgattattctggatgaaacataacgaatttgactccttttccagctggaagtgatcctactaaatcgataccccaaacagtaaaaggccacatgctgctcatcaaggttatctctattgggggagctcctggaactttggaatagtgttgacactattcacatttccagacatattcaatgcaatccttcttcatagttggtcaaaaatatccttgacggatgatctttttggaaaaaattggtccaaacgtatgatctccacaaaatccttcatgtattttgtacataacaacgcatatctttgttacagctatgcatatcaagtatggcactgataaccctcttttgtatagttttccatccatgagcacgtgtcttggggcttggtactggatctttcacgcaattgctctgtcatcagagagcgttctaaattttaggaacttatgaattggagccgtccaggaagttgaataatcaattgtggttaccccaatgtttatgtgattagaatgaataa

SEQ ID NO: 92118 - DNA, 579 bp, Cannabis sativa
tttttttctaaataaaaaactcttaattatgaatagtatttgtgactataaatgagatacggtgataaaagcagttttaaaattatatgatgatatatctttctaatattttatttagtatagcatttgaagataattattttattaaatgattataaaaaattaaaattaaataagttaattaaaaaatctaaaacatactatttaaatttaaatttaattagataattttttttttttattaattagtaaattttatttgatatatttcattttaaaaaaaaaaaaacaatgtagattcaccttatatataaaaatgatcactagtaaatttataattttatttgttttatgttagaagaaatttattggaaaatacaataatgacaacggctttgaatgtagtgatgactacaaatgagatactgtaatgacaacagttttaaaatcatataataagctttctatagagtcatcaatcattataattttatttttttgtattctaattcaattaatttaaaggaaatatatattataaaaactaacttcaggataatatgtatttataattaatta

SEQ ID NO: 92119 - DNA, 513 bp, Cannabis sativa
tttgttctagaatatgtttgataaattatcatcttgtgatgtgtcaactttttatcaattagccccatattcaatttcattgtagtttttgtgtattttaagacttctaaaatttaaagtagagatactagtgaacatatgcataggtgacagcatatttcgtagtgttctccttcgtatatatgcatcttgatttctgattaggaaaaaattatccatttgaaaatacatcatgagattaggcacatttactgacatgggcggctgtaatttgaaggtttcacctatagttgtatctcgtccctgatataattacaatgtcatcagtgctgggttggcgtgctcccataaatatcaaatcatcctattctattttctttattgagaagattatttgtatttttatttcatgagtttgtagttgcataagtaagtaagcatatcttcttcgtagtggaacagtttttgggaaagctttaatacattaatacattaaaatttaatggtcagtat

SEQ ID NO: 92120 - DNA, 644 bp, Cannabis sativa
ttttgtggttaaatgttacaaaccgtaaagttcaaatggtttagccgccaatatccctaattaataataatagtttatgttgtaaaagattagatagaaacaatgtgattttgatatagacaatttgatctatatgaacatatatataaacgttacaagttcattaaatattaattaattaccatgtgaatgtatatatgactgtttttttttttcttcaattcttatatttaattggaagcattgatgtgggttttaaaggaagaaaatacatttggcaaaataaaagattttgtggattggatatacatataatattgcttatctctataatacaattttttactattaacatgctcgtgataatcatcatgcttataaccagggtaattaaattaaaatatattctttttcaaaaatatatatatataaaataaaataacgaaaataattaataatgcaactttttaattaatgaattaatcgtttttaatacgtataaattaattaataattgtggatattattatgggtggtagctgcttttagttacatgagataaacattcttcttattattaattattattattatttcttactcaatatataattaatacatgcacctaatctgtagatctctat

SEQ ID NO: 92121 - DNA, 2258 bp, Cannabis sativa
ttatttatttttattttaatttaagtttttctttttctaaaagaaaataaataaaatagtccagtctatttttaaactaaacacaggattactttcaccataatcgaatcttgtccagtctagtccaatcattttcagtccaatccagtctaatcctgcgtaccaaacgggtcatacgtgttatatattaataacataatttaatatttattgttaattaataataaaatgttatgtaacatcatctcaaatgtaaaatttaaaatttatattaaatttaacacaaaaataaatctatattatatttgacttactataaaaaaaaaaaaattattataatgatggttatttaatattttattgaataatttattatttttttttatctttttaattatttaaataattataatatggtaaataaagaaagtaatgttttgtaaaagtcaaataatcaaaataattagtagcattataataaataaaaaataatatttattataaattgaatttaatacaatattatattaattttgatacaacttttaacgtatactaatttaacaaacttaataaatactattgaaacaaacttaataaatactattgaaatattaattttataacaatacaactccattagatgctctaatagttttattctaaaacatgtataacaaatttgaaatagtgtatttttagtttcgaactttaaatattgtaataaagttcctaagtgctataagaaaaagattatagattcacttataaaaagaaaaaaagattatagattgaagagtgtaggttggtccggtgacgatggttttagctttaggcggctcaatgctctttcgttcatattcatttcattaattatcattcacacactgacactacaaaaccataattgttaaaaagtattattagtacttatttttttatcagtgttatattattattgatataattaagtatcagatcttagaaacatctacaagaaatgctataaaaaaatgtttgattatataaatacattttagcatttttaattgatggttacttttaaactaaaaaagaatgctacaaacaaaatatcatactataatatcctttacatattctagtttttattttttttattattatttcatttccgttaactcataaatatggacacgtggagcgttcagatgcattatatttatttatttaattttaaaatttaatatctttaatatcaaaaactaaatgctacttgtttcaaaaaaaaaataaaaataagagagatacaaaactaaattaccataactgagtgaactagtgtaatatatgtaaaaattattatgagaattgttctgtttttttttaaaaaaaacaatagtagcatttagtttatgatactaagaatattaaattttaaaataaaaaaaaatgtaatgtattttaacttttcacgtgtccatatttatgagttaacgtatattgtagtaataaatgtaagagaattataatattgagtatttttgccttaaaaaataaaaataaaatatttaagtatataaaatatgaaatattaaatatttatgctgcaatttatattttgaagtgacctaaaagtttttgatactaaagaatactaatattggagatactcttataaacttttaaaaaaataaaaaattacagttaactaatcaaattacctattaaaggtggtagcgtacaataacaatcctgtaaaacaaacacgttcacgccgacatgcctgccaatgggctaactcttaggtacgttctttctcgaaacgtgtccatatatataaaattaaattatacaattcctgttttttttaagaaaataattcttcaagataaataaattaataaatgataataaataataatagcccaaacaacggaagaatgaaaaattaattaaaaaagtcaatagagaggacgtatttttaacgtcacccgaaggatcaacgtgagagtgtaaaatttaagaccacgtgacatgcatttaataattttagctttttttttttaaacatataattttaccattttaactatctatatatttttcgttaagccaaaaaaaaaaatctatctgttataaatattaataattatgtagatgtccaaattttttatttattactatctgttataaagaacattcctcttttcttagttttccttttttttagtttcttaatattttactcttgtatttgtataaataggggttcaccc

SEQ ID NO: 92122 - DNA, 626 bp, Cannabis sativa
gtccatagttactaccacaaaaaacaaaagaaaaagtaaatttcttgaaatggctggtagatggagggaaaatagtcaccagattaacatcccagtcgatttaatctcacaaaaaatgagtatcagggcaaaggttctctcacacactctatcccaatggtcaacactaagacagtcctagccctaatttgaacaaaaatttctaccccagacgtgaaatataagaggttcagacaggggtttagcgtacttacttgtctaatacggagggaagagttacacgttaaagtagttggcctgaaagcctcaaagccagtcgatgcatcggtcacagctagcctaaaaatcaaacgcttcacctaacgaggattttggttgatcgagtcggagaggtttggtgataggaaaaagccttgcacggatgcatagtagtttttggattgaagtttttaactccttttgcgtgcaagaagttggctgatgaagagagaaattacagagagaaatatgaaccttcatgtgaaagaagtaaaaagaacgctattaagggcagtttgtatttcaaaaagaaaactggcctctgcacgatcaatgatttagaatctgtagtggatccaacagttagg

SEQ ID NO: 92123 - DNA, 1586 bp, Cannabis sativa
  modified_base (271)..(278): a, c, t, g, unknown or other
  modified_base (1112)..(1112): a, c, t, g, unknown or other
atgaatcccaaaaactttctcgaggagactccaaaggaacattttttcgggtttagcttcatgttatacttttttttaatattttaaagcattcccctaggtctgaggtatgatccttactctttatcgatttcaccaacatatcatcgatgtaaacctccatgttttgccctatttggcttccaaacattttgtttactagtcgctgatacgttgcgccagcgttctttagcccgaacgacatgaatttataacaatagagtcccatgtnnnnnnnnaagcttgtatgttcttgatctgggacgtgcatttttatttggttatatccagaatatgcgtccataaatgacataagctcctgcctagcagttgcatccactaactggtcgatcttaggaagtggaaaagagtctttttggcacgtcttattcagatcgaagaagtcaatacaagttctccaagttctgttaggtttgaggacgagaacataattggctatccacgagggataaaacacctcgcgtaaaaaatcgttgactaacaacttgtcaatttcctgttttagtgccccttgcctcttggaatccaggggcctctttttttatctctttgccgggtagtttggatcaacatgtaagtgatgacagataatcttagggtcgatccctatcatatccccatgactccaggcgaattgatcctggttcgccttcaaaaagcttattaattgctatttgagctgctcgtcaaggttcttcccaatgtacacacatttggtgggatttcctgggtcgataatagcctcttccaattcttcaattggttttagtaggtttctttcatcttgaacttggggattatgatcttcatcttttttctcgttttctcctaccaagattgtcattaacttatgaccggcctttctatgctgcaactctatctgatagcaatcgcgagccaacatctggtcaccacgcaccactcccacgccatctggtgtttggaattttaaagataggtgcttgatcaaactaactgccctagtccgatcagtgctggacgacccaataatatgttgtaagccgagggcaggtcgacaaccaagaagtctngcataacagtagcagttaaaggtgcctcgcctaaagttaatgcgagcttaattatgccaaggctagcgatgctatctccggtgaattcgtaaagattcaccatataaggccttaatttggccttttcgagccccattttctttagagtctccttataaatgatatttaccgagctcccattgtctattaacactatcttgatcctcttattggcgagttgaatggttatgaccaacggatcgacgtgagggtatctcacgttcttctcgtcttcctctgtgaatgtaatggggggttcctcagttttcaccttcttggaaggtcctaggggaaagatcgactactcgttctttatctccttcacatatcttatctaggcgttattgctttcccctacgatatgcggccctcctaaaataaccaggatgtcctctccttccacaggaataggttgtaacccctagttgtttgggt

SEQ ID NO: 92124 - DNA, 1061 bp, Cannabis sativa
ttggatgggatgcgacttagatggacgtgcaagagagatcccgagagaagagaagagagacaagaaaaagaagagagtgaaaagttgaatggggtgcggtttggatggggttgcgactctgaataaaaatttaggttaattattatatgtagtagggtttttatgttgttattgagcttgggctttttttttgttaatttgttgtgtcagtttggaaatgacgctgcatggcatctttttaaatctaatgcaaaattttaaaatgacaaaaaatctcaatgtaatctttttgcgtcagttttaggtattgatcgacacaaaaaagactattttgttgtagtgtctacttcttacgtttaaaagtagaattgagacaaatgacagagaaattaatctcaatgccaatcttgttgtttatgattatgatccctacttccttgaggctaattactctagtattggaagaaattttccacctacttatcccaccctttcagatcttatgtgtagagatttcatgtcctaaataaaatttaattttattgtaattttatttagttttaataaaggtaagaaatcctatcttgatcttgtcataagctttgttcacatgtgttattacgtgattatatgtttaatatatcaatttttaaatctcaattagtatttacaattacagtgatatcatcacagttaaaagtaattgtaattatatgcttcaaattattcagtcacatgatttatcagtgcacaagatttacacttacgtgataattagtgatgaggtttgcttacacttggataagtggagtgtcttttcgagagcaatattagtaaagtaaaccaagatcgtatgtattagctatacatcgaactgaaggaatattgacgatggaaaagatatcataaccttaccgttatattttttctaaattgatgtttaattgatcatagatcaattgatctcaattctgagatagttgagctctagcttaattgtattacataagttctttgacttgttcgtactagctaagccgtaggactagcccatacttaca

SEQ ID NO: 92125 - DNA, 560 bp, Cannabis sativa
  modified_base (27)..(30): a, c, t, g, unknown or other
actaatcagattgtaaagagttttatnnnnggcataaaacccaacaatatacacggtcaaatcgggatactttctagcttctcacttggaagatcaaaaccctacggttagtggttctcaaacttcaaaattctagaaaaaattctggtcctttctatcccatcaaaggtgcgaatttttatatggaggcaattcatgattgcttcctagtagttgcaattctccataaaagacatattgctaattctcccaactgttctttgtgtcgctatgataaagaaacaaccaaccatgcactatttttttgccaacgacccagaaaagtttggaaacattcacctttctctcttaataatttattttcaagccaaaagagcttaaaagaattattgctcaatgtttctaatatgtggaatgatttacaattttggagcaattcattacaactctttggtgtgtttggaatgagagaaacaaagaaattcatggcacaaaaccaaagccatatcaggttttactctattttgctttgaattacttggaggaatatcacttggcac

SEQ ID NO: 92126 - DNA, 569 bp, Cannabis sativa
aagaaccctaagtcatatatactcaaagaatattatttactatttatgaattaaggtacgctctcattatttgagttattttctttgaatcaacaaatatattatttagatctatgcctatacatttatataaattatattattaatagataatatatttatttataaaattgaatcttgttattgttataacttaggtcggatagttattagaggtttttttattcattttaacataatttggaaaaaagtgaatggagatctatcttaaaatcaattgacaatagaagaagtaactcattcatccattcatcttatataatatattatctttccacacattaacaatgtgaagaattctaacatatattagtttacttttcattactttatttaataatatttattccattaataattactttgaaattgtagatagattggtccgggcataaatatatatatctaacatctataaataaatggtgatttagcttagatcgatgattatatatcttttcttattgatttgtattaaactcttggttgttgttaataagagtttaatt

SEQ ID NO: 92127 - DNA, 505 bp, Cannabis sativa
attcgtcttttatacttaaataatgtgattctctttttttttttcacacaagaaagtaattaatattttcaaatatctttctaacattgtatgtgggcctagaacattattgaaggaaatgccataaatttggattgatggttgtttcagcctatgtgtacgtacaaaatttaatgttttataatcttttttttttttgtcgttttcattatagcttccaattaatatgcatttagcttctcacatgtgtgggtcaagtcaatccattaatatgcagaaaagtacgtgtttcatcatataaaattcaatatatgaaatttttatattatatacagtactgcttgcacggtgtatgcatatagcttttagagaatctccaaggagatatcaaatttggtgttacattatcactaaatttagtgtcaaaaattatttttactccaaccacaacaccaaaaattacactaaaaaaatatttcttatattatattaattttttaataaa

SEQ ID NO: 92128 - DNA, 558 bp, Cannabis sativa
  modified_base (434)..(434): a, c, t, g, unknown or other
ttaattatttgttaaggtctcttcattatatgaggctagtgacttttgtttagaaaactcaattacatggatggctagggacataaattaacaaaaaaaagaatccaatctttcctcatagattgtatattggttcccttaaaagttaattctagtattgaatgattttgagctcaaatttataatcagattataacttaattattcactagtgacttaataatacttaaggaatataaagtaaattagaaaggtaaaatagtaattttttattttaatttatgaaccaatttattggagggttgaacaattgtaagatgatatgaacaacttaagataagatttctctaaaagtatgtttaaatattttgtatacaaacatatttttgatatagtataaaaaaagatattattttttaattaagtagctaaantaagcatagaaattcaaattttccttatattattcgctggatcaaaatctaatagtttaatatttataattaaatttatttagtaaccatcaatggatattacttattgagaagtgttccatat

SEQ ID NO: 92129 - DNA, 840 bp, Cannabis sativa
tgactaaggatctcgaggcttctgatcgacttgaggagaccatcgaaaccttatctgcagaggtgaatagccttcaggatgaaaggacgtctcttcgacctttcctccctcgggtagaagaggagaagaagtctgaggaggaggagcttacagccgaggtggagaagctgggagaaaaggtccatgtcttagagacagccggcctcgagctcttttatgacttttggaaggctaaccctcaggcaaactttgatcagttgggtgaagccaaaggcatgtatctcgagttctgcgcttcccaagtggcttatggtgagcctgatgcgactgcttcttccaccggccaaaatgctaatgtacctcccgttcaaacaacagatcctccagctcctaccggcccagaagatctgaaccgagagcatgggactccagctatttaaatacttcttcttttatccttctcttctatatatcttattcggccataaggccttttttaagacatcatgaccggccaagcggtctttaaacttggaattattattccttttacagacaactggctgaccgggcagcctttaatcctggtattaagtgcttttgttatctttaatgaattccattctctgtttataatcatcgtgttatccttacgaaatgctttgtacaggtataggtgccccccaagtgaccgaggagacttatgactcttggtcacttgtttatcacaagtacactatttatctgctcggtgctttgggttcgaccaaaccttttgtacgcactggatggtaacttagaaacatgctgataatttcgactcaattgaattttgaaata

SEQ ID NO: 92130 - DNA, 557 bp, Cannabis sativa
atttctaagctattacaagttttggtaccactctctatctatttgactcacttttttaggacaaagggagtcaattctatgtttgacagtaagctgatttttctttacaattgcatctacattatcaatcttattattccatgtttgacagtaacccagctacagccgctacaagaactttcttcttgaaggagctgatctttgcacgatttatccgtctaagaagtttgttgaggtcattggagagaacaccccaggacaaccagcttttaatctgtttcacacactcccgagctaactggcagttaaagaacagatgccttatcgattcttcatggtgagagcataagctgcaagtggcatcagctgctatatggagcttgtgcaatctatctttggtcttcaatcagttttgaattgaaagccaagtgatgaaggtgtgtatggggatattaaatctcccccacacttcattactctaagtgactttagtttgtggtggacagagcaatttatagccaagagagatagtatacctattggatgtgaattgttga

SEQ ID NO: 92131 - DNA, 1960 bp, Cannabis sativa
gcggtgtggtgcggtggtgtggtgcggtgcgagcgtgcggtgcgagcggtcggtgcgagcggtttgggcggtttgatgaacacccctaagaaggacaatctatggatgaaataggttcattgtgtatacattaagcatcacaactggtgggagtataaagctccccaaagcagtagttggtactggaaaaaaaaaatggtggccattagagacatagtgaagtagaagtttcggccagaagagttctcaaagagtgaattcaaagtggcagcaggttatagaagccttgcacaagatcatgagagagtggaatggtgcaatgaagtttggtctagactaaatataccgaagcacaactttctaacatggttggctatgttaaataggttgaagaccaaagataggctatgcaaatacaaggtgatcgattcatctacctaccccttctgcaatagtgcagaagaaaccatagaccatctgttcttcaagtgtgttttttctcagcaatgttttctaaagctgaaagattggcttaaatggtacacacgagctgatagtttgagtaacattttaaaaagcataaggaaagccaagcagttcaagttcaagaagtgtgtaaaagcggctagtgttgcagccctagtgtatctgatatggagaacaaggaatgacttaatctggaatgagaaaactcagcagccaaccaaactattccagcagctgaaaagaaatgttaaaattagagtgatgcttgtaatgccaaaaaaaaagtaaaactcaaaaatagagaatggtttgaaagtttgtaaataattgtatagaaattattaaggccattgatggtgcttataggttgtaaataaaagttttgtgcaatgaacctcatctgattcatcaaaaaaaaaataactatagtatatcttaacaacaacatgaaaataattataaaacaacaaaaagacaattatgaagtaatagaatagtaacaagacatcaatttcgttgtaatttgtaaaacaatatcaactcctcagcatgtttttgtattacggtattctttgtttttacttagttttaaccacttgatttatttttttgtactactacattacttttttggataaaatttattgttacaacttcataatttcaactcttttttttttctctttctttttgagttagtgaaagttaaaatgacaatttattttttagaagttaaataacaattacattaatgatagaaataataaaatcttatgattttaaaatgtggtatataatataatgtctaatatataattaaaataataaaaaaattaactagataacaatataattttaatatgtcaatatctaatagtgcacattatgtcaattaaaaaaataaaaaaacttacattgtattttaaaaaaatgtgtcaaataaataaactaaatatatgtatctacatctacaaagcaaaacacatacaacaaaaaaattaagaataaactaaaaatatacaccataaaaaatgcacatgaataaaaaaacaactaaaaaataactgtagaacaaaaaaacattctgaaaactactaaaacataacataaaaataacaaaacaaatgcacatatatacaacaaaaaaaattgtctagaaaaaactaaaaatatacaccataacaaatacacagaaattaaaaaataactatacaataaaaaatacataaaaacagtagaaaaacaactataaaataattataaaacacgtaaacaacaacatgaaaataattatataacaacaaaaagacaattacaaaaataacaaaataataacaagacatcaatctcgttgcagtaagcaaatcatttataaatgaactctgaataaactacaaacataaaaaaaaatactatttttattaatcatgtaagaaaaaaaaaagataagaggagtgttcctaatttttttttt

SEQ ID NO: 92132 - DNA, 795 bp, Cannabis sativa
aaagagacaagggtgagagtaaaccaaaagaaacaatgaccaacatcagcttctcttaattaatagttaataaaccaattatacttcaattttgttgtgttgacttaaaagcttacttatagagacccttttttgaaacttttccttcctactactcaaatgtcttttaaattcatgttcagcaagcataataatgcaagaatttttttatatccagaaccaaaaattgtagtagcaataaagtactacacaaaaccaaaattaaattaaacaatgacaaaaaatcactcacatactcaaaatacactaattttttctaaaattaagctacaaaatctcagatattaaaccaaaaaccaatttgaaagattaaatctaaaaacctaattaaaactaagaacaaattttttcaaataaacaccctaaaatcaaaaaatatatatatataagagaaatcataccttcaatagcaaaaaatctttctctttaagaaaccactctcattgtcatgctcttctcattttttttttttttttattttcaaatctaagaatgaaggaataagaaaaaaaaatgagaaatagggagaaagagaggcgtatatatagagagagaggaacaaagagatctatatataaatagagaaagataaaagaaagaaaaaaaagagatgtacctggaataggggtgaagccatggaagactcatcgaggagatggaagacgagagagagagagagagaagcaaaagtgtttttaaaaatttttaaaatcatcaaaaatctatttttaaaat

SEQ ID NO: 92133 - DNA, 746 bp, Cannabis sativa
ttaaagttttttatgctatttttttgtatttatgagatttatttcatatttttttttagaaaaaatatcatatttttttatgcaattaaatttgcatgtgatattgactcaaaaaaaaaaaaaaaaattggcatgtgatatagatatcaaaacgtttttttcctctaaatagccttaggatatttgcaccaaaatattagataggtcctttatagctaaaaaaaataataaaaacgtcaaaaaaaattgttcaaaaataaatagataaataaataatttttttttcttagaacaagaatccattaaacaaattaccgattacaaagaaaatagcaagtcacattcaataacatgacgagcacaaggggatgacaccctaatccacatagcactaactttgtttttcaaaacgtaattagttaatacataagccaccatattggcttccctaaaaaataaacctcaaaccactaatagaaggacataacaacaacctctgaatctcaaccatgataccatccacctccctacaaccccgctcttcgccattaatgagttttaacgcctgcaaacaatccgattgtacatcaaaccttggcagcccccattgcattccaactttaatgccatcccgaatcgcataaagttcagtcaccaacggagacatggcccggtgcaaaacagtggcagcaggaaaattaaccgccccctctccatccctaatcaccacacccgtagaagcacca

SEQ ID NO: 92134 - DNA, 620 bp, Cannabis sativa
gtgtaaggccggtaacgtactcgacccaaaatcgacatcagaatttgttgttgtttcgccattaacgacatcgaaggcttgccggttgtgctttccacgatcaaaaagcttgtgagcctccattgccattagcgaaggatggcgttctagccacgtcgccttcccttgtcgagcttgacgggtttttggaggaatattctggctcgggttctcgctgtacaacaccaacatcgtctccagcaccgatgtcgtctccaactttggtggttcgatctttgtctctggtgatgcaagcttcgtcgctagaaacttagatttacagccatgattagattccttgttttccacccttttcgttggagactcgtgaagattaacaagttgttccctgtcattttgcaactcttccttctgtgtgctagtttgatgacagaacttcagctatccttcaacgaagaatgctttagcgatgacttcggggagtgttctcaatttatattcactcaccttcttcttcacctccgcaggaagatttccaataaacatatcacaaagaaaggtttcgggaatatccgacaatcttgctgcaattggaatgaaccgaacccagaactctagca

SEQ ID NO: 92135 - DNA, 518 bp, Cannabis sativa
aaatatcatatttggtgcaattaagtttgtgtgtcatatatgtataataactttttaaacaaaaataacgaaaaaaattacaaaaatacagttatacgaaattttaaagacttataattttatttactaaaaatatggtcttaccttttttttcgaggtatatacttttcttattataataccttgtttggactgtatcgtactatgtatcatttgataacccaatcaatcccctattctatacgtatttttatgttgtactcatgttaattttttgttattttgcatgttatttttttgttgttgtttgaatgttattttttaaatatttttatgtagtcttcttgttgtttttataaaacactgtaaatatgtaaaaaactatatatttgaatgtaaaaatgtaatttttttttacaaaaaatagtgttttatgttattatcttcttttcttatatttttgtaaatagtccaaaaatatatgatttttgttttttttttagaataaatacatgtta

SEQ ID NO: 92136 - DNA, 748 bp, Cannabis sativa
aagccatgaaaatgaaactcctctgatgaaggtgactgtaacgagagagagaaaaccaaaagtaataaaagtgtttttaaaaatttttaaaatcatcttaaatctatttttaaaattcaatctattctgttttttaattttaaaaataaaaagtaaaattaagttaccgaatacaatttttattggtgttttcaaaattttaattttaaaaataaaaaactatttttaaaatggttaccaaacatacccatagtgtatatactttatgctttgatgtttttttatttatggatgatttagttctggaacttttttttctaatattagagattgcatttccagggatcgatcttcaccgtttactctttatgccaaatggacttcctgatggtgccgagttggcatactatctgaaggaacatgtatatatctatataccttaaataaataaaaaatgttttattttttgttcaattataaataaaacagttagttgttatactgtacatattactaatcttatcctttggttggtattttaaatttatagagctccacagcgacacatctataccttgagttagactgaaatggcatggacatgtatatatttcaaatgcatttatttgattttgggggtttggtcaaattaaaaataaaataataatgaaaaaaagttgatttatgggatttatgaataggtggctaattaatgtataatttccctgaattatcatgttctagagga

SEQ ID NO: 92137 - DNA, 679 bp, Cannabis sativa
caccttgatagcacatcttggagaaactccttttctcttataattcttcaacaagtcttgtaccatcattacattatgagctatagacctcccttgaacaaaggccccctgattttgattaactaaattaggaaggacctgagctaggcgagagcaaagaagcttagagatacatttgtacaacgttgtgcaacaggctattggtctgtagtcaaccgcctttgaagggttctcaatttttgggataagagtgatcattgttgcatgaagttcaggaggcattctaccagttcggaaaaagtctttgatagcatcactgatatcattccccaaatctgcccacaaagctttgaaaaatcctgaaccaaatccatctggaccaggagccttcgaatcaggaatgctgaaaagagcttttttttatctcctttttagtaaaaggtttcagcagccccacttgatcatcaagactaagcttagccccatgatcaatacaactcgggtcaatttgacttgtagattggatgcgtcgacccatgatgttcttgaaatgagataaaaaatgagtaaccacttcaggaaaattgtccaccaccaaacgttgctcattagtataagatgttatcctattctccattctcctttgttttaagaccgaatggaaataggaattgttctc

SEQ ID NO: 92138 - DNA, 541 bp, Cannabis sativa
gcactttaaaatataagatgttaaatatatggctaattaggttttaggccgttaaaaaatatctccgaactaataagattgtaaggatttttgtctaattttactaacgaagcttcatgtgaatgaaagttccaaggaacacaaattggtgcatcatattgaagtttaaagagcacaattcgatagatatcaaagttccgagaacatgatttaacacatagattatattggtaaaattgaacagatgtgacagaagtactccttaaattcaacaatttcaatagttcgagtggaatttttaataatccaaaattcatggtggcataatttaatacatgtaaaaattaagagataaaaatcctaattagctgtatatattattgataggaataaattaataattaaattctcttactcttaaattgtaggaataaattaaaagatacatagtactttaaataagattttgtttttattttattttcaaaaaatgtaaagtagtagtaataaatatagcatgtaatcttaaaaatacttatta

SEQ ID NO: 92139 - DNA, 743 bp, Cannabis sativa
  modified_base (453)..(457): a, c, t, g, unknown or other
gctcatgttattgctaagtaggttttttttatgtaagtaggttcattctctattgttagtggagagaagtctctccctaactgatgtgttttgctggtttattctaagaaaaagaatgatttgtttttttattaatatataatatatatggatagttacataaagtattacttttcgtaaaatttttatatttttatgttttaagattttatttttatattttacgattttttttgtaaaaacaacacgaaaataacaaaaaaactgtataaaagtaacaggaaaataacatcaaacaacatcaaaacaataacaaaaaatagcatatagataataaaaaaatcaacaataaattaataaaagtacaatataaatagaccatatttttgtaaataaaattttaaaaatcgtaaaaacttttaaaattatgtataattatatttttataatttnnnnnttgttatttttatatatttgtaaaataatctctaatatatatattaaggatttttgtttaaaaatcaattattttttttttcttaattagagtcacgtacttttttatcttttacattatatacatcactaataagcggttaaattaatataccaaaaggtaacggaaaatagtatatttccacaaccaagataaattatggtttgttaaaacacctctcataaaaatagtatatttttacagctattattatattaaaagttgtttttaacaagccacatatcat

SEQ ID NO: 92140 - DNA, 571 bp, Cannabis sativa
tcaacctggacgctgggtgagtgccaaaatgtccgaggcttgtaatttttgatgcctaagtgatgtgttgacaccacttagccagttttcatgttctagtgaagtcgtccaccagctcttagaaatgttgttgtttcgcagaatcaggatactcgaaattacctaattcgtgactaagtcactttgcaaaaaagtgaaattatgaagttgtgaatttaacttatttgagttcaaagctcttgtttactatgaaaactagacgaatgctcgagacgaaatcagaatgggatagtaaaatccagtgcaccaagtcatacatcaacctaggcactgggtgctcttttcagagcttccgagttgtcgttttgatggtttcaaggtcttcaaaattgagaacgagatctcctaccccgttttcggctagaggaagaaatagggtctgatcgtgcgtgttatggggttggtggtttctaggtctttagggtaagtggactttctaacttcgattggtacatacacgaccaaagtggaaaggatataagggacctgcatgtttggtaaagagagattt

SEQ ID NO: 92141 - DNA, 593 bp, Cannabis sativa
tcctcagttcagttcagtggactgccctctgaagacccaaatctccacctgtctaactttatggagttatgccagacctttaaagtaaatgaagtcaacgattatgccatccgtctaagattattcccattttcgcggagggagcgagccaagagttcgttggtgtctttgcaacccaactccattgcttcatggactgatttggcgataaagttcttgtccaagttttttcctctagcaaaagctgccaagctgcgaggggaaattaataatttttgtcaactggacaatgaatatctctatgaggcttgggagaggttcaaggatttaatcagaaaatgtccacatcatgggatcgaaaattggatgttggttcataatttttacaatgggctgattggtaataccagaacaattatagatgccacagctggtggggcatttatgtgaaagagtgcaaacgaggcttatgatctgcttgaagaaatgactatgaataaccaacaatggccaacttaaagaagccaaacaaagaaagttgctggtatgcatgaggtagacgctatcaccaagttgacagcccaagtggaggc

SEQ ID NO: 92142 - DNA, 661 bp, Cannabis sativa
acataagccataaacaaaagaccttttccactgtacaaaatacatgtaatagcacctctaaaaaatagcttttcttgagaataatagaaagtttagcaacaaaaaaaagaataatagaaaaagtcttcatgattgtatattatattatgcatatcagaaaatgagaaccaatattcctactttaaaaatattttattcatattttatgatatttgtctgtatcatacataagaatagataatacttttagaaaaaattatgcttaaaatattacattttgattggaatacacacataatttcttttttaaatctttatactttttatttttacttttatacagtatgagattttttgaagggaaagactaatgtatgtaaatcctatttgttggtggtgaaaggtggacgtgtcaaatagcgcgtttcaggtttgttagattgtttttttaaaataaaattagataattaaaaataatattaattaaatgagtattttagtaagaaacaaaaaaaattgtgtaagagccatgtgatcatgtcaaatcgtcaaaatgtgtcactaaggctaatttatatataaaaaaaagttacagaatatataaagattaatgttcaaaattaagcgtccaacaatgttagttcaattttgtaccaacttt

SEQ ID NO: 92143 - DNA, 3566 bp, Cannabis sativa
cttgagtgtgctaccttttgtggtggtttttgtttgtttattggctatctttactttctattttcattggaatgtcttacatgcagtcttatttgtattcatactcccctttttctttttttagacacagataacctaggcagacaactgccagattctcttacaaatcaagatgagaccactcgatgaaacagagacaacagcagtattcgagaagatcttcaagttcacaggaaataacctcaagaatattgtagagaatccttctcatgaaggtccagactccgaacctggacgctattgcttccgccttaacaagagcaaagtctactacgtcagtgagtcccttgtcaagcgtgccacaaatgttgctcgtgttaaccttatatctctaggaacctgcattggtaagttcacacatggaggtaatttccacctcactgtccagagtctgagtgttttggcctcgaatgccaagcacaaagtctggcttaaacccacctctgagatggcatttctgtacggaaaccatgttttgaaaggtggtttagggaggattacagagaatattttgcccggtgatggagtcgtggtgttctccatgtctgatgtacccttggggtttggaattgcagccaagtccacccaggattgtaggaagatggaccctaatggaattgttgtgttgcaccaagcagatattggggaatatttgaggatggaagatgatctctgagtttgaaattaatgatttcttagagtaatttttgataaagtcatatacaaagtgtgaacaagaaatgtgagatgagaactttgattagattgaggatgttcatatgttctctgtttcgagtatgtaattcaagttttgtcagttttgatattctatataacattatgcgaaaacaatttcaagattttccttttaacccatgtgtaaactattaatttaaccagagtaaacaattaattttgatttttgtatttatttattttgggtatgaagtctattttttttgtatggtcccacttaaagattactagacctaccttttagagaaatgttaaagggcaccagtggtgtctagcattttcttatgtgtcaatatcgcttgatctaactaagtatgaggtcttatataacttaatataatagtttttagggagtatggctaggcaatcgcaacgcgacatgtcaagaaagtgctaggcaccagcaatgctctaccttttattactaaagaattaatgacatgtaaagtgtaattggaattagaatgaatgtgttaaaaatataaaataattaaaaatattattttatggtgattatttaatggttatatttttttttttgaatgaaaatttaagctttattattattatttttctggaaaaaagcgttcattggataaattaataaaagttagacctcatggttattacaaaataggcctgaaggaattgtttctaccggaatgactccaaacctctgaagggcaaaagcccatttaaccacattatgggcatcaaaattacaagttctacccatagtagaaaaaatacaactattaaaataagaagagtaactattacaaaatgagacacagtttgctaatgcccaatgagaatccttcacgttaagagcattgataactatcctagagtcgctctccacaatgataaacttaagacccaaattcgaagcaaccgaaagagccaagcagcaagccgccgcctctccacataacgcatcagtgaaatccaatcgcgtttgaacccagaccaccctacgaagatagtttctggtaacaaccgcaatacacatgctttcaaaacccactttaacatcacaattcaatttaatccaatctgtaggaagaggagaccagacctccttccagcacaaagcgggggaaggaaaaataaagtcatgtaaatctgcaaaagaagtacaaaagttgtcaatacacttctttatgtcaaccggataattattatgaacatttttattgcggatacgccataaagagaacaacaattaatgcaaaaagaaaaaactgctcagcatcaattcccttgtgtttgaggttccagatgaatttgacctaatcccacaggcgaataccagtatcacagataggatagatacccaaggagaggctcttcccgcatgcaacaccacatcacacgagagaaataaatgttttaaagattcttcttccagtccacataaaaggcaacttgcatcatcaatttgaaatcttttcctgatcacagaacggactgggagagcattggaaagaattgaccaccaatgaaccttatggtgctccaaaaccttactattccacagcttattccagagcgacgacgcaacctcacaggggggagccctctccatggcctgggtaaggtaggaaaatttacaagaaacgaacattacgttttagagtccaaatccacttatcattaccatggccagagggaaaaccccctttcaaaattatagacacagtttcctggtcaaagagactattcaatttgttgatatcccaacctccaccaatagagagaagatcatcaactttgctatcagtagaagaaagagcaccatttgattttgggtaaaagtctttcatatggggaatccagggatccccccaaatactagtgtccctcccatctcccatcagtttacacgcacctttcctcaagatagatttggttttaacaacattcttctagaaccaagagtctgaatctttatacgaacgatttaggaactccttcccttttagatatttggttgccaagattcagcaacaaagagactgggaaccattaagtatgttccacccccatatagccaaaaaggcctggttcatttccttagtttttcggaatcccaatccaccacgagattttggaagacaaagcttgtcccacgcttttagataaagcccgtggttgcctttttcaaagccccaccaaaaatcgcgcactaaaccatcaattctagaaacaagcttgttagagaatttggtagtttgtatggcataaaaaggcatagataggcccactaatttaataagggtagctcgacccgccttagacagggttttagctttccaaccttgtaactttgaagtgagattatctaggatgaagttaaaatcagcattttttatcttgatctgaataggggaagtcccaaatacttaatgttgccctccgatgatccgactcccaacaaatcactgatctctcttttaatgctttcaggagtattattgctaaagaaaattgaggacttaagcttgttcacttgtccagaccaagagcaaagtttcttaagacaattccagtagcccctagcttcaagcaaattggatttgccgactaaaattaaatcatcaacaaagaaggtgtgggaaaggatcgggcctcccctgctaagcataatgccttgttgcgcttaagccttcctcaagtaatctagataagacttcagtcgcccaaataaacaaatacaaaggaagagggtcaccccgacggaggccaca

SEQ ID NO: 92144 - DNA, 912 bp, Cannabis sativa
tataaattaaagaaaattctttacaaaaatataagatagataatttttatttgatatttatttttttattgcattaataagttatagtaaattatttctataaaagttaaatatgccataccaattatgttgatcaatatgtattgtaacataaataaagtcgatacacaaacacgacaagtcgacatgagaacacgataggtcatgttaggattgaaatttctgacacgaaatatatatatatcgagttagagatgaccaattaaatatgtcaatttgcataatgaatatgacacgacaacacgaattaccatccctaattagaatactctgaaagaaattcaacgacatatttgtaaattaattaaagattcattagtatacatctgagttctaaatttcttttaattattttaaataattaagaattcaattcaaaacttaaaactcagtgaaaatattcactcaaattattaattaatttatatatttcgaacacatttgtgtatatatgatattcggccaaattgtttcttctacaaaagaaaaagtgtaatttgatacaaaatttctctgtttttttttattattatttttcttgaagaaatacataataagagttattgaattttacgtattttaatttaataattacaataaaaaaattgataactaaagctgatttttttttctttttttttttggcaattacagttttcaatcaataaaaaaaatccaaaaagtgtagtaaaaaagaaaaagagaatcctatgaaatttctaacaaccccaatccttgactattaatttatattaaaaattaacaaaacgacaaaacaaaacaaaataacataatcatataaaacaaaacaagaattacacaaataaataaataaataacaacactaaacaa

SEQ ID NO: 92145 - DNA, 647 bp, Cannabis sativa
aaataagtttaattggaatacaattttatctttttaaaaaataattatttattggttaactaaataaaaaagaaattaaaataatactttttattttagtcctttttgcaatgacaataaagaaatatatatttctcacatatcaaaatgatcactttaaagagtagtttgaaatagtataatttttgagattaaacaattatcggtgtaaccgaataaatatttaaaacttataaaaataaaaatattttttcaatataaaaatttagtactgtatacctaaaaaagagaaagaaaacaaaaatgtaagaaatacaaatattagaggcttagagagcacgtgaagtgagggaaaatgatttatttattttttaataaaaaaataaaaaattgtgaggaagctaacatgtatgcgcttaagacaaataaaagaaatagtcaacatattacggtggtacacgtatcataaaatattaagattatatcggtatttaaataaccaacactaaattcataaataatttaatatttgtttggcgtaatttttctattaatatttgatatttgatgatttcatttgcatgcagtatatctataaaacatattgttatccaagagaacacgagcagttgaaggagcttagggaa

SEQ ID NO: 92146 - DNA, 660 bp, Cannabis sativa
taactgttcctttcaaataccttagcaattttttgtaggcttcccaaggcaatgttgtaggagctttgagaaattgaatgagcctattcacaatgaatgcaacatcaagtttggtcaagcttagatattgtaaggcacctaaagtgcttctatacaaatgtagggtcttcaaaaggctctctttcatttaagctcaattttgtggtggagctgctaggatttggacaaggtttagcacctttcatgtttagtttgaccaaaagatcagtgatatactttgctttcgataggtacattgctattgagttcctaaaaatctcaactcctggaaagtagtgatcctctccaagatcctttagtgaaaaaagttgattcaagtctgcaataagttgagacatgaggtgttgatttggaccagttactagtatgtcatcaacatacactagtaggacaattagattcaaccttgagccataaatgaaaagtgatgtatctaccctggatgcttagaaactccattgaaatagactattctttagcttttcattccaagctctaagagcctatttcaagcaataaatggccttatgtagcaaacaaacacgatctggatgttgagcatcttgaaatcctggtggttgttgcatgtacactacctca

SEQ ID NO: 92147 - DNA, 701 bp, Cannabis sativa
gacatttgcaaaaacacggtttttcatttgtaattattttcatgatatgtaattaattatttaattgaagtaaatttttattaataaacttatgtaaattataaattaacataatttattaattaattaataagtaactaataaatatgatatatttttttaacaaaattttaattaaagaaaaaaaattaagaaacttatgtaataattaattataagtgaagtaaatatttattaaaaaacttatttatattataaattattacaatttatataaatattaataatgaaaaaaataattaacatatttttattttatcataaaaattaattatagtaattaattctttttaattaatgcataaatcaatttttatatattttaataaataaatgaattagattttttaatttaattttctaaaaaaaataatttaaccttttaaagttaattataataaaattgaatgtatttaatatgaaatatttttattattatgtttttcaatataccacatataatttttttttttaaattttcaaaaataattttctaagttcactaaaatataccatatggttaaaaaaaatatactttcaactaaaatacttttttagtatacttaagaaaataattttagtatacttaaatataacttcaactatttgtttaattaaaaaaaattacaataataattata

SEQ ID NO: 92148 - DNA, 2645 bp, Cannabis sativa
tagttaacttgttcaccaatggattgagcaaagcagagagaagagctcctccaaccaattcagccatatcagatcttcagaaactcagaaaaggattacagagaagattgattgattgatgaacacaaagtaataattcaaaagcatatatatatatatatatatgagtttgattattaggagtttgtttgacataactaattatatatatgataattgaatatgagtggtggtagctgcatggctaattataagtaattacatgtgccttcacgtctttgattatataatataaataaatagaagagatcaaactttgagatttgatcattttaattaatataaataaatttgatagtcaacactatttaattataaaaataagccaccaattagttaagccagctgtcttaattaacagctattgtatcaaagtttagcaatctttgatacattatattctgctaacacacacaaaggtatccaagtttgtgtgccaatccaaggttaatacagaagcctgtcgattcgggacatgatttagagtaatagcttgtgttgtgttcacaatatgttcattcacattcacattcactttgtaaacaaataatagacttacaaagagtaaggtcgatcccacaagtagttaagtactttaaaattaaatctttatttttatttgtctatatcaaaattaagagaaaattaaaattaataataaagaaacagtaaaaataagaagcaaataataaataggtaaattaacaataattaaaatttaggattttcgatttcaattgtatctattgatatggtttaacatgatttaattcctattaccaaattctatgcaatagcaggtttactcaagtaatttatagtcttttcagatatataaatctcaattacatgcaaattttctactctcatgataaattaaacatgtaaaaggcattaaacacagaaaccctataagttatccaaaccatataagtactctcgtcctacatcgaaatttgtttctatttcactatagcataattgacactcacttctcagatttcgcatcaaaatcataaacatttaattagtgatcaggcaattataagtaattacgtacgaatgaaatagaatatatagaaatttgaagaaaattaaatcacattaacaccataaatcaatgtcaaacaatattcatctaaacactaataaactatttagctactcatgttcatcgtagaaaatttacacctattaattcgaaatagaagaagaaaaaaatgttgaaaaccccgtagaaaaagccttccaggttgattttgctctccaattttcgtactcctaaactgcttgcaaattaagagtttatgagttttttttagctctgaaaacgtactaaaaacactaataataatgtgtttatataggttaacagagttacttaaaagatactaaaaagatttaaaatttaaattaaaaaaaaaaaatcgcaactctacttgaaaagttatcttttttttcgctatttttttatcttttttttttcagaaattttctactagaactactgatagtattttggtcataactctctcgatattgctcagaatttgacgattcaagatgttccggaaagctgaaatagagatctataacttttatgttttgactttttctaaaatctgatcagatcatagtcgaattcaggcttaatatttcagctttattttttgcacaattttctctattttatagatcatctttttttgaaatttgacccattcatacattttaagtgtagaaactttaaattaaagaaaacaagcgtaattctattctaaaaagtaacaatgaaaaagaaaattaactctaaaaataatttaaaaaataggctaaaaatatccaacataatgaaaatgaaatttcaagaaagcaaatgttaaacgataaacacatttgtggcatttcttaattatgcatataaaaaacattaacttttaacaattatggcatgaaaagatttgtaagaaaataattgtgtctaagagctctacatttagaatctgctatttcaattttcagggaaacaaggtaaaactgatccattgaaaaataaaacagtgatttaaatctctgcatgtatgaaattttattcatttagcaatcttgtatgaatgttacaacaagaaatgataaattaagcttctccaataatggatacaaccaagaaagaaaaactaattgtatttgtatagacaattcttcaaaagaaagtaacaatggatggtagtacaaaacattaacaatggtctcaatcaacctcttctacaaagtaaaattaatgacaccactctaatcacacaccatactcaaactttagacatgactgagaaggcgaagctgctcagttccaagcgatgcacatttttgggcttaacttgagcagtgatcatcaattatatttctaactaaaatttcataataatttactgcatttttataaaatggctaagtgaaaatgagaggatgaaccaccataccgcatacacaggggcggacccacattgtagcgagggggggactgccccccctgaaaaaaaaaatcgaaaaaaaatgtatatgtattttaattagttacaacatat

SEQ ID NO: 92149 - DNA, 1058 bp, Cannabis sativa
ttggatttggaattaatcatgaaacgacaccgtcgctggggcactttggtgattcttacagcaacaaagaaaactcatctgaatctgataaagtgccagtagtagtaggtaaggagaatattagtttgacatgggaggagttgggagttagagtttcagatggggaaagtaatggacccaaaatgattctccaacatatcactggctacgcccgcccaggccagattttggccatcatgggtccttctggctctggaaaatccactcttttggatgctttagcaggtatgtacactactatatatatatttatatatatcaaaaagataagtgagattagatcgattaatttattatatggtacatcatacatcaaagtaattttttttctttttctctcttgtactagtctggctcagttggcaaaatattgtctccatatttgaattgaatatggaaaaaaaataaataaagtagttgggaattaagatcttctattaaaagatggtgtctattaaattaattttattgtgacacatcaatcaatttgaatattttaacattttaaggaaaaaaataaattgtatatatagatagttaatggaatctaaataaatttagttggttgaatattatcacacttaaataggtttaatatattaagtaacaccaatttttaataaaggatcttaattcgtttgattcgagcttagtttttgatttaaaaaaaggccaattatgaagtctctcactacaattttgaggtatgtgtgatccctcaattgattttagctcttgcatggaattgatagataaaattatatatgtttcatccttaggttggtaaatgatactataaaagcaagggtactaatttttgtgaaaattggaaatctactaatttacattaattattggtgttctgcttattatcatgtttaatttatatatataaaaaaagtacatatattaatatttttttattttgttttaaattaaatttttttcttaattaataattttcatttactttttgtcttatagaatagttttttttt

SEQ ID NO: 92150 - DNA, 983 bp, Cannabis sativa
cctgaaagcctcttcaatggatgatttggtgaaacaacaacaacaaaaaaataaattaaaagatgaaacaacgataaaacaacttatacacaacattaaatcaatataattatttaaagtctttagataatatctctgattcataaaattataaaacttaaaaaaataactttgccaacttgtgagagaaatggacgtcaataagcattaaattttgaagttgagatcatttgaaaaaaaaaattaaaatcaaatccaaaggagattgttgaataataaaactctaaatttgagttttatacctaacatttagatttgagcttcgccaacaaaaaataaactgaaatgcaccagcaacaacaacaacaataacaatagcaacaatataaataaaaagataaaagcaactacaaaacaacttacaaataacaataaatcaacatatttatttaagatctgaagataaaattactaattcattaaatttagttcaacaaaataaaaaaataataataatatcatgaagaagcttaacttaaagatgaaaaaataaatagcacaattgaagatgccctctttctttaggctaataaagaatattaactatgttaggcattttgtcaaacacatggaaggtatgaccttatatacatataaataaaaaactcaacttacagaagaagaaaaaatttctcgaaatttgtgggcaaatgggtggaatcaacaataaagaatcacactacaataatattcttataaaactttcaaatctaattttttatattgatgtagtttgaaaagaaaaaaagaagaagaagaagaagaagaagaagaaaagaacaacttaaaatcagagcttgaaacatattaatagcagcaaaaagaagtttgaaagagatggagatgatttgaccaagagatgaataaactcagagagtgtctctttctccctagactgtggcataggaaggttaaggagaggt

SEQ ID NO: 92151 - DNA, 628 bp, Cannabis sativa
  modified_base (214)..(221): a, c, t, g, unknown or other
acacacaattaccaacaaaaaaaaaatgtgacacgtttggtcgattcatttataataaaataaagaatacactattttattttattttttaaaaaaaggttacttgtgtcatttcacgaaaagagaaatgctaaaggacactattggtgcctagtactctcctatgtgtcgatatcgctattggtccatctaagtatcgggtcccatataattnnnnnnnntaacttttagggagtatcgctagtcaatcgcaacgtgacatgtcgagaaggtgctaggcaccactggtgcctaatagcaatgctcttacgaaaaatgtttatgcgacaaataaatttaaaaagcaataaatctacttactgaaaaaaaaaaaaaaggatatgctcattacttttggcatgctattaaattcaaaatacttttgcgcatgtgttataaaattgaggtgtaaatagcatttagatattataaatatataaaaaatttgtagggtgcttcttatgcactgtgtcaatatataacgaatacctaacctgcagaattcctatgcccctaccaaaactataatagccagtggttatgtgttatgttgcactagaaaaagaaattgaatgagaaattacactct

SEQ ID NO: 92152 - DNA, 541 bp, Cannabis sativa
aatatgtcctagcattacagcatatatgtctagcctatgattgtattctcactaattcccttttgaagataacaatatcaatcgatcggttaaaatctaatactttaaaagacataggctacaaagcctacaattcccaagtgtcaaggcattttttcctatcaaatgttgaagttagaacttttgcattagatagaattgtaatcttggagcattggttttattttcacccatcttttgaagggcaaagatcattgcttgcaattctcctttgattagcagagttggatatgatgctcattaaattcggataccattgaccatgcactttattgatccaaagcactgcaatccctgctaccccatctttcaatggagcatctgtgaagaaaagatgctctgcatctttggtataaatgatagggtcacaactttgatgaatccttgctctagtttctattgtttcactctccatctccaatttaaattcatgaaattttgagacagacagggcaaaggcattggttgttgaagatcatat

SEQ ID NO: 92153 - DNA, 690 bp, Cannabis sativa
gatcctggtaaaataaatttccaagagattccagttgtggctagaacacgaacattaggattaacagccatagggttttgaggaagacttcatgaggcaaaatttgtagttggagttctccttctgttaaccatggtgttagatcagataaattgacaaagctctcaatgaaagcaccaaactattgatctcaaatttggctaactgatagcgaagtcataattattattgatgctaccatgtgcacacaataagaacaggaaagtaaaagagacataatattcttatagaggtttgacccccttagctagcgggcaatgacctactccccttgtagttgtattaatgccagaaataataccactcaggtcataagggttgtggattttgaagtggctatcttaagattataatatgagaatcagtaggcaaatctcaagtgaaagtgatgaagagacttagtctcatttacaaagccttgtgcgtgtagaagagatggagagagagaattagggtttcaggcttagagcttaagagcttagagagacttagagaaattatggttggattaatgctctttatataggtgagcttacatgagaataataacctaatatccctaaaaaataagaactataaagtatttgttatataattaaataataattaataaatgggttaattatcctc

SEQ ID NO: 92154 - DNA, 830 bp, Cannabis sativa
gctgaattctattctacaagttttttaatgcctgaacccccttctgatcttgactggcagacactgttccaagccagtaaaccagccccttgcatcatgtattgccctttccataggaaggctctacatatagcttcaatctcatgaatgacctgctttggtagcttcagaatctggcactagtaggcatgaattgttgagagaattgagtttatgagcaccgctctaccagcaaaagagatgtttctggtactccaaaatcgtattcttgctgtcattttttctatcaagacattacattcctgctttgagattttcttagtgcaaatagggacacaaagatatctaaagggagtatactgccttgagaatccttatgcatccaacactctacacatctcatgttctgccatgttactgcagaaaattgcagatttggtttagtttggctgtaaacttgaagtggtcgagaagagcttcaagccttggagcataagaatgatgctcctatagtcacctctgtaaaaaatcaaacatcatctgcaaaactcaagtgattgagttttagggcctcacataaagagaaataacatcatctgccatgttacttctttatcctttagttccactaagtcactagtggaagtataattcaagattccatctaaatttgcgtgcaactttccagtactagaattaacacataaagagaaacaacatttgatatgttatgaaagttaagattctatatttgtagatcatgttcccagtcatccatattattagctttctaagacaaaagttgtaagaatcatcttctctaagaaact

SEQ ID NO: 92155 - DNA, 1343 bp, Cannabis sativa
  modified_base (119)..(119): a, c, t, g, unknown or other
agggagtcaaagcgacttgagtctagggccttaatgaaaatatcagctaattatttctcagtatcaacatattctaactgcaaaattttattttcaacaagttccctgataaagtgatnccttatatcaatgtgttttgtactagaacgttgaacaagatttttggaaatatttatggcactaatgttatcacaaaaaatagttaaaacagccaattcaaatccatagtcaatcaatatttgtttcaaccatagcaattgcgtacggcaactaccagcaacaatgtacttagcttcagcagtggacagggaaatagaattttgtttcttattgtgccaagaaaccaaattgtttccaagaaagaaacatcctccacttgtactctttcgatcattagcattgcctgcccaatctgcatcactaaaacaagtcaaattagaattagtgtctttagaataccagattccaaagtcgagggtactattaatatattgaataatcctttttacagcagatacacgagattccataggattactttgatatctagcacaaactcccacactataactaatatcaagactactagtagtcaaatacaataaactatcaatcatactacaataaggagtagtgtcaaccttctttccattctcatcatttgttaatttcgaagtggtgctcataggagtacttacctgtttagccgactcaaggccaaactttttgactaggttcttggcacacttactttgtgacacaaatgtacctccttccatgtgtctaacttgaggacctaaaaagaaagtaagttcaccaaccatgctcatttcaaactcatttttcatttgatcatcaaacacctgtacttcatggttagatgtaaatccaaaaactatatcatcaacataaatttgagcaatgataaaatcagattttatatgcttgatgaaaaaaggtttatccacactacctctttgataatcattagaaattaaaaattgagttaacctttcataccaggcacgaggagcttgtttcagaccatacaatgatttttcaagtttatacacatggtttggaaattaaggatcttcaaatccttctggttgctcaaattaaacttcctcactcaaaatgccattgaaaatggcagatttcacatccatttggtacaatttgatatcaagaatacaagcaatacacaagagttaacgaatagattctaatcttgctacaagagataaattttcatcaaaatcaataccttctacctgtgtgtacccttgtgccaccaaacgagccttgttcctcataattgtaccgaattcatcacttttatt

SEQ ID NO: 92156 - DNA, 1332 bp, Cannabis sativa
tattcaacacaaagaaaacagaaacaaaaaacctagaaaattcatgaagatttaacaaaaattaacaaagataacaacaaaatcaacacaaactcaaactgaaaacaaaaagaaactaaatagaacaatgatgaacaaccaaaataagaacacattttgaaaaaattagaaagcaaacaccaacacatcaaacataacctaaaaaacccaaccgatcatcccaaaacagcaataaacccaaaaaacccagtcgatcaaggaaaatcattaagaaaaacaaaaaaaaaaaaaccaacaaacatcataatagcgaactataatcactaaaactatagacattacaaaaaaaataatgaacaacttaaaacttacctcacttaaacaagtaactgagctccaaaatgaccacaatcgaataacccacccacggcagcaccggtcgaagcatgaaaaaatagcaacaatggcatcactgtcgaagcttgaagacgaagaacaagaaaaatatgaaggaaaagaataaaccctaagctaaaactaaggggaaacgaagagaagctgagagagagtaaaagtgatagaatacctcttgctcagaatatgaaatgacaatgggattgattgaactgtaagaaacaatgagtacaaagctaagctattccatgcaaatgctatacaaaacaatgggaattgacccaaatataacaaatatatggctttcataaaacccgtaaaaaggaacaccagacaaaaatcccatatgacaaaggctttatttaaaaatgccataaaaaagtaaacagtaaaataaatctcatattttgcgtaatttttaatttagaattataaaaatatgattgtacgaaattttaaatatttttatagtttttaaaattttatttacataaagtgcggtcttcatatatatttttatattatactcttgttattttattgttgatttttcgttacttttatattatttttttcatttatactttgcgcacagaaactcaactacgatgcctccatcttccaaattcacaaacataaccaccatagaaacatgaagacatccagaaaacaactattaattttgacaagatggagtaaaaatagtgaaatcaatgacaaataaatgaccaacaacttcatcaaaaccaaaattcaacaaatcaaaaaaggtctgacactgttgacctcaaaatttggctaactaacagcgggagtcgtatttattgatgatgcttgccacatgttacacataagaataataagtaaataagacataggattttatagaggtttggcccctttagttagcgggtaatg

SEQ ID NO: 92157 - DNA, 605 bp, Cannabis sativa
ccaaccggaattccgattcctacaggccattctgaaccggaattccggttcagtgcatgaaaccttaaaaaatttatttctcacccaattcaaccccaaaacttaccaaaccctccagacctgctatttagaccccaaggaacatatcaaaagcaataaaaccaaggttcatgcaaaattacaaaaactaccattgatgagtcaagcttgagttcaaaaactaaaagcttgctcatccaactaattagctatcaaaacctgtttaattcaccatatatgaccataaaataactccagaacacaaactcaagcacaaacaacaaccacaacaactatctcatcattttactcataaactaaagtttgagttcaaaactccacactttgataaaaccaactaacgtgcatcaaaacctactctaatccactcaattgaacaccttaaaactatagaaaacatcacataaatacaacagcaataataaccaaataacaaagcatgcaactatcatatttttcttacaactcaagaaaacacaaagagagttggtagagataaaaccttggcttgaattacgcagagagctgctggaaactaaggattg

SEQ ID NO: 92158 - DNA, 705 bp, Cannabis sativa
aatagtgcttttcaaatatccttggcacaaaaattctgaattagatgagcattcaaatcctctgagatcttcctaggacccaaattaataactttggcaaaagcatccttcaaggagaaatctgaagtaaaaaaaagtagcaaaataaccttcaaagactgctccaatttcaccttgactcgagacctcaaagccattcctattctaaatttttagaattatattattggcccatctacccgaagcacacttgtgaatataactgacttcttgtgtctcaatttgagccaatcattttttgcccgagaagtctaatatttctcttctttttcctgaagaacattaagctcttgctcaattttttgaagctcctcacagctaacattgtcaagattagcatccaaaatagaaaaatccttgagctttttatttatggcaatttgttgtctcttatggatttttttattctagccattcagtttacctcccacttcaagaatattgagttggacagtgcgaatgggatctaaatatttgaacttctaattttggccaataattttcacacaatcttcctcatctacgcaagtactttaatagtgtaaacgagaatgcgagacatggacattattaccttgaggagcagaaaaagaggagaacactataggtcgatgatcctatataagagacaagtgtgagacatga

SEQ ID NO: 92159 - DNA, 522 bp, Cannabis sativa
ttattaactaatacacgtaatatattaatttatctataaaaataatatttctattaaaacataataaacttttattttatcaataaactagagcaatgttattattatgattaggggtatgagtaccttaagttattcaactataaaaaataccgaaataaattaataaatttttatattacttattaaattaaaatatataaaacccgaaatattttattataaggtcattctaccatgtatatccttataaatggtgtattaatacaaactttatgtgttttggcatttagaatatttgtttagtgtaatcttttttatattcgcgtagtttatagttgtttaagacattatgtaaaattttaagaaattcagaataatttacaatataaaaaacagtgttcaaacagtttatttcacacgcatttaaattaaaaagatcaaaagtgtaacagactatttaaatcatagtttcgacgtgttaaatttctacgaaagtattataaatttacaagatatctt

SEQ ID NO: 92160 - DNA, 772 bp, Cannabis sativa
taattgtaaaaaaaaaatgcaaaaaagtaaaatgcaaacttgagcccggatatgaaaacgatctaatctttttaagaaaagtggactgatacgaacaaagcacggtacgaatccgagcaaagcacgacatgaaaataccgagcctaccctttgaaaatggtggcgcagtacagtaagacccatatagggcataacacatcacaacccatattttgaaaagcacagaaaatatgggccgagccagtacgacgcgcacgaatttacaacattgcacatcatcttacaatgtctcatacatgaagaagatgttagataattaacttggttaaatatttggtgtcatggaatgtgatgataactaactcaatgccagttgaagcagttgatctatttctacagatggagagttgtgaaaaagagcctgaatctgatgcagtcacaattgccctgttacttggtagccgtcttcatcgatatgttgatatgaagaaatttcggcctatactattggaaaatgctttattagatatgtatgtatgctaagtgtggttgtttagaagaagcaagtgaagtatttaattaacagtatgaagttttaggattattttagcgtctggaatgcaagatttgggtatgagtccggattctgttgcttttttatcagttccatgggcttgcagccatgttggattgctcgaggaggggaagtactactttaagttgatgatttacaagtatcaaatagttccagggctaaaactattcgtgcatg

SEQ ID NO: 92161 - DNA, 943 bp, Cannabis sativa
attattccttcgcgaggcattcgtgagggcgatcctttgtccacatatctgtttattatctgtgcagaagggttttcagctcttattaagaagtatgaaacagataggatcatccacgagtgtcgtgtagcaaacggggccccctctatcactcatatgctcttcgctgatgacagttatttattttgccaagccaccccaagtgttgctgatagtatgaatagacttcttcactcttttgagcttgcctctggtcagcgtgtcaatgcatccaagtcttcgatattcttcagtcctaactctgatggtgtggtcaaaactcaaatatgctcaaccctcggcatgcctgaagctactgaaggctctttctacttaggaatgccgaacattattagaagaaagaagacggttatccttggctttctcaagaataagatcattaaccgcataaatagttgggatggtaagttcctttctcgtgctagtaaggaaattctgttaaagactgtcatccaatctcttccaacatatgccatgagtgtgtttctgattcctctaaaaatatgtaatgatattgagaagcttatggctagcttttggtggaaaacaaagagtgctagtggacaaggcattatttggatgtcttgggatcggttggctgttcacaaggacttgggaggtatgggttttcgtcatctccacgattttaatcttgcaatgcttgccaagcaaggatggcggttattatgctctgactcatcccttattagtcaagtctttaaagccaagtactacccacgatcgaattttcttaatgctgaactcggaagtaaccccagttttgtttggcgtagtatttggaatgcccaacatttggtacgatctggtactaggaagatcattggcactagtactgcagcaagtattctggctcatccttggc

SEQ ID NO: 92162 - DNA, 570 bp, Cannabis sativa
agatttgtggctctgattatgttctgtgtgtctacggtgtcttaccatgttacttatggaggaaggaagttgggtccgatcgttcctggttgtggaatccgtcaaggggatcctatatctccgtatttgttcttggtttgtgctgaaggtctctcttctctcttaactttgtatgagcaacggagatggttgactgggtgtaaagtggctcggagtgcgcctagagtctcacacatgctattttctgacgatagctatgtgtattgcaaagctaatgagggtgaagcttcacatgtgatgcaccttctccaagtttatgaacaagcatcgggtcaacaagtgaattactccaagtcctcggtctttttcagtaagaactgctcggatgatactcgtactaggctgtgtggtctgatgggaatgttggaggctggggataatagcttttacctcggcttaccttgcattttgggtcgcaataggaaagctatcctgggttttttacaagagaagatgaaaaagaaaatttttaattgggagagtcgtttcttgtcaaaagcgggaaaggag

SEQ ID NO: 92163 - DNA, 648 bp, Cannabis sativa
aaattgcattaattaattatgtttgaatttgtacgtgtacagtcctatctcatagaaatatgggtatgcaaagagatcatattatacaaatgtgccaaagattcagtccgtatggcggaaagtttacaatggacaacagaagctatagtactgctacttcttctacttcaacctttaaacacccaattacttcctcaaggtattatatatcacacatgatttgatcagattaatttacagcactacttttgaaattatatatattcttttatatatctctcttctctttctctctctagatttcaacatccttgggcattaggagtcaatggttcgttgagtagtggaggttggaccaaaaactccatatgtgaaaaagttatggtccaaaatggaaacaagatattaaggccaatagttagttcatcacataatgataataatgttaatatgtttggtgtaagagatgcaataacaagaactgttccacttagaccgtgtcaatttcttgaagagaagaaatggcctccacgagatgtgattaatcatcacgataggaacatcatcccaacaactactaattctcagctcaaattttctcgtgccgattgtaataatatcatgagttcgtatgtttcacacaaacca

SEQ ID NO: 92164 - DNA, 546 bp, Cannabis sativa
  modified_base (491)..(512): a, c, t, g, unknown or other
catcttgggcagtataatgaataataatttaattattggcttttctagaaaaaataatttaattatttaaatgttataaaaaaaatattttagaattaatttttttagtaaatatcattttggatcttgtgttttttaaaagttatcaatttgaccttttttttttattaaatgacaattcggactctgtgcctctcacaagatgaaaccatttaccatgccttggttgattgcacctttgcccgagccacctggtgcagaacaatggtggatgttgtcatcagtaatgctgatattggcaccagttcaacaagtttctgcaattggttgttgatgttgcagaataaaaataaagatggggagttagaggtagtggctatggtgagtttggcgatatggaaagttcgaaatgatttcgtatggactcaaaaaagttggactgtcgccaacactgttgctttagcaagatttgttggaaatattttaccagnnnnnnnnnnnnnnnnnnnnnntgtttcattaacatcctaacatgaatttctaaaa

SEQ ID NO: 92165 - DNA, 682 bp, Cannabis sativa
cctgtaaacccatttgcaaccaatgatcttctgtccaattggtttgggtacaacaatccaggttttgtttcttttaagagcaatcatttctcctcccattgctccacaccatttaactttatcagatgatttcatggcttccttgtaggatcttggctcatcctcaagcatctcagccacatgaagagcatagttcacaacatctgcatatccatatcttgcaggtgctctcacagctcttctctctctgtctctgactaactgatagtcaaaactatcatcatctgattcatcttcatctctcacactagctctgtgttctgtttgagtttcttcactttcctcccttaaatttgagtctatagggtcactcctcttgtcaaactccacctccatttgtgtactctcattagtttcagtgtgttcatcatctttctgagttttcagtgtatctttataaaccttctcttcatcgaataccacatctctgctgatgaagttcttttgatgatcaccaggttcaatactccacatcttatatcctttaacaccttcaggatagccaatgaatatacactttctagctctaggctcaagtttgtcttgccttacatgagcataggcaatgcacccaaaaactctgagatgatcatattttgcattactccctgttctggcttct

SEQ ID NO: 92166 - DNA, 760 bp, Cannabis sativa
ttatgccgcaatttaccctaaaaagtaatatagtccctacttaaaaaatataaataactaatatttaatatgaataaaatattactttaaatagaacacatccgaagtaaatttatcacaatataaaatatttaaataaatgtattctctttaacaaaactcataaaacattctccaaaagaaaattatcaactaaaactaatcaattgagtaggccaccaaggaagtaaaagagaaacaaccggtaaacgtggacgcaccttaggatgaacactaagatgacaaagactttcaattttattgtggttttcaccaactattctacatttaaaaatctcaactttatctttaactttataaccataacatgaaaagaaaaacacatctccatcatccggatgaaaagttaaaaaactaagttcgttcactctcaaacaatatttagaattcatcgtcatttcatcgtgataatgcactaaattccaaatacacctctcaccattatcgtctaattcccatgccttcaaaacaaaagattgattcttcttattccaaaagaattgtgacaaacgcaactttccccgaactactccaatatttacttgcctaacaattgaacaatgtaggcgacctaacactctagacaaattaatcgagcgacattttctcgaaaaaatattcaatgcaaccatgccttcaattttattcccggtaccatatggccaatatacaatatcattggaagcaatagcttggttat

SEQ ID NO: 92167 - DNA, 652 bp, Cannabis sativa
aggtatgtttaattatataaattcctattttttaaaaaatactaattagttaaggccatatatcgctggatcctttcatttcaataaatcttaatttgcatatagaaagagttattatatatattaaggtgggattatttttgtttttaaactttttaatcacaaaaataaaagtaaaactttaatttttaaaattttgttcttaaaaaacaaaaaataaaagtatgttatgttttcaggggtttgggtttgtagttttctcctcgaatttgcttgaatcttcattatttctgatgatacaaaaatgttcgaaacactttttggtgaacttaatcagaaatggcactgggtcccaattatgacccttcaaaaattccatttggtccctgaaaatagttgaattttaatattttttgaaaacggagaatattcttgaaagagttctcaaaaacatcaccgaaattggcccaagttgacaaaatgtcaacctgggcattgggccttgtttctagcaccccgaaagtgttatttcttcgctgaaaggacctgttttccagtttttgatgaagacgaagaagattcaaaagtcatattgtcacgacccgagccctaagccgtggcagatatgtaatatccataacttgggtggtca

SEQ ID NO: 92168 - DNA, 1091 bp, Cannabis sativa
attagtttaggcataaaatattagggtattttatacatattttttcaaatttcccttaataatttaatacatgggattagatttctttctaatgatgaaaaaatagttggattttatgtatacaacaaaaacttcaacactcatctacttcaacccaatcacattttggatgtcaatatttatgactttcatcctcaagaactcacttgtaagaattcaatataataatatattttttaaaaggactttagaatttaaggagccaaataaaaaactaactctatggaagatggccgagtatcatttgcttgaatccaatgacacgcaggtactaacaaatacccttaatgatcattactgttcactttaaatattgaatgcatgcatatgtacgtattaataaagtctaacttacttttaatttattttttgtagtaatgtacttggatattgtgcaagatttataaaatgaaatcaaaagagaataagacatttacaaataaagagaatgaagaaccaaacacaaaaaaacaaaaattagtacaggagaatattatggtagcagagcaagagtcaactgaagtatttatgaatgaagagaagaatatcgcagtacaacaagaaccaccaaagaatgcgtcaacagaattaatgaagaatgagctcgagagcataactgccaatctcgataacttattagcagatccaaatttactggcagacttagatcaaatttttcagaacataataaattccatattgtcattaataacatgttgtttaccaaacatatgaagtccaaatcacaaaccatgtataacagaattaactacctttctgtgtgtaacacaggtgaaagccagactggtatgtttgaataataccactgaacaagaagaatctaattctgatgattataaaatttgtgaagagtcccttgctaaatcatacaaagtcatgtatgaaaagtggatacaagttacttctgaaaatagagtgttgattaaaatgaataaaaaaatgtcttatcaaattaaaacttttgagttaaaaataaaagaacatgagatagatttttgtgttaaagatga

SEQ ID NO: 92169 - DNA, 767 bp, Cannabis sativa
ctatatataagatgtttatatgatcgtttagggtttagaaacggtggtgagatgctgagagagagagagagagagagagagagagagaggttgtgggtcgaacaaaccgagtggtcagaaagtgagatttcaggttttatgagtttgagagttttctgggctgctctagattatttctttgagttttatttcatccaagaaaagttttagatgtgattagaaggtttgtaatcgcacctttcgattgacaccattgtttacgttcaaaaataccgttcttgaaacagacccggatttgaatgtgtttaagttgtttcagagataaaaggaggttgtgtttaagtttatgggaccccaaagattatttttaacatgaagaattagagctttacagtctgaaacaaaattcgccatttttgactccattaacaacgatacatcggagttagagaagacaactccgatctgatgcattggggttattatcttgggtagttcttgataaatttgaggtcctaagcactgtggaaagctttcccaatcgaaaagacgggtcaagagaaatcggggacaaagttaaactttgtcggcgacgaaaccgacgtgaacgccggtgatcgcattttaggcagttttgaggtttttactcacgtatttttacagattcaatttcttattttattctaaggtgtttaataaattttgataattttctaaatttatttagaattattgtaaattatttagtttatttgttaaattaatta

SEQ ID NO: 92170 - DNA, 2272 bp, Cannabis sativa
taatgttgacagcaatatatatattacacattataattaataaaagttgatgaaattattaagaaatattattgtttgactgttgtagcatagtaaaaccatatataattaataagatatagtaattaatattaaaaaataattatacaaaaaaaaaacacggaaaacacacgaattaattagtcaaaaaaggaaaatgtacatatttgattggtcttaaaatgatcaacaaactagttttcgtgaaagttatgtcctcactatagtacacataatatatatatatatatatttatatatatgtagggttaggcagaaattaattaataaaatgccacgtttacgattattaactagtctatcataattacttgtgaacacttttgcttaacaatatataatattaactaaaatgattgttcatcagttgtttatatttgtagtaattatttatcatcatgaatattcactcatttatatatatgtatatataatatgatgatttgatattcaattctatatatgacgtggcattcgaaaaccctagctctaattacgtatccccacatatagtccacctcagaattcttttcatgaaaatcaagtaattatattcctttcattattattattattaatactattatttcattttattataataacagtagttttgattataattaattgttagttataacaattattattaatctagaaacttgtcggttagcatatcaatttaattagtatataattataaagaccagcttaactaattgtaactatatatacatgcttaattatatatcttataattaattaaatcatgtaataattaattattagttctaaacatatagctacacttgactagctagggattttccttcgattaattaatttcttgttcaagtatatttatataaattaatttatatgtagatatataggttggggaccatacaaatatacataggtatgttacttgtaatatatatatatatatatatatatttatgttatatattatgaccacaatttgtaatttaattgaggaataattctttctaaaattcgaaaagttccatggaaaagttggccgaactaggtaggtactcagtttgaaaatatatctcattgtgttgaatatcattaattacataatgatataatatttaatataattaagagtgttattaataaataattaattatctttggaataattaatagagactgataataataataattcaaaactatgagaggcttatatattgttgcatatatatctattgatattcaagtgatgagaagacattatttatttattttgtttattgtaataataataataataatagataataattaatatttgggatgaatactgctttggatttattcaaataattgcaagtaacttgctggtgaggggtcacttaatgttgccatcgaactcaactgagtttggccatgtatgatcttattgcttctcctttgaaattaccctttttattaatttatttattataatatttttaccacacttttatctcatcataaacaatattaattattaattattttatgatgtcacatcaacatagcatcaaggtaaataagaagattccttagtgacaacatctctttatttatatatattattgttattagtatatcagtggtgcttaactacttatattagcacttacacgataaggcacaattctgagcttaagcaggttaggcttatgtctaaagcccacctagcccaaggaaaaaaattttcttttaaaatattatagaaaatcgctaacaaattatagagtgatactttatcgtagtgttaggcactatgaatgcatcatagtaatgttcttttgaaaaatatcaaatatttttaaaaataatggctctaatttttttttcttatagtactctattaaatttcaatattgtcaattttttttttatgattgattagtaatattttttcaaaaaattattattttaaaaaattatataaaattcgataatgataaaaaaatgttattaggcacaagtaaaataatattccataaaagaagggtttggatatatattacattagataaagctaagtagttttcctttgtggggtaagttaaaagtggaattattaatttgattgaataagctagctagggtttggatatatattaatactattatatacatatttatacatgtttttttttttttttatagatgtattgggttctaaagc

SEQ ID NO: 92171 - DNA, 697 bp, Cannabis sativa
taccaacaccctccatcatgatcaacaggaactccgtgctgcggtaaatctcgcgttcgaagagcagaggcgcatttgccgaatggggagacaaagagatggaagcgttaagggcttatttaagggcttatcatacaaagattgacaatcagattgacaatcggattgacaatcgtattgacaatcgtagtcggcaagctactgtgctgatacaaaaagcttatcaatctatcgggcaacaacccccgaatgtcatccccctgggttgaaacagacgaagatccaaccaatgaatacttctcagactataaatggtcagcctccgaatctctggtcacaggttctgcctgtgggccaagcagtaggtggggagaccttgtttagtaattaatcgggagaagtcataccaggtaattccaaccaagttaatggtgccggtcagcacattaaccaaatcaaccaatcaatgagacacccaggcgcttttgtattcaataggttggggacgactcataacctcagaaacgatctaaataggaggagaggagtagacgattagcttgacatgccaaacgtgcagcctgaaacccatgctcaaatgcttgctcaaaaagatactgatgtgacttagatcggccaaaatgccgaacaatgcacaactggacaaactaaagaatatgttccaaggcatggccgg

SEQ ID NO: 92172 - DNA, 877 bp, Cannabis sativa
caaagcatatcattccgagccttccaaattgcccaaccaaccatgacatcttcttcaaccaattccatattgcctactgccaacacttccataaacttgtcaaaaaaatttgttgctacaaattggccaacacctaacgctgatcggatccaacaagaatgagcaaatgagcattgaaccaacacaagaaaaattgactcttccctatagttgcacaagacacaatgtaaatccacaggaacatgtttactatgaagttgagtacgtgtaggcaaacaacccgaaatagctttccaagcaaaatgtaaaaccttaggaggggctttattgtactcttattaatttattattttgtgttatttgtaagttattttttattattattttgttgttgtttggatgttattttcttattattttatataattttttttattattttcataaaatacaataaatatatataaaaaatatattgaatgaaaaaatattaaaaatttataaaaaataatactttatgtaattatatatatatttataaaagatcagcccatatttataaatacccacataaaatggactttccacctaaatattattattgttatttatttgttttggtatgaaacttaccatttaattattacacttctacttttcataaaggatggtggttttgagttcttctactatagcataagattattaaatttagaaattttatagttcactaaaataaactaaaataaattgatgttgctgagagaaataattatcttgaaagaacttgggtcattagttgtagtacgggagaattgttgtagtacttagtacgtaccattagaggtgtacatggatcggtttggtcggattatag

SEQ ID NO: 92173 - DNA, 640 bp, Cannabis sativa
acaactaattagagtttggaacaagatgttgctgagagttagcctatgtatcatgtatgttcaattatctaaatgatagcattccttttaaaagtaaatgctatttcaattacaaggaaaaaatgttttttaagcaggcttgaacaccaatataagatatgagaactataagagtttaatgtttagtgtgtgtgtgttcacgagtgcgtgcgagtgtattgattctgcatatgaaatcattatgaatgtctgaataaaaaagagaaataatttaatggcatgagaaaataagaatataattgtatatatatgatgatatgttatgtattatatatatattaagagaaaaaaaatgttcagtacacacatgcatagaaacggtatatgtacaaattaattgaataataatattgtggcaattaatttcaaattttagttgttagatgcaattttttctttaaattatgcttcaagaagtcatttatcttttgtattttatttttaattatatatatataaaattttaaaattaagtttttaaaaaatattaaatgaaattaaaattattatttaaaactcaaaggggctgtttggtacacagtttttcttactctgaatgggaatactaagtctaatctat

SEQ ID NO: 92174 - DNA, 503 bp, Cannabis sativa
actaagcgggctttacatgttccaactcctgagatcgagaaaaggcacaagattcttcttggccttccctttgagttatgaacagctgagtttttgcttcatgagaacaacctgaaggtttgcgcccttctcggaaaagatcaatccactaatgacttcaaggtcccaaagtttttagacgggcgacaataactagtacctgctgacgaggaagatagggattatgtggctcgtaaccattatatgaagaatgtgacccctcaagaagctgaagatgatgcctccggaggtaataattttggaatttgtggatggtccccaactgttcttagtgctgagcaaacaacactagttaaatttagggataggcgatataatttctatatctagacaattgtgtagatcttatttcctataggtttgatagttggtatcccaagcatcacatccaattgagttatttgtccaataaaaatgataatgcacaaagtagtggcctttaa

SEQ ID NO: 92175 - DNA, 773 bp, Cannabis sativa
aaaagttggaacttctcaaaattaataaattttaaaaaaaatcagagacttagtgtgtataataaaatgagtctcatgacatatgagttcttatttacaagatatacagaatctaattttggccacgatagggttccaaaagacacaaatttttgtgcgaataggtaaggagacacacttgaccaccacacacatgtgtatcgttggatcgagagttggctgatgtaacacttttattttttgagaaatctatttattaaattattatttttatttagttaattaaaatagttttaacatgtttaattaattggtaaagaaaaacatgttctcctccttattttcaacatcgttcttatgatcccacttaacgttcccatgatcaaagttttttttcttattactacattttgtgcattttctatataatgcattagaactaaaaggaaaaatacatctttctcaaatcagaaaaaagtcatttatagtttattatttgcgattatattatatatatagtctgagcagtagatgtttttgagccaacgtggtgttttgacggttctctattgtgtagtatggagctctgatacaatgttatttcgactaggtcgttttatcctgggacgatcggtaatttatgactacttgcatataccgggaaagtgttgcgaacgtcttaaaaatagtaacctataacccgcgactcaacctaaaaattttatttagtaatattattttagtagcaatttactcaatacaaggtgtgtaga

SEQ ID NO: 92176 - DNA, 512 bp, Cannabis sativa
tttgttctattatctgggaagtctcattcgaatacttgctattctaagttaagttcttgatgtttttctgttaaatatttatcacttattttctatttggtgttgtccaaatttttccgacaacatttggcgccgtctgtgagaaattttattattgattttggagaaaaatcaacatggctgccaaccagacaaatggaaacaacaacacgggatcttttaatatagaaaccatgaatgttccactcccaggtgatggaactaatccaactgatacaatcgttgggggtgtgggacgaaccaacatcacccctttcaacctattcctagaaattgctggtcacgttggggaaacatcgacaccagcagccaccgtgggccacttctcgcctatcacgccagtcgtagtctctgaaggcattattcagcttacgacaacacaatacacaaccatgcaggaacaaatacaggcattacaggccgaggtcgatggaagagagagagtcaggacc

SEQ ID NO: 92177 - DNA, 515 bp, Cannabis sativa
tcatataatttggtaaaagtatatattgttaaagtcaaaggtgttcttcttttgtctgattatgtttggtttatgtttttgtgctcatcacatgaaagagccaatgacatttactacctttatcatcaaaagtacaaatcaatgtatcattttcaaaaaaaaaaatggtcatattattaattaattatttgtaattttgaagctttactttattaaaaaaataaataattaacattttttgaaattcgaattaaagtaaacatgtttatgaattagagtttagagctacaaatctggaaaatgtacaaatatttacatgtttaatgagcatctcagatcatagtattctctctttaattgcaaaatatattttaggaatgaccaaaaataaatatgataatattccattattaccttaattaagctataataaaaccaaattatagtatgttttattcctttatcttattatatagctctatcatgtattgaatattattattatttatttattt

SEQ ID NO: 92178 - DNA, 822 bp, Cannabis sativa
cttgcatactttatgtatgagtggagtgacgtgacatgacatcatttcatttttttgtagagtaaagaaaagaccagacctacctttactttaaatgtgtctaaatcaagtttcaatagaaccttggaacataaagctctttgctaattttaaaacaaaaccactactatattgcttgttccttaaaattctaaatgtgagaactcatcttgtctgtggataggagttgctcacagttagtgactttcttaagtttatttgtagaccttgcaagaaattatgaatgtggaataacaatctaaaataatccactatgtgttaacaatcacattaactacattagaatgaattcatacaaaataaattgaaaatttattggtgatactaaagtgtgatttatttttcttaattatacagtaaaaactatacattttagatgaagttatcagaataagtgttggaaatttctactaatattgaagaaatttatgaatagtgatgttgtaaaattatataattgataatatatagttttgaggtttaaatgaatcatgtttttaccaatatataaacatgattaaatatgaaatctttttaaacaaaaattccttgtgggctaaatttttaaattaataagattagatttagatgtagattatgatagattaacacagtttataaaaaacttaaagtttaacatttctatctcaatgaagggtatggaacacttaattatattataaatgtttcaaaattttatactttatgataaaactattaaattaaatctacataatttcctgtgggataaattaagagaat

SEQ ID NO: 92179 - DNA, 817 bp, Cannabis sativa
ttttaatattgggtcttacaaattttaatttagtgaataatgtggaaaactactaaccaatctttaagtgtcatatatgcatagtgttgggcatcttacgatgtcaaataacaatgttctattaataataataaaaataattcaccaaaacaaatattgtacaaaaaattatacataaaaaatcattcataagaaaaaaaaaacaaaaaaaaaagataaccaaaagaagaaaaaaaaaaccacataagttgttgtaaaaagaattgtcattcatgaggagaacagaaggatctttaaaaagactcacaaaagtgttagattttattttactaggatctagatttactaacatgtatgttgaattataattctataatctaaatcctaaatatgaattacctaaaataatgaattaaacacataaaaggcatagaaaaatttacataaatggtagcaagataatatgacttcttctgttttgatctctaacccttgatctatactgttgtagagtatgatcaaaatctgaacctgaattcttcttctgatgacaaagtgacaacacagtcttcctcactatgctgagtattgctttgatttgtgtgagcaagttctcaacactaaggaacatgaatttttatgatgaaaaacaagagaattttttgaaattttaaatacaaaagtaattgcctttctttttattcagtttgctagacatgagagagtttaaattgtgtctactgaatcaaaggatcactacaagaaaaattaaaactaccggcggagcttgcctgcctctaataataagagtattacc

SEQ ID NO: 92180 - DNA, 1059 bp, Cannabis sativa
agctcatgttcgccatgaattattttatacctcacagagctaaccgtagcaataacaagatcaatgaaacgcaagtcaaatcccattttactcatcattgctcgaagaaaaccccacttcatacgatcatatttaagctttactaagatccagtttgagatagtatttttgagaaaagaatgaataaattaataacaaaaagggtacatatttttgtaaaaacctattaataatcactagtcacttttgtttctattaattatatatgtaatacaattctctctttagttatcgctcacaaataaaaactactaccaatatgagtttctaactatatgaaggaagctatgcaaataaataaaaggcaacaaacaagcttttctatacatgaaaggtgtggaactgatgtgggtctaaaacttatcttctatataactttaatttatctctcaaaaaaaaaaaaaaaattaatgcgatcgagctaagacacccctcttaacttagtttggtttactatacactctccaaagactagacttttatgtcccaatgagccagatttcgggccctccgaataattattgttagcttatatatgtgtgcattcaagaccttcatcattgcattgcacgatattattatttaatttatttaattatgatatgtacaaaattgttatataatttgtagctgtagctaattaagctctaataatctccaagagataatttcgtacgtacaatctgatcttagatctctgatttcctcctgtgccaaccacacatggttctctctctttcctctctgtctttctcttgagcatattttcattattgtttagtcacacagcagtgatttcttgtctttctttttccactaaatttggttttttgtttttggttttttttaatgataaaataaataactttttccactttaattttgtaacagtacatataaccttcttctctctttcgcttcttccttacacctctttcaatttggtgattttgttcaatatccacctccattaactttttggttctctctctctctctc

SEQ ID NO: 92181 - DNA, 955 bp, Cannabis sativa
tttgattttgttttgggtgggtttcaggataatggtttgatatacggaaagaggaacgtaatcgataaggaagaagagaagtaatttattcatttgtagattaattaaagttaaaagaattttatacacacacagttttttttttttattatttccctgtataagtgagtattaaaataagttatgataggtctcatcagaggtattttcttatgctattcccatggcaacctagaattatggtatgtttttgtaattaggcttatttgcaagaaaaatttctgaacttattaacatttcctttgggaaatatgaaatgaaaaatttatgagaggaatcctatccctcctccaatgaacaatttccacagcaatgggcaaataagatcagagcaggcaataatggttatggagaaagttgaattttatttttctgggtatagctttggcaacaggtacgttttctttattaatccttttgatatcaattgccaacaactccctatttatgttaattgaagtttttatgccattttctggttatgtcttgtaacgtttttgatgttatatatgccattttggcttgtttgcttttgttaaggttaccagttaccttatcccttttggtgctattaattaatgtcatcaaccatcaacattcacatctcaaacattttagagaaatgctagaaggcaccagtggtgccaagcaccttcctacgtgttaatatcgttattggtctaattaagtatcgagttccatatagtttgataaaatagcttttagggagtatcgctagtcaatcacaaggtgacatatcttaagggtgctaggcactactagtgctcaataacaatgctcaacattttaatacaatattagccttggttctgtcactctggtttatttattttgttgaattttccattagcaaaatgtcaccaataaaaaagac

SEQ ID NO: 92182 - DNA, 514 bp, Cannabis sativa
atatataaactaatttctcaaaaaatatttaatgtagttattgtgtaaaattatttattatttttcttatgttgtattattattaaaaaatttcaaaatattactaaaataaacatacaatattattatattataaacataaattataataatttaagcattaataattctattattgtaaataaaatattctattagtataataattttatataattttattttttgtttaaattactggttctttcttaagatgatcaattttttcatcagaaatgtacttttcaactaatattaacaattattatgagtatcaaataagcatttaaaggccacactttaattccctctcttaatccctactctatatttaaagaatatgatttattgtatataaatatatatttattgtaagtttagtaaatattacattcactgatcgaaatattagttttttaatatatatttttaaattgtttgaatttttatcactaagtattttttcacatttttt

SEQ ID NO: 92183 - DNA, 711 bp, Cannabis sativa
ttagaacaaaaagagaatataataagagaatataatattatattataatattatattgaggttttatattgaggtttttttatttttacactttaaagcagtttttttgatatttttattgaaatctatatagcaactcacataacaatttaaatcgcaaccaaaatctacatagtaactcacataaaaatcatcggaataactactaaaataacccaacctgtaaattttttaaaaaaaattggcatgtagaataattctcttattttaatgtggagttcaccactttctccactgtacaccaaaatctatcacaccaactcacacataatgtgataaaaggattttaaataaagtaaaagaattaatcctatacacctgctctaactaaatctatatacactttttttctttttaattataattggatgaataagcttccctatagcatgagggataaactacatgttttaccgtagaaattccctatatatatatagatactagaatgcacctagccgatttttcgccagaggtcgaacctaagttagcaatggatgatcgacgatgttgttttcccgttatgggcattttcgatggaagctaaacaaggacgattgacgatgttggtttcccgttatggggattttcgatggaagctaaacagagacgctcaccaccgttttcacccaaatcgatgacacttttcaa

SEQ ID NO: 92184 - DNA, 717 bp, Cannabis sativa
  modified_base (50)..(72): a, c, t, g, unknown or other
agcatgttttagtatataaacaatcactaaaacagtaaaattgaatgaannnnnnnnnnnnnnnnnnnnnnnaacaatctcaatagttcggggggattttctaacggttaaaaaagtttaggagacacgatttggtacatgtcaaaattcaggagaaaaattattaattaagctttttttttttatcaatatcttaaattcttgtgattatgacacatttaaattgcaaacactatctacatgccgatgtgtaattaatatcaatcacgcaattataaatgatctggtttctttaagactattaatgttaatgttattgtttagtatattttgtaaataatttagtttattaattatgtcaaaaactttaaaattactctcactaatatgtaattaataaataaaattcaaatctactttattttatcaatatatgtttaaagcatatttattttttatttaatttcaaaaccttaagcatgattttattttattcatttttatttctattgatattaattgtagtttaacatatgtactaattgtttattgtagatgggatgtaaaactactaaaagacttaccagattatatgaagatgccttttcttgttttacacaataccattaatgaaatggcattagatgtattaaaagaaaaacactttgtcaacattgaatgcctcaagaaaacggtatgtgcccataaacttataat

SEQ ID NO: 92185 - DNA, 527 bp, Cannabis sativa
catcttattttattatttttatttagtattaaatatatatattaatctatcaaatataaatagtaaaaatttcatctaaaaaaaaaaatataaatagtaaaattgagtattcttattggatattccctaacattttttttatagatagcactttatgattggttagcgatatttttaaaaattattttcttaagttacataaaaatcgatacttaattacacctataacgatatgacaccgacaaaaagtgctacggacttttatcatttctcattaaaattattcttcctttttacattctaaaatatacatgtttaaaataaaaataaaatataggaagactacaatgaacacggtaaaagaagtgtattgatacatccttatttgttttggtatttgagaaattttatgtagcctaattctttttatatagttgtgttgtagtagttatttaaaatattttgtaaaatttttgagaaatttagaaaaatttaacacgctaaaaataggatttaaacagtctatt

SEQ ID NO: 92186 - DNA, 542 bp, Cannabis sativa
atatgaggttggatggttttttgcaagtaaattgatagttaaaggggttttgccgcaaattactcttattattatatatgtatatattaatatatttcattttatatatattgatgtctgatcatgaagaagccaacaagctaacctaaatcattattgaacgacaaaacaacatatatcaagaatatatttgttcaaattaatatatatattttttgatgttgaagtttaattgagacaggctgatttttttattttctttatataatatgccaactgttggtaattagcagacaaataatgtatagtagatgtttttgtaaaactttggcatgtatttaattatgccctctgaatttttaaggtcgttaaaagtacaccctgagctattgagattatcagatttaatttttttttatctaattttagttaaaaaaagtttaacatgaaagttcaggggacatgatctagtatatgtcaaagttcgaggggcatgatttgatagatgtcaaaatctggggagcatgattttgtacataaac

SEQ ID NO: 92187 - DNA, 729 bp, Cannabis sativa
  modified_base (676)..(688): a, c, t, g, unknown or other
taaaatttttgggttgagcgggtcaggtccgaacaggttggttgggtctggtcaaactcggtcaaaatgttcactcctgctattaaggaaggctatatccccatccatagcaagcacaatattataaattagtacaacacagtacaaaaaatataattattataacacgatacgacacaaaaagtttgaaaaacacagcatataagcatgcataatctacttcgaaaaaacaacacgttaaaaatcttataatttgataatagtactaacaataatttgtaaattattattgaataattatataaaaataattaaagctataaaaattacatataatttagtaattatctcactaattataaaaataatatattaaaaaatagaacatagattttgagtccatataagaaaaaaggtcaacttgagtaaagcatgacatgaatcctaaaaatattgggcctacaaatcgtatcgggcttaccttcaaaaatattgacacgataggacacaatctatttttttatggtatgtcacgacacggtccatatttttattttggcatgacacctatttagatcactaattacacacatgtgtgtttcaatgtctttagtgggtgttttaatacaaaagactgctagttttagtgacgactttttagtcacaacataatttnnnnnnnnnnnnntgtaacttttagtcacaataaaatattatttgtgactaaaa

SEQ ID NO: 92188 - DNA, 840 bp, Cannabis sativa
ccatgtatatctgacaagtacatgtttgggccagtgttgagaatccagaattgttgacgaatgcttggatgaacctcaatgtctgtttggaaaaatgatacaaaaggctatgatgaaatcaaccttagaacaaaaaggaactacaactttatacacccctgaacaccaatagttcattataaaatacaagaaattcctacaaactgttacagtaataaagagtgatcctttctggtgaagtgatttccgccattggagctggtgcggtggtgcctatgcacaattaaaatgaatatgctgagagaaaaaagatgtattaaaatgaatgttggtgcagtggtgcctatgcacaattaaaaaagatgttgagaatgaatgaatatgaattcaaataaatgtatatatatactatcatatttccacccatagtgaagccaaatttttcatgtcacgtatatgtttggtacattacaaatctactccaatcccattagctctattcttgggaagtttacacacaatagagggtcagtccaaaattcggagaaactctaacagtaaagcagcctattagctctaattagttcgtttttataactcttatgtaaattccctttctttttgacctctaatatagcaagaattacacctggcaagaacttccttcaatcgatttcatttcctcaatagttatacataacagatttttagatgaaaaccaaccttttcatttttgacgaattgtatcatacattcaaccttcgcgatgcctccagcaggcatgttgttctctgctacagtttccttcacaaacctggtaagacgggaaatgctaataaa

SEQ ID NO: 92189 - DNA, 510 bp, Cannabis sativa
aattaaaaacatataagagagaacgcaaggttaaaaattaaggcacagacctaaccaccacaaccccagcagtgtgaaaatagaaaacagtatccaaaatcattattacattgttaaatgatatgctaaatgatattgagtcatgaaaaaagaataaaaacttgttaagtgccaaaatcaaatatttctctaacttaaatttgtaaatgcatcttacatccaaacacaaaagaaattaaaaaaatagaaaaaaagtattatcaaataaattttagttcttcagtagttatttattttttttttgataattcagaaattcattgcaccacaaacaattttttataacctaaaagcaccttaaaataaaaggccttgaatatactttctattccagctgttgtacaaacatttaataacaactatacaactttataaactctcaaaccattctctatcttgttgtgtaatttttttcggccatatagacaaaattctgcttttaacaaacca

SEQ ID NO: 92190 - DNA, 767 bp, Cannabis sativa
aaaaaaaaaaaaaaaaaagccccatttggccctaaagctgcaaaacttattttatcgcgacttctgctttttcgtaaatataatttcagtatattttttgttttggcaagtaaccgatacgcctatcgatctctctcttaatctactttacgttatattcggtcggttactaaatttttacatattctgacacacaatatctgtagttatatttaaatcaattatatatgtgctacgtatataaaaattatatgtacaggatcatatatgtatatagaatgtgatatatatatatatatatttatatatactaatgtattttgggtatattatatgctctggggtaaatgtctttagctgcgcgtggacggggacttatagaaagtactggcgatgattgtcatcactggtgcttttatacataatgaaatttgttccgatcgtgaccacacccattaataagtatctaatagttctaacaaaataacaatgtataaaaataatataaaaactaattaataactttacaagcttcacctgccctagaaactcattctaggcgcctagtgcttagattcctcgaaccagagtaataactttcactattttcaaatatgtaccttacaaatatacaaacaataatgtaaacaatacactcttttaaatccttacccataccaaccaagactcttgattggagatacaagattcccttgtgtgaatgatgagctctcttcaacacttttcttcaatctgaactcccttca

SEQ ID NO: 92191 - DNA, 529 bp, Cannabis sativa
  modified_base (32)..(46): a, c, t, g, unknown or other
tgccatagagatactgtggtgtattgagtatnnnnnnnnnnnnnnnatgaactacatatgtcaatagcttcatccacccctaagtgttatagagaccatgtggagttatgaatatatccagagttcagtagatataaaagatccttgaactgcatatattattcttcttaatttcttccacacctatgagatcaaaatatctttttattataaaaaatcttaataattgtttcagtattaacaattatgcataaacatagaattccaattctaaaatgtttatgcggtattatctctttgcagagtataatataccatagattttgtatcaataataaaacacaaacacatacaaacatttgaaacatataaatataatttgtataggcatacacaagataaagaaatatgaagctcaactcataaatataattcattaccaaaagagaaaaatttattataattttctccaaaaaaaatgaattgtctgtaataatatgaaaaatagggaataaaaatcccaaaccaa

SEQ ID NO: 92192 - DNA, 787 bp, Cannabis sativa
gactcgatcccggaggaataatcacaaacaacaaaggcccctctgacctctaaattgggattcggacctagacatggacacgaacccagacccagacccgaataccaacccacacccaaaccgggatcaaaacactggacctggacccagacctagacgtagacccagacacgaacctgggatccaaacgcaagaatcgaaccttgacccagactgggatccgaaaaacccgtacccaaactcggaggaagactcattacccgaccccaacctagacccatgcccagacccagaaccaaacccagacccggaatcataattggaactatgactaggacccaaacttgagaccaaaatcgaacccaaaccataacccaaactcagaccaaaacctggaccgagaccttgactaggactaggacctgagacttgggaccagaacctcgaccgagacccggaccggtacctagacctaaccaggtcctaaactctcagcgggacctgagacccgcgacccagaccaggatgaagaccccaacaacctggactcggaccaagactgggatctagacctagacccgaactcagaccgagacctagaataaaaccaagactccggacctgaacccgaacctcgacatagaccaggacctaggaaccggacttggatgggggacctagactagggacctatgcctcggaacctagacccagatctaaatctgggactcaaacctgaaccaagacctgacctggacccacgaatctgaagttggacccagaccca

SEQ ID NO: 92193 - DNA, 559 bp, Cannabis sativa
  modified_base (60)..(61): a, c, t, g, unknown or other
aactaatataattatcgaaatgagacctcaatcatttatctctatcaagccaagctcaanngaaatcatcgtttcacttctaaagacttatagaagctaaaatgccctcactagaacagttactaattcaaaattaatcatatttttattatattaataaaaaccttgtaggttgggattccgagattaaaacaatgtgaaaatacatataccataatatagttacatattattattattcttttttttttttacaaactacagggcagcaacaaaatatgactcaaaatacagtaagaccgaaatcctccaggttgcactgccgtgatatgtataatccctactgcactccaactgactgctcctctagcttagccttacccttacctacacaaggtagcaaactgatgagatatgcataaaatatatacagataatgcaatatcggctttatacttaagctgtcctgatctcaattactagactcaccaaatggttaagaacgttctcaatgaaagtacgaccgttgtaccacatgcactagagtaccgactccgta

SEQ ID NO: 92194 - DNA, 578 bp, Cannabis sativa
caaattgaatggagagattcctatatgcatggaagtgactcatctctctttgttgggtggtttaaataatttgtctggaaaacttccgatacagattgggaaactgacgaacgtacaagtgcttgatttttcctacaataaaataaatggtgaaattcccacaagcttagctgaagtatcttttttaagttacttggatctatcaaataatcgatttacaggaagaatccctactgctcctcaattacaactcttcaatgcttccgcatattccatgaaccttggtctttgtggaaatcctctaccaagttcatgccccggagatgatgataatgtgtcttcgcatgttcccgcttcaaatttagctcgtgatgacgatggtggagaatggtttgacttgtcgtggttttaccaagggaattggaggtggattcactattggattttgtggtgtttgtggaaacttgttaatcaataagtcttggagagcttcctattttcgattgatgcaaaatataggtgactggctttatgtggtgatcatcattaaatggaatttcttgaggagaaagcttgtt

SEQ ID NO: 92195 - DNA, 700 bp, Cannabis sativa
  modified_base (71)..(73): a, c, t, g, unknown or other
aattattccttcttcttgaactagctgtagcatggaaaaacttagaattctgatcaccctctcttaaccannnctgtttcgacctttggcgccaaaatatttcttgctgcaccagaacttcctgcaattttatctcggcattcttgtagttttgtatagagaccgagtctctccctcttttccagcttcgcatatcagatttgcactctttaatgcgatctctgaagttaccagtatagtccttaccctaaacttgaagcttctcaccacagtaattgattttttggacaactgaacaaccagcataataatcccaagtatctttcacaatttgtaaacataaaggctcatgaagccaataattttcaaattcgaaagatcttctacctccaatttgaacaacattatccaggatcaaatgaagtgggcaatggtctgatgtagaaacttcaagattaattaatttagcaagagggaaaaaatctaacaaattttgccactgctctgtcaattcgaacctctatccaagcattagtccccggtcctttctcccacgtataaggatagcctcccaactccaagtcaaccatattcttccaacgtttcatagaatcccttaataagccaattggggtacgggttgcctccccttttgtcagactgagaggtgatgttattaagatcaccaataatgcaccat

SEQ ID NO: 92196 - DNA, 822 bp, Cannabis sativa
aatcaaggctattctgcaggcggtgcccaactatatgatgagtatgttccagcttcctgtggctacttgtgataagcttcgctccattattttacagttctggtgggggacaaacaatgataaaaggaagattgcctgggtgaagtgggaggatgtctgtcagccaaaatcgaaggggggattaggctttaaggaccttgtgctctttaatcaagccatggtggcgaaacaagtgtggcgcttaatgcaatcgccacattctctggctgctcgtgtcttgaagtacaaatattttcccaatacatctattctggatgcgaaagaccgtcaagggtcgtctcatttgtggtcaagcttgatttggggacttaagttgttgcatttggggttgaggaaagtggttggcgatggccaaagtgttgatgcgtttcgggatccgtggattccccgtcctgtatcgtttcggcctatctcgcccgcgcctattgatggtgtgatggtgagtgagttgattgggtcggaggggacttgggatgtaaatactttatctcagtatttcctaagtttggatattgatgttatccttggtattccattgcggggaggacaatgtgaagatgggtggtgttggcattataattcaaatgggtgctattcggtgaagagtggttataaggttgcacttgatagggtgagtgagaggaatgggggctcttcagcggatctggctcattggtggaatgggatgtggaacttgaagataccacaaaaggtcaagatttttctttggcgtatgtaccatcgggctcttcctactaattc

SEQ ID NO: 92197 - DNA, 826 bp, Cannabis sativa
gtcgtttcatgcgattttgtgttttctaccaaaatttgaatgtgtacttttttttttttttttctttttgaattctttttaaattttaattaattcttctatttatgatttgcttattcgataattgtaaacattagctgaaaaatgatgtctgtctgttccgatgatttaataattgcttttggggcatttacgtagtaggatagttatgttgtattttagaaacagaacagatatgcttatccttagcaacttctatctctaatgggcgcatcgccggagataggcatctttgacgtcattgacaatgaaaccatgggttgatgttcagctttgaaaattgactatcgaataggcattatgaaatatgtgagcaaattaagggtgctttcggtaaaaattgaagatagaagttatttgattcagttaataaataattactaataattattgtccttctctttttttaaaaaaatacagcgtaactaacataactattatttagaccaatatttgaagcaaacattgaaaaataataataataataataataataataatatacaatatcccacacaaaatttatagttaactgaaaaagaaatgtttgaacaaaatatgaaattatttttttaaatgtagttaacaaatatatttccaaaaaaaagaaatgtagttaacaaatagaacttgctttgtatatagtcttattagggttaaattttatatttttattatgataagagaaaattacatagaaaaattaaagcttctctattgtgggcaacacttcaccaaacaaaagtgatggagatctgaaattaac

SEQ ID NO: 92198 - DNA, 592 bp, Cannabis sativa
tttttatgttgttgtttagatattctataatttatttttctgtgtttttctgtacagttgttatttagtttatgtacattttttatcgtgtggtttatttcatacaatatttttgttgtatgaatgtgcattttactttgttatttttaagttgttttttagtggttttcataatttttttttgttgaacaattatttttttatttatgcatattttttatggcgtatatttttagtttattcttgaattttttctttttttgttgttgtatgtgtgttgttgtagatatagatacatataatttattttattttatttttttgacattacatttttttttaaaatacaatgatagataagattttttttttttttttgtttgtttttttaattgacatgatgtgcagtagtagatattcacatattaattatatattacttattatgttatatacccatttttgaaattataagattttattaaatttattattaatgtaactatttatttaatttttaaaaaataaattataattttaactatcactaactcaaaaagaaaaagagaaaaaaaaaaaagttgaaagaata

SEQ ID NO: 92199 - DNA, 620 bp, Cannabis sativa
atttctagagttatcaataaccagacatatattcaaacagatcattctaatataacacaatactaataattcaattatttgtctaataagacaaactattcccgatgcttcatgaagtatctgttaactctcatttttccgatacttcatgaagagctaataataatgacttgtagattaagacttattaatgctccaattaaaaatcttgttttattttcttctcaattttactttctttatcttaatattttgttataattgagtttcgaaaaattcagtaaatagtagcagtaggatttctaaaagagatatcaacttatttgtggtgcactttcaaagaaaaaagaatttatttgtggtgcaaaaacattaaccttatgtttgaaagctagattttaataacaaaagaaaaatgtaagaaagaaaataaaaaaattcattaaaaaaaccactcaatttaataaaatttttcatataaaatataaaaattgataattcttttgttgtccacatttttttcctaacactttctctctctctttctatatatatatgggtatgctcttaatacgtattacccatgtatgagtattttattcttgaccattggatcaaat

SEQ ID NO: 92200 - DNA, 562 bp, Cannabis sativa
atatatttttgaaagttaatgggatgattaaacctactttaaattcaacagaatattttttatttttaaagtatattttgttaaaccaagaatataaacatgtataatttcgtttggttttgatattatatgtccaatccaatttctgtatcataattaatattgttgacctatttagccatattagataatggattattattattattattattattattattattatagtttgttacgtgaaggcaagagtacccctccactacacataattgaaatggactataactgattaatacctccaatccaaccttatatatattaattaatggagattaccccactaattttttatttttattttttgaaaagggattacgtaccctatgacaaacaaaattatttatttgtttatacagtttaaccgatcattattacgattgtaagtctaacaggaacctagtgatagagccattattatttgattttttttttcttcttaatacgaattaaaataaagcagttatatcaacacagtatgattcaaattagaaatatcatc

SEQ ID NO: 92201 - DNA, 654 bp, Cannabis sativa
atcgatctttctgaggagctaaccattgtggattcttcaggcccgaaagctgctaagtctaaagtctctcgaggagaaagtttggagaggcccgaacagttgaaaggcggaactgagcttgccaaaagtggatctgagcagatccgagctactaccccacctccatcactgcatccagagaccaaaaaaggcaaggagatgctcactcactaaatgaatcggctggttgctaaggtgaacgagcagctggccggaggtgacaacgaatcttccctagagttgttgattggaagagtcctaaaggagtttacaaaggtgagtctttctggacagcttcctttagtccttttttacttggctcagactcaaatgtttttttctgtggttgtctgaagatggcttacactaaatcttgagctaagtctgctgcatccaagaacactcccatgtacaatactatgaggacagaagttgacctgacctagaaggatggtgatgaagctagggttcaactcggagctgtccgaatggaacttggcgaaatcaacaagaaactttttgccaccgagaagaaggtagccgagctgactaaggacctccaggatttcgaccagcttgaagctaccattgccaccctatcagtagaagtgaaca

SEQ ID NO: 92202 - DNA, 852 bp, Cannabis sativa
ggtatgttgcgccaaagaggcctgttgcaaatgtatctaagcctaagggaaggaaaaattgaccgagtgattttgttaatcccgacggtgggatagaagaataattctcaaaagatagctagtccactatagacctctgaaggcgccttcacacaaagtacgaaaatactaaaggagagaagccaaggccatgtggaaacaacctaaggaatcacttaaatgataaggcttacggacgcgaccttccaaatagtgacacaaaagagttagaagaataaattacttctctaactaagctcgtctggaagagaaatggggccctctgagatccaaaagatgaagacccaaaaccatgtgttaggcggatcaacgaagccccactacttaaaaatttcaaataccacaaagagagttgtaagatggtcgtacggctcctaagacccccctgtcaaaatagaacaaaaggatgcaagtgaaaagattgagcgatgatgccaagtgtctttgctttttgttaacgctaaccaagttaacaaaagattagtggaagagatgtactcctggatcaatcaatagctggaatgagttaaaatatactttttggaagtagtgtattgctgctagagattatgatatggaagtcgagtcactcaccaacatcaagcaatagccaggtgaaagcttgaagacctttattcaaaggatgatggaggcggtagtaaagaccaaggttagcgatgacataaaacttgtagccctttaatttggacttatagttggctccttgttaggggggagatacaaagaaaaagggttgagaccctgtctgagttcatgtccaaggaacaaggt

SEQ ID NO: 92203 - DNA, 583 bp, Cannabis sativa
aacaatttacaaatcataaaaatttagaatatgcctagtgttatacaacacatataaaaatcaagtccaataatcaagttgagtccctaactctcccatgtcgttaaactttgtccaaaaagacaatcttaagctctcaagtcccgagctctaattgtttagtccaatcttagatattactctcacatataccatcaaatggttaaataaatatcatcatcgcactttacattcaaaactgagttcaacgacatataatatgactatatttaaaatttggggttccgaaacctcacctaagccgtgcgcattaactatcggtggtggtaaaaatcaatgtaccgaaaacgtcgtcaaaaataggagtagtgtatatcaaaatgactacctcgacgagtagatcacacccatgacgaccgtttctcaaaacagtacacgatgtcgtcggaatgtcactgaaaaggggcagagttacaaaaatatcactgaaaaaaatagcgagttgggcaaaatagcttagtgtggattgttctcctcgttgagctgagtctagtggtgaagacagctcgtcaaacggacaccg

SEQ ID NO: 92204 - DNA, 1216 bp, Cannabis sativa
aaaaaaaactattttgaaatataacagtaaaaaactccaaaatttattctaatatataattataaacgtaaaaattaactaaaaaattgtaattaacactcttctttccatttatacaagaaatttgacttattatgtaagagctctatatatgttttgttaagtttggcaccggtgcaattaccccttagcatttttcattatataaggacaaatctaacatcgtcccatcttcatggtgaaattttacacattattggcatgcctaattgaaagaacaaaaaataataattgcaaatgtatgataattgtcattttgcgctgagtttttgataatagtgctctattatcgttcatttgtcaaatttagcagttttcaaaatatatataataaagtctaatatatagtgctttgactagagactacctcaaatcaatccctctatacgaccacacataccagttctgtattagattaggtgaaaacaccaatataatatgagttaccaatcacttattcacaatctgaatcacattttagtttaaataaaagtttagtattactataatcaaagctaatttaatcatagtttaaaaagaaaactacaaaaatagtaatacaaacacgtcactattcttattgaccatttcccatttgccagttgtcaatttatcttttttgtcacattttgagaataaagaaacgagtaaaactaaatgaatatcaacaaattccacgtcggagtaaacgtggaaaatatatcctaaatgtgtaatataggcgtaatatgaggggcaattatgacaagtagccaatatattagtaatgacaaacttcatataaatcattcttatctacaaagtggcacagagcaccacaaccctatctatctaattttagacgagtagtttctagtgcatatcttctcaaattttctcagtctaaccaaaaaatagaaagtaaaaaaatggctgcagatgaagtactaaacctctttgattcatactggtttggaattagatcctcctcgtgtttcattacttcaaaaacaaacccaactgaagattttgatcatgatcataatcaagaagaacaaactttatcctcacaagaccatgaacatgaacatcatcaacatcatctttcattttctccatttgtaaaccatctgaatgtaaggtcacaaagcgagcatcttttggagtactcatcatc

SEQ ID NO: 92205 - DNA, 1625 bp, Cannabis sativa
aggacacaaaatggttgtacaaatttgaacatgcatacacctacaaaccctagagatccagctaggacagactctgctctgactaatccttaaccaccaataggcccacaaacagtaggtcaatgcgtgactacccctctggctggtttcactctgggtatgcaagaaacttgaaccaccagtactcggaccaagaaaactgcctccgatattggaatcccatatgctacaaattctcaaaggccgattggcagtgacaccgaactacaaaacttgtgagctgcactagggcaaatacaaggccacaataacacttttcattacaatcaacaagatactaaagcaactataaattttgcctttgaagaacaaagatgctagtttgaagaatggagggatcaagagatagaaatgatgagagcccaataagaagtgattgacaatcgatctaggcaggccgtcgtactaatcaggagagcctattaactcactgggcaacaaccagtagcagatgcttacatccctcttgggccacaacatgggccagaataatttttagttgaacaaactcaaaaaacccaagttaacagatcgtccaatcctaggccatatagtcaaattgtgggccacatggtagacaagcaagttctgtcaactcgttacttgggaggaaatgatcagcctaacatccttcctcatacggaaatactaggccaaccccttgctcataatggtcagacatagaggcctccaggaaattcagtctttgaacgattaggcactatgcatgacctcagaaatgatttgaatctcataagaggactagatagggaaaatatccctcttaccgttcagtcaaataataaaatttactttgtgtccggcccagtcctaagagatcctcatgtgacacaggtcagtcaacatgcaggtcaagttgatccattggtgcaagcacaaatagaccaacttaacaacctcattcaaagcctaactggccccaaactcatagatctagaacttttctggaccaagggatcaccactctcacaagaaatcaatgctcttgacctaccgcccatgttcaaaattccaacatggaaaatgtatacggtcaaagaagatcctctatctcacattaaatattaagaaatacaaatggacttacaatgtgatgtacagtgtagaatcttcccagctactttggcagaggtcgcccagtagtggtacttcaagctagctctagggaagttcaattcacagaattcttttacgttagagtttcatgcacaattctcctcttctcggcagctcccatctcacttagaagacatggtcaaagtgaaacaaaataccaggggaacccttgagagctacatcagtagatttatgactgaagctacaaaagtagaaggactgaccgaagaagggaggctggccgcaatctgaggaggtattgaacctctaggagaattgtggaaagacataaaagattaattgtacgatcaatggccgaattcttggactaagcaagcagatttataaaacttgaagaggtagtctggcatgtggaaacagttggatagaagaaaaatcaacatcacaccactgcagccaatacatct

SEQ ID NO: 92206 - DNA, 529 bp, Cannabis sativa
ttatagtcgtctatattgtagttatttaatacattttacaaaattttaaaaaattgaaaatatttaacactcaaaaaatatagttcaaacaatctatttcacacttataaattaaaatattcatgcgtgcaatagactaattaaaacttgttttcgacatgttaaattttccaaaattttgtaaaatttatgtctttaataactacaacataaatgattataaaaaaattaaactaattttttttaataccgaaatataaaaaaatgcatcaatgcattatttttaaaaagtgtgttgttcaattgttttgaacaaacttattaattaataaatcttatgatttttattcaaaaatattgtatttgatacaattaaatttatcgataaaaaaaatatgtcaaacaatacaagatatgacacatcattatagtgcattctaatatttgttttcacatatttgacaccttaaaattcttgcaatatagaacaaaacacatacacattactaaaactttatcatgagcttaa

SEQ ID NO: 92207 - DNA, 1164 bp, Cannabis sativa
tcaatgttgttgcaaaataacgatgggctaagtgtatgatgtggcaagagagagagagagagagaagagatagttaaagaatacatataaaatgtgatcttatttagggatcaatgctcattaaaagaaaatctatttggttaaagtttaaaagtgtgtcaggtggtcaactatttttgttgaccaacatgaagatgccctaaccagctataaccttctacccaatcaccatccaccacgtcaagacaatcaagggcactctcgtatcctaatatggaagaaaagttcttatggagcgtttagtataaggtgtttaaaataatttgattaattggaataataaaatagaaaatataattgtctataatttataactgtatttgattatgtatataaatatctagtttatttactaataattagattatattatttagctaaataaaagaatatgataaagtgttctgaaaagttatataagaaaatattaatatattaagtcaatgatattaagataggtaaatattattttggactatgtgttttgtcaaagttattaattgaatcttatgttttgttaaatgacaaaatggaccccgtatttttcaaaatggtacaaataggaccctgaactcattttttgtcataataaaatttaataataatccgatctaaatgtgttatgacaaaactgtttatattttctttatctgttcatgttaaggattgtctttaagttggttatattaaaaaaattaaaaattaagttcaaggtcctatttttaccatttcagaaaatacaaggtctattttgtcatttaacaaaatagagggtcaaatcggtaattttcacaaaacacaaagtctaaaataatattcaccctattaagattgatcatattttttttttggaagtatttaaaatttccccagtagaagataattttatttgcaaaataataattttttcatacttaaaaaaatagaaaaacatcatactaaacatggtaatataaaaaattaccattgccatagcctctaagtaagataatacaaaattactatgtttagtaacattgactaaaaaatagggattttttctataataaactaaaaagggaagcaatttacatttataacttaaaaaggaaaaataaacataaa

SEQ ID NO: 92208 - DNA, 868 bp, Cannabis sativa
tacatctaagatcctggataaatataataccaacagacactgcctctctcaaagaaacctggggtccctatcttcgggtcagaattgagatcgatgttactcaaccgctgccccgtggtacaggcttccattttcaaggtatggcatccccggtctggttagaatttcgcttcgaaaatctacctgacttttgccatttctgtggtcgccttaaccatatcgtaaatcactgtcctgagtttctagcaaagtgtgactcctcttctgccccaccaccacttcagtatgatcacaccttaggagcaaaaatccgcataacttccaatcctttttacatcgctagcactaggacccgtctttgccctcatgtcactcaccctgtttctctagcccctccaagcccgcggcctcccactaaccatattatctctgaaccatcctttaatgacccatcttctgagtatggggttcaatatcttcatcaaccccgaactactccagtgggctgctacatgactcaagttccccaacaaaatacattcatccgtgatattaacggttcaaatgttgttccttccttctcggcttggccaacctctagcaatgttgtggaccttgatagcccttcccaatcacgtagatccgttcccccctcggcctaccccattctccatgaccaaaacacaaacatcaacaatagtatgtctgtacctgaacaagttgcaccatctaatccgattgtggctgcccctgctatcactaatgccaacatttctgatgctactggttacactgtaccggtctcacaagcctttgctacaataatggcggatctcaatgctaaccagccacttcactttgccatggg

SEQ ID NO: 92209 - DNA, 543 bp, Cannabis sativa
tggaacttttttgaaagttaataattttctgataaaatgagattatatgtgaaatagaatgagtttgacacgggatatatgagcaattgtttccaagaataactttggtacttgaattttatatgaatgggtgaacacatacacttgatccaccacacacgcgtgtgctgtccgagttaattgaactggttggtgtggtaaaaaacttagtttttactatataaaattccatctatgatgcctattttaagggtgtattcgacagttcgttagtgcagtgatattttgatacagtgtatgaaattggacggttttatactgggaatgacctgcaatttctgactccttgcataatcctggacaagaacgtctcaaagagagcaatttgtaactcaatccaacaaatttattcaataatatcatttctattttattttcagtaacaatctgtataacaattgtagtatatacacgtatatttataaaaataataatttgttgtacatttatctgcacgtgtagatctgtgtatagtgtacatgt

SEQ ID NO: 92210 - DNA, 522 bp, Cannabis sativa
attttataattttatttgattttaaaatgaattttaaaaataattttttaataataatattaggtgtaccaatataaatgtgtcatgtgtacaagtgtacatatgtattagcagttcaaactgaatgacttgattattcattaaaataaacttagttattttctacaaaaatctattaaattttgttgcaggcaatggagtgaaaggaaatgtaggagaaccagcttacttagagaaattggattcatatgatattagtaccttatctccacgcgacatagctttcaaggttgccttcgataagaacgagagtattggagttcctggagctttgataatcaagaatagtggcagtgacgagttctatgtcaagaccatcaccctcgttgatgttcctggtgaaggtcacgttcacttcgtctgcaactcttgggtttacccttttacaaaatacgattatgatcgtgttttcttcaccaacaaggtaatggattaatggattattaattgttttctcttcat

SEQ ID NO: 92211 - DNA, 817 bp, Cannabis sativa
tagaatttaaaatgaagtaacatgtggttatatctcaaacttgagagaaatagtatatacattttatatggtactataatctcttacattaataatgaacgtgaattttgaaagaattttacaaggtcaaattaagaaatttgtaaattttttagaaataattaaagatctgagcagtaattggcacaattagtctataggtcccaaatgtgtgaatggtaattaaggtatatagaatgtaagagaagtagcttatatatcttatgtatttctacaatagcaatgtgagactattatcaatacaccctcctcacttagacttagaaagtgtgggtataatgaacaaccttcaagggaccacaacttcgaatgtgacatttgaaaaaatcccataagactaaattggaaaatttatgagtgtatacgtcgagaaatttgtgatttttttttaaattgaccaaagaccccaatagtagatattggcacacattggccgaaagatcttaaataaaggtcaaaggcagagatagcgaaatttatttattattatttgttttgataccatgttcaaatctatatacttatataatcctactgttaaataaggttaagtggcatcatctccttttaggattgctaattttctatcttctcattttttttccttttaagttgttttttttttatataatttttttcattaattaatgtaacataaataaatcacaaattgacctttcctttccttctccaccatttaaaaactacaaaacattcattataataaaacatttattataatattgatcaaaaaaaa

SEQ ID NO: 92212 - DNA, 822 bp, Cannabis sativa
gagttgttgttattgcttaaattaagttccttatgagttgtataggtactctagagggtttgaagtcatttggggttgattttctttgtttagaaagtttttacggattcctatactgaaacgatcaatcggttcattatggacctgtaggaatcggtcgactggttcctcccctggcagacccccacataactggttttctggttaggaaccagtctaccagtttgctagtgctctcactcattttaaacaatctttacatttctctaatggtttagaagttcctagggttggattgaaagggggaattatgttattatggaaagataatgtaaatgtaaccttacttcaaatgagtacaaaccatttgtattgttatttgtcctttgatgatggtccttgatggtatctttcaactgtttatgattttctcgaagctagtagcaaaaaacacatttgggctttgattaatagacaagctgatgtttctcctatggacccttggatgttaattggggatttgaataaaattttctcccaccctcataaaaatggaggtctccttcatcttaataatcaaatgaatgctttttgatcgaccttggacatatttttcttaatgaattggcttttgatggtgatgattttacttggactaaaatataagattaatcccactgcattgaaggaaagacttgattggtgctttataaataatgtttggaataatagttttaacttactaactctcacccgccttgactattatggatttgattatcgtgctcttgaggttgctgttaatttttcccctattgttga

SEQ ID NO: 92213 - DNA, 6094 bp, Cannabis sativa
ataagcataagactataagaaacaaaatgattaaaaccctttggtagcgtttggttagcggtaatgaaatggaaaggaaatgaatcaaatttaattccattcttttgtttggttgcatgttagagtattggaatgtcatttcaccattttggtggaatgactattccattttgaaatggaaagaaagactattccaatagaagatgagaaaaaacttaataacttttttatctgattcatttatgcatttacaatttcattccattctattcctatttatattctcattcacattcctattccatagtttttattcctcccaaccaaatacaacctaaagtgtatttagttgcggggtaatgaaatggaatggaaaggaatcaatttatctttcattttagttgcattttaaagcattagaaataacatttccatcatttggttggaatgactattccatttccaaatgggaagaaatgctattccattgaaagataaaaagaaattaataactttttttttatcaattttattatgcatattaaattttatttcaatctatttattacaattcccaatcctactccatgtttttattgcactttccatacacgaggaaaggataacacattcacaaacatgagaaggaatgttaaccacaagctacaatatctgaattctattatttcataaacttcaaacgtggcataaaatatcttataaattatttaaaacacaaatacaaagataacaattattttgtatagaactacaaactagattctacttcataactaaaaatattatatatttatgttaagcaagaagcgctattaaagggacggacagctcagctctcttaattttgcagcaaaggctacattaaagacatggaattaaggttcctaatgaataaaattaaagctggtatttttattaagtcttctcggacttctaaataaaaaacctcacctttcattttagcagcaaaagctatgtaagtaaaaacaaaattcaaactgggccttcttattaacttattaaaatttaatggcctttaagtccaaagagcctaaactgagggtcatcaattctgtgaagcacccctaaaggggacagtttgcagtagggaggcggtgtacgtgtatgcctcttcatttctcacaacatataactcactcttttttaatgttcttattcccatcttccaccccaattaagtctgaattacttttttttataagagtacaagactttacgttttaagaaatggcactaggtcttattcatctaatgtgtaattgtgtgtatgcttacattaaatatcaaaattagtgagcctaaaatactgagttggaaagaggtgaagcatttctcattcaaggttcatgtttacaaaaatgataaatttcagtaaaaagaacagaacagcgttaagtcatttaaggacattgaaattttgaactcaaattatatattcacatcttactatgtaactataaaaaatgtgcagtgctatgtgtacctaaaatatgcaccaaacaattacacatcaatcacaattttgtaaatcacgtcactgggtgtaatgttttggtgcatattttgagtgcacatatcattactctcaaaatattatgcatgcatacatgggtacaaatatgtatataaaggagagataaattacttgggaatttatgtagttcaatgatccctggtgaacatactgccacattgattcgaacaaacagaaaaagaaatttggtaagctaaggatctaaaatatactaaaagcaaaataaaatggcaccattaacctcttcatgttattattatcagacctggggattttgaccaggcccagctcctagtccatctctttttccagaaccatcaccacccctaccagatcccttggtgtctccctgtcaaggttgttccccaacataaccattcctcttagaaaacattctacatttaacacaaatctaaaaagataacatcaaattaaaaagatagaattgttacctccaactgccgcagtgcaatcacaccaataaaatcagccacgtcaaaaaaacaagaaaggaaaaattagagttgaatttgcacacaaaaaataaaagaaagactgaaagagttaaactcattttgtcgaaaatgaataaatacaagtataagtaaggtgctgccttgatgcataagggagaggacagaaaaaccttcttcaattttcaaattctacatgcagacaacctcaatttgaatattattaacctcaaatacgatttgggatatgatacggaaaaaagattgctcttctttttattctttagttttcacgtcaacaaaacaccgtgtagtctaattcaaattttaagtatttaattcaattcatagccaaacatgaatcgagcataataattcgggtcagtaaatgaaaaaggaaatcagaatcaaagattcaaagattcaaaatttacctccctgtatcttgccaggtaagtcttaagcggttcaatataatcctcaaatcccaacgtagccattgcccataacaaatcatcgccgtttatcgtctttctcttctccttttggcacttgtcactcgccctaaacacagaaaatgaaaaatgacaaacaagactactaactatttcagaataattattaattttggaaaacttactcgctggtgatgaaactgatgaattcagagacgcattcttgtacagtatctttagcgtccttagcgatcttgccattagcaggcaaggccttcttcatgatacgactgatattggcgatcggcaggtaccgatcctgctctcgcacaccgctcccacgcgggctatgctcaccgccgctatcgggactcccgccagccggactcgtcggagcttccgccatgatgatctgcagttaacccaaaaacaaaaaccctagattttatcgtacacagccacaaaacccacgcgtacacataaatacagtcatgccaaaaatacaatggagaacagagaaggaaaaaatcaatagccggacattgttaccctaagtccaggctagcattaaggagtttcagcaaagaagagtgaaaatttgtgaaaagaaaggagagaggaaggtgtgtgtatgtatacaaacctggaaaattatatagagaaaaagaagaaggaagttgttgttttgtatttggcgccgagacagagaaaccgaatttttgttttggatgggctataaaattttattggagaattgattttatgaaatctgacgctggagaaaagaatggagaagcctttcggcgttatgcttatcaacaccgttcgttttccctttttcaatctctatatttatttatttttttttccacaaaaagaaaaaaaaaactccatatttatttattttatttttatttattttcttgttatgttcaatttcttctactttttatagtgtctcttagcaccggatatcggacgggtttcgggtgaaaaaaatgaatctgaacctatttgtttacgtgtcgcgggttggcagttaggcgagttgacttgaccaactctttttttttttaatattttaaaagaaaacaaaaatgagattcttcttttttacatttcaatattttttttttttttgcatttttatgaaaatctacataacaaccaacagagcaacctgaattgcaactacaattcacataacaactcacataaaaaccatcagagaaacccaaagatggtggttgtccagccaagaaagcccaacatcaggagaaatttgtcggtgagaaccccatcgatgaagagaagatagatgaccaagaagaagaccttgagggcaaaaataatgatgaggatgatggcagagacaacaacgagattaaagatgggtattacaaaaatagatattattatgaacaagatcctgaggtttatcaaatggctggagaacttacaataactcaacaaaaattagtagcacaagaggatatctccagccagatggagaaaacactagcacaactacaggctagattcgaggcccacgaggaaatttcagaggagaacactccagaagagcctgcccctaaggaaataaccccacaaaaaaggcggacccagttgatgttagaccttctactcctgcaaaggacaagggaaaggtgtaacgtgtgaaccgcagaaaaagactactcccaatgtacttaagactaactagaatctagtcaactagtccctgcaaaaaaagaaggccacccctaccccagggctaggatgcccttctgatccgcgagccaaggttgattggaacgacatgtttgatgctccagtaccaaggcctgttgttttagggatggaaagaccgccctagcaattttgtaagccaagacaagggaataaaggtaatttctcctaaagatatttggtccactatagatctccgtaaccgcctaaatacaaaatgggaaagagccagaggtgaaagggcgatgcctcatggaaatgatctccacaaccatattaacggaaggatccaagtgcttgaaagagtagatggtcgccctgaccaagatagtaaggaaacaaagcggggccatctccgattcaaaggaggaatatgcagaaccctatattagacgaatcatagaggcggcactagcagaaaatttcaaaatgccacaaatagagttatacgaaggcaggacggacccacgtgcccatctgttaaaatataaccgactaatgcaagtagaaaaagccagcaattatgcaagtgcctttgttttttgttgacattaaccatgtccattgaaggcaggtggaagaggcttcctctgggatcagttcacggttggaaggacctgcaatccacgttcaggaaacatttcattaccaccaaggacgttgatatggagtttagatccttagccaatatcaaacaatagaaaagggagagtcttacgaccttcatccaaagaatgatggaagcagtggccaagaccaatgtcagtaacgacatgaagtttgtgacccttcagtccaaattgatagttggctcctttctctggagcaaattgcaaagaaaaatggctgaaattccatctaaattcatgtacagagcccaaggaattattaatttaaaagacttatattcaagctttttgagttgctccaacactaactccaccgagtagcacagcctttgccccataattctaagcttcggcagcacaatggccggtagccagtacacaactcctacagtcttcggacctgttgccctagggtatgcacctacgtagactaatttttctagctatggggcggtacaaactagatgtagtgctgattaaggctcaaatttgtacattttaaaggtttaattgcgaccataaaattaatttaattaattattttcatggttttaattataaaattattgtagttggaaatatttaatttaattaattttttatgttacttttttttttttttttttgtagatttgagcaaagtggtttaaataaaaattatgtcaagcccaataaaataggcccaattcaaattctatatacttgcattactctatctctctctctctccaatcaagatacattaacttgttaaagcttcacaattcttcaacgtccaaagcccaagtcatacaccatttcaaaataatagaagaacccaaattgatcatgataatgcacctgagggaagtcttcaattagccatgtggtcgcttgttttccttcaagcccaacatcaattggtgcagctatcttttctctcactccacctgacccactttcctcaaacaaccacttacacataagcccaccatcttagctgaagtaattgatgtggccccattatccactacatcaaagtttttcgtcactttctccagtatgtgtatgaaaaaactatcaagtgtgggagcaaaatctgctctataaataagatgattgaagagagcaaaagtcatcagatttttagagtagtaaaattatactctctttattattttcttatttctctcttagttttacttattttatgtgacaaaaatgagtgaacta

SEQ ID NO: 92214 - DNA, 1587 bp, Cannabis sativa
  modified_base (371)..(376): a, c, t, g, unknown or other
  modified_base (1427)..(1438): a, c, t, g, unknown or other
ggtaaaataattccaacagtaccttcactaattagctctagatatcattcaatgagatccacagctccgtcgagtcaactctctcagatagaagctgacattcaaatgatgttgactgctgaagttcaccttgtcaccaataactacgattgttagatggagcgttatgtcttcaagcgtagaaacgacgaggtttacattatcaacctcagaaagacatgggaaaagctttagctcacaactagggttattgttgctatgttatcaatgagacgtcccaaaacgatacgctttacaacataattaatacacgtttgcattaacccagtaaaagtggaccaatcacagttgtgtgattttcaaataataannnnnnttattttacgtgggatgtaatcaaatcccacaatatcaagggatgatggttctaaaatattagtcaaatttgtaattaatggccctcctatgtaattataaataagagcaggttaatttgaaaaagggacgaaaaattcattagagaaaaagcccttgaattgtatcagaatctaataagattgactcgtggactatgcatgttatagtgagaatttctcacctagaaactcgagaccagactcctataaaagtgacacgtgagaagggatgggatatcagtgagagacctcttgagtgcaaacctcatctaaaccaaagtcaacgaaatgatgtgacctgattaagactcaaatttatatattataatactttaattgtgtatataaaattcattgaaattaatatttttagaattttaattgaaaaaaaaaaaatcttagttgaaaatatttaatttattttgattttgtgttaatttttagatttcgagcatataagaataataataaaaatcaagataaaatgtgagaagccccatcattctaagcccaagtcaaatatctcaatatttaaaataggaacctatggctgtgactttgaggaaattacactgtcatcaatcaacatgggcttaatttatcactttggcccaaaacgttaacaacgaaaattatgcttaaataatgccaaatgatatatataatcatatttatgtatcactatggatcatgtcctaagcttgaacgtggaccaagaccattagatttatcaattagaagcccaacaatgaagaagtcaggttcgtgcacgacaatgaagcagcgagtaacacgtctgacgaattcaccaactgctaccaccctttctaccactaccaatgcacattttgtcccccacttttctcagtttttgtgccatttatcccactaaatgatacactaaaataccatatttgaggagcaaacttgcactgcaaaaaagaatcaaatacaacaaaaaaaagacatcaaattttagagtagagaaatgttggattttgtgccctaaannnnnnnnnnnncaatataatcagatttactagtcaataaagaacaaaaaataacattttatgttgcatggttcacatgatatatttcatgattgtttaatgtataaattctattaagtccaggacatatgtatttgatcatgattatagtgtcgtcagca

SEQ ID NO: 92215 - DNA, 990 bp, Cannabis sativa
taataagtaaatctgattatattggaatgagttttatttagggcacaaaacccaacaattgtgataagcatcacacgtatgcctcactcatcattaatagaagaacgcaagaagtaatacttgaagtatacttaagtgctaatttttatgataaagcgtcttaaagagattgattgcattacaagaagaataagtcatagtcagcataactgcttatagataaagttaaaagaatagttataagaagttatttgtcattatcccatgtgacgtaaatgtgaactgtggggattgtccacattttacgaatggttacaagtgataagattctaagggaatagttgtcactctaaactcctataaatagagatataataatctagagaacaagagacgaccaatctgagaaaaagagagatatactagtctttcattgtattctgtatacaatttattaatctcagaataagatggactcgtggactataaagaattaacttcaaacccaagttaaaaatcctcttgtcatttgttattattattattattattattattagtgttcatttaattccaaagtatatttattacaaaaaaaaacttatatttattaattaacgaaagtcggcttcaataattaataatatgaaactcttccaatgcgtacatgatttagtaccgataaaaccaacatggtattgcttgttctttaggttgataatattctacttattggaaacaatgtagaaaggttatcagacataaaaagtggttagccgaacaattctaaatgaaggatttgggagaagcaagctattttctcggcattaaaatctatagaagtagaaagagaagaacattagcattttttcaagtaacattaaataaattgggataaagataaaagttgtctagacaatagacaccaccagtgtctcgttaagacataggtggtgccactatcactatgtcttgacacagtgataggca

SEQ ID NO: 92216 - DNA, 587 bp, Cannabis sativa
ttaaggcaacaaaacatccacccacacacagaatcaaaatccaccattgatgagtcaagcttgagttcaaaaactcaaagcttgttcatccaactagctagctatcaaaacctggtcaaatcactctacaataccataataaaactatagaaaacataatccaacaacagcagcaagaacaacaagttaaacaacatttcatgcaaaactttctttttcttacaactcaagaaatcaacaaaagttacatgaagcttaccaagaacttgagatcactaattccttgctaaaaccagcttgaaaatcacaaagaaacccccacaccctagctgctctaggccgaaagagagaaagagagagacttgcgagaaaatgcaagtttttgtctaacttttgatttttcaacaaaatgagaaagaattggttttcttgcttagtaatcagcatataactcaactaaaaaatcagattaataaacttaaaataaaatccacaaaagacaaaatacaaatgggcaaaatgacatttttccctctcacataaaaatgacataaaaggggtagtaagggtatcttgggaaattctaa

SEQ ID NO: 92217 - DNA, 659 bp, Cannabis sativa
gatctatatagaagaaattataaattttataagttttatactttttgtacgaaaaaaaaaagttgttttatatgaaaatcgaagaaaaagttgaaaaatatagaaaaattaattaaggataactaagtattgataactagtattaactagtatgtaattaagtatcttatgttatttttttctatatattttttttaatttttttaaaatttttctataaattaatgtttttgagaaaaataatcatatttttacaaacttaaaccataaaaaatgaaaatttctcttttaaataaatatatatattttacagattttaattttttttttacaaaaatactaaatattattttaatttcatgttactgatacggaaaaatatttttttttttcaaaataaaataagaagtgaaacttataaaaaataaaatttgtaaaaataaaaaaataattagtaaatatataaaaaataattttaagtattttgtataaatttttctatatcaaattatttgtatatcataattctaaataatatcatattaaattttaacttatattaaaatattgtaactctatttgtacatacaattaatatcaaacattgcataaaaatattgtgtaccaaagagactaaaactagaagtgttataatatct

SEQ ID NO: 92218 - DNA, 640 bp, Cannabis sativa
ctcgagccatgaaagaaaaagaaggaagaagaagacaagaatggagtttacacagagtctagctctgatactattttacgaaatagagagaaaggaaaatgaagaactctgtgtaatttccattgattacaacacaaaatataagaacaaatttatatacaaactggtataaaccagtaacaccatgccactgaataacagactatgcaactgaataacagactctaactaactaatacagctggcaaaaccacttcctaacaaactcaaagacactaaactaacaactgtgattgttgatatgaatccatgcgtttaaaataaacccacgaagtagtaaacctcgaaataggcatagatttagcacactgaagctccgtacgataccgtttctgtaatttctccatcttatgtcggcattgtatggcagtcttccctggagacgccgagggacacttagccgagacggcatcggcgacttcttgccagtaggtgtccttgaggttcccacgacggagagaataccacttatcacaatacggatcgatcagagaaaaaaagaaaagggaagaaaaaaagaaaaaaatatatattttataatttatttattttttaatttttaaatatttataataatttt

SEQ ID NO: 92219 - DNA, 532 bp, Cannabis sativa
aattctcttgttgtagcatgtacaagtatctagctagcttcttataggaaactgcctgcgtacctgtaatatatgtaagtatcttcttcttgcacatccacgccttcacatagctcattaggatcccatagctatcaaacatatcccttattctgtctatagccttatacttagttccatcttgggtgtacttcccttaataaggtgggcaaccacccacggtgctacttgacagtaatcagaatgtttagtatctaggatacaagtatgttcgttgtgatatatgataacctcaaagttgtcacaacgcatcttcttcttcccccttaatattcatttacaatttggatccttgcatgtaatgtacaacacattagtgtcggaattcttcaccatccactaaaaattgttattcagtgcaaacatacccactacttgtcttaattctttcttattttcgtacaaattgtcaagttgtatcgctcatgattgcttactttgtaaagaggtagtcaggacatgattttcctgt

SEQ ID NO: 92220 - DNA, 844 bp, Cannabis sativa
aacatcttcaagcttacaaaagttcacacaactaagaaattcagagtcaggataagttctcaccctttgtccaaccctctcttccttagccaaaatatcattaaggtcacccattacacaccaatattcatcagtatacagaccacacaaatgcttccataagatatgcctctcagtcctattatttgatgcatacacaacagtaagaaaactattgaagccctcaattgttgacattctcaagtgcattagctgactagtacacttgacaatatcaacaaagaatctatgagggttccaagcaatagtaatcttacctcccggatgccatgcaatgttggaagagaaacaccatccatcgaacacattcgagtacaaggcttcaagtttcggggcctttaccctagtctcgaggagaccaacaaaatcaaccttttgagaattaatgaattgctttattaattgttgtttagattgattgttagctcctcggacattccaacaaagcattttatccatttgaaagagagggatctccccccccccctcttgtgtcatccatgatctccctatcggcttgtagtatgctcatttcaatttcccccctatttcccatctctttttccaaactgagagcttgaaaagggttgcttgttgatactgctgggaactcctaagtttgttcaggcttatcaatcttcttcccttttgatactctaataaaaccatcatcatcaatgtttgtggtcttcctattatcctttttaacaatccattgttgcttggccggtgcagctcttttacattcagcagctaagtgaccaattccggaacaatgagagca

SEQ ID NO: 92221 - DNA, 804 bp, Cannabis sativa
atatttaaaaaaatttaataatttataatactagaaataaaattactaatattttaatttattacgcatatttagaaaattttaaatctatttctcgacactgtaaattatttgaaattttttaaaaatttataagaataatattgtaactataacaaacaccgtcatgaaaaaaaaaattaaataaaaaatatttcgacatatatttttagtcacatgaaaattaactaaaagactataataagagactcaagataatacctctccttgtttcaatataaattggtgttagtatttgtgaaaaacaaaaagaaaaaaatacaaaaccaaataataatataataattttacaattggctcgttcatcttttcttttgggtagcactattattatttgtcctaagtttcaaaaagttttgattccaaagtgtagtagtacttttagtagtgatgggtccatagaatagtgttgtgtgtacatacatttgattttttatttatttatttttaataaaatgtgtgttgtaaataaattaataataataataatgtgagtaatttgtaatataaatacttaaatttaattttggttgtagataaatatttaagtttaaatttttacggtaataatacctatattataaatctaaaacttttgtagatacctaacctgtcaagtcaatggccacgtggtagtctttgattaattcagattattaaatttttatttttatttaaaagttaaattaaatataccaataagaaaatgaagcgtagattataacttgacacttaacgactaga

SEQ ID NO: 92222 - DNA, 1038 bp, Cannabis sativa
gtggaaggatattaagagattaacagtgggataaatggtagaatttttggatcgagcagattgattcattaaacttgaagaggaagtacggtgtgtagatacagtgggacacaagaaaaattagaacacatcactacaactgctacatccacctagaattcacagaatcccagcagtttgaatcaaaatggaagaagttcaaacaacaacaatacacagggaaatggaaagaaaagcaagttcaacggcaactcttaacagcatcctatggagaatgcctcaaaattcactactttctcagtcctaacagaatagaaacaatttatgcaactaccctatctatggtgtcatacaagaaaccctctccaatgaaaaatgacatgagcaaaagagacacaaccaagttctgtcattttcatgcagacaacggccataacacatatgaatgtaataatttgtagcaggagatcgagttctgaataagaaaaaataacctggacttacaaaaatatgtcaaggccgaccaagaacaaagggttgcccaagaagataataaccaaaaccagctaatgcatccaccaatggacatgcatcttcaagttatcatttggggctctcatctcattggggacttgggcaaagctagagaaaagtattcatgagccttgcaatatgaacaaaacaatgcagtccttgctgtggaagatagagagcccaaattatcacgtgtttgagaaccaatcataacattcaccgaagttgattctagctacgtcatttttctgcacaacgaccctttggttattgaggtgcagattgcaatgtggcatggactatggtggacaactaagcttcctcaaatattctatttaagaccacatatcaaaaaatggggctccagcttaaagatttggttccttacactcagctagtctacgggttctccgaccagagtgtagcaccacttggacaaattcgcctaccacttacagtgggacaagttccgacaagcataacagtaatggcacaattcttagt

SEQ ID NO: 92223 - DNA, 660 bp, Cannabis sativa
  modified_base (126)..(128): a, c, t, g, unknown or other
cttttagacacaacaaaatttgtgactaaaaatgtaaaaattgtgactaataattataaatcatgattcctatgttgtgactataaaagtccgtggctaagagtattagtcacaaaaattacaatnnnttgtgattaaaactaaattagtgaaaaattataactaaatactaagttttagtcacaagtaacattttgttgtgactaaaaagttatcattaaaagtaacaattttttgtagtgcctcccttttgtgtaaaacatctagcaactaatcatgcattgtatctagccttcaactccagggatcccttcctgtgcttgtatactcattcacaaccaactattatacttagtagctaccaagtcttaactcataacatgattttaataattggataaataagtaggtaccaagtcttaactcataacacatgatttttttaatttattattggcataaaaataaaagtaaaaatttattatttaattaatatcaatttatgataatatttatatttatatataattttcttatgtaagtttatatttatatttatatgagatatttatatgaaatatttaatataatatttgtagctttggagataaccttacagcaaaacaacaaaaatttaaaatttaagagagagagagagag

SEQ ID NO: 92224 - DNA, 726 bp, Cannabis sativa
ataaatgataatattattggtatttaaatttatttattaattcaaaaatattattcaaattaatataatggaagttaataattcaatcctatctttttttaaggtatgaacattaccctcctcaagggtagttatattactaaggaaataataatccaaggctaaaccctccaaacaaacaaggtaatgcttcacattaccattcccttactagcattaacctattctaaacagcccatggttacactatataatacaaaataatttatttacatttaattatacattctatattagatatataaacataattttaattttatatacaatttatataaggtaattaatttttcctgtcttatataaataaacaataagcatacttatttttccttagtaaaataaaataaagatacatattttgtttataaaattatatattaaatatattagattaataatttataaacattatcaatataaaatataaacataatatttatacatggttatagtttcgtttttttaaaacaaaataaacataaatattttatttttaaacttatttatgaacttttaataaacaaattatattaattcttttaaaacattatcatgataaacatattatattaataataacattataaacattaataataatcaaatatttaataaacttgtatatacattgtttataaaatataaagggtaaatagtggcata

SEQ ID NO: 92225 - DNA, 515 bp, Cannabis sativa
tgttgtagggaaatagaaatagtactaaatgctctcgcgtagccaaaccatcggaaagggaagtgaaattcgatgtaattcttagtcatggaaaatattttaatttactagaaacatgttacttatcatccacaataatgtaataatctctacacattcggcactcttcacttttaatgttgtaaggatgatgatgatcattataacatatttcattccttactttcctttaaaagaatataccaacaacattaaaatttgtctactaattgggtttttcactatacacattctcatgaaattttacttgccaaattacatagtatttacttggaggtaaagagatagaatataatggaaagaaaataatattccattactttatttagttgaatattatgacatatttacttaatggaaatgagatttaaaggtatgagatcattctcctacaattgtttattaaattttgaaaaggaagaaagtagtgggacccacacaaattagagagaaaa

SEQ ID NO: 92226 - DNA, 895 bp, Cannabis sativa
caggttagtaacaacaatttttgtctatatataggcaaaattttggaggaactaaagacaacacaaaatatatttatatataatatattgtataactgtaatttggacgcttttttatttgtcttggtcactattgaaattaacgatgttgatattctttatatataagtacgtacgtgggtaagcatgcaaaccgcgtataggagagcgccggcgcaacgcgtgaatcatcgtttaattaagccagttttttgagggccttgtgcgtgcgtgttgaatattttatcctaatattgtcataaaagccattttcattaattagacgattgctatatatacagtaccagtgttcgtacgtaccaacacatcgtattgattttagtaatttagtaacattaatagatatcatatataaaaccacttgaggctagttcaaggccataggtgggtaggtgtctcctgagtttgtgtcccaaataaaatatgtttgtaatatataaacgcttaaataaaaaaaaataaatatcatatataaaattagtgttggatactaattagtctcgtttgaagaaataaaaatataagtataagaataagcataaaaatagaaatagaaatagaattgaataaaatttaaaatgtataaaaaaatgataaaaaaaatcattaaattttttctcatgttacattaatgttagagactttattacaatggaagaaaattaaaatgtattataactctattgtaatataatacaagaaccaataaagagattaaataatgttacaacacataatattccatatatataatttatattatatataagaaaggtggaaaaagatatgggtgactattcaatggttacatttttattgtaagatcggaagagcg

SEQ ID NO: 92227 - DNA, 1885 bp, Cannabis sativa
agtgggattccctctgtttgtcctatgagtaggggtttaagcttgaaaaaatattttgatatattaatttggctttgattgcaaaattgggttggaccttggcttcgaggagtaatgctttgtggtgtcaagtttttaagagtaagtacttctctagaggtgtcccattttggtccttggtgatgctaggtttagccttcaaggttgcaaatggaatcataggatcttgagatctcatgcatagttaatgttgtgtgatcctagaaattgtcaactctattgacctctggaatacccctggattccttggctctcttgggatgagtatttggcaggattcaatttaagattggtggaaaagagtaggatgttcaaccccaccctggtcatagttgatggtgattggattaacaatgtagtgtctaatttgatcgtgataaggtatgtatttctcttacctcggtacaaatatttctaccataccatgaggatatacttatatggaaggataatttagatgggtccttttcggtgcgacaagcctatagagctatcattaaggatcgtgggtcaacactaggtgaggtttggaattaaatctagttgactccggttcatgagagggtttgcttctttttgtggaaggtggctagggacattcttccatttagacaaccgttcaatcaaatttttgatagtaataatcaatgcatcttttgccatatggcccataattcttgtactcatctcttcttagagtgttattgtaatgccctattagcgtaggcgcgctacaatattttctaaatttatgtgctaatatttttttatcaaatagtaataaaaaatgtgattaacaaaattttttatgataaatataaaactttactaattgtacaaatatataaattttacaaactctaggatcccaatttattttttaaatacaacaaaagtgtcgcccaacggctaacaaactaagcccacgtaatctcgaagattcgaacactctaggtccaactatttagatatgtataatcctcattgagctccagactcaccgttattcaggttttatcttgcctttactatacatgaatcacatatttgtgagtcgaccgactcagttgaaaatcgtaaatcatataatctgacttgtaacttaggcgctcatacacctaatcacaaatttaacccacatctaatgtgtatgtgtctcaaatgttctagacgatcaacaactataccacatgcacttatattagtacctaaaagtattagtgttggtagtgttgattgcgcaaccaatcactatactatatgcactcagtatcctagaaatactagtgttggtaggattggtagcacgactaacaattgtaccacatgcactcagtatcctaaaaatactagtgttggttgcattagtaacttgactaatcgttgtaccacatgcactcagtatcccgccaacctaccaacccgcgccttattcgagtccgagttcgatttcatttttttgaaccagaaacccaataaacccgcccgatgttcagccctaaactattgtcagggtgagttcataccttctaaatcatccatgctaaacatgtatatatgtgcatattttataataatcttatctcactttcgtaatcaggtgtgccaaccaacccgagtgaaaatactgctcaacgattctaaggccctaaagcacagtcatgcaaaataggtaagtgactggctaactcacttttggggacttaaacttaaaattaaaaatttctataataccctaaatatcgagaaaacatgaaagtcgtggtacccaaaaatacctcatcaagtgaactagatccctgaatagtgaaccttttattggggt

SEQ ID NO: 92228 - DNA, 857 bp, Cannabis sativa
atataaatgggtcagcaatgagcaattttggcctggaacgtgtccttatcctcttatcttatattattgtaatgatggtttattaaattggagaagcatattgtgaatgatctaatatattatagtgtgtttcttgatgggtactgacaccaatgaacaagcaaaatcttcaaaaatgtaattgtttagtagccaactacacttgcaatcttcttaaatttgtcaactaagtcagtgtcaatgtcaccaaccaacatgtatattacttagtatgtttactattcagaagtcagctttcctatattaactcccaaagtctctcctaacatttttttgccaaacaattcaccactttgatttctttataactatattttatatagtacaagacaatagattgatttcctttacaatcttggaaattatttatcatatatgttggttaggtttctattgtttcttcaaagacaaagttttgatcatcattatcaatatgtgaaaagaataaatagtgccatgactaccctaccaattaccaaacacaaaaagaaaagaacctttcaaggagttacagaacatagaacccacaaaatcccaagagcaatagaataataataataataatacatagtcgcatattatcaactaaataatttcaaagggaaacaacacttaatgggtgtggcccacttgggataattactcaagggcaaagaaaaagaatggaaattctcccaatgtgtttcaatcagcttttattatttaattgctttctttttaccatagtgttttgctgttaacatcatgtaactgttgcttaccacattcttgccatgttcttctctggcctaatccta

SEQ ID NO: 92229 - DNA, 1199 bp, Cannabis sativa
tatgcaaaaaatgtgaaaaaaatacatttatgctatttttggcatttgatgatgatctaacagtgaaattgactctggatgctggtcgtcaattttcagagcttgaatcgtgtctgcatgatattttttcggtaagttgttgttgaagtttgtaacaatattcacgaaaaaatttggacttgatatctttagaattatgattggagtgtgaaacacgacttaatagagattgaaatatattcaaaatgcaagttgaatcacatcaataaaattaatattgagtgagttatgataattttactgcaggctgctctgatactagcgcccaggttgacaacctagcacccaagttgacatccagtgtccaggttgacatatgacgtcaacctagatgctaagtgagtgggaaaatgtgatggggatgtgtattttttttgatgcgtaagtgatattttgaccttagttaatttctttatttttgtgaagtcgttcactagttctcggagatgttgatattttgcaaaatcaagagactcgaaactacccaatttgcaaatttgtcaccttggcaaaaaagtgaaaatatgaagatgcgaattttacttatatgagttcataacaatcatttactatcaaaaacttgacaaacactccagatggaattagaatcggataagaaaactcagcgcatcaggtcatacataaacctgggtgctaggtgctctctctagagcttcctagatgtcgttttgatactttcaaggttcgtaaaaattgaggactcccatctcgtttttgaccatgccggagagaattctcggagcataatttgtgtttcagtgatcgaatctagtgcgttaggttgagtcaacctgggtgttgggcccaaaaccaagtcaacctgggcgatgtgctcaaatttcttccctttgggattcttgttttctccctgaatttacatgtatctttgtttttttgacacaaaaaattcctagaacacttttttggacaattgtttagaaacagctcaggttgacaaaatatcaaatgggtgttgggcccaacacaaggagtgaaactaggtgatgggtccatttcatgccaccaaaaggtttagtttgatttcctaaaacacttgtatcataatttttgacaaaaacggaaaatatgctcggaagacttcctctaaattactaatg

SEQ ID NO: 92230 - DNA, 595 bp, Cannabis sativa
acaattagtttgtaatttaaagttgttaaaagtttgatttgtgactcgatagtaatagagttattaataaaatgaatgttgagaatcatgggagtccatcccaaaattaattggcaatgagtggagtagcctatgttcttatatatgactcaattctctaccatttattccatgtgggacaatgtccacaaaatgtccacaatattccctctcaaaatgatggctatggtcattatttgtataagtgcggatcggataggatcagttgcccgttagggatataactctgataccatgttgagaattatgggagtctatcccaaaactaattggcaataagtggagtagcccatgttcgacaatatccacaataatgaatgattttgattacttaaaactatatacatgcaatttgctttcattttcttgtttaaaatacaactttagtggattctaatgtataagtttacaaatgtgttgtcaaaccagttaggggtaaaatatttcatgctcacacaaaagagtgacataatgaaaaagtgtaaatatatctactgactctttatattagtattgcatatcacttaaaggattt

SEQ ID NO: 92231 - DNA, 521 bp, Cannabis sativa
ttctgcacaacctcaacaccagatgaaataaagactatatttgcaagcaagtctttgaaaatcataataaaaaaaccacactcttatctttcccaaaaacgtgaatgaaaactttcaaaactaaataaaaaaattaaaaaaaaaaataaagaagaagaacttaacaaaaaataaaataaaaaatttatatgttattagagaaagattgagagaacttgaggaagaagagagtgaaaaaaaaaaagagttatttgttatttgttatttgttcaagaggagtacatatataaacacaaatagttttttagtttggaggatcacatagtgtttaccgagattttcaaaaaccgatcaatgaaagcttaaggaatgtaaaatattaaatcacaaataaacatggtttttacttggttcagacgttaatgatttttagttcacgagtcagtaatattagccttctttggcaaatgttcgagcattacaagtgtttacaatgctaatctctatattccttttgtttc

SEQ ID NO: 92232 - DNA, 509 bp, Cannabis sativa
attagtaaatctgattgtattgagtaaatctgattgtattgaaatgggttttgattgtattgaaatgggttttatttgtattgaaatgggttttatttagggcacaaaacccaacagaatcttacttgcatgcccaagcaatatgcatgcaaatctggtcaagtggcatgaatgtaagccttggctgagtgacttgcatgctactttggtcgagtgacatgcatgcaagtcgtgatcgtgacttgcatgctactttggccgagtagcatgcatgcaagtcttgatcgagtgacttacatgccgtcttggccgagtgaatttccttggtgcatgtcaagtgactagtcctcgagcatgtatggccgagtgacatcctccaatgcatgtcaagtgacatgcagatcgagtgaccttccttggtgcatgccgagtaattagtcctcgagcttgcatggtcgagtgacattccttaggtgcatgctgagtgactagtcctcgagcatgcatgg

SEQ ID NO: 92233 - DNA, 516 bp, Cannabis sativa
tatactggtgtttaagaacaaacaacatacaaaaaaattcctaaccataacgtggaaatcaaagttcatctttcataaatatacagatatatttgttttgcttttattacattttacaatagttctatttttgaccaaagttaagtccaatttttcttttctttttccacaatatcatatatgaaagtctaaagatattgtcatttaaaaataaaattggatcagaactcatgaaacactaaaaataatattagtataatattgcatcggaagttagaaggatattaatcagaaatttttgcacataattctcatgcgttgggaaaatatatattacatattttatttagtgtggtaaataggttggtaggtataaggaagtcggactagtcctgaacataatcagattagatttgtgtttagagcttaaaaaaatatgttcctttttaaaattattcattttttttttacgacccaccaggacgaactctaagtacacgtaccttggttttgtag

SEQ ID NO: 92234 - DNA, 629 bp, Cannabis sativa
tgtttgcaccagcagtactacatcagctgcgacttcatctcttacttctaactctgctactccattaaaatggctcccaccgctccaggtttctacactcttaatgtggatgatgcgtataatgaggaagctgcaattattggtattggagcgatatttagagattatgcaggagatgtgattgctgccttttcgagatctttgaagggttgttattcaatcaaagaaatggaagccaatgccattattcacagtttacaatgggcttttgctaaccaattgcctattcactatattgaaacagactccttacttgtggcaaatgcaatcaacaatgcttcttctaagatttgtgtttctcatttttaagatttaatagatgacatttcacttttattatccttctttcttagagtaaaagtttcccatgttaaacgggatgctaaccaagccgctcatggcttagctcgccttgctcttcaattggataatgattgtacatggttggggaaaatctcttctccaatctactctgttgttgtttttgattccattcaataataatagcagtgtttttacaaaaaaaaaaaaattatgaactatctatatttttttattattttaaataa

SEQ ID NO: 92235 - DNA, 550 bp, Cannabis sativa
tcgtattttaagacaaaaaattcgcactatgacattaacaaatttattttctttgcaatttaacaaggggtataaattcttagttgaataatgatgctgttttaaaaatagtcttagggtcagtttggcacaactatgctgtgggaaaaaacagttatagcaaaactgtagaaaaaagctgagctgaatgtttggtgaattataaatttcaaagtactgtaattgttaagattataatgataatgttataatccattagttttgatagtataactaccctcattgtaccatttctatcctaacgacagattccaatgataacttgttaacacctttttctaatatataacttcctttacaaatacgtgggtcatgactacctctatattagattttgaatgagtatctttttatacgtatcatatttagtgctcacgtatatattgatgagggtggtactattaaataattaaataagtaaataataattgaaaaattctgaaaatctcacaataaatacatattataaaataatcaagtatatatatat

SEQ ID NO: 92236 - DNA, 696 bp, Cannabis sativa
cgagcaaagctgcatcgaaccagcaaatgcagtgctgtttcaggggctgcagcacacaatggacacccagcttcgacttgcacatgcttagtagtcaataagaaccttgtaggaagacaattagcacacactctccaaagaaaattgagtaccttcggaggcactttaatagaccataacttgctccacacatcagtagggacagcatgattgacattgttattagcctcatgttgtagtctataagcactccgcaccgagaaaatacctgagctatcttgcaaccaaaaccagttatcatttctccttgcagacgagagaggaatgcgccaaaccaattctctatctctgtcatttagcacatcagagataacctcattgtatcactcaagtttgtcaacttgcatcaaagcttgaaccattttcccatgaagacttcgacttgaagtctcaatgtatggattaaccacatccagcagccacggttcatgcaaaatagaaattctggaaccatctcccaccaggcgcctcgcaccagcccgaaccaagtcctgagcttccaagatacaccgccaaacgtaactcggattacttccgagagtggcattgagaaaatttcccgatgcaaaatatctagctttaaaaactttagtagctagcgtatcctcacaagacaacaacctccaaccttgttta

SEQ ID NO: 92237 - DNA, 563 bp, Cannabis sativa
aaatcacagctatatgattttcaaatcataaccgcatttacactacgtgatatgtaatcaaaccccgtgattttaggggatgatcgttgtaaatagattataatcaacttcgtaattaactgcccgctatataattaaaaatagtggcaaacaagatcaaaaaaaggagacggaaaaactcatacaaaagagaccctgaaaaataatcaaaaatctgaataaaattgactcgttgactcgttgcaaaaccatgtaaaaaatcttgtgtgttcatactttttattttataactttttttttttttttttttttgtgtgagattgttacgactaggctaaaatttaattaacgaaaatctccgttaacattaatatatttgaagaaattattttttaaattttaacattttcaccaagattaaaagataaaataataaatattgcattcttcttgagaaaaaatgattaattgggctagattaattttttaatcatccataatactatcatttacaatgatttctgaacatcattatatatccaataatatattatccttaatag

SEQ ID NO: 92238 - DNA, 743 bp, Cannabis sativa
tttatttatatatagtaattataaatattttaaatttatttataaggttttaatattgttaacaaatttatgagttaacagtaatactttaaattaatcatttcgttaaattaataaaaatattactttattattaatttgagataaaaacttttaataattaaaaaagaataatactatattatttttattagaatcaaagtaatattgtttattaattttattttaaacttttaatagcatgtgataactcaaaattatatatttttacaaattttaataaataaatttttgacgataaatttataaataagttttacattattcctttcaaattatttttaaatctaaaatatatttacaaagtgaaaaactaaaaaagaaagataaaaatagtcatgtgtgcaaggattatttttcgcactgctattaatcccaaaaatataaaattaactgaattaattagacatcgagtcccctaatataaccaaatattggattagtgacattttttaatttaatctagttgagtcaatcattgagaaatgtaatctaatatcaatgttcaatagacactctagtttattttattagttgtaattttttttatattaataaaatctataattttgtaactcataatatatggtaaaataaatttttactccattgcttacttatttcttttattccaaattattttttttttgtaatcgtgaagtttaatttttttttttcttttt

SEQ ID NO: 92239 - DNA, 1026 bp, Cannabis sativa
ctgaagatatagagagtgtgtacatagcaactcagtcgttaatttcatacaagaagcccgggcccatgaagaaagatgccagcaaaagggacatgcgaaattttgtcagtaccatggagactacgaccgcgacaccaacgaatgttacaacttgaagcgggaaatagaacttctgatcaagaaaaacaacccgcgcttacagaagtatgtcaagaccaaccaaggtcagaacaattaggatctgatgcctccgccaatagatggacacttgcaagtcattattggaggtccgcacattgctggagacacgagcaaagctcgagagagatatgcccgaacagctcagtacgagcaagaagaagtcatcctggccgtgaaagagaggaagcccaaagttccacgagcaggagagccaaccataactttcaacgacgaagacgctgtccagataagattttcgcacaatgacccgctagtcgtggaagtccagatagcaaacataacggaggccagaaccatgatcgataatggggcttcttcaaacattttgttcaagactgcttacgagaagatggggctttagctcaaggatttaactccatggcttcagcctgtctatggtttcttcggtcaaggagttgcacctctaggacaaatccggctacccctcacagttgaacaagctccgacgagcataactatcatgacacaattcatgatattgaattttctttcagcctttaacgtaatgttaggccgaccagccttgtatgacttaaaagctgttacatcaatctttcgctcgtgcttgaagttcccaaccaaaaacggggtagggtgtcttagagggaatcaacaatctactcgggaatgttacaaccttgcagtagccaaggctaagaaggaaatatccttcatccagaacccagacaagggaataaacattcccaagtaggaaacttcccagggcaaggatgaagatgtggatcctcgacttggggaccccaagcagcaatgttggacctg

SEQ ID NO: 92240 - DNA, 1153 bp, Cannabis sativa
gatattcatagaaagacatgattttccatactcgaaatctcagtgttttctagctacagatctacatatctaaggccttactggtctgctaatctgacttcggatctagatattttctggtacgagtttcaaaatgatattacatatcattcaacatcttatagaaaccatccttaacatacattgataattgtttgttgtgtaaaaactttatcaaaggtagatacttgttctgtgagtttttataattcatcatgtaaacttgcaacatatttcttagaattaaaattgtcccttcagactggccatctgtctacgattagaaagttatactaaacttcagcttcgcgctcatggccctctatagactttgttaaaacctaaaggtaaattttgattttctattcaaaataataaactttaaaatcgcataaggtcatactatttcccttaaataatttcccatactagctcttgtaccaaaattagtattctatttcatattcaatcatacaaaagcaaacatgcttgcggttctaagtattctaattatataaatttctagtaacatccccttgtttcactcgagaaaatttagtaaatcataataacctttccagtttctgatggttaaacctagtacattgttaaattaagtatttgaatacataatctaccacatcattttgcattgtacctcattagtaagtagaatttcaagtcttggtacatcttaatagtaccaaaattttaacaatttaaggagaggtataagtttttcctagagtctctcttatgagctcaacactgcctgagacacaaactcgagtttattaacgtaacatcttgtgatctgatactgagaattctctgacttagccagcttaaaacatatttttgagttttcactaaatttgtatttaccaattgagcacttctattttcgtctaataaatttggttgaagtgttaacttattgagtttactcatgcaaactccaaacttaacctgaccatgacaattgttaactaaggagaaatcatagttgtactgaaaacccacccaagacatttcctacctagggtttcctccactagattggccttcctagggtaatagagagtttcacagtcttaatctttgactaactcca

SEQ ID NO: 92241 - DNA, 1731 bp, Cannabis sativa
gaatgagataggagagttttaattagcttatagaattaagttttagtgtgagatataatttattatatatgtatatgtaaattttttaaaaaatatatgagagaaaatagatcttatatttattttttatttacgtattgaatttaaatttttttcattatgtgaaattaaatattttattaatattcatatatttttattattaactagtcactaatttgctaactagttactcataaatgatataactagtaagtagttaaataattaaaaattttaattttgttgtatttcattatattgtaggttgtgagctaattttttaagcaactgaataatttggtgttgatcgatttttagctagctacaggcatatatattcactaatttttgttattaattaattatcaatgtttagtggagtttgaatatcttaaatatttatccgtagtgaagtaggttctgtgatatattgtactgctggcatatgggtggaaggatatgcataatagttgaatttgaatatcttgaatattcaactatagtgaagtaagttttgagaatacatgtattgtgattggatgagtagataattaatgtattgttaatgttattttgtttattttgtattatttcttatttttgacatgtttaaaatttttgagaacgtccaattacaactatcatgttgttgaaattttggttgaattaggataaatttgactaaaaatgcataaatattaaaaaaaaaaaaacaagtgttacgcataacacaaataattagttactagttgtaagaaactagttagttaattacaacttatataactagtaactatttacagtaagttactaattatcatgtcaatatttgaaatgagtaatataataacatgatctagactaaaacaaaaattaaagtaataaataaatataaaatagttgtgagaaagacctccttctccaagatcatgttattatattactcatttcaagtaatatagatgacctatttgatcagctacagggaaagacctccttctccaagatcgatcttcgatctggttatcaccagttgaggattcgagaagagaatatccccaagacagcttttcagacccggtacggacactatgaatttctagtaatgtccttaaaattaacaaacaccccaacgacatttatggactttatgaactgagtgttcaaagacttcctggatgattttgttatcgtctttattgatgatattctattttattcgaatacagaagagacacatgaaagacatctccggatggtacgcctctgagagcataagttgtatgccaagttcaagaaatgagaattatggttgcttcaagtaagtttcttgggcatgtggtaaataaagatggtattctagtggatctggtaaatattgaagcggtacgagactggcctcgacctaagtcaacaattaaggttagaagtttcctgggtttagtagggtattatagaagatttgttgagggctttgctaagatttctacatccttaacagaattgacttgaaagaatcacaagtttgtttggactgataaatgtgaaagcaatttttaggaactgaaacaaagattaattaccacttccgtactaactttaccggtcagtgatgaaaagttcgtgatttattgcgatgcatccaaacagggcctaggctgtgtacttatgcagtctggaaaagtgatt

SEQ ID NO: 92242 - DNA, 653 bp, Cannabis sativa
ccgagttagagcgtgaaatagccgtagtagggctgggcataagaatgaaacccaaaagaaacttgaccttgtgcgaagagatccacgaggaaaacctcgcggctcgcaaaccaagggccaggagacaacccagagatatactcaaaactcttaggagatttaacctaaagaaacagaggaaacttggaacacaaccctctcttcaggttcatcagaaagaaactcgcgcaaacccttatagggagaataaggtaaatcaaaccataagagaaagagcaaagtccgactgcagtcacaataggagtgatctacgagatcatctgaacttgaaaaaacctgatcttcgtcaacaactcgatccaaagcgaaaggattcactccatatgcgaattgaagagttggagaataagttcagaaggcatcgagtcacgaaacccagaagacaaccgaggcatgatactgttggagaatttgattaagaagcctcagggttaaagacaaaagatgattccaaaaggctgcccaaggataagaaacacaaaaaatatacccctctttatgttgaatataccgagctcaatgaaactcgggagaatatctacttcgcgcatgtacatgaagttatttttagcgagccagaacctatgaaacat

SEQ ID NO: 92243 - DNA, 2222 bp, Cannabis sativa
taaaaccccttagtggccaaattttagcaccaatcccgtctaacccaaagccagtcgaacaatacccagctcgtcaaacccagaacatcaatatcaaacaccaatcgccacccatcttctaatctgactccttacattaataatatcaatctgaagtccaacaataaaaacccagaaataaaaaaaatatatatgataaagaaatggagatatgtagaaagaggattaaagaaatggatggtgaagaagcttatcttgtttccatgctagagaagctcatccaaactctttggtcgacggagcaaacatcggagacaagagagagaacggaggagtcgggattttgggacttagaggttttgagattttctttgtctggcgatgaacccattcgaaggttgagagggtagctgtgatggtaatgtgcacattgtgcagaacgcgtacagtagagagaaaaggggaggagagagagaggcggcagagagatagatagggaagaaattagggttttctttatcacatttatatatttagttaatcatatttttttttattttttttatttttttgctgagataacttttttatttaaataaatatgtataattaataaattattttttttttcaaaacgtattggttatctaatattaacatagatatattttacttttttatttacttattaattaattatacatacttttttttttaaaagaaattaggattgtgatatagtgacacgctaagtgtgtcaggatatatttatccaatcgcacctagcgcgtcactatagatcagtattttttaaattaataaaaattaaaaaaatttagattttactctttagtgactctccatatttttagtaacacacattataagagactaacactgaatatttagagtctaattgtgcatgtcactaaaaataacccccaactctttagtgacacacatatttatgtgtgtcactaaatagtgtcactaaaaggctaaattgtagtagtgcatgtatcgaatatttacatccatgtcgctagggtaagtttttgggaaaacacttggaaagaaatttttctcaattttgtaaaagagtttcaatctccattgttttgtaactaagctcgtgtattgaagattattttattaaaaaagactacaagccaaatattttgttctccctatggattagatcaagtgttttcccaatattttattgatccacgtaattggtgtgttcgattaatttgctaatttagttttatctcatctttgatttgcattagagggtgtgcttattgttgtgttcttgtttgtgtagtttgaatcaccacaaatagagccaaaggaattcgatgttcaagaatagtaagtatcaagatcaagattacatcaaggattagcttgggaaagtttgagattgacaacttcactaggaaaaattatttcaacatgtgtagaattaaggcgttgctggtgcatgaaggcatttcaaaaaccattgtggaagatacttttaaagacaagaaggaaaatatgaagaacaatagagaaaatcaaacaaagtctcattgtgaaactttattaacactactaaaaattagacaattcctatcgattttaaatcattttttaaaaaacagacgctaaaatatgtgagcgcttaaaactgacacaattagttcacaatttttgtcatttatgaggattcattaaaaaaatttgttgattattaatgggcacaaattttaattttaaaaactataaagagaaaattgtcatcggttttaaacaaccgactgaactacagccgaatgtttagaagcatcaactatagtatagtgtagctatatataacccaatcacaaatctaatatttttttcatcttagctctttctctttctccacgttctctcttttttagtaattcctcctttagagccccaacatgtcacacccacccctcctcctctcatctctctccccggtgagccactcaccgacctcctccctcactcctccttccttgcgctcctcagttgtggtaatctctctttctctctcttttgtttgatctctttgtctttttagaatatctctccctctaattttttaatgtattccaagcctggtagtggtacgatggtgggtttttacccttgaagaaggtacttgtgctctctctccttacatattattctctctctctctctct

SEQ ID NO: 92244 - DNA, 861 bp, Cannabis sativa
ggtttttgaactttgggtatcaacaccatgtttgatggttgacatagctcttaagatggtttacacagctcttaagagaatcaagtagtcccaacgattctgtcacatctaaattacaactctaccaaccctcaacaaataattgatcgacaatcatcatctttaagccaatgaggcttgaatctaactttcatttagcatgctcctgactccatgttaccatattcttaagtttagaaattataggacgatggttagaaaaaagaaaattgccatgacaaattcagactgaaggaaaaaacatagaccaagcttcattacacataaattgatctagccattcttggaaattagcaacaccttgtctcttattcacccaagtgaaagtcaggccttcatagcccaaatcatcaaacatacagtcatcaagaatcatttgaaattcattcatagccataatactttgatgtgtatagccattcttctaatgcatagatagaactcattggaatttccccatatatccatcgtaagttaaaaaattgtttgatgtgtcgaagaagtagcaacaaatcttttcgaaggtgagcctttgggtttataaaatcttgtgatcaatccttagaaattttccaaaagcaaggatatgtcccctagaatagcttttaacagtaacacctcaatcatcattccacaataataagagtctaccgctactccccatacaatccacatgaaatctattaccgtactttatttttcttcgagtaccttctgcccagttatggtaaagcttagtctcgtataggaagaccaagcttggggaatacttacaaataatagtctacaatgcattcaatg

SEQ ID NO: 92245 - DNA, 540 bp, Cannabis sativa
gcacgtaacattctcccccacttcaacatgtcgatgccctcatcgacggaccgcaggcaaatcctcctgatctcgactcctaagcttaccctaagcttctcccgaattctaagtctgcacttgtccctctacctctgtagaaccaccctcttagtgatgatctcgcacgcccactcttggacttgatcaaagacgctgtgccactgtcgctattcagatccacccatggagtagtgcctccgaagtagaatacttcgccaacatgaattcctctgagtccatcacaacgtccctcccgtcaaacaagtagcccttacaacactgaccatgaagctaccacatcctctgattgtagctcactcgccaatcgtccaatgcatactcctttcgacaaggactaagtatggtgcacccctcgaggtgaagttcgcaaaccaaccgtccccaacggcacctacaaaacacgcttccactgaagccaagtccctctggacaagtccctccggaaacttcacacgccaactctatggcgcaccatcc

SEQ ID NO: 92246 - DNA, 1303 bp, Cannabis sativa
catactttgacagaatagaccctcttctttctagtcatgaaggtagtaagtgaaatccttagccgccctgaaccagtccaagacgaatgttaatacaatacttgcgcctccaatcatggggaaaacctaaaagaaattgaataaaattgtaataattccatcaatattatttgatttaatggggtttgcctaagaaacttgaaagtaacccttgaaaagttttattatcttgtcctgctttaactgtaaaactacgaacaaattcattaattaattaccaaaacataaactcagctattcaaggaagtataattaaggtaaactattaaactgaacatcttatgaagtgaacaattctagctactttcttacaacattccaataacatgtaattggattcaaactatgaagatagatcgagagctaaaaatcgatgggtcaattaaaggaaggaagagtcaattgcaacccaaattggctcaattatataattgagtttactgatatgaattttttagaagttttaaaattctaatcgctgtattcttaggtaatagagaattcatttcaatgggatctttaggaagcccaaaaacatgggtaacataccttaacaacaatctctttacaagataaattatatgaagaaaaaaatttcaataatcaactctttcatatcactaagtaaataaccaacaacatccttttaatacatatatcctgtttttcaacctcagatggtttaactactatcataaaactgtataacattttaacctttatcacagactaaaattattactttcactaactatagtacttaaaattattagctatcaaattttagccaaaaattgatacctttagggaacgcgtagatctataatgtctctgcaattcaatctctttctattaccattacacatgagctttcattaacaccaaacaataaaagatcattctcaaaaccatgtcaataagtgaaacaaacataattaatatgatgcaagtaaacaaacaataaaaacaccaacaaaagagatagaaaaaaagagggttatgatttaattactcctttatcagttcggctattgcttgcccatgcaattttcggaaagtttccataattactatctcgaataccaccggccttaaaaatggcaatttccagttctttttctatagctacatttcaaaattctaatgcttgtttagcaagaccccaatccaccaatcttaagctgaatgaattatatgactttggtcaatacaaaaaacatatacaaacaccatactttccccc

SEQ ID NO: 92247 - DNA, 990 bp, Cannabis sativa
tattacataatactaatattttataatagtttagattttaaaaaaattatttttaataattaagaaaattaaaagaaattataattttaatactaattaagtgatttaaaaataaatttagttttttattaaaaaaattcatttagatataaaaaaatatataaaaatttaatttttaaatttaaatttcaccagaactagtttgagtctatttttttctccaaagatttagatttattcaagtaaacataacatttttttagtttaattctaactctttttttttttttttcaaaatatttttatatttttattgaagttttaataatttttctttattttttaagatatgagtttataaatataaataaatttgattttttcttcaaaaatcgtattttgtttaaattatttattgtacttttaataattttagtttgattttttaatatatatgtttataaataaaataaagtttaaaaatatttttttagcaataatgtagttttttaagaaaatttaatattttttttattaattcattatttttatcagatttcttaataatttttattaatttttttttagaattaatagaatattataatttttattttttattttaatgaaattggtaaaattttgtattggtcaaagctcaaaggtaaaaatactaattttgaacggtaaaaaaaactaacctaacagaagggcataaaactgtacatttagggtgcaagattaggtagtatcaaaaatttaggagacaaaaatgttaattttaatgtacaatgtgttttgtgaatgaacgaaacattgattaaaagcttggggttaacatcgtgattatcactagggctgtacataaattttcgtaaatcgcccaacccgaacaacccacccaaactaaaccgagataacccaaaaaaaaaatgcaaaccaaaaaacccgacgaaaatataactctcccaatctttatattgggcgggt

SEQ ID NO: 92248 - DNA, 1013 bp, Cannabis sativa
gacgttcgcttgacctagtgaaggttgacgacttagaataagaggtggataagttgctaaccaatggcctcatgtgggacgtatattacccgaagtggctagccaattcggtgttggtacccaaacccaacggaacatggcaagtctacgtagactttgctgaccttaataaggcctgcttaaaggattgcttccatttgccacgaattgatcaaatagtggacgccaccgcaggttttaagttgttgtctttcatggattcctactccgggtacaacgaaattaaaatgcatgtcgcagattaggaatgtactagcttcaggaccgacaagggggtacactgctacctggtcatgcctttcggattaaaacacatcggagcaacctatcaatgcatggttaaccggatgtttaaaggcctcctaggaagaaacatggaggtatacgtagacaacatgctagttaagtccaaaacatgaatgggccatgcagacgatctcacggagtgctttgaagtagtccagagatatgggatgaagcttactcccaaaaaattgaccttcggcgtcaaatcggggaaatttctggtatttatcgtgagtcaacacataatagaggcaaacactgaaagaatacaggtcttgttgaacatgccttccctaaaaaaacaagcatgtacagagcttgactgggaaagttaccgccctaagtcgattcatttcccgatcgactaacaagtgcattcatttcttcaatatttttttaaaagtttttgatcaaacctttcagacgagaaagggatcaaaccatcacaactttttgattgaaaacctgtctgacgagaaagaaaaatccaaagttataaatgagatataactcataactcgcgtgtgaagctgaatattaacggctcccacagtaaaggaaagtattaaatgagacatcaatgtgtcttgataaatgtacttaaacctagtatatgaatagacgatctaactattcatataagcaat

SEQ ID NO: 92249 - DNA, 663 bp, Cannabis sativa
aaacatttacaaataatatcaataattacaaggtatataatcattaaaaaaaattaaaactaacaaatttcacctaaataaagtattaccatatatataattaatttgcaatatttaaataatatacaataattaattgcaataaatatagcttatcagttatcatgtcttgtctaactttcataaggataagatatatatatttttgtatttataagagaaataaggtaagattccagccaaaaaaggtagaaaaatacagaaaatataaagtgagctatatgttaggtttcagtagctacttatatatatatatagagtacaatacaatactattactaactatcatgatattgttttttctacgtagtaaaatacaaattaaaacttgcaggtgtgtcaaacttaaacattcgtacaattaatcattttcttgttttaaattttggattcattacattgaaataccaaaaaaaaaaaatcaaataaatatataattttagagagactatatcatgtagtaaagtaagccaaataaattaaaatatatatgtatatttttgtaattataaaaatatttaaattttgaataaattatttgggatatttgatggtgctcaaattagagttcaaataaattattattcatgtatataaaaaaaa

SEQ ID NO: 92250 - DNA, 626 bp, Cannabis sativa
taagtacatcccattatatatggattgcatatattcttgatagtgatatctatatatgtgtgtgtacagatacaatttacaaatggaaaatggactacgatcattgaagatcgcataaaatatatataatgtatacatatatatatatatatatatgatttaaaaaaacaattaaaacacttcaaccgattacgttatgaatgatgatcatggaaccgcgctctctttgaatttttttactggtttgaagcagagaccaaaataaaaaccaatgtgttctcatacacgcatagcaaatgactggaacaaaaatatcgtatatgtaataactacaatatctaaatatatttatatatcaaaacttttgtttaaaaatttttacatcggacgccgccatgtttcatattcttagaaagagcaaaaatttaaattggaatcgacacccgttgaaaatatgagctgatttgattctccttataatatcttataataacttcacattattcaaaaatataaaaataattgttaacataaatctcctatcaagcttagagaatgaatatgcataggttgcagagctggataaagtaagaggactcactgcaactcattatgtcaataagaga

SEQ ID NO: 92251 - DNA, 549 bp, Cannabis sativa
acctgggacaaattctcaggtccagaaaccagcaagcaaacttcgaatttttagcaagaaatctcaacctaatcactccaaattctcaaccaaactttcaaattaacaattaggattacaagcacataatagatgcttaattaacatattacatgcatcaaaatcccagaattcagattgctcaaaaagactcaatatcatgcttaagattaacaaaacctaagctcatactcaagaactataaagccaagctcttcaaatcaattccagcaacaagcactaaatttaacacctgaaattccaacctagaatcaccatatactctcagcccaagttcaacaacaagcatacaacaaatcaaactcaaattcaacccaagttagcaccaattcacctaacatgcaacccatcatcgtcatcaccaagttcatgcttcccaaacataataattcaggatcttagattaaaacaagattaaaaatcatagaaagctaccttaatccacaataaaacaagagcaatggtctttcctgttggaaattattttac

SEQ ID NO: 92252 - DNA, 722 bp, Cannabis sativa
atgcacttggttattcaatcatttgatggaactttttcttgtttcatcaccctagtctatacttttaattatagactaggaaggaaatcattgtggaaggaattgcaagggtattacacaactgagaaatggatgctaatgggtgattttaatgacatattggcaaaggaggaaagaattggaaataaagttaaatatcaagctgacagagatttcattgagtgcattgaggcttgtaatctagaggatgtgaaatatactggttgcttttttacatggagcaacaaacaacaaggtggggatcgaatttggtccaaaatagacagagtattagctaatcaagcatggcttgatgcttttcctactgtcgaagtgttttttgctactgagagcacttttgaccactccctagccttactccacattcatccggaatgccaaacagggaaaaagccttttaggtacttttggatgtggagatcacacaaagattttgaacaaagagtcaacgaagtctggactcgacagcactatggaacaaaaatgtattagctggtgtgtaaattgaagagtctaaagcaggtattcaaggagataaacaaggaaggctacttgcaatctacttgctgaaacaatcaaagccagagaaaagttggagacatgccagaaagcccttcattcaaatccattaaacactcagttgcagtaagaggagctcaatg

SEQ ID NO: 92253 - DNA, 715 bp, Cannabis sativa
aagcaagaaagtagatgacggacaacatttagctctattgcaagctggaatttggatgggaactccgttctagaatgaattacaataggaaggtgcagctagccttcaagattcctaaaaaagagcccaaaagtatatcaacatggaagaagcctaaatcacaaccttcgcggggtactatcctaccaaaggccttgggtatgcttccgaagtgcaattcccaggcatcatgcttcctgtcgctccccaaacaagtggcatgcctagtgtgcaatttcaagtaacacttgggtactcaccaaattctgtcatggcaccagcccaaactgattatgggctaccagcaagtggtcccactctcggggcatgcacgcaatatcttgttcaatccgattcatttgcagtgagtgcagctacagctcctgaagcttctcagagtaaacagtcatctaaaggaagcacctgaagtgaaagtaataagcctaaaaggtctgagtataacccccaatatactcaatatattgatctggtggatacgcaagaacgcatatatttagccacaagacaaaatgtttattaccgaaggccaccacctttaaactgagacagctcatgaagggactcccgtaaaaaatctgagtaccatattgatattgggcatacaaccaatgaatgcaagaacttaaaaaatgagattgagaacatgatatggcta

SEQ ID NO: 92254 - DNA, 979 bp, Cannabis sativa
tctaggagtattcttcagagagtaggtctattacgaagaatttctcttctcgatcattttattgaaggacatggtaactctttgtgggtagacttgctgcttttagttggcttggtctcttcttctttcccttttatcaagggatcctgctagcaagatgtggtttcctgctagactagaagtgtaaggctatggccgtccaagttgtggaggtgatggccagataggtggatagttctatggtcggccagtctgctgtggtcatggttggctagccttctaaaggctaagttgatgttgcagtttgatcccttttacactcagttggctttacccctggcatgattgtcgtatagcctttgtgcacccttgccaatagctattcaacttttttcttagtactgattcttagaggtggtgttgggataccacatctgtgcgttatgctgtgcaggattggacaccctatagccatcccctaatccttggtttctagcaaggtttttatttggagatattctattgtaagtgtatccattttggttttccagtaagtctatttcttttaaaatatagcagcttagttttttgaagaacttagcatgtaccaagttttgtcgtggtttccatggtgcagctggctagtgaagtgagtgcattgattgttgtgtcatctttagggacttgccttttagtagagcctttgagttgacttaacaagtcttgatattagctcaattaagcatcatcttttgtaatgagctgtaaattcacctagtacatgacctactactagttgagagtcgtggtgtatatctaggtgtttagcacgcgctttgcgtgctagcttgaggccaacattcagagcttcatgttcaacctcgttgttagaagctttgaaatttacttgtgttgccatgtgcagctattgccccccaagtgctctgagggccaagcttgcatcaggcaagtggtcaat

SEQ ID NO: 92255 - DNA, 570 bp, Cannabis sativa
ttaataaaaaaggcatttttcaactaacccccataaaaaatgaagtcggtcaaataaatatgtatattttataaagaataaaaagaaattgacagctaaagtacttgttcttttgatattaaagtatttgccttttaattttgtttttgtgataatattttctttccttaatatatttgtgcattttagtccctcgtcgttaaatactaacaaaaatagttaaaagtattttatttattttttaattattcactagtgtttagtggattttaaaatatatttttcttcatatatatgctctcatattaatgtttaatataaagttttaatatttgagtagtaacaaaatataaacgaaatgtattgtttccaccaagtttacttacaaaagtacagtagttgaaaacatttgagtattatcgctgcaaatttggttactttagacatatcattacaggtcagttttgtgtaagtcagtctacagatatgtgttaggttagttataatcgacttctcatgtcaaaattatagtatagtaaaatctgtatttttatatattataatatggtc

SEQ ID NO: 92256 - DNA, 616 bp, Cannabis sativa
ttgcaggtagccacccaccagccaagattcctgttccagtgcctccatcccgttcaacaaagagcgaggaggtatgttcatataaaagaaaaacatgggatattgtgttaggaaaagactaattctcagattttttttcatctcacagatttaagtggcagatacatgaggtgctttaaacataatttcgctcaatattttgaattattaaagctatgttttatataatcataattcaaagtggagaaataaattcaaaccatttagtttatatgatccattctcatcacttttcttcgccgtctgaaattcacaaatttcccaactcttctgattttcactggatgtcaactattaccatgttacaactggagtcttatggtccaaattaattatttagtttttgtgatatttgctagggatttgcattggtatttgttatccttatgtatcataaattacgagggctgtgttaattctaatcttgtcacttttctaatattaaaaccttgtgtttattgtttcatcgttataatgaattgtcttatcttatatatagattactgctatccctgataacttcagctacaatattaaagcctgacttttatatatg

SEQ ID NO: 92257 - DNA, 526 bp, Cannabis sativa
atgaattagtgatcgcaaaattcttttcatatgtaaacttaatttggagtatttctatagcaccaccatctcatgtgttaatagtattttataatagttattaaattaatttatttgagaattatacttttattttaataacagtatataaatggggctaatatcattagtgttttagaatttttctttaattaattagcaatgaaggaatatgcatgttttattttccaacaaaaaaaaagtgaaggaatgtatttcttgattttatattatgcatgttggactattttcttccacttggttcacaattgattagaaaagctaactaacttttgaacaataaaagcagtttgtataaaccatcatatacatagatatatatattttccctcttgtgggacaatatactttccctcttgtggatagaattgattcctgataaattgtgttatgttataaataatatatagatgtctaatttgtttttattgattatcattaattaaagatgagatttcaataatta

SEQ ID NO: 92258 - DNA, 539 bp, Cannabis sativa
tatggtatagtattttctgcagtatttccaagcccaaacattggaaaggaatagcataactaaattaatcaaacacttggcatacatgaatgaataattataaattagtactcaaacattggaaagtcaaagtttccaaacatagacaactttctataagagaattctttctcttataagaagtttcttaaacaaaaaaaaaaaacaaaagacagttgaaaaggaatctttccttaaagaaaatgagcattaaaggtacaaaatcaatgtaattaaatcaatttaattgcacaagaaaattacacattaaataaaaaatattttgacacctaatttgcaaaaaaaaaaaaaaaatgaaaaaaagactttacaatctctccatttgacactttagataatcgaaatatttttaactaatatgcacctgcaaaataaagttagcaaaatcatacaattaaactcccctgaaaaacacatcattaaactgaaatataatgctaactttaaacaaaatttttaacacaaacacaaacctcaac

SEQ ID NO: 92259 - DNA, 1041 bp, Cannabis sativa
tgttttgatttaaaagagttataattaattttttttgtactaaaatcatattgacttattgattatatatgaaaaaaataaaatatttaaaataaattaattctaataaaataaataattattaaatctctaatttttttcttaaaaaaaattatattttattttagtattaacaaacaaaatcaacttagaatttttcttagatacttgagtttataatttatttacatttgataaaacataatataaaaatactataaattattttatcaaatgcatataaatttatatttaaaaaaataaaaatatatagaaaataaaatattatataaaataagtttttacatatttgtgattataataaactagattataatattatcattatcattataatatattttaataactcacagtactttgaaatttataatttaccaaacactcagctcagttattttctacagttctgttgcagttgttttttctcacagcacaactgtagttgctttttcccatgccaaactggccctaaagaggaaaccacccgaaaaagaagaaggaggacacaagcttcatttgtttgaatttcttttctatttcttctatttttctcctttctttaaatatttgaagtttgttgaattgtaaagaagtaagtagcagccatggatgaacaacttttattttggattttatattctgatttgaacatgagctaaacctcttgaggcttgaatggctatgaatctctatgttttggtatgattaatttttagcatattttagcaactttgtctctgttcattcaagtaaacttgttgtttattggttgttattacttggccatgagtaacaatttactaagctagatctggttggaaagacaagatctagtagttacaacttggatgatgcaagtgaatacctagatttaggtttttcttagtaaatgaaatatgagtatttcaattgccttgcataacttgagaattgatgtttaaatattgttttgcaatctggtttgatataggaatatat

SEQ ID NO: 92260 - DNA, 1064 bp, Cannabis sativa
acaagcagccagtgaccagaaacagtacttgaacctgttgtcctctatgacaatgtctaaaatagtacatggattcttctgttccagcacgtaaaagtaactaggtaactgacaataaggttttgttggcgtacccctcgcatacataagtgccttctgtcggcacctccaagccttcttataactcatcttcatcccatagtcttgaaacatatccttttgtatgtctttagccttgtacttagttccatctgatctgaacttgttcttaataaggtggccaacaacccacggtgttgcttgacggttatcagcatgtctagaatccaggctacatgtgtgtttgttgtggaatatagtcaccttaaacatgtctcaacgttctctcttcctccccctcactctccatttgcaatttgaatccctgcaagttgcgtaaaaaacatctgtcccagacttctttaccatgaacttaaaattcattttcaatgcaaaccttcccactacatttttcaattcagtcttatttgtgtacaacttgctaacgtgtatttcccttgaatgtgtaccagtaaaagaagttgtataaacattatttttctctatgtcttcccttgtccacacaataggtttgaattttgtacaaactttaaaatcagagggtacagtactatgaggaggacctggccggctgctatagtatttggcaattttccctacgaggggttcttctttcttgctctttcctctggtcccttgcaggtggtggaggtagttctaaccttaaagaaagtacctctataaattcatcaacttgtaactccgcatcaccatcctcgttcaaatctaccacaggatcgttgttgtaaaaaggaccatgagactcatcaaactggtcaaatacattgtcaatccgatcctcatctatattagtaggggcctgctcattcaaatctactactggatctgtttctgggacaaaactcccaacaacacttcttcagaggacagttggcggagtaggccccaaaatcgcatgccttttaaccttagtcacaaacagt

SEQ ID NO: 92261 - DNA, 915 bp, Cannabis sativa
tatattagttttagtgtctttatagttatatcaattttttagttacatgaaaaatattgttattattatgttacaaatattattaatgttagtgcataaaaatattgttatacaaaacgattctaaaattttaaaatggaggtgcaaaaaattgtaaagaaattcgcaattttacttacctacaactatgcgtcattttataaccaatacaaaaagctagatagaaaaaaaaaattatgttataattaagacacatgtgaactgttagttttccacgtcatcaccaattgtcctaaccaactaattcagttagcctctaaacaatcacagccaacaactataaataggttaacttgctcacttgtttgagataggacttggtttaataatttcgttatttgcttagagagtttgagaaactgaaaaccagagattgtgagagtgtttatggagggatgataaagggagtgtccattcatgaaatggcttccctcgtgtgaggattttatgtaactgtctctgtattgtaattgattcatcttgctggttttctctctctcccactgattgtaatcaaagctatttcagcaataaagattcttcttcatgttcataatttagtcttatatatgttttcttggtgaaattgatttcatactcaattcaattcagttcattattcttgatcatttgatcctttttttgttctgttattgtgtgtttattgttgtttgagcagtggtcttgcacaacaaaaagataaaaaaaaataattatttttacgtacttgtatgcgccaaattgtaactaacgcaaataacaaatttgcgccaattccagtttgacataaagttttttgcttcacttaaaaactaatacaaaactatttgcgtcagttattaattaattaggcaa

SEQ ID NO: 92262 - DNA, 1188 bp, Cannabis sativa
atttttgcatcaaacaatcaagttatataattttataacaacaaataatagaaaaatgtgaaagtaagaatattggtggagattacataattaagataaattaaaataagagtgagaacgagaagaaaactagaattttttttttatgatttacagatttcaaaaatcatcaaaattatttttaaaaatttcttaactgcataataatcattaaaataataataattattaaacaaagtcaaaaaaattacttaaaaatcatagaaaaaaagaaattaaattctaataatattggaaaaaagaatcatcaaaatcaaagtctgaaaactactgtattctccctcaatctttgataaccacgagtgggcttcgtctcagcagtgccatattcaacctccaacaggtgcgtaaactggtcatacgacctagttccaatttggcaggtcggagagtggtttttttggcaaaaaatgtgtgattttgacagaaaaagaagggattttgatgggaattgaatttgtaagctatccacagtgataaatttgattaaaatgaccaatcaatagagttatttcaagctttcatgggcaaaaattataaaaaaattaagtctgataatacatgaaattaaaccctcacataatacttacaatataataatcacagcatataatacatcaatttctatgatttcaaaaattaaacaagtaatttcattataattttatgagaaaatctaaaattttaaacataaagttccatctcaatactcaaaagaaattaagcatgtaatatatcaagagaaagcttatgaggagagcactaaaaactctaaagtttcaggatcaatatataaaaaatttatcataaaataagaatgaatttattatgtcatttgagaaaattaacttatacatatcaacttttatacacaaattataagtataaatcatatacaatagataatctaatacaatactacatgttagaaaaattaataaaccaagatacaaaatttgtatataatctagagcacaacaataatagataatgattaggtatgcgtacctgattgatccatagtaattacctcagtttgatagattaatgctatcaactaagtcttccttcttagatctttaaattagaaacaattttatttacatgattatcaaaaggtatacaatt

SEQ ID NO: 92263 - DNA, 791 bp, Cannabis sativa
taattactttgttgtgtatatatattattacaaatttcaaacacgtgtatttaatgatcataatattcatgagaaaatcatgtttcacgttttcattaattgttggttgagtcttttgactaaatttggacaaacatggaattaaaaagggaaaacgtttgcacattttgtaattgaaggcttggccaacccacatacacatatttaaatataatcacttaatttctattataaataaaagtatataaagtagagatgcacattttactcatgaaattgactttgtagagacccacccttaatagggtagagatttttcgtctaaatgaggaacgaagatgacacttcttgctttgacgggaacccgtttagtatttcattttaaaaaaatttacataattaaccaaaaacttaaaaaaatttacaaaaatacatcaatacggaaaaattttcatttttactctttgagtttttttatttacaaaaatacctcttcagtgaaaataatgtattgtttttttgttgttttatagtttattaatagttgtattataattgtcatgagatttttttgtttgttttataattgatttatagttgtcgtggaattgatttataattgtcgtgggattgattttacgttattttttattttatactttttgctgaacaaaatatatttttgtaattttaaaactttacaagaatatttttataattcaaaaatttaagctgtaaaattataaaaaaaatataaaaaaagatacttttgaaaattctccttcatttta

SEQ ID NO: 92264 - DNA, 940 bp, Cannabis sativa
atattgatagtaagtatgagaagccttagaagtttatgaagattgttcaaggaaagaacaagagtctggtgattgggagctgatttctataacatgttgaatgttattatttatttaattgttcgttttttcaatgctagatgttaggacttggttattcatgttatagttctattgttgttttttctttttatttatgaactggatatcagattgttatcgattttcgagacaatatataattttgagttataatgcatatgtttttgtgcgacttttttgtttatgctgatatatataaaatatttgattcaactgtaagacaatgtttattcaacatgtcttattgttatatctatgaaagtagtcagagaaatcacttgaatttttttaatcaatgtgttatttgtaacacctactatacaactatcattcaacgctttggcaactattgaataaccaacatgctttttaacgtaataagaaaagtttttttaaacttctaattaatgtttcaaatatggtgttgctaatgctttacatttctgataatatgttggatctgagattcaactacaaaacaactattatgcaacttttttaaaaccaataatgtattaaaagtaataacaatgtattaaattgatattttctacctgtaaaagttcacaaaaaaaattaaataaatcaaattaatattctctcaatatatagctaattgcttagttatgacatgtcttctagttgtgacttttttggctacatttgttgcacctatttatttattttttttccatgcacctgaaaatcatcttttccttggtcttccggatcacacaaaatggatatcttgtgaagtcgtgttctttcaattttagttgtatgtacaagaattgttagacctctgttaaccaactttatatcaactaatttagtatat
